(19) United States
(12) Patent Application Publication
(10) Pub. No.: US 2026/0218149 A1
(43) Pub. Date: Jul. 30, 2026

(54) CLASS II, TYPE V CRISPR SYSTEMS

(71) Applicant: Metagenomi Therapeutics, Inc., Emeryville, CA (US)

(72) Inventors: Brian C. Thomas, Berkeley, CA (US); Lisa Alexander, Albany, CA (US); Alan Brooks, Clayton, CA (US); Christopher Brown, Albany, CA (US); Cristina Noel Butterfield, Oakland, CA (US); Cindy Castelle, San Francisco, CA (US); Audra Devoto, King City, CA (US); Daniela S.A. Goltsman, Oakland, CA (US); Paula B. Matheus Carnevali, Pinole, CA (US); Isabel Nocedal, Oakland, CA (US); Morayma Temoche-Diaz, Emeryville, CA (US)

(21) Appl. No.: 19/099,615

(22) PCT Filed: Jul. 28, 2023
(86) PCT No.: PCT/US2023/071286

§ 371 Date: Jan. 29, 2025

Related U.S. Application Data
(60) Provisional application No. 63/369,920, filed on Jul. 29, 2022.
(60) Provisional application No. 63/386,298, filed on Dec. 6, 2022.
(60) Provisional application No. 63/484,168, filed on Feb. 9, 2023.

(51) Int. Cl. C12N 9/22; C07K 14/705; C07K 14/76; C12N 5/0783; C12N 5/0789; C12N 9/04; C12N 15/113; C12N 15/88

(52) U.S. Cl. CPC C12N 9/226; C07K 14/70596; C07K 14/76; C12N 5/0636; C12N 5/0647; C12N 9/0006; C12N 15/1138; C12N 15/88; C12Y 101/03015; C12N 2310/20; C12N 2510/00

(57) ABSTRACT

Described herein are methods, compositions, and systems derived from uncultivated microorganisms useful for gene editing.

### CROSS-REFERENCE

[0001] This application is related to PCT Application Nos. PCT/US21/21259 and PCT/US22/31849; and U.S. Provisional Application No. 63/369,920, filed on Jul. 29, 2022; each of which is incorporated by reference herein in its entirety.

### BACKGROUND

[0002] Cas enzymes along with their associated Clustered Regularly Interspaced Short Palindromic Repeats (CRISPR) guide ribonucleic acids (RNAs) appear to be a pervasive (~45% of bacteria, ~84% of archaea) component of prokaryotic immune systems, serving to protect such microorganisms against non-self nucleic acids, such as infectious viruses and plasmids by CRISPR-RNA guided nucleic acid cleavage. While the deoxyribonucleic acid (DNA) elements encoding CRISPR RNA elements may be relatively conserved in structure and length, their CRISPR-associated (Cas) proteins are highly diverse, containing a wide variety of nucleic acid-interacting domains. While CRISPR DNA elements have been observed as early as 1987, the programmable endonuclease cleavage ability of CRISPR/Cas complexes has only been recognized relatively recently, leading to the use of recombinant CRISPR/Cas systems in diverse DNA manipulation and gene editing applications.

### SEQUENCE LISTING

[0003] The instant application contains a Sequence Listing which has been submitted electronically in XML format and is hereby incorporated by reference in its entirety. Said XML copy, created on Dec. 1, 2022, is named 55921-755.102_SL.xml and is 14,705,179 bytes in size.

### SUMMARY

[0004] In some aspects, the present disclosure provides for an engineered nuclease system comprising: (a) an endonuclease comprising a sequence having at least about 80%, at least about 81%, at least about 82%, at least about 83%, at least about 84%, at least about 85% at least about 86%, at least about 87%, at least about 88%, at least about 89%, at least about 90%, at least about 91%, at least about 92%, at least about 93%, at least about 94%, at least about 95%, at least about 96%, at least about 97%, at least about 98%, at least about 99%, or 100% sequence identity to any one of SEQ ID NOs: 6274-6281 or 6340-6551, or a variant thereof, wherein said endonuclease is a class 2, type V endonuclease, or a nucleotide sequence encoding said endonuclease; and (b) an engineered guide RNA, wherein said engineered guide RNA is configured to form a complex with said endonuclease and said engineered guide RNA comprises a spacer sequence configured to hybridize to a target nucleic acid sequence. In some embodiments, said endonuclease comprises a sequence having at least about 80%, at least about 81%, at least about 82%, at least about 83%, at least about 84%, at least about 85% at least about 86%, at least about 87%, at least about 88%, at least about 89%, at least about 90%, at least about 91%, at least about 92%, at least about 93%, at least about 94%, at least about 95%, at least about 96%, at least about 97%, at least about 98%, at least about 99%, or 100% sequence identity to any one of SEQ ID NOs: 6274-6281. In some embodiments, said endonuclease is configured to bind to a protospacer adjacent motif (PAM) sequence having at least about 80%, at least about 81%, at least about 82%, at least about 83%, at least about 84%, at least about 85% at least about 86%, at least about 87%, at least about 88%, at least about 89%, at least about 90%, at least about 91%, at least about 92%, at least about 93%, at least about 94%, at least about 95%, at least about 96%, at least about 97%, at least about 98%, at least about 99%, or 100% sequence identity to any one of SEQ ID NOs: 6332-6339. In some aspects, the present disclosure provides for an engineered nuclease system comprising: (a) an endonuclease comprising a PI (PAM interacting) domain having at least about 80%, at least about 81%, at least about 82%, at least about 83%, at least about 84%, at least about 85% at least about 86%, at least about 87%, at least about 88%, at least about 89%, at least about 90%, at least about 91%, at least about 92%, at least about 93%, at least about 94%, at least about 95%, at least about 96%, at least about 97%, at least about 98%, at least about 99%, or 100% sequence identity to a PI domain of any one of SEQ ID NOs: 2811, 2819, 2878, 2916, 2963, 3009, 6274, 6275, 6276, 6279, 6280, or 6281, or a variant thereof, or a nucleotide sequence encoding said endonuclease, wherein said endonuclease is a class 2, type V endonuclease and said endonuclease is configured to be selective for a 5′ PAM of any one of SEQ ID NOs: 6326-6339; and (b) an engineered guide RNA, wherein said engineered guide RNA is configured to form a complex with said endonuclease and said engineered guide RNA comprises a spacer sequence configured to hybridize to a target nucleic acid sequence. In some embodiments, said endonuclease comprises a sequence having at least about 80%, at least about 81%, at least about 82%, at least about 83%, at least about 84%, at least about 85% at least about 86%, at least about 87%, at least about 88%, at least about 89%, at least about 90%, at least about 91%, at least about 92%, at least about 93%, at least about 94%, at least about 95%, at least about 96%, at least about 97%, at least about 98%, at least about 99%, or 100% sequence identity to any one of SEQ ID NOs: 2811, 2819, 2878, 2916, 2963, 3009, 6274, 6275, 6276, 6279, 6280, or 6281, or a variant thereof. In some embodiments, said guide RNA comprises a sequence with at least about 80%, at least about 81%, at least about 82%, at least about 83%, at least about 84%, at least about 85% at least about 86%, at least about 87%, at least about 88%, at least about 89%, at least about 90%, at least about 91%, at least about 92%, at least about 93%, at least about 94%, at least about 95%, at least about 96%, at least about 97%, at least about 98%, at least about 99%, or 100% sequence identity to non-degenerate nucleotides of any one of SEQ ID NOs: 6284-6325. In some embodiments, said guide RNA spacer sequence comprises a sequence complementary to a eukaryotic, fungal, plant, mammalian, or human genomic polynucleotide sequence. In some embodiments, said endonuclease comprises at least one of a S168R, E172R, N577R, or Y170R mutation when a sequence of said endonuclease is optimally aligned to SEQ ID NO: 215. In some embodiments, the engineered nuclease system further comprises a single- or double-stranded DNA repair template comprising from 5′ to 3′: a first homology arm comprising a sequence of at least 20 nucleotides 5′ to said target deoxyribonucleic acid sequence, a synthetic DNA sequence of at least 10 nucleotides, and a second homology arm comprising a sequence of at least 20 nucleotides 3′ to said target sequence. In some embodiments, said first or second homology arm comprises a sequence of at least 40, 80, 120, 150, 200, 300, 500, or 1,000 nucleotides. In some embodiments, said first and second homology arms are homologous to a genomic sequence of a prokaryote, bacteria, fungus, or eukaryote.

[0005] In some aspects, the present disclosure provides for an engineered nuclease system comprising: (a) an endonuclease comprising a RuvC domain, wherein the endonuclease is derived from an uncultivated microorganism, and wherein the endonuclease is a Cas12a endonuclease; and (b) an engineered guide RNA, wherein the engineered guide RNA is configured to form a complex with the endonuclease and the engineered guide RNA comprises a spacer sequence configured to hybridize to a target nucleic acid sequence. In some embodiments, the Cas12a endonuclease comprises the sequence GWxxxK. In some embodiments, the engineered guide RNA comprises UCUAC[N₃₋₅]GUAGAU (N₄). In some embodiments, the engineered guide RNA comprises CCUGC[N₄]GCAGG (N₃₋₄).

[0006] In some aspects, the present disclosure provides for an engineered nuclease system comprising: (a) an endonuclease having at least 75% sequence identity to any one of SEQ ID NOs: 1-3470 or a variant thereof; and (b) an engineered guide RNA, wherein the engineered guide RNA is configured to form a complex with the endonuclease and the engineered guide RNA comprises a spacer sequence configured to hybridize to a target nucleic acid sequence. In some embodiments, the endonuclease comprises a RuvCI, II, or III domain. In some embodiments, the endonuclease has at least about 20%, at least about 25%, at least about 30%, at least about 35%, at least about 40%, at least about 45%, at least about 50%, at least about 55%, at least about 60%, at least about 65%, at least about 70%, at least about 75%, at least about 80%, at least about 85%, at least about 90%, at least about 91%, at least about 92%, at least about 93%, at least about 94%, at least about 95%, at least about 96%, at least about 97%, at least about 98%, at least about 99% identity to a RuvCI, II, or III domain of any one of SEQ ID NOs: 1-3470 or a variant thereof. In some embodiments, the RuvCI domain comprises a D catalytic residue. In some embodiments the RuvCII domain comprises an E catalytic residue. In some embodiments the RuvCIII domain comprises a D catalytic residue. In some embodiments, said RuvC domain does not have nuclease activity. In some embodiments, said endonuclease further comprises a WED II domain having at least about 20%, at least about 25%, at least about 30%, at least about 35%, at least about 40%, at least about 45%, at least about 50%, at least about 55%, at least about 60%, at least about 65%, at least about 70%, at least about 75%, at least about 80%, at least about 85%, at least about 90%, at least about 91%, at least about 92%, at least about 93%, at least about 94%, at least about 95%, at least about 96%, at least about 97%, at least about 98%, at least about 99% identity to a WED II domain of any one of SEQ ID NOs: 1-3470 or a variant thereof.

[0007] In some aspects, the present disclosure provides for an engineered nuclease system comprising: (a) an endonuclease configured to bind to a protospacer adjacent motif (PAM) sequence comprising any one of SEQ ID NOs: 3862-3913, wherein the endonuclease is a class 2, type V Cas endonuclease; and (b) an engineered guide RNA, wherein the engineered guide RNA is configured to form a complex with the endonuclease and the engineered guide RNA comprises a spacer sequence configured to hybridize to a target nucleic acid sequence. In some embodiments, the endonuclease further comprises a zinc finger-like domain. In some embodiments, the guide RNA comprises a sequence with at least 80% sequence identity to the non-degenerate nucleotides of any one of SEQ ID NOs: 3471, 3551-3559, 3608-3609, 3612, 3636-3637, 3640-3641, 3644-3645, 3648-3649, 3652-3653, 3656-3657, 3660-3661, 3664-3667, 3671-3672, -3678, 3695-3696, 3729-3730, 3734-3735, and 3851-3857.

[0008] In some aspects, the present disclosure provides for an engineered nuclease system comprising: (a) an engineered guide RNA comprising a sequence with at least 80% sequence identity to the non-degenerate nucleotides of any one of SEQ ID NOs: 3471, 3539, 3551-3559, 3608-3609, 3612, 3636-3637, 3640-3641, 3644-3645, 3648-3649, 3652-3653, 3656-3657, 3660-3661, 3664-3667, 3671-3672, 3677-3678, 3695-3696, 3729-3730, 3734-3735, or 3851-3857, and (b) a class 2, type V Cas endonuclease configured to bind to the engineered guide RNA. In some embodiments, the endonuclease is configured to bind to a protospacer adjacent motif (PAM) sequence comprising any one of SEQ ID NOs: 3863-3913. In some embodiments, the guide RNA comprises a sequence complementary to a eukaryotic, fungal, plant, mammalian, or human genomic polynucleotide sequence. In some embodiments, the guide RNA is 30-250 nucleotides in length. In some embodiments, the endonuclease comprises one or more nuclear localization sequences (NLSs) proximal to an N- or C-terminus of the endonuclease. In some embodiments, the NLS comprises a sequence at least 80% identical to a sequence from the group consisting of SEQ ID NO: 3938-3953. In some embodiments, the endonuclease comprises at least one of the following mutations: S168R, E172R, N577R, or Y170R when a sequence of the endonuclease is optimally aligned to SEQ ID NO: 215. In some embodiments, the endonuclease comprises the mutations S168R and E172R when a sequence of the endonuclease is optimally aligned to SEQ ID NO: 215. In some embodiments, the endonuclease comprises the mutations N577R or Y170R when a sequence of the endonuclease is optimally aligned to SEQ ID NO: 215. In some embodiments, the endonuclease comprises the mutation S168R when a sequence of the endonuclease is optimally aligned to SEQ ID NO: 215. In some embodiments, the endonuclease does not comprise a mutation of E172, N577, or Y170. In some embodiments, the engineered nuclease system further comprises a single- or double-stranded DNA repair template comprising from 5′ to 3′: a first homology arm comprising a sequence of at least 20 nucleotides 5′ to the target deoxyribonucleic acid sequence, a synthetic DNA sequence of at least 10 nucleotides, and a second homology arm comprising a sequence of at least 20 nucleotides 3′ to the target sequence. In some embodiments, the first or second homology arm comprises a sequence of at least 40, 80, 120, 150, 200, 300, 500, or 1,000 nucleotides. In some embodiments, the first and second homology arms are homologous to a genomic sequence of a prokaryote, bacteria, fungus, or eukaryote. In some embodiments, the single- or double-stranded DNA repair template comprises a transgene donor. In some embodiments, the engineered nuclease system further comprises a DNA repair template comprising a double-stranded DNA segment flanked by one or two single-stranded DNA segments. In some embodiments, single-stranded DNA segments are conjugated to the 5′ ends of the double-stranded DNA segment. In some embodiments, the single stranded DNA segments are conjugated to the 3′ ends of the double-stranded DNA segment. In some embodiments, the single-stranded DNA segments have a length from 4 to 10 nucleotide bases. In some embodiments, the single-stranded DNA segments have a nucleotide sequence complementary to a sequence within the spacer sequence. In some embodiments, the double-stranded DNA sequence comprises a barcode, an open reading frame, an enhancer, a promoter, a protein-coding sequence, a miRNA coding sequence, an RNA coding sequence, or a transgene. In some embodiments, the double-stranded DNA sequence is flanked by a nuclease cut site. In some embodiments, the nuclease cut site comprises a spacer and a PAM sequence. In some embodiments, the system further comprises a source of Mg²⁺. In some embodiments, the guide RNA comprises a hairpin comprising at least 8, at least 10, or at least 12 base-paired ribonucleotides. In some embodiments, the hairpin comprises 10 base-paired ribonucleotides. In some embodiments: (a) the endonuclease comprises a sequence at least 75%, 80%, or 90% identical to any one of SEQ ID NOs: 141, 215, 229, 261, or 1711-1721 or a variant thereof, and (b) the guide RNA structure comprises a sequence at least 80%, or 90% identical to the non-degenerate nucleotides of any one of SEQ ID NOs: 3608-3609, 3853, or 3851-3857. In some embodiments, the endonuclease is configured to bind to a PAM comprising any one of SEQ ID NOs: 3863-3913. In some embodiments, the endonuclease is configured to bind to a PAM comprising SEQ ID NO: 3871. In some embodiments, the sequence identity is determined by a BLASTP, CLUSTALW, MUSCLE, MAFFT algorithm, or a CLUSTALW algorithm with the Smith-Waterman homology search algorithm parameters. In some embodiments, the sequence identity is determined by the BLASTP homology search algorithm using parameters of a wordlength (W) of 3, an expectation (E) of 10, and a BLOSUM62 scoring matrix setting gap costs at existence of 11, extension of 1, and using a conditional compositional score matrix adjustment.

[0009] In some aspects, the present disclosure provides for an engineered guide RNA comprising: (a) a DNA-targeting segment comprising a nucleotide sequence that is complementary to a target sequence in a target DNA molecule; and (b) a protein-binding segment comprising two complementary stretches of nucleotides that hybridize to form a double-stranded RNA (dsRNA) duplex, wherein the two complementary stretches of nucleotides are covalently linked to one another with intervening nucleotides, and wherein the engineered guide ribonucleic acid polynucleotide is capable of forming a complex with an endonuclease having at least 75% sequence identity to any one of SEQ ID NOs: 1-3470, and targeting the complex to the target sequence of the target DNA molecule. In some embodiments, the DNA-targeting segment is positioned 3′ of both of the two complementary stretches of nucleotides. In some embodiments, the protein binding segment comprises a sequence having at least 70%, at least 80%, or at least 90% identity to the non-degenerate nucleotides of SEQ ID NO: 3608-3609. In some embodiments, the double-stranded RNA (dsRNA) duplex comprises at least 5, at least 8, at least 10, or at least 12 ribonucleotides.

[0010] In some aspects, the present disclosure provides for a deoxyribonucleic acid polynucleotide encoding the engineered guide ribonucleic acid polynucleotide described herein.

[0011] In some aspects, the present disclosure provides for a nucleic acid comprising an engineered nucleic acid sequence optimized for expression in an organism, wherein the nucleic acid encodes a class 2, type V Cas endonuclease, and wherein the endonuclease is derived from an uncultivated microorganism, wherein the organism is not the uncultivated organism. In some embodiments, the endonuclease comprises a variant having at least 70% or at least 80% sequence identity to any one of SEQ ID NOs: 1-3470. In some embodiments, the endonuclease comprises a sequence encoding one or more nuclear localization sequences (NLSs) proximal to an N- or C-terminus of the endonuclease. In some embodiments, the NLS comprises a sequence selected from SEQ ID NOs: 3938-3953. In some embodiments, the NLS comprises SEQ ID NO: 3939. In some embodiments, the NLS is proximal to the N-terminus of the endonuclease. In some embodiments, the NLS comprises SEQ ID NO: 3938. In some embodiments, the NLS is proximal to the C-terminus of the endonuclease. In some embodiments, the organism is prokaryotic, bacterial, eukaryotic, fungal, plant, mammalian, rodent, or human.

[0012] In some aspects, the present disclosure provides for an engineered vector comprising a nucleic acid sequence encoding a class 2, type V Cas endonuclease or a Cas12a endonuclease, wherein the endonuclease is derived from an uncultivated microorganism.

[0013] In some aspects, the present disclosure provides for an engineered vector comprising a nucleic acid described herein.

[0014] In some aspects, the present disclosure provides for an engineered vector comprising a deoxyribonucleic acid polynucleotide described herein. In some embodiments, the vector is a plasmid, a minicircle, a CELiD, an adeno-associated virus (AAV) derived virion, a lentivirus, or an adenovirus.

[0015] In some aspects, the present disclosure provides for a cell comprising a vector described herein.

[0016] In some aspects, the present disclosure provides for a method of manufacturing an endonuclease, comprising cultivating any of the host cells described herein.

[0017] In some aspects, the present disclosure provides for a method for binding, cleaving, marking, or modifying a double-stranded deoxyribonucleic acid polynucleotide, comprising: (a) contacting the double-stranded deoxyribonuclcic acid polynucleotide with a class 2, type V Cas endonuclcasc in complex with an engineered guide RNA configured to bind to the endonuclease and the double-stranded deoxyribonucleic acid polynucleotide; (b) wherein the double-stranded deoxyribonucleic acid polynucleotide comprises a protospacer adjacent motif (PAM); and (c) wherein the PAM comprises a sequence comprising any one of SEQ ID NOs: 3863-3913. In some embodiments, the double-stranded deoxyribonucleic acid polynucleotide comprises a first strand comprising a sequence complementary to a sequence of the engineered guide RNA and a second strand comprising the PAM. In some embodiments, the PAM is directly adjacent to the 5′ end of the sequence complementary to the sequence of the engineered guide RNA. In some embodiments, the PAM comprises SEQ ID NO: 3871. In some embodiments, the class 2, type V Cas endonuclease is derived from an uncultivated microorganism. In some embodiments, the double-stranded deoxyribonucleic acid polynucleotide is a eukaryotic, plant, fungal, mammalian, rodent, or human double-stranded deoxyribonucleic acid polynucleotide. In some embodiments, the method comprising delivering to the target nucleic acid locus the engineered nuclease system described herein, wherein the endonuclease is configured to form a complex with the engineered guide ribonucleic acid structure, and wherein the complex is configured such that upon binding of the complex to the target nucleic acid locus, the complex modifies the target nucleic acid locus. In some embodiments, modifying the target nucleic acid locus comprises binding, nicking, cleaving, or marking the target nucleic acid locus. In some embodiments, the target nucleic acid locus comprises deoxyribonucleic acid (DNA) or ribonucleic acid (RNA). In some embodiments, the target nucleic acid comprises genomic DNA, viral DNA, viral RNA, or bacterial DNA. In some embodiments, the target nucleic acid locus is in vitro. In some embodiments, the target nucleic acid locus is within a cell. In some embodiments, the cell is a prokaryotic cell, a bacterial cell, a eukaryotic cell, a fungal cell, a plant cell, an animal cell, a mammalian cell, a rodent cell, a primate cell, a human cell, or a primary cell. In some embodiments, the cell is a primary cell. In some embodiments, the primary cell is a T cell. In some embodiments, the primary cell is a hematopoietic stem cell (HSC). In some embodiments, delivering the engineered nuclease system to the target nucleic acid locus comprises delivering the nucleic acid described herein or the vector described herein. In some embodiments, delivering the engineered nuclease system to the target nucleic acid locus comprises delivering a nucleic acid comprising an open reading frame encoding the endonuclease. In some embodiments, the nucleic acid comprises a promoter to which the open reading frame encoding the endonuclease is operably linked. In some embodiments, delivering the engineered nuclease system to the target nucleic acid locus comprises delivering a capped mRNA containing the open reading frame encoding the endonuclease. In some embodiments, delivering the engineered nuclease system to the target nucleic acid locus comprises delivering a translated polypeptide. In some embodiments, delivering the engineered nuclease system to the target nucleic acid locus comprises delivering a deoxyribonucleic acid (DNA) encoding the engineered guide RNA operably linked to a ribonucleic acid (RNA) pol III promoter. In some embodiments, the endonuclease induces a single-stranded break or a double-stranded break at or proximal to the target locus. In some embodiments, the endonuclease induces a staggered single stranded break within or 3′ to the target locus.

[0018] In some aspects, the present disclosure provides for a method of editing a TRAC locus in a cell, comprising contacting to the cell (a) an RNA-guided endonuclease; and (b) an engineered guide RNA, wherein the engineered guide RNA is configured to form a complex with the endonuclease and the engineered guide RNA comprises a spacer sequence configured to hybridize to a region of the TRAC locus, wherein the engineered guide RNA comprises a targeting sequence having at least 85% identity at least 18 consecutive nucleotides of any one of SEQ ID NOs: 4316-4369. In some embodiments, the RNA-guided nuclease is a Cas endonuclease. In some embodiments, the Cas endonuclease is a class 2, type V Cas endonuclease. In some embodiments, the class 2, type V Cas endonuclease comprises a RuvC domain comprising a RuvCI subdomain, a RuvCII subdomain, and a RuvCIII subdomain. In some embodiments, the class 2, type V Cas endonuclease comprises an endonuclease having at least 75% sequence identity to any one of SEQ ID NOs: 1-3470 or a variant thereof. In some embodiments, the engineered guide RNA further comprises a sequence with at least 80% sequence identity to at least 19 of the non-degenerate nucleotides of any one of SEQ ID NOs: 3471, 3539, 3551-3559, 3608-3609, 3612, 3636-3637, 3640-3641, 3644-3645, 3648-3649, 3652-3653, 3656-3657, 3660-3661, 3664-3667, 3671-3672, 3677-3678, 3695-3696, 3729-3730, 3734-3735, and 3851-3857. In some embodiments, the endonuclease comprises a sequence at least 75%, 80%, or 90% identical to any one of SEQ ID NOs: 141, 215, 229, 261, or 1711-1721 or a variant thereof. In some embodiments, the guide RNA structure comprises a sequence at least 80%, or at least 90% identical to at least 19 of the non-degenerate nucleotides of any one of SEQ ID NOs: 3608-3609, 3853, or 3851-3857. In some embodiments, the method further comprises contacting to the cell or introducing to the cell a donor nucleic acid comprising a cargo sequence flanked on a 3′ or 5′ end by sequence having at least 80% identity to any one of SEQ ID NOs: 4424 or 4425. In some embodiments, the cell is a peripheral blood mononuclear cell (PBMC). In some embodiments, the cell is a T-cell or a precursor thereof or a hematopoietic stem cell (HSC). In some embodiments, the cargo sequence comprises a sequence encoding a T-cell receptor polypeptide, a CAR-T polypeptide, or a fragment or derivative thereof. In some embodiments, the engineered guide RNA comprises a sequence having at least 80% identity to any one of SEQ ID NOs: 4370-4423. In some embodiments, the engineered guide RNA comprises the nucleotide sequence of any one of SEQ ID NOs: 4370-4423 comprising the corresponding chemical modifications listed in SEQ ID NOs: 4370-4423. In some embodiments, the engineered guide RNA comprises a targeting sequence having at least 80% sequence identity to any one of SEQ ID NOs: 4334, 4350, or 4324. In some embodiments, the engineered guide RNA comprises a sequence having at least 80% sequence identity to any one of SEQ ID NOs: 4388, 4404, or 4378. In some embodiments, the engineered guide RNA comprises the nucleotide sequence of any one of SEQ ID NOs: 4378, 4388, or 4404.

[0019] In some aspects, the present disclosure provides for an engineered nuclease system comprising: (a) an RNA-guided endonuclease; and (b) an engineered guide RNA, wherein the engineered guide RNA is configured to form a complex with the endonuclease and the engineered guide RNA comprises a spacer sequence configured to hybridize to a target nucleic acid sequence, wherein the engineered guide RNA comprises at least one of the following modifications: (i) a 2′-O methyl or a 2′-fluoro base modification of at least one nucleotide within the first 4 bases of the 5′ end of the engineered guide RNA or the last 4 bases of a 3′ end of the engineered guide RNA; (ii) a thiophosphate (PS) linkage between at least 2 of the first five bases of a 5′ end of the engineered guide RNA, or a thiophosphate linkage between at least two of the last five bases of a 3′ end of the engineered guide RNA; (iii) a thiophosphate linkage within a 3′ stem or a 5′ stem of the engineered guide RNA; (iv) a 2′-O methyl or 2′base modification within a 3′ stem or a 5′ stem of the engineered guide RNA; (v) a 2′-fluoro base modification of at least 7 bases of a spacer region of the engineered guide RNA; and (vi) a thiophosphate linkage within a loop region of the engineered guide RNA. In some embodiments, the engineered guide RNA comprises a 2′-O methyl or a 2′-fluoro base modification of at least one nucleotide within the first 5 bases of a 5′ end of the engineered guide RNA or the last 5 bases of a 3′ end of the engineered guide RNA. In some embodiments, the engineered guide RNA comprises a 2′-O methyl or a 2′-fluoro base modification at a 5′ end of the engineered guide RNA or a 3′ end of the engineered guide RNA. In some embodiments, the engineered guide RNA comprises a thiophosphate (PS) linkage between at least 2 of the first five bases of a 5′ end of the engineered guide RNA, or a thiophosphate linkage between at least two of the last five bases of a 3′ end of the engineered guide RNA. In some embodiments, the engineered guide RNA comprises a thiophosphate linkage within a 3′ stem or a 5′ stem of the engineered guide RNA. In some embodiments, the engineered guide RNA comprises a 2′-O methyl base modification within a 3′ stem or a 5′ stem of the engineered guide RNA. In some embodiments, the engineered guide RNA comprises a 2′-fluoro base modification of at least 7 bases of a spacer region of the engineered guide RNA. In some embodiments, the engineered guide RNA comprises a thiophosphate linkage within a loop region of the engineered guide RNA. In some embodiments, the engineered guide RNA comprises at least three 2′-O methyl or 2′-fluoro bases at the 5′ end of the engineered guide RNA, two thiophosphate linkages between the first 3 bases of the 5′ end of the engineered guide RNA, at least 4 2′-O methyl or 2′-fluoro bases at the 4′ end of the engineered guide RNA, and three thiophosphate linkages between the last three bases of the 3′ end of the engineered guide RNA. In some embodiments, the engineered guide RNA comprises at least two 2′-O-methyl bases and at least two thiophosphate linkages at a 5′ end of the engineered guide RNA and at least one 2′-O-methyl bases and at least one thiophosphate linkage at a 3′ end of the engineered guide RNA. In some embodiments, the engineered guide RNA comprises at least one 2′-O-methyl base in both the 3′ stem or the 5′ stem region of the engineered guide RNA. In some embodiments, the engineered guide RNA comprises at least one to at least fourteen 2′-fluoro bases in the spacer region excluding a seed region of the engineered guide RNA. In some embodiments, the engineered guide RNA comprises at least one 2′-O-methyl base in the 5′ stem region of the engineered guide RNA and at least one to at least fourteen 2′-fluoro bases in the spacer region excluding a seed region of the guide RNA. In some embodiments, the guide RNA comprises a spacer sequence targeting a VEGF-A gene. In some embodiments, the guide RNA comprises a spacer sequence having at least 80% identity to SEQ ID NO: 3985. In some embodiments, the guide RNA comprises the nucleotides of any one of SEQ ID NOs: 3985-3991 comprising the chemical modifications listed in SEQ ID NOs: 3985-3991. In some embodiments, the RNA-guided nuclease is a Cas endonuclease. In some embodiments, the Cas endonuclease is a class 2, type V Cas endonuclease In some embodiments, the class 2, type V Cas endonuclease comprises a RuvC domain comprising a RuvCI subdomain, a RuvCII subdomain, and a RuvCIII subdomain. In some embodiments, the class 2, type V Cas endonuclease comprises an endonuclease having at least 75% sequence identity to any one of SEQ ID NOs: 1-3470 or a variant thereof. In some embodiments, the class 2, type V Cas endonuclease comprises an endonuclease having at least 75% sequence identity to any one of SEQ ID NOs: 141, 215, 229, 261, or 1711-1721 or a variant thereof. In some embodiments, the engineered guide RNA comprises a sequence with at least 80% sequence identity to the non-degenerate nucleotides of any one of SEQ ID NOs: 3471, 3539, 3551-3559, 3608-3609, 3612, 3636-3637, 3640-3641, 3644-3645, 3648-3649, 3652-3653, 3656-3657, 3660-3661, 3664-3667, 3671-3672, 3677-3678, 3695-3696, 3729-3730, 3734-3735, and 3851-3857. In some embodiments, the engineered guide RNA comprises a sequence with at least 80% sequence identity to the non-degenerate nucleotides of any one of SEQ ID NOs: 3608-3609, 3853, or 3851-3857.

[0020] In some aspects, the present disclosure provides for a host cell comprising an open reading frame encoding a heterologous endonuclease having at least 75% sequence identity to any one of SEQ ID NOs: 1-3470 or a variant thereof. In some embodiments, the endonuclease has at least 75% sequence identity to any one of SEQ ID NOs: 141, 215, 229, 261, or 1711-1721, or a variant thereof. In some embodiments, the host cell is an E. coli cell or a mammalian cell. In some embodiments, the host cell is an E. coli cell, wherein the E. coli cell is a ADE3 lysogen or the E. coli cell is a BL21 (DE3) strain. In some embodiments, the E. coli cell has an ompT lon genotype. In some embodiments, the open reading frame is operably linked to a T7 promoter sequence, a T7-lac promoter sequence, a lac promoter sequence, a tac promoter sequence, a tre promoter sequence, a ParaBAD promoter sequence, a PrhaBAD promoter sequence, a T5 promoter sequence, a cspA promoter sequence, an araP_{BAD} promoter, a strong leftward promoter from phage lambda (pL promoter), or any combination thereof. In some embodiments, the open reading frame comprises a sequence encoding an affinity tag linked in-frame to a sequence encoding the endonuclease. In some embodiments, the affinity tag is an immobilized metal affinity chromatography (IMAC) tag. In some embodiments, the IMAC tag is a polyhistidine tag. In some embodiments, the affinity tag is a myc tag, a human influenza hemagglutinin (HA) tag, a maltose binding protein (MBP) tag, a glutathione S-transferase (GST) tag, a streptavidin tag, a FLAG tag, or any combination thereof. In some embodiments, the affinity tag is linked in-frame to the sequence encoding the endonuclease via a linker sequence encoding a protease cleavage site. In some embodiments, the protease cleavage site is a tobacco etch virus (TEV) protease cleavage site, a PreScission® protease cleavage site, a Thrombin cleavage site, a Factor Xa cleavage site, an enterokinase cleavage site, or any combination thereof. In some embodiments, the open reading frame is codon-optimized for expression in the host cell. In some embodiments, the open reading frame is provided on a vector. In some embodiments, the open reading frame is integrated into a genome of the host cell.

[0021] In some aspects, the present disclosure provides for a culture comprising any of the host cells described herein in compatible liquid medium.

[0022] In some aspects, the present disclosure provides for a method of producing an endonuclease, comprising cultivating any of the host cells described herein in compatible growth medium. In some embodiments, the method further comprises inducing expression of the endonuclease. In some embodiments, the inducing expression of the nuclease is by addition of an additional chemical agent or an increased amount of a nutrient, or by temperature increase or decrease. In some embodiments, an additional chemical agent or an increased amount of a nutrient comprises Isopropyl β-D-1-thiogalactopyranoside (IPTG) or additional amounts of lactose. In some embodiments, the method further comprises isolating the host cell after the cultivation and lysing the host cell to produce a protein extract. In some embodiments, the method further comprises isolating the endonuclease. In some embodiments, the isolating comprises subjecting the protein extract to IMAC, ion-exchange chromatography, anion exchange chromatography, or cation exchange chromatography. In some embodiments, the open reading frame comprises a sequence encoding an affinity tag linked in-frame to a sequence encoding the endonuclease. In some embodiments, the affinity tag is linked in-frame to the sequence encoding the endonuclease via a linker sequence encoding protease cleavage site. In some embodiments, the protease cleavage site comprises a tobacco etch virus (TEV) protease cleavage site, a PreScission® protease cleavage site, a Thrombin cleavage site, a Factor Xa cleavage site, an enterokinase cleavage site, or any combination thereof. In some embodiments, the method further comprises cleaving the affinity tag by contacting a protease corresponding to the protease cleavage site to the endonuclease. In some embodiments, the affinity tag is an IMAC affinity tag. In some embodiments, the method further comprises performing subtractive IMAC affinity chromatography to remove the affinity tag from a composition comprising the endonuclease.

[0023] In some aspects, the present disclosure provides for a system comprising (a) a class 2, Type V-A Cas endonuclease configured to bind a 3- or 4-nucleotide PAM sequence, wherein the endonuclease has increased cleavage activity relative to sMbCas12a; and (b) an engineered guide RNA, wherein the engineered guide RNA is configured to form a complex with the class 2, Type V-A Cas endonuclease and the engineered guide RNA comprises a spacer sequence configured to hybridize to a target nucleic acid comprising a target nucleic acid sequence. In some embodiments, the cleavage activity is measured in vitro by introducing the endonucleases alongside compatible guide RNAs to cells comprising the target nucleic acid and detecting cleavage of the target nucleic acid sequence in the cells. In some embodiments, the class 2, Type V-A Cas endonuclease comprises a sequence having at least 75% identity to any one of 215-225 or a variant thereof. In some embodiments, the engineered guide RNA comprises a sequence having at least 80% identity to the non-degenerate nucleotides of SEQ ID NO: 3609. In some embodiments, the target nucleic acid further comprises a YYN PAM sequence proximal to the target nucleic acid sequence. In some embodiments, the class 2, Type V-A Cas endonuclease has at least about 5%, 10%, 20%, 30%, 40%, 50%, 60%, 70%, 80%, 90%, 100%, or 200%, or more increased activity relative to sMbCas12a.

[0024] In some aspects, the present disclosure provides for a system comprising: (a) a class 2, Type V-A′ Cas endonuclease; and (b) an engineered guide RNA, wherein the engineered guide RNA comprises a sequence having at least 80% identity to about 19 to about 25 or about 19 to about 31 consecutive nucleotides of a natural effector repeat sequence of a class 2, Type V Cas endonuclease. In some embodiments, the natural effector repeat sequence is any one of SEQ ID NOs: 3560-3572. In some embodiments, the class 2, Type V-A′ Cas endonuclease has at least 75% identity to SEQ ID NO: 126.

[0025] In some aspects, the present disclosure provides for a system comprising: (a) a class 2, Type V-L endonuclease, and (b) an engineered guide RNA, wherein the engineered guide RNA comprises a sequence having at least 80% identity to about 19 to about 25 or about 19 to about 31 consecutive nucleotides of a natural effector repeat sequence of a class 2, Type V Cas endonuclease. In some embodiments, the class 2, Type V-L endonuclease has at least 75% sequence identity to any one of SEQ ID NOs: 793-1163.

[0026] In some aspects, the present disclosure provides for a method of disrupting the VEGF-A locus in a cell, comprising introducing to the cell: (a) a class 2, type V Cas endonuclease; and (b) an engineered guide RNA, wherein the engineered guide RNA is configured to form a complex with the endonuclease and the engineered guide RNA comprises a spacer sequence configured to hybridize to a region of the VEGF-A locus, wherein the engineered guide RNA comprises a targeting sequence having at least 80% identity to SEQ ID NO: 3985; or wherein the engineered guide RNA comprises the nucleotide sequence of any one of SEQ ID NOs: 3985-3991 comprising the chemical modifications listed in SEQ ID NOs: 3985-3991. In some embodiments, the class 2, type V Cas endonuclease comprises an endonuclease having at least 75% sequence identity to any one of SEQ ID NOs: 1-3470 or a variant thereof. In some embodiments, the class 2, type V Cas endonuclease comprises an endonuclease having at least 75% sequence identity to any one of SEQ ID NOs: 141, 215, 229, 261, or 1711-1721 or a variant thereof. In some embodiments, the engineered guide RNA comprises a sequence with at least 80% sequence identity to the non-degenerate nucleotides of any one of SEQ ID NOs: 3471, 3539, 3551-3559, 3608-3609, 3612, 3636-3637, 3640-3641, 3644-3645, 3648-3649, 3652-3653, 3656-3657, 3660-3661, 3664-3667, 3671-3672, 3677-3678, 3695-3696, 3729-3730, 3734-3735, and 3851-3857. In some embodiments, the engineered guide RNA comprises a sequence with at least 80% sequence identity to the non-degenerate nucleotides of any one of SEQ ID NOs: 3608-3609, 3853, or 3851-3857.

[0027] In some aspects, the present disclosure provides for a method of disrupting a locus in a cell, comprising contacting to the cell a composition comprising: (a) a class 2, type V Cas endonuclease having at least 75% identity to any one of SEQ ID NOs: 215-225 or a variant thereof; and (b) an engineered guide RNA, wherein the engineered guide RNA is configured to form a complex with the endonuclease and the engineered guide RNA comprises a spacer sequence configured to hybridize to a region of the locus, wherein the class 2, type V Cas endonuclease has at least equivalent cleavage activity to spCas9 in the cell. In some embodiments, the cleavage activity is measured in vitro by introducing the endonucleases alongside compatible guide RNAs to cells comprising the target nucleic acid and detecting cleavage of the target nucleic acid sequence in the cells. In some embodiments, the composition comprises 20 pmoles or less of the class 2, type V Cas endonuclease. In some embodiments, the composition comprises 1 μmol or less of the class 2, type V Cas endonuclease.

[0028] In some aspects, the present disclosure provides for a method of disrupting a CD38 locus in a cell, comprising introducing to the cell: (a) a class 2, type V Cas endonuclease; and (b) an engineered guide RNA, wherein the engineered guide RNA is configured to form a complex with the endonuclease and the engineered guide RNA comprises a spacer sequence configured to hybridize to a region of the CD38 locus, wherein the engineered guide RNA is configured to hybridize to a sequence having at least 20-22 consecutive nucleotides having at least about 80%, at least about 85%, at least about 90%, at least about 91%, at least about 92%, at least about 93%, at least about 94%, at least about 95%, at least about 96%, at least about 97%, at least about 98%, or at least about 99% sequence identity to any one of SEQ ID NOs: 4466-4503 and 5686; or wherein the engineered guide RNA comprises a nucleotide sequence having at least about 80%, at least about 85%, at least about 90%, at least about 91%, at least about 92%, at least about 93%, at least about 94%, at least about 95%, at least about 96%, at least about 97%, at least about 98%, or at least about 99% sequence identity to any one of SEQ ID NOs: 4428-4465 and 5685. In some embodiments, the class 2, type V Cas endonuclease comprises an endonuclease having at least 75% sequence identity to any one of SEQ ID NOs: 1-3470 or a variant thereof. In some embodiments, the class 2, type V Cas endonuclease comprises an endonuclease having at least 75% sequence identity to any one of SEQ ID NOs: 141, 215, 229, 261, or 1711-1722 or a variant thereof. In some embodiments, the engineered guide RNA comprises a sequence with at least about 80%, at least about 85%, at least about 90%, at least about 91%, at least about 92%, at least about 93%, at least about 94%, at least about 95%, at least about 96%, at least about 97%, at least about 98%, or at least about 99% sequence identity to the non-degenerate nucleotides of any one of SEQ ID NOs: 3471, 3539, 3551-3559, 3608-3609, 3612, 3636-3637, 3640-3641, 3644-3645, 3648-3649, 3652-3653, 3656-3657, 3660-3661, 3664-3667, 3671-3672, 3678, 3695-3696, 3729-3730, 3734-3735, 3851-3857, and 6033-6036. In some embodiments, the guide RNA comprises a sequence with at least 80% sequence identity to the non-degenerate nucleotides of SEQ ID NO: 3609. In some embodiments, the engineered guide RNA is configured to hybridize to a sequence having at least 20-22 consecutive nucleotides having at least 80% identity to any one of SEQ ID NOs: 4466, 4467, 4468, 4479, 4484, 4490, 4492, 4493, 4495, 4498. In some embodiments, the engineered guide RNA comprises a nucleotide sequence having at least 80% identity to any one of SEQ ID NOs: 4428, 4429, 4430, 4436, 4441, 4446, 4452, 4454, 4455, 4460, or 4461. In some embodiments, the cell is a eukaryotic cell, T-cell, hematopoietic stem cell, or precursor thereof.

[0029] In some aspects, the present disclosure provides for a method of disrupting a TIGIT locus in a cell, comprising introducing to the cell: (a) a class 2, type V Cas endonuclease; and (b) an engineered guide RNA, wherein the engineered guide RNA is configured to form a complex with the endonuclease and the engineered guide RNA comprises a spacer sequence configured to hybridize to a region of the TIGIT locus, wherein the engineered guide RNA is configured to hybridize to a sequence having at least 20-22 consecutive nucleotides having at least about 80%, at least about 85%, at least about 90%, at least about 91%, at least about 92%, at least about 93%, at least about 94%, at least about 95%, at least about 96%, at least about 97%, at least about 98%, or at least about 99% sequence identity to any one of SEQ ID NOs: 4521-4537; or wherein the engineered guide RNA comprises a nucleotide sequence having at least about 80%, at least about 85%, at least about 90%, at least about 91%, at least about 92%, at least about 93%, at least about 94%, at least about 95%, at least about 96%, at least about 97%, at least about 98%, or at least about 99% sequence identity to any one of SEQ ID NOs: 4504-4520. In some embodiments, the class 2, type V Cas endonuclease comprises an endonuclease having at least 75% sequence identity to any one of SEQ ID NOs: 1-3470 or a variant thereof. In some embodiments, the class 2, type V Cas endonuclease comprises an endonuclease having at least 75% sequence identity to any one of SEQ ID NOs: 141, 215, 229, 261, or 1711-1722 or a variant thereof. In some embodiments, the engineered guide RNA comprises a sequence with at least about 80%, at least about 85%, at least about 90%, at least about 91%, at least about 92%, at least about 93%, at least about 94%, at least about 95%, at least about 96%, at least about 97%, at least about 98%, or at least about 99% sequence identity to the non-degenerate nucleotides of any one of SEQ ID NOs: 3471, 3539, 3551-3559, 3608-3609, 3612, 3636-3637, 3640-3641, 3644-3645, 3648-3649, 3652-3653, 3656-3657, 3660-3661, 3664-3667, 3671-3672, 3678, 3695-3696, 3729-3730, 3734-3735, 3851-3857, and 6033-6036. In some embodiments, the guide RNA comprises a sequence with at least 80% sequence identity to the non-degenerate nucleotides of SEQ ID NO: 3609. In some embodiments, the engineered guide RNA is configured to hybridize to a sequence having at least 20-22 consecutive nucleotides having at least 80% identity to any one of SEQ ID NOs: 4521, 4527, 4528, 4535, or 4536. In some embodiments, the engineered guide RNA comprises a nucleotide sequence having at least 80% identity to any one of SEQ ID NOs: 4504, 4510, 4511, 4518, or 4519. In some embodiments, the cell is a eukaryotic cell, T-cell, hematopoietic stem cell, or precursor thereof.

[0030] In some aspects, the present disclosure provides for a method of disrupting an AAVS1 locus in a cell, comprising introducing to the cell: (a) a class 2, type V Cas endonuclease; and (b) an engineered guide RNA, wherein the engineered guide RNA is configured to form a complex with the endonuclease and the engineered guide RNA comprises a spacer sequence configured to hybridize to a region of the AAVS1 locus, wherein the engineered guide RNA is configured to hybridize to a sequence having at least 20-22 consecutive nucleotides complementary to a sequence having at least about 80%, at least about 85%, at least about 90%, at least about 91%, at least about 92%, at least about 93%, at least about 94%, at least about 95%, at least about 96%, at least about 97%, at least about 98%, or at least about 99% sequence identity to any one of SEQ ID NOs: 4569-4599; or wherein the engineered guide RNA comprises a nucleotide sequence having at least about 80%, at least about 85%, at least about 90%, at least about 91%, at least about 92%, at least about 93%, at least about 94%, at least about 95%, at least about 96%, at least about 97%, at least about 98%, or at least about 99% sequence identity to any one of SEQ ID NOs: 4538-4568. In some embodiments, the class 2, type V Cas endonuclease comprises an endonuclease having at least 75% sequence identity to any one of SEQ ID NOs: 1-3470 or a variant thereof. In some embodiments, the class 2, type V Cas endonuclease comprises an endonuclease having at least 75% sequence identity to any one of SEQ ID NOs: 141, 215, 229, 261, or 1711-1722 or a variant thereof. In some embodiments, the engineered guide RNA comprises a sequence with at least about 80%, at least about 85%, at least about 90%, at least about 91%, at least about 92%, at least about 93%, at least about 94%, at least about 95%, at least about 96%, at least about 97%, at least about 98%, or at least about 99% sequence identity to the non-degenerate nucleotides of any one of SEQ ID NOs: 3471, 3539, 3551-3559, 3608-3609, 3612, 3636-3637, 3640-3641, 3644-3645, 3648-3649, 3652-3653, 3656-3657, 3660-3661, 3664-3667, 3671-3672, 3678, 3695-3696, 3729-3730, 3734-3735, 3851-3857, 6033-6036. In some embodiments, the guide RNA comprises a sequence with at least 80% sequence identity to the non-degenerate nucleotides of SEQ ID NO: 3609. In some embodiments, the engineered guide RNA is configured to hybridize to a sequence having at least 20-22 consecutive nucleotides having at least 80% identity to any one of SEQ ID NOs: 4574, 4577, 4578, 4579, 4582, 4584, 4585, 4586, 4587, 4589, 4590, 4591, 4592, 4593, 4595, 4596, or 4598. In some embodiments, the engineered guide RNA comprises a nucleotide sequence having at least 80% identity to any one of SEQ ID NOs: 4543, 4546, 4547, 4548, 4551, 4553, 4554, 4555, 4556, 4558, 4559, 4560, 4561, 4562, 4565, or 4567. In some embodiments, the cell is a eukaryotic cell, T-cell, hematopoietic stem cell, hepatocyte, or precursor thereof.

[0031] In some aspects, the present disclosure provides for a method of disrupting a B2M locus in a cell, comprising introducing to the cell: (a) a class 2, type V Cas endonuclease; and (b) an engineered guide RNA, wherein the engineered guide RNA is configured to form a complex with the endonuclease and the engineered guide RNA comprises a spacer sequence configured to hybridize to a region of the B2M locus, wherein the engineered guide RNA is configured to hybridize to a sequence having at least 20-22 consecutive nucleotides complementary to a sequence having at least about 80%, at least about 85%, at least about 90%, at least about 91%, at least about 92%, at least about 93%, at least about 94%, at least about 95%, at least about 96%, at least about 97%, at least about 98%, or at least about 99% sequence identity to any one of SEQ ID NOs: 4676-4751; or wherein the engineered guide RNA comprises a nucleotide sequence having at least about 80%, at least about 85%, at least about 90%, at least about 91%, at least about 92%, at least about 93%, at least about 94%, at least about 95%, at least about 96%, at least about 97%, at least about 98%, or at least about 99% sequence identity to any one of SEQ ID NOs: 4600-4675. In some embodiments, the class 2, type V Cas endonuclease comprises an endonuclease having at least 75% sequence identity to any one of SEQ ID NOs: 1-3470 or a variant thereof. In some embodiments, the class 2, type V Cas endonuclease comprises an endonuclease having at least 75% sequence identity to any one of SEQ ID NOs: 141, 215, 229, 261, or 1711-1722 or a variant thereof. In some embodiments, the engineered guide RNA comprises a sequence with at least about 80%, at least about 85%, at least about 90%, at least about 91%, at least about 92%, at least about 93%, at least about 94%, at least about 95%, at least about 96%, at least about 97%, at least about 98%, or at least about 99% sequence identity to the non-degenerate nucleotides of any one of SEQ ID NOs: 3471, 3539, 3551-3559, 3608-3609, 3612, 3636-3637, 3640-3641, 3644-3645, 3648-3649, 3652-3653, 3656-3657, 3660-3661, 3664-3667, 3671-3672, 3678, 3695-3696, 3729-3730, 3734-3735, 3851-3857 and 6033-6036. In some embodiments, the guide RNA comprises a sequence with at least 80% sequence identity to the non-degenerate nucleotides of SEQ ID NO: 3609. In some embodiments, the engineered guide RNA is configured to hybridize to a sequence having at least 20-22 consecutive nucleotides having at least 80% identity to any one of SEQ ID NOs: 4676, 4678-4687, 4690, 4692, 4698-4707, 4720-4723, 4725-4726, 4732-4733, 4736-4737, 4741, or 4750-4751. In some embodiments, the engineered guide RNA comprises a nucleotide sequence having at least 80% identity to any one of SEQ ID NOs: 4600, 4602-4611, 4614, 4616, 4622-4631, 4644-4647, 4649-4650, 4656-4657, 4660-4661, 4665, or 4674-4675. In some embodiments, the cell is a eukaryotic cell, T-cell, hematopoietic stem cell, or precursor thereof.

[0032] In some aspects, the present disclosure provides for a method of disrupting a CD2 locus in a cell, comprising introducing to the cell: (a) a class 2, type V Cas endonuclease; and (b) an engineered guide RNA, wherein the engineered guide RNA is configured to form a complex with the endonuclease and the engineered guide RNA comprises a spacer sequence configured to hybridize to a region of the CD2 locus, wherein the engineered guide RNA is configured to hybridize to a sequence having at least 20-22 consecutive nucleotides complementary to a sequence having at least about 80%, at least about 85%, at least about 90%, at least about 91%, at least about 92%, at least about 93%, at least about 94%, at least about 95%, at least about 96%, at least about 97%, at least about 98%, or at least about 99% sequence identity to any one of SEQ ID NOs: 4837-4921; or wherein the engineered guide RNA comprises a nucleotide sequence having at least about 80%, at least about 85%, at least about 90%, at least about 91%, at least about 92%, at least about 93%, at least about 94%, at least about 95%, at least about 96%, at least about 97%, at least about 98%, or at least about 99% sequence identity to any one of SEQ ID NOs: 4752-4836. In some embodiments, the class 2, type V Cas endonuclease comprises an endonuclease having at least 75% sequence identity to any one of SEQ ID NOs: 1-3470 or a variant thereof. In some embodiments, the class 2, type V Cas endonuclease comprises an endonuclease having at least 75% sequence identity to any one of SEQ ID NOs: 141, 215, 229, 261, or 1711-1722 or a variant thereof. In some embodiments, the engineered guide RNA comprises a sequence with at least about 80%, at least about 85%, at least about 90%, at least about 91%, at least about 92%, at least about 93%, at least about 94%, at least about 95%, at least about 96%, at least about 97%, at least about 98%, or at least about 99% sequence identity to the non-degenerate nucleotides of any one of SEQ ID NOs: 3471, 3539, 3551-3559, 3608-3609, 3612, 3636-3637, 3640-3641, 3644-3645, 3648-3649, 3652-3653, 3656-3657, 3660-3661, 3664-3667, 3671-3672, 3678, 3695-3696, 3729-3730, 3734-3735, 3851-3857, and 6033-6036. In some embodiments, the guide RNA comprises a sequence with at least 80% sequence identity to the non-degenerate nucleotides of SEQ ID NO: 3609. In some embodiments, the engineered guide RNA is configured to hybridize to a sequence having at least 20-22 consecutive nucleotides having at least 80% identity to any one of SEQ ID NOs: 4837, 4844, 4845, 4848, 4857-4858, 4883, 4887, 4892-4893, 4904-4909, 4914, 4916, or 4918. In some embodiments, the engineered guide RNA has at least 80% sequence identity to any one of SEQ ID NOs: 4752-4836 that target any one of SEQ ID NOs: 4837, 4844, 4845, 4848, 4857-4858, 4883, 4887, 4892-4893, 4904-4909, 4914, 4916, or 4918. In some embodiments, the cell is a eukaryotic cell, T-cell, hematopoietic stem cell, or precursor thereof.

[0033] In some aspects, the present disclosure provides for a method of disrupting a CD5 locus in a cell, comprising introducing to the cell: (a) a class 2, type V Cas endonuclease; and (b) an engineered guide RNA, wherein the engineered guide RNA is configured to form a complex with the endonuclease and the engineered guide RNA comprises a spacer sequence configured to hybridize to a region of the CD5 locus, wherein the engineered guide RNA is configured to hybridize to a sequence having at least 20-22 consecutive nucleotides complementary to a sequence having at least about 80%, at least about 85%, at least about 90%, at least about 91%, at least about 92%, at least about 93%, at least about 94%, at least about 95%, at least about 96%, at least about 97%, at least about 98%, or at least about 99% sequence identity to any one of SEQ ID NOs: 4946-4969; or wherein the engineered guide RNA comprises a nucleotide sequence having at least about 80%, at least about 85%, at least about 90%, at least about 91%, at least about 92%, at least about 93%, at least about 94%, at least about 95%, at least about 96%, at least about 97%, at least about 98%, or at least about 99% sequence identity to any one of SEQ ID NOs: 4922-4945. In some embodiments, the class 2, type V Cas endonuclease comprises an endonuclease having at least 75% sequence identity to any one of SEQ ID NOs: 1-3470 or a variant thereof. In some embodiments, the class 2, type V Cas endonuclease comprises an endonuclease having at least 75% sequence identity to any one of SEQ ID NOs: 141, 215, 229, 261, or 1711-1722 or a variant thereof. In some embodiments, the engineered guide RNA comprises a sequence with at least about 80%, at least about 85%, at least about 90%, at least about 91%, at least about 92%, at least about 93%, at least about 94%, at least about 95%, at least about 96%, at least about 97%, at least about 98%, or at least about 99% sequence identity to the non-degenerate nucleotides of any one of SEQ ID NOs: 3471, 3539, 3551-3559, 3608-3609, 3612, 3636-3637, 3640-3641, 3644-3645, 3648-3649, 3652-3653, 3656-3657, 3660-3661, 3664-3667, 3671-3672, 3678, 3695-3696, 3729-3730, 3734-3735, 3851-3857, and 6033-6036. In some embodiments, the guide RNA comprises a sequence with at least 80% sequence identity to the non-degenerate nucleotides of SEQ ID NO: 3609. In some embodiments, the engineered guide RNA is configured to hybridize to a sequence having at least 20-22 consecutive nucleotides having at least 80% identity to any one of SEQ ID NOs: 4946-4947, 4949, 4951, 4957-4960, 4963, 4967, or 4969. In some embodiments, the engineered guide RNA has at least 80% sequence identity to any one of SEQ ID NOs: 4922-4945 that target any one of SEQ ID NOs: 4946-4947, 4949, 4951, 4957-4960, 4963, 4967, or 4969. In some embodiments, the cell is a eukaryotic cell, T-cell, hematopoietic stem cell, or precursor thereof.

[0034] In some aspects, the present disclosure provides for a method of disrupting a mouse TRAC locus in a cell, comprising introducing to the cell: (a) a class 2, type V Cas endonuclease; and (b) an engineered guide RNA, wherein the engineered guide RNA is configured to form a complex with the endonuclease and the engineered guide RNA comprises a spacer sequence configured to hybridize to a region of the mouse TRAC locus, wherein the engineered guide RNA is configured to hybridize to a sequence having at least 20-22 consecutive nucleotides complementary to a sequence having at least about 80%, at least about 85%, at least about 90%, at least about 91%, at least about 92%, at least about 93%, at least about 94%, at least about 95%, at least about 96%, at least about 97%, at least about 98%, or at least about 99% sequence identity to any one of SEQ ID NOs: 5126-5195, 5682, or 5684; or wherein the engineered guide RNA comprises a nucleotide sequence having at least about 80%, at least about 85%, at least about 90%, at least about 91%, at least about 92%, at least about 93%, at least about 94%, at least about 95%, at least about 96%, at least about 97%, at least about 98%, or at least about 99% sequence identity to any one of SEQ ID NOs: 5056-5125, 5681, or 5683. In some embodiments, the class 2, type V Cas endonuclease comprises an endonuclease having at least 75% sequence identity to any one of SEQ ID NOs: 1-3470 or a variant thereof. In some embodiments, the class 2, type V Cas endonuclease comprises an endonuclease having at least 75% sequence identity to any one of SEQ ID NOs: 141, 215, 229, 261, or 1711-1722 or a variant thereof. In some embodiments, the engineered guide RNA comprises a sequence with at least about 80%, at least about 85%, at least about 90%, at least about 91%, at least about 92%, at least about 93%, at least about 94%, at least about 95%, at least about 96%, at least about 97%, at least about 98%, or at least about 99% sequence identity to the non-degenerate nucleotides of any one of SEQ ID NOs: 3471, 3539, 3551-3559, 3608-3609, 3612, 3636-3637, 3640-3641, 3644-3645, 3648-3649, 3652-3653, 3656-3657, 3660-3661, 3664-3667, 3671-3672, 3677-3678, 3695-3696, 3729-3730, 3734-3735, 3851-3857, or 6033-6036. In some embodiments, the guide RNA comprises a sequence with at least 80% sequence identity to the non-degenerate nucleotides of SEQ ID NO: 3609. In some embodiments, the engineered guide RNA is configured to hybridize to a sequence having at least 20-22 consecutive nucleotides having at least 80% identity to any one of SEQ ID NOs: 5126-5130, 5133-5143, 5147-5150, 5172-5173, 5184-5189, or 5192-5194. In some embodiments, the engineered guide RNA has at least 80% sequence identity to any one of SEQ ID NOs: 5056-5125 that target any one of SEQ ID NOs: 5126-5130, 5133-5143, 5147-5150, 5172-5173, 5184-5189, or 5192-5194. In some embodiments, the cell is a eukaryotic cell, T-cell, hematopoietic stem cell, or precursor thereof.

[0035] In some aspects, the present disclosure provides for a method of disrupting a mouse TRBC1 or TRBC2 locus in a cell, comprising introducing to the cell: (a) a class 2, type V Cas endonuclease; and (b) an engineered guide RNA, wherein the engineered guide RNA is configured to form a complex with the endonuclease and the engineered guide RNA comprises a spacer sequence configured to hybridize to a region of the mouse TRBC1 or TRBC2 locus, wherein the engineered guide RNA is configured to hybridize to a sequence having at least 20-22 consecutive nucleotides complementary to a sequence having at least about 80%, at least about 85%, at least about 90%, at least about 91%, at least about 92%, at least about 93%, at least about 94%, at least about 95%, at least about 96%, at least about 97%, at least about 98%, or at least about 99% sequence identity to any one of SEQ ID NOs: 5211-5225 or 5247-5267; or wherein the engineered guide RNA comprises a nucleotide sequence having at least about 80%, at least about 85%, at least about 90%, at least about 91%, at least about 92%, at least about 93%, at least about 94%, at least about 95%, at least about 96%, at least about 97%, at least about 98%, or at least about 99% sequence identity to any one of SEQ ID NOs: 5196-5210 or 5226-5246. In some embodiments, the class 2, type V Cas endonuclease comprises an endonuclease having at least 75% sequence identity to any one of SEQ ID NOs: 1-3470 or a variant thereof. In some embodiments, the class 2, type V Cas endonuclease comprises an endonuclease having at least 75% sequence identity to any one of SEQ ID NOs: 141, 215, 229, 261, or 1711-1722 or a variant thereof. In some embodiments, the engineered guide RNA comprises a sequence with at least about 80%, at least about 85%, at least about 90%, at least about 91%, at least about 92%, at least about 93%, at least about 94%, at least about 95%, at least about 96%, at least about 97%, at least about 98%, or at least about 99% sequence identity to the non-degenerate nucleotides of any one of SEQ ID NOs: 3471, 3539, 3551-3559, 3608-3609, 3612, 3636-3637, 3640-3641, 3644-3645, 3648-3649, 3652-3653, 3656-3657, 3660-3661, 3664-3667, 3671-3672, 3677-3678, 3695-3696, 3729-3730, 3734-3735, 3851-3857, or 6033-6036. In some embodiments, the guide RNA comprises a sequence with at least 80% sequence identity to the non-degenerate nucleotides of SEQ ID NO: 3609. In some embodiments, the engineered guide RNA is configured to hybridize to a sequence having at least 20-22 consecutive nucleotides having at least 80% identity to any one of SEQ ID NOs: 5211, 5213-5215, 5217, 5221, 5223, 5247, 5249-5250, 5252-5253, 5258-5259, or 5264. In some embodiments, the engineered guide RNA has at least 80% sequence identity to any one of SEQ ID NOs: 5196-5210 or 5226-5246 that target any one of SEQ ID NOs: 5211, 5213-5215, 5217, 5221, 5223, 5247, 5249-5250, 5252-5253, 5258-5259, or 5264. In some embodiments, the cell is a eukaryotic cell, T-cell, hematopoietic stem cell, or precursor thereof.

[0036] In some aspects, the present disclosure provides for a method of disrupting a human TRBC1 or TRBC2 locus in a cell, comprising introducing to the cell: (a) a class 2, type V Cas endonuclease; and (b) an engineered guide RNA, wherein the engineered guide RNA is configured to form a complex with the endonuclease and the engineered guide RNA comprises a spacer sequence configured to hybridize to a region of the human TRBC1 or TRBC2 locus, wherein the engineered guide RNA is configured to hybridize to a sequence having at least 20-22 consecutive nucleotides complementary to a sequence having at least about 80%, at least about 85%, at least about 90%, at least about 91%, at least about 92%, at least about 93%, at least about 94%, at least about 95%, at least about 96%, at least about 97%, at least about 98%, or at last about 99% sequence identity to any one of SEQ ID NOs: 5661-5679; or wherein the engineered guide RNA comprises a nucleotide sequence having at least about 80%, at least about 85%, at least about 90%, at least about 91%, at least about 92%, at least about 93%, at least about 94%, at least about 95%, at least about 96%, at least about 97%, at least about 98%, or at least about 99% sequence identity to any one of SEQ ID NOs: 5642-5660. In some embodiments, the class 2, type V Cas endonuclease comprises an endonuclease having at least 75% sequence identity to any one of SEQ ID NOs: 1-3470 or a variant thereof. In some embodiments, the class 2, type V Cas endonuclease comprises an endonuclease having at least 75% sequence identity to any one of SEQ ID NOs: 141, 215, 229, 261, or 1711-1722 or a variant thereof. In some embodiments, the engineered guide RNA comprises a sequence with at least about 80%, at least about 85%, at least about 90%, at least about 91%, at least about 92%, at least about 93%, at least about 94%, at least about 95%, at least about 96%, at least about 97%, at least about 98%, or at least about 99% sequence identity to the non-degenerate nucleotides of any one of SEQ ID NOs: 3471, 3539, 3551-3559, 3608-3609, 3612, 3636-3637, 3640-3641, 3644-3645, 3648-3649, 3652-3653, 3656-3657, 3660-3661, 3664-3667, 3671-3672, 3678, 3695-3696, 3729-3730, 3734-3735, 3851-3857, or 6033-6036. In some embodiments, the guide RNA comprises a sequence with at least 80% sequence identity to the non-degenerate nucleotides of SEQ ID NO: 3609. In some embodiments, the engineered guide RNA is configured to hybridize to a sequence having at least 20-22 consecutive nucleotides having at least 80% identity to any one of SEQ ID NOs: 5661-5663, 5672-5675, or 5678. In some embodiments, the engineered guide RNA has at least 80% sequence identity to any one of SEQ ID NOs: 5642-5660 that target any one of SEQ ID NOs: 5661-5663, 5672-5675, or 5678. In some embodiments, the cell is a eukaryotic cell, T-cell, hematopoietic stem cell, or precursor thereof.

[0037] In some aspects, the present disclosure provides for a method of disrupting an HPRT locus in a cell, comprising introducing to the cell: (a) a class 2, type V Cas endonuclease; and (b) an engineered guide RNA, wherein the engineered guide RNA is configured to form a complex with the endonuclease and the engineered guide RNA comprises a spacer sequence configured to hybridize to a region of the HPRT locus, wherein the engineered guide RNA is configured to hybridize to a sequence having at least 20-22 consecutive nucleotides complementary to a sequence having at least about 80%, at least about 85%, at least about 90%, at least about 91%, at least about 92%, at least about 93%, at least about 94%, at least about 95%, at least about 96%, at least about 97%, at least about 98%, or at least about 99% sequence identity to any one of SEQ ID NOs: 5562-5641; or wherein the engineered guide RNA comprises a nucleotide sequence having at least about 80%, at least about 85%, at least about 90%, at least about 91%, at least about 92%, at least about 93%, at least about 94%, at least about 95%, at least about 96%, at least about 97%, at least about 98%, or at least about 99% sequence identity to any one of SEQ ID NOs: 5482-5561. In some embodiments, the class 2, type V Cas endonuclease comprises an endonuclease having at least 75% sequence identity to any one of SEQ ID NOs: 1-3470 or a variant thereof. In some embodiments, the class 2, type V Cas endonuclease comprises an endonuclease having at least 75% sequence identity to any one of SEQ ID NOs: 141, 215, 229, 261, or 1711-1722 or a variant thereof. In some embodiments, the engineered guide RNA comprises a sequence with at least about 80%, at least about 85%, at least about 90%, at least about 91%, at least about 92%, at least about 93%, at least about 94%, at least about 95%, at least about 96%, at least about 97%, at least about 98%, or at least about 99% sequence identity to the non-degenerate nucleotides of any one of SEQ ID NOs: 3471, 3539, 3551-3559, 3608-3609, 3612, 3636-3637, 3640-3641, 3644-3645, 3648-3649, 3652-3653, 3656-3657, 3660-3661, 3664-3667, 3671-3672, 3678, 3695-3696, 3729-3730, 3734-3735, 3851-3857, or 6033-6036. In some embodiments, the guide RNA comprises a sequence with at least 80% sequence identity to the non-degenerate nucleotides of SEQ ID NO: 3609. In some embodiments, the engineered guide RNA is configured to hybridize to a sequence having at least 20-22 consecutive nucleotides having at least 80% identity to any one of SEQ ID NOs: 5562-5564 or 5568. In some embodiments, the engineered guide RNA has at least 80% sequence identity to any one of SEQ ID NOs: 5482-5561 that target any one of SEQ ID NOs: 5562-5564 or 5568. In some embodiments, the cell is a eukaryotic cell, hepatocyte, T-cell, hematopoietic stem cell, or precursor thereof.

[0038] In some aspects, the present disclosure provides for a method of disrupting an APO-A1 locus in a cell, comprising introducing to the cell: (a) a class 2, type V Cas endonuclease; and (b) an engineered guide RNA, wherein the engineered guide RNA is configured to form a complex with the endonuclease and the engineered guide RNA comprises a spacer sequence configured to hybridize to a region of the APO-A1 locus, wherein the engineered guide RNA is configured to hybridize to a sequence having at least 20-22 consecutive nucleotides complementary to a sequence having at least about 80%, at least about 85%, at least about 90%, at least about 91%, at least about 92%, at least about 93%, at least about 94%, at least about 95%, at least about 96%, at least about 97%, at least about 98%, or at least about 99% sequence identity to any one of SEQ ID NOs: 5861-5874; or wherein the engineered guide RNA comprises a nucleotide sequence having at least about 80%, at least about 85%, at least about 90%, at least about 91%, at least about 92%, at least about 93%, at least about 94%, at least about 95%, at least about 96%, at least about 97%, at least about 98%, or at least about 99% sequence identity to any one of SEQ ID NOs: 5847-5860. In some embodiments, the class 2, type V Cas endonuclease comprises an endonuclease having at least 75% sequence identity to any one of SEQ ID NOs: 1-3470 or a variant thereof. In some embodiments, the class 2, type V Cas endonuclease comprises an endonuclease having at least 75% sequence identity to any one of SEQ ID NOs: 141, 215, 229, 261, or 1711-1722 or a variant thereof. In some embodiments, the engineered guide RNA comprises a sequence with at least about 80%, at least about 85%, at least about 90%, at least about 91%, at least about 92%, at least about 93%, at least about 94%, at least about 95%, at least about 96%, at least about 97%, at least about 98%, or at least about 99% sequence identity to the non-degenerate nucleotides of any one of SEQ ID NOs: 3471, 3539, 3551-3559, 3608-3609, 3612, 3636-3637, 3640-3641, 3644-3645, 3648-3649, 3652-3653, 3656-3657, 3660-3661, 3664-3667, 3671-3672, 3678, 3695-3696, 3729-3730, 3734-3735, 3851-3857, or 6033-6036. In some embodiments, the guide RNA comprises a sequence with at least 80% sequence identity to the non-degenerate nucleotides of SEQ ID NO: 3609. In some embodiments, the engineered guide RNA is configured to hybridize to a sequence having at least 20-22 consecutive nucleotides having at least 80% identity to any one of SEQ ID NOs: 5861-5866 or 5868-5869. In some embodiments, the engineered guide RNA has at least 80% sequence identity to any one of SEQ ID NOs: 5847-5860 that target any one of SEQ ID NOs: 5861-5866 or 5868-5869. In some embodiments, the cell is a eukaryotic cell, hepatocyte, T-cell, hematopoietic stem cell, or precursor thereof.

[0039] In some aspects, the present disclosure provides for a method of disrupting an ANGPTL3 locus in a cell, comprising introducing to the cell: (a) a class 2, type V Cas endonuclease; and (b) an engineered guide RNA, wherein the engineered guide RNA is configured to form a complex with the endonuclease and the engineered guide RNA comprises a spacer sequence configured to hybridize to a region of the ANGPTL3 locus, wherein the engineered guide RNA is configured to hybridize to a sequence having at least 20-22 consecutive nucleotides complementary to a sequence having at least about 80%, at least about 85%, at least about 90%, at least about 91%, at least about 92%, at least about 93%, at least about 94%, at least about 95%, at least about 96%, at least about 97%, at least about 98%, or at least about 99% sequence identity to any one of SEQ ID NOs: 5953-6030; or wherein the engineered guide RNA comprises a nucleotide sequence having at least about 80%, at least about 85%, at least about 90%, at least about 91%, at least about 92%, at least about 93%, at least about 94%, at least about 95%, at least about 96%, at least about 97%, at least about 98%, or at least about 99% sequence identity to any one of SEQ ID NOs: 5875-5952. In some embodiments, the class 2, type V Cas endonuclease comprises an endonuclease having at least 75% sequence identity to any one of SEQ ID NOs: 1-3470 or a variant thereof. In some embodiments, the class 2, type V Cas endonuclease comprises an endonuclease having at least 75% sequence identity to any one of SEQ ID NOs: 141, 215, 229, 261, or 1711-1722 or a variant thereof. In some embodiments, the engineered guide RNA comprises a sequence with at least about 80%, at least about 85%, at least about 90%, at least about 91%, at least about 92%, at least about 93%, at least about 94%, at least about 95%, at least about 96%, at least about 97%, at least about 98%, or at least about 99% sequence identity to the non-degenerate nucleotides of any one of SEQ ID NOs: 3471, 3539, 3551-3559, 3608-3609, 3612, 3636-3637, 3640-3641, 3644-3645, 3648-3649, 3652-3653, 3656-3657, 3660-3661, 3664-3667, 3671-3672, 3678, 3695-3696, 3729-3730, 3734-3735, 3851-3857, or 6033-6036. In some embodiments, the guide RNA comprises a sequence with at least 80% sequence identity to the non-degenerate nucleotides of SEQ ID NO: 3609. In some embodiments, the engineered guide RNA is configured to hybridize to a sequence having at least 20-22 consecutive nucleotides having at least 80% identity to any one of SEQ ID NOs: 5955-5963, 5968-5975, 5979-5987, 5989-5993, 5997, 5999, 6003-6010, 6014-6016, 6024-6025, or 6027-6030. In some embodiments, the engineered guide RNA has at least 80% sequence identity to any one of SEQ ID NOs: 5875-5952 that target any one of SEQ ID NOs: 5955-5963, 5968-5975, 5979-5987, 5989-5993, 5997, 5999, 6003-6010, 6014-6016, 6024-6025, or 6027-6030. In some embodiments, the cell is a eukaryotic cell, hepatocyte, T-cell, hematopoietic stem cell, or precursor thereof.

[0040] In some aspects, the present disclosure provides for a method of disrupting a human Rosa26 locus in a cell, comprising introducing to the cell: (a) a class 2, type V Cas endonuclease; and (b) an engineered guide RNA, wherein the engineered guide RNA is configured to form a complex with the endonuclease and the engineered guide RNA comprises a spacer sequence configured to hybridize to a region of the human Rosa26 locus, wherein the engineered guide RNA is configured to hybridize to a sequence having at least 20-22 consecutive nucleotides complementary to a sequence having at least about 80%, at least about 85%, at least about 90%, at least about 91%, at least about 92%, at least about 93%, at least about 94%, at least about 95%, at least about 96%, at least about 97%, at least about 98%, or at least about 99% sequence identity to any one of SEQ ID NOs: 5013-5055; or wherein the engineered guide RNA comprises a nucleotide sequence having at least about 80%, at least about 85%, at least about 90%, at least about 91%, at least about 92%, at least about 93%, at least about 94%, at least about 95%, at least about 96%, at least about 97%, at least about 98%, or at least about 99% sequence identity to any one of SEQ ID NOs: 4970-5012. In some embodiments, the class 2, type V Cas endonuclease comprises an endonuclease having at least 75% sequence identity to any one of SEQ ID NOs: 1-3470 or a variant thereof. In some embodiments, the class 2, type V Cas endonuclease comprises an endonuclease having at least 75% sequence identity to any one of SEQ ID NOs: 141, 215, 229, 261, or 1711-1722 or a variant thereof. In some embodiments, the engineered guide RNA comprises a sequence with at least about 80%, at least about 85%, at least about 90%, at least about 91%, at least about 92%, at least about 93%, at least about 94%, at least about 95%, at least about 96%, at least about 97%, at least about 98%, or at least about 99% sequence identity to the non-degenerate nucleotides of any one of SEQ ID NOs: 3471, 3539, 3551-3559, 3608-3609, 3612, 3636-3637, 3640-3641, 3644-3645, 3648-3649, 3652-3653, 3656-3657, 3660-3661, 3664-3667, 3671-3672, 3678, 3695-3696, 3729-3730, 3734-3735, 3851-3857, or 6033-6036. In some embodiments, the guide RNA comprises a sequence with at least 80% sequence identity to the non-degenerate nucleotides of SEQ ID NO: 3609. In some embodiments, the cell is a eukaryotic cell, hepatocyte, T-cell, hematopoietic stem cell, or precursor thereof.

[0041] In some aspects, the present disclosure provides for a method of disrupting a FAS locus in a cell, comprising introducing to the cell: (a) a class 2, type V Cas endonuclease; and (b) an engineered guide RNA, wherein the engineered guide RNA is configured to form a complex with the endonuclease and the engineered guide RNA comprises a spacer sequence configured to hybridize to a region of the FAS locus, wherein the engineered guide RNA is configured to hybridize to a sequence having at least 20-22 consecutive nucleotides complementary to a sequence having at least about 80%, at least about 85%, at least about 90%, at least about 91%, at least about 92%, at least about 93%, at least about 94%, at least about 95%, at least about 96%, at least about 97%, at least about 98%, or at least about 99% sequence identity to any one of SEQ ID NOs: 5367-5465; or wherein the engineered guide RNA comprises a nucleotide sequence having at least about 80%, at least about 85%, at least about 90%, at least about 91%, at least about 92%, at least about 93%, at least about 94%, at least about 95%, at least about 96%, at least about 97%, at least about 98%, or at least about 99% sequence identity to any one of SEQ ID NOs: 5268-5366. In some embodiments, the class 2, type V Cas endonuclease comprises an endonuclease having at least 75% sequence identity to any one of SEQ ID NOs: 1-3470 or a variant thereof. In some embodiments, the class 2, type V Cas endonuclease comprises an endonuclease having at least 75% sequence identity to any one of SEQ ID NOs: 141, 215, 229, 261, or 1711-1722 or a variant thereof. In some embodiments, the engineered guide RNA comprises a sequence with at least about 80%, at least about 85%, at least about 90%, at least about 91%, at least about 92%, at least about 93%, at least about 94%, at least about 95%, at least about 96%, at least about 97%, at least about 98%, or at least about 99% sequence identity to the non-degenerate nucleotides of any one of SEQ ID NOs: 3471, 3539, 3551-3559, 3608-3609, 3612, 3636-3637, 3640-3641, 3644-3645, 3648-3649, 3652-3653, 3656-3657, 3660-3661, 3664-3667, 3671-3672, 3678, 3695-3696, 3729-3730, 3734-3735, 3851-3857, or 6033-6036. In some embodiments, the guide RNA comprises a sequence with at least 80% sequence identity to the non-degenerate nucleotides of SEQ ID NO: 3609. In some embodiments, the cell is a eukaryotic cell, hepatocyte, T-cell, hematopoietic stem cell, or precursor thereof.

[0042] In some aspects, the present disclosure provides for a method of disrupting a PD-1 locus in a cell, comprising introducing to the cell: (a) a class 2, type V Cas endonuclease; and (b) an engineered guide RNA, wherein the engineered guide RNA is configured to form a complex with the endonuclease and the engineered guide RNA comprises a spacer sequence configured to hybridize to a region of the PD-1 locus, wherein the engineered guide RNA is configured to hybridize to a sequence having at least 20-22 consecutive nucleotides complementary to a sequence having at least about 80%, at least about 85%, at least about 90%, at least about 91%, at least about 92%, at least about 93%, at least about 94%, at least about 95%, at least about 96%, at least about 97%, at least about 98%, or at least about 99% sequence identity to any one of SEQ ID NOs: 5474-5481; or wherein the engineered guide RNA comprises a nucleotide sequence having at least about 80%, at least about 85%, at least about 90%, at least about 91%, at least about 92%, at least about 93%, at least about 94%, at least about 95%, at least about 96%, at least about 97%, at least about 98%, or at least about 99% sequence identity to any one of SEQ ID NOs: 5466-5473. In some embodiments, the class 2, type V Cas endonuclease comprises an endonuclease having at least 75% sequence identity to any one of SEQ ID NOs: 1-3470 or a variant thereof. In some embodiments, the class 2, type V Cas endonuclease comprises an endonuclease having at least 75% sequence identity to any one of SEQ ID NOs: 141, 215, 229, 261, or 1711-1722 or a variant thereof. In some embodiments, the engineered guide RNA comprises a sequence with at least about 80%, at least about 85%, at least about 90%, at least about 91%, at least about 92%, at least about 93%, at least about 94%, at least about 95%, at least about 96%, at least about 97%, at least about 98%, or at least about 99% sequence identity to the non-degenerate nucleotides of any one of SEQ ID NOs: 3471, 3539, 3551-3559, 3608-3609, 3612, 3636-3637, 3640-3641, 3644-3645, 3648-3649, 3652-3653, 3656-3657, 3660-3661, 3664-3667, 3671-3672, 3678, 3695-3696, 3729-3730, 3734-3735, 3851-3857, or 6033-6036. In some embodiments, the guide RNA comprises a sequence with at least 80% sequence identity to the non-degenerate nucleotides of SEQ ID NO: 3609. In some embodiments, the cell is a eukaryotic cell, hepatocyte, T-cell, hematopoietic stem cell, or precursor thereof.

[0043] In some aspects, the present disclosure provides for an engineered nuclease system comprising: (a) an endonuclease having at least 75% sequence identity to any one of SEQ ID NOs: 215 or a variant thereof, and (b) an engineered guide RNA, wherein the engineered guide RNA is configured to form a complex with the endonuclease and the engineered guide RNA comprises a spacer sequence configured to hybridize to a target nucleic acid sequence, wherein the system has reduced immunogenicity when administered to a human subject compared to an equivalent system comprising a Cas9 enzyme. In some embodiments, the Cas9 enzyme is an SpCas9 enzyme. In some embodiments, the guide RNA comprises a sequence with at least 80% sequence identity to the non-degenerate nucleotides of SEQ ID NO: 3609. In some embodiments, the immunogenicity is antibody immunogenicity.

[0044] In some aspects, the present disclosure provides for a method of disrupting a mouse HAO-1 locus in a cell, comprising introducing to the cell: (a) a class 2, type V Cas endonuclease; and (b) an engineered guide RNA, wherein the engineered guide RNA is configured to form a complex with the endonuclease and the engineered guide RNA comprises a spacer sequence configured to hybridize to a region of the mouse HAO-1 locus, wherein the engineered guide RNA comprises the nucleotides of guide RNAs mH29-1_37, mH29-15_37, mH29-29_37 (SEQ ID NOs: 5779-5781) comprising the nucleotide modifications described in SEQ ID NOs: 5779-5781; or wherein the engineered guide RNA comprises any one of SEQ ID NOs: 4184-4225. In some embodiments, the class 2, type V Cas endonuclease comprises an endonuclease having at least 75% sequence identity to any one of SEQ ID NOs: 1-3470 or a variant thereof. In some embodiments, the class 2, type V Cas endonuclease comprises an endonuclease having at least 75% sequence identity to any one of SEQ ID NOs: 141, 215, 229, 261, or 1711-1722 or a variant thereof. In some embodiments, the engineered guide RNA comprises a sequence with at least about 80%, at least about 85%, at least about 90%, at least about 91%, at least about 92%, at least about 93%, at least about 94%, at least about 95%, at least about 96%, at least about 97%, at least about 98%, or at least about 99% sequence identity to the non-degenerate nucleotides of any one of SEQ ID NOs: 3471, 3539, 3551-3559, 3608-3609, 3612, 3636-3637, 3640-3641, 3644-3645, 3648-3649, 3652-3653, 3656-3657, 3660-3661, 3664-3667, 3671-3672, 3678, 3695-3696, 3729-3730, 3734-3735, 3851-3857, or 6033-6036. In some embodiments, the guide RNA comprises a sequence with at least 80% sequence identity to the non-degenerate nucleotides of SEQ ID NO: 3609. In some embodiments, the cell is a eukaryotic cell, hepatocyte, T-cell, hematopoietic stem cell, or precursor thereof. In some embodiments, the engineered guide RNA comprises the nucleotides of guide RNAs mH29-15_37 or mH29-29_37 (SEQ ID NOs: 5780-5781) comprising the nucleotide modifications described in SEQ ID NOs: 5780-5781. In some embodiments, the method further comprises disrupting expression of glycolate oxidase from the HAO-1 locus.

[0045] In some aspects, the present disclosure provides for a method of disrupting a human TRAC locus in a cell, comprising introducing to the cell: (a) a class 2, type V Cas endonuclease; and (b) an engineered guide RNA, wherein the engineered guide RNA is configured to form a complex with the endonuclease and the engineered guide RNA comprises a spacer sequence configured to hybridize to a region of the human TRAC locus, wherein the engineered guide RNA comprises the nucleotides of MG29-1-TRAC-sgRNA-35 (SEQ ID NOs: 5681 or 5683) comprising the nucleotide modifications described in SEQ ID NOs: 5681 or 5683. In some embodiments, the class 2, type V Cas endonuclease comprises an endonuclease having at least 75% sequence identity to any one of SEQ ID NOs: 1-3470 or a variant thereof. In some embodiments, the class 2, type V Cas endonuclease comprises an endonuclease having at least 75% sequence identity to any one of SEQ ID NOs: 141, 215, 229, 261, or 1711-1722 or a variant thereof. In some embodiments, the engineered guide RNA comprises a sequence with at least about 80%, at least about 85%, at least about 90%, at least about 91%, at least about 92%, at least about 93%, at least about 94%, at least about 95%, at least about 96%, at least about 97%, at least about 98%, or at least about 99% sequence identity to the non-degenerate nucleotides of any one of SEQ ID NOs: 3471, 3539, 3551-3559, 3608-3609, 3612, 3636-3637, 3640-3641, 3644-3645, 3648-3649, 3652-3653, 3656-3657, 3660-3661, 3664-3667, 3671-3672, 3678, 3695-3696, 3729-3730, 3734-3735, 3851-3857, or 6033-6036. In some embodiments, the guide RNA comprises a sequence with at least 80% sequence identity to the non-degenerate nucleotides of SEQ ID NO: 3609. In some embodiments, the cell is a eukaryotic cell, hepatocyte, T-cell, hematopoietic stem cell, or precursor thereof.

[0046] In some aspects, the present disclosure provides for a method of disrupting an albumin locus in a cell, comprising introducing to the cell: (a) a class 2, type V Cas endonuclease; and (b) an engineered guide RNA, wherein the engineered guide RNA is configured to form a complex with the endonuclease and the engineered guide RNA comprises a spacer sequence configured to hybridize to a region of the albumin locus, wherein the engineered guide RNA comprises the nucleotides of mAlb298-37, mAlb2912-37, mAlb2918-37, or mAlb298-34 (SEQ ID NOs: 5756-5759) comprising the nucleotide modifications described in SEQ ID NOs: 5756-5759; or wherein the engineered guide RNA comprises the nucleotides of mAlb29-8-44, mAlb29-8-50, mAlb29-8-50b, mAlb29-8-51b, mAlb29-8-52b, mAlb29-8-53b, or mAlb29-8-54b comprising the nucleotide modifications described in Table 5. In some embodiments, the class 2, type V Cas endonuclease comprises an endonuclease having at least 75% sequence identity to any one of SEQ ID NOs: 1-3470 or a variant thereof. In some embodiments, the class 2, type V Cas endonuclease comprises an endonuclease having at least 75% sequence identity to any one of SEQ ID NOs: 141, 215, 229, 261, or 1711-1722 or a variant thereof. In some embodiments, the engineered guide RNA comprises a sequence with at least about 80%, at least about 85%, at least about 90%, at least about 91%, at least about 92%, at least about 93%, at least about 94%, at least about 95%, at least about 96%, at least about 97%, at least about 98%, or at least about 99% sequence identity to the non-degenerate nucleotides of any one of SEQ ID NOs: 3471, 3539, 3551-3559, 3608-3609, 3612, 3636-3637, 3640-3641, 3644-3645, 3648-3649, 3652-3653, 3656-3657, 3660-3661, 3664-3667, 3671-3672, 3678, 3695-3696, 3729-3730, 3734-3735, 3851-3857, or 6033-6036. In some embodiments, the guide RNA comprises a sequence with at least 80% sequence identity to the non-degenerate nucleotides of SEQ ID NO: 3609. In some embodiments, the cell is a eukaryotic cell, hepatocyte, T-cell, hematopoietic stem cell, or precursor thereof. In some embodiments, the engineered guide RNA comprises the nucleotides of mAlb298-37, mAlb2912-37, mAlb2918-37, or mAlb298-34 (SEQ ID NOs: 5756-5759) comprising the nucleotide modifications described in SEQ ID NOs: 5756-5759.

[0047] In some aspects, the present disclosure provides for an engineered guide RNA comprising: (a) a DNA-targeting segment comprising a nucleotide sequence that is complementary to a target sequence in a target DNA molecule; and (b) a protein-binding segment configured to bind to a class 2, type V Cas endonuclease, and wherein the guide RNA comprises a nucleotide modification pattern depicted in any one of SEQ ID NOs: 5695-5701. In some embodiments, the guide RNA comprises mAlb29-8-44, mAlb29-8-50, mAlb29-8-37, or mAlb29-12-44. In some embodiments, the guide RNA comprises hH29-4_50, hH29-21_50, hH29-23_50, hH29-41_50, hH29-4_50b, hH29-21_50b, hH29-23_50b, or hH29-41_50b, mH29-1-50, mH29-15-50, mH29-29-50, mH29-1-50b, mH29-15-50b, or mH29-29-50b. In some embodiments, the DNA-targeting segment is configured to hybridize to an HAO-1 gene or an albumin gene. In some embodiments, the class 2, type V Cas endonuclease comprises an endonuclease having at least 75% sequence identity to any one of SEQ ID NOs: 141, 215, 229, 261, or 1711-1722 or a variant thereof. In some embodiments, the class 2, type V Cas endonuclease comprises an endonuclease having at least 75% sequence identity to SEQ ID NO: 215.

[0048] In some aspects, the present disclosure provides for an engineered nuclease system comprising: (a) an endonuclease having at least 75% sequence identity to any one of SEQ ID NOS: 1-3470 or a variant thereof, or a nucleotide sequence encoding the endonuclease; and (b) a polynucleotide sequence encoding a CRISPR array, wherein the CRISPR array is configured to be processed by the endonuclease to an engineered guide RNA, wherein the engineered guide RNA is configured to form a complex with the endonuclease and the engineered guide RNA comprises a spacer sequence configured to hybridize to a target nucleic acid sequence, wherein the spacer sequence is configured to hybridize to an albumin gene. In some embodiments, the polynucleotide sequence comprises a sequence having at least about 80%, at least about 85%, at least about 90%, at least about 91%, at least about 92%, at least about 93%, at least about 94%, at least about 95%, at least about 96%, at least about 97%, at least about 98%, or at least about 99% sequence identity to SEQ ID NO: 5712. In some embodiments, the endonuclease comprises an endonuclease having at least 75% sequence identity to any one of SEQ ID NOs: 141, 215, 229, 261, or 1711-1722 or a variant thereof. In some embodiments, the endonuclease comprises an endonuclease having at least 75% sequence identity to SEQ ID NO: 215.

[0049] In some aspects, the present disclosure provides for an engineered nuclease system comprising: (a) an endonuclease having at least 75% sequence identity to SEQ ID NOs: 470 or a variant thereof; and (b) an engineered guide RNA, wherein the engineered guide RNA is configured to form a complex with the endonuclease and the engineered guide RNA comprises a spacer sequence configured to hybridize to a target nucleic acid sequence. In some embodiments, the engineered guide RNA comprises a sequence having at least about 80%, at least about 85%, at least about 90%, at least about 91%, at least about 92%, at least about 93%, at least about 94%, at least about 95%, at least about 96%, at least about 97%, at least about 98%, or at least about 99% sequence identity to SEQ ID NO: 6031. In some embodiments, the endonuclease is configured to be selective for a 5′ PAM sequence comprising SEQ ID NO: 6032.

[0050] In some aspects, the present disclosure provides for an engineered nuclease system comprising: (a) an endonuclease having at least at least about 80%, at least about 85%, at least about 86%, at least about 87%, at least about 88%, at least about 89%, at least about 90%, at least about 91%, at least about 92%, at least about 93%, at least about 94%, at least about 95%, at least about 96%, at least about 97%, at least about 98%, or at least about 99% sequence identity to any one of SEQ ID NOs: 2824, 2841, or 2896, or a variant thereof; and (b) an engineered guide RNA, wherein the engineered guide RNA is configured to form a complex with the endonuclease and the engineered guide RNA comprises a spacer sequence configured to hybridize to a target nucleic acid sequence, wherein the engineered guide RNA comprises a sequence having at least about 80%, at least about 85%, at least about 90%, at least about 91%, at least about 92%, at least about 93%, at least about 94%, at least about 95%, at least about 96%, at least about 97%, at least about 98%, or at least about 99% sequence identity to any one of SEQ ID NOs: 6033, 6034, or 6035. In some embodiments, the endonuclease has at least 80% sequence identity to SEQ ID NO: 2824 and the engineered guide RNA has at least 80% sequence identity to SEQ ID NO: 6033. In some embodiments, the endonuclease has at least 80% sequence identity to SEQ ID NO: 2841 and the engineered guide RNA has at least 80% sequence identity to SEQ ID NO: 6034. In some embodiments, the endonuclease has at least 80% sequence identity to SEQ ID NO: 2896 and the engineered guide RNA has at least 80% sequence identity to SEQ ID NO: 6035. In some embodiments, the endonuclease is configured to be selective for a 5′ PAM sequence comprising any one of SEQ ID NOs: 6037-6039.

[0051] In some aspects, the present disclosure provides for a lipid nanoparticle comprising: (a) any of the endonucleases described herein; (b) any of the engineered guide RNAs described herein: (c) a cationic lipid; (d) a sterol; (e) a neutral lipid; and (f) a PEG-modified lipid. In some embodiments, the cationic lipid comprises C12-200, the sterol comprises cholesterol, the neutral lipid comprises DOPE, or the PEG-modified lipid comprises DMG-PEG2000.

[0052] Additional aspects and advantages of the present disclosure will become readily apparent to those skilled in this art from the following detailed description, wherein only illustrative embodiments of the present disclosure are shown and described. As will be realized, the present disclosure is capable of other and different embodiments, and its several details are capable of modifications in various obvious respects, all without departing from the disclosure. Accordingly, the drawings and description are to be regarded as illustrative in nature, and not as restrictive.

### INCORPORATION BY REFERENCE

[0053] All publications, patents, and patent applications mentioned in this specification are herein incorporated by reference to the same extent as if each individual publication, patent, or patent application was specifically and individually indicated to be incorporated by reference.

### BRIEF DESCRIPTION OF THE DRAWINGS

[0054] The novel features of the invention are set forth with particularity in the appended claims. A better understanding of the features and advantages of the present invention will be obtained by reference to the following detailed description that sets forth illustrative embodiments, in which the principles of the invention are utilized, and the accompanying drawings of which:

[0055] FIG. 1 depicts the gene-editing outcomes at the DNA level for human GPR146 in Hep3B cells.

[0056] FIG. 2 depicts the gene-editing outcomes at the DNA level for mouse GPR146 in Hepa1-6 cells.

[0057] FIG. 3 depicts the gene-editing outcomes at the DNA level for human ANGPTL3 in Hep3B cells.

[0058] FIG. 4 depicts the gene-editing outcomes at the DNA level for human GPR146 in primary human hepatocytes.

[0059] FIG. 5 depicts the gene-editing outcomes at the DNA level for mouse GPR146 in primary mouse hepatocytes.

[0060] FIGS. 6A-6C depict predicted folding for single guide RNA (sgRNA) sequences without spacers (Turner, 2004 model). TracrRNA and repeat sequences are looped with a GAAA tetraloop. The repeat anti-repeat fold is on the 3′ end of each structure (right end circle). For FIG. 6A, tracrRNA sequences for these two candidates were obtained from in silico analyses of intergenic regions suggesting they potentially encoded tracrRNAs. For FIGS. 6B and 6C, tracrRNAs were predicted using covariance models built from previously active sgRNAs. The sgRNA number (sg #) is shown below the nuclease number.

[0061] FIGS. 7A and 7B depict in vitro cleavage assay amplification products. FIG. 7A depicts 2% agarose gels with low molecular weight DNA ladders (NEB) in the leftmost lanes. FIG. 7B depicts a digital gel from an Agilent Technologies 4200 TapeStation and D1000 ScreenTape System. Resulting amplicon products are 188 bp with a U67 spacer carrying guide or 205 bp with a U40 spacer carrying guide. The specific sgRNA (sg #) and spacer are shown on top of the lanes used for each nuclease.

[0062] FIGS. 8A and 8B depict Seq Logos of protospacer adjacent motif (PAM) sequences obtained from NGS sequencing of the amplified cut site on the template strand (FIG. 8A) and the non-template strand (FIG. 8B). The specific sgRNA (sg #) and spacer are shown next to the nuclease number.

[0063] FIGS. 9A and 9B depict histograms of the number of DNA reads mapping to each MG91 nuclease's amplified cut site on the template strand (FIG. 9A) and the non-template strand (FIG. 9B). The specific sgRNA (sg #) and spacer are shown next to the nuclease number.

### BRIEF DESCRIPTION OF THE SEQUENCE LISTING

[0064] The Sequence Listing filed herewith provides exemplary polynucleotide and polypeptide sequences for use in methods, compositions, and systems according to the disclosure. Below are exemplary descriptions of sequences therein.

### MG11

[0065] SEQ ID NOs: 1-37 show the full-length peptide sequences of MG11 nucleases.

[0066] SEQ ID NO: 3471 shows a crRNA 5′ direct repeats designed to function with an MG11 nuclease.

[0067] SEQ ID NOs: 3472-3538 show effector repeat motifs of MG11 nucleases.

[0068] SEQ ID NOs: 38-118 show the full-length peptide sequences of MG13 nucleases.

[0069] SEQ ID NO: 3540-3550 show effector repeat motifs of MG13 nucleases.

### MG19

[0070] SEQ ID NOs: 119-124 show the full-length peptide sequences of MG19 nucleases.

[0071] SEQ ID NOs: 3551-3558 show the nucleotide sequences of sgRNAs engineered to function with a MG19 nuclease.

[0072] SEQ ID NOs: 3863-3866 show PAM sequences compatible with MG19 nucleases.

### MG20

[0073] SEQ ID NO: 125 shows the full-length peptide sequence of a MG20 nuclease.

[0074] SEQ ID NO: 3559 shows the nucleotide sequence of a sgRNA engineered to function with a MG20 nuclease.

[0075] SEQ ID NO: 3867 shows a PAM sequence compatible with an MG20 nuclease.

### MG26

[0076] SEQ ID NOs: 126-140 show the full-length peptide sequences of MG26 nucleases.

[0077] SEQ ID NOs: 3560-3572 show effector repeat motifs of MG26 nucleases.

### MG28

[0078] SEQ ID NOs: 141-214 show the full-length peptide sequences of MG28 nucleases.

[0079] SEQ ID NOs: 3573-3607 show effector repeat motifs of MG28 nucleases.

[0080] SEQ ID NOs: 3608-3609 show crRNA 5′ direct repeats designed to function with an MG28 nuclease.

[0081] SEQ ID NOs: 3868-3869 shows a PAM sequence compatible with an MG28 nuclease.

### MG29

[0082] SEQ ID NOs: 215-225 and 6340-6551 show the full-length peptide sequences of MG29 nucleases.

[0083] SEQ ID NO: 5680 shows the nucleotide sequence of an MG29-1 nuclease containing 5′ UTR, NLS, CDS, NLS, 3′ UTR, and poly A tail.

[0084] SEQ ID NOs: 3610-3611 show effector repeat motifs of MG29 nucleases.

[0085] SEQ ID NO: 3612 shows the nucleotide sequence of a sgRNA engineered to function with a MG29 nuclease.

[0086] SEQ ID NOs: 3870-3872 show PAM sequences compatible with an MG29 nuclease.

[0087] SEQ ID NO: 5687 shows an MG29-1 coding sequence used for the generation of mRNA.

[0088] SEQ ID NOs: 5830 and 5846 show DNA sequences encoding MG29-1 mRNAs.

### MG30

[0089] SEQ ID NOs: 226-228 show the full-length peptide sequences of MG30 nucleases.

[0090] SEQ ID NOs: 3613-3615 show effector repeat motifs of MG30 nucleases.

[0091] SEQ ID NO: 3873 shows a PAM sequence compatible with an MG30 nuclease.

### MG31

[0092] SEQ ID NOs: 229-260 show the full-length peptide sequences of MG31 nucleases.

[0093] SEQ ID NOs: 3616-3632 show effector repeat motifs of MG31 nucleases.

[0094] SEQ ID NOs: 3874-3876 show PAM sequences compatible with a MG31 nuclease.

### MG32

[0095] SEQ ID NO: 261 shows the full-length peptide sequence of a MG32 nuclease.

[0096] SEQ ID NO: 3633-3634 show effector repeat motifs of MG32 nucleases.

[0097] SEQ ID NO: 3876 shows a PAM sequence compatible with a MG32 nuclease.

### MG37

[0098] SEQ ID NOs: 262-426 show the full-length peptide sequences of MG37 nucleases.

[0099] SEQ ID NO: 3635 shows an effector repeat motif of MG37 nucleases.

[0100] SEQ ID NOs: 3636-3637, 3640-3641, 3644-3645, 3648-3649, 3652-3653, 3656-3657, and 3660-3661 show the nucleotide sequence of sgRNA engineered to function with an MG37 nuclease.

[0101] SEQ ID NOs: 3638, 3642, 3646, 3650, 3654, 3658, and 3662 show the nucleotide sequences of MG37 tracrRNAs derived from the same loci as MG37 nucleases above.

[0102] SEQ ID NO: 3639, 3643, 3647, 3651, 3655, and 3659 show 5′ direct repeat sequences derived from native MG37 loci that serve as crRNAs when placed 5′ to a 3′ targeting or spacer sequence.

### MG53

[0103] SEQ ID NOs: 427-428 show the full-length peptide sequences of MG53 nucleases.

[0104] SEQ ID NO: 3663 shows a 5′ direct repeat sequence derived from native MG53 loci that serve as a crRNA when placed 5′ to a 3′ targeting or spacer sequence.

[0105] SEQ ID NOs: 3664-3667 show the nucleotide sequence of sgRNAs engineered to function with an MG53 nuclease.

[0106] SEQ ID NOs: 3668-3669 show the nucleotide sequences of MG53 tracrRNAs derived from the same loci as MG53 nucleases above.

### MG54

[0107] SEQ ID NOs: 429-430 show the full-length peptide sequences of MG54 nucleases.

[0108] SEQ ID NO: 3670 shows a 5′ direct repeat sequence derived from native MG54 loci that serve as a crRNA when placed 5′ to a 3′ targeting or spacer sequence.

[0109] SEQ ID NOs: 3671-3672 show the nucleotide sequence of sgRNA engineered to function with an MG54 nuclease.

[0110] SEQ ID NOs: 3673-3676 show the nucleotide sequences of MG54 tracrRNAs derived from the same loci as MG54 nucleases above.

### MG55

[0111] SEQ ID NOs: 431-688 show the full-length peptide sequences of MG55 nucleases.

[0112] SEQ ID NO: 6031 shows the nucleotide sequence of an sgRNA engineered to function with an MG55 nuclease.

[0113] SEQ ID NO: 6032 shows a PAM sequence compatible with an MG55 nuclease.

### MG56

[0114] SEQ ID NOs: 689-690 show the full-length peptide sequences of MG56 nucleases.

[0115] SEQ ID NO: 3678 shows a crRNA 5′ direct repeats designed to function with an MG56 nuclease.

[0116] SEQ ID NOs: 3679-3680 show effector repeat motifs of MG56 nucleases.

### MG57

[0117] SEQ ID NOs: 691-721 show the full-length peptide sequences of MG57 nucleases.

[0118] SEQ ID NOs: 3681-3694 show effector repeat motifs of MG57 nucleases.

[0119] SEQ ID NOs: 3695-3696 show the nucleotide sequences of sgRNAs engineered to function with an MG57 nuclease.

[0120] SEQ ID NOs: 3879-3880 shows PAM sequences compatible with MG57 nucleases.

### MG58

[0121] SEQ ID NOs: 722-779 show the full-length peptide sequences of MG58 nucleases.

[0122] SEQ ID NOs: 3697-3711 show effector repeat motifs of MG58 nucleases.

### MG59

[0123] SEQ ID NOs: 780-792 show the full-length peptide sequences of MG59 nucleases.

[0124] SEQ ID NOs: 3712-3728 show effector repeat motifs of MG59 nucleases.

[0125] SEQ ID NOs: 3729-3730 show the nucleotide sequences of sgRNAs engineered to function with an MG59 nuclease.

[0126] SEQ ID NOs: 3881-3882 shows PAM sequences compatible with MG59 nucleases.

### MG60

[0127] SEQ ID NOs: 793-1163 show the full-length peptide sequences of MG60 nucleases.

[0128] SEQ ID NOs: 3731-3733 show effector repeat motifs of MG60 nucleases.

### MG61

[0129] SEQ ID NOs: 1164-1469 show the full-length peptide sequences of MG61 nucleases.

[0130] SEQ ID NOs: 3734-3735 show crRNA 5′ direct repeats designed to function with MG61 nucleases.

[0131] SEQ ID NOs: 3736-3847 show effector repeat motifs of MG61 nucleases.

### MG62

[0132] SEQ ID NOs: 1470-1472 show the full-length peptide sequences of MG62 nucleases.

[0133] SEQ ID NOs: 3848-3850 show effector repeat motifs of MG62 nucleases.

### MG70

[0134] SEQ ID NOs: 1473-1514 show the full-length peptide sequences of MG70 nucleases.

### MG75

[0135] SEQ ID NOs: 1515-1710 show the full-length peptide sequences of MG75 nucleases.

### MG77

[0136] SEQ ID NOs: 1711-1712 show the full-length peptide sequences of MG77 nucleases.

[0137] SEQ ID NOs: 3851-3852 show the nucleotide sequences of sgRNAs engineered to function with an MG77 nuclease.

[0138] SEQ ID NOs: 3883-3884 show PAM sequences compatible with MG77 nucleases.

### MG78

[0139] SEQ ID NOs: 1713-1717 show the full-length peptide sequences of MG78 nucleases.

[0140] SEQ ID NO: 3853 shows the nucleotide sequence of a sgRNA engineered to function with an MG78 nuclease.

[0141] SEQ ID NO: 3885 shows a PAM sequence compatible with a MG78 nuclease.

### MG79

[0142] SEQ ID NOs: 1718-1722 show the full-length peptide sequences of MG79 nucleases.

[0143] SEQ ID NOs: 3854-3857 shows the nucleotide sequences of sgRNAs engineered to function with an MG79 nuclease.

[0144] SEQ ID NOs: 3886-3889 show the PAM sequences compatible with MG79 nucleases.

### MG80

[0145] SEQ ID NO: 1723 shows the full-length peptide sequence of a MG80 nuclease.

### MG81

[0146] SEQ ID NOs: 1724-2654 show the full-length peptide sequences of MG81 nucleases.

### MG82

[0147] SEQ ID NOs: 2655-2657 show the full-length peptide sequences of MG82 nucleases.

### MG83

[0148] SEQ ID NOs: 2658-2659 show the full-length peptide sequences of MG83 nucleases.

### MG84

[0149] SEQ ID NOs: 2660-2677 show the full-length peptide sequences of MG84 nucleases.

### MG85

[0150] SEQ ID NOs: 2678-2680 show the full-length peptide sequences of MG85 nucleases.

### MG90

[0151] SEQ ID NOs: 2681-2809 show the full-length peptide sequences of MG90 nucleases.

### MG91

[0152] SEQ ID NOs: 2810-3470 and 6274-6281 show the full-length peptide sequences of MG91 nucleases.

[0153] SEQ ID NOs: 6033-6036 and 6284-6325 show nucleotide sequences of sgRNAs engineered to function with MG91 nucleases.

[0154] SEQ ID NOs: 6037-6039 and 6326-6339 show PAM sequences compatible with MG91 nucleases.

[0155] SEQ ID NOs: 6040-6049 and 6282 show MG91 intergenic regions potentially encoding tracrRNAs.

[0156] SEQ ID NOs: 6050-6059 and 6283 show MG91 CRISPR repeats.

### Spacer Segments

[0157] SEQ ID NOs: 3858-3861 show the nucleotide sequences of spacer segments.

### NLS

[0158] SEQ ID NOs: 3938-3953 show the sequences of example nuclear localization sequences (NLSs) that can be appended to nucleases according to the disclosure.

### CD38 Targeting

[0159] SEQ ID NOs: 4428-4465 and 5685 show the nucleotide sequences of sgRNAs engineered to function with an MG29-1 nuclease in order to target CD38.

[0160] SEQ ID NOs: 4466-4503 and 5686 show the DNA sequences of CD38 target sites.

### TIGIT Targeting

[0161] SEQ ID NOs: 4504-4520 show the nucleotide sequences of sgRNAs engineered to function with an MG29-1 nuclease in order to target TIGIT.

[0162] SEQ ID NOs: 4521-4537 show the DNA sequences of TIGIT target sites.

### AAVS1 Targeting

[0163] SEQ ID NOs: 4538-4568 show the nucleotide sequences of sgRNAs engineered to function with an MG29-1 nuclease in order to target AAVS1.

[0164] SEQ ID NOs: 4569-4599 show the DNA sequences of AAVS1 target sites.

### B2M Targeting

[0165] SEQ ID NOs: 4600-4675 show the nucleotide sequences of sgRNAs engineered to function with an MG29-1 nuclease in order to target B2M.

[0166] SEQ ID NOs: 4676-4751 show the DNA sequences of B2M target sites.

### CD2 Targeting

[0167] SEQ ID NOs: 4752-4836 show the nucleotide sequences of sgRNAs engineered to function with an MG29-1 nuclease in order to target CD2.

[0168] SEQ ID NOs: 4837-4921 show the DNA sequences of CD2 target sites.

### CD5 Targeting

[0169] SEQ ID NOs: 4922-4945 show the nucleotide sequences of sgRNAs engineered to function with an MG29-1 nuclease in order to target CD5.

[0170] SEQ ID NOs: 4946-4969 show the DNA sequences of CD5 target sites.

hRosa26 Targeting

[0171] SEQ ID NOs: 4970-5012 show the nucleotide sequences of sgRNAs engineered to function with an MG29-1 nuclease in order to target hRosa26.

[0172] SEQ ID NOs: 5013-5055 show the DNA sequences of hRosa26 target sites.

### TRAC Targeting

[0173] SEQ ID NOs: 5056-5125, 5681, and 5683 show the nucleotide sequences of sgRNAs engineered to function with an MG29-1 nuclease in order to target TRAC.

[0174] SEQ ID NOs: 5126-5195, 5682, and 5684 show the DNA sequences of TRAC target sites.

### TRBC1 Targeting

[0175] SEQ ID NOs: 5196-5210 show the nucleotide sequences of sgRNAs engineered to function with an MG29-1 nuclease in order to target TRBC1.

[0176] SEQ ID NOs: 5211-5225 show the DNA sequences of TRBC1 target sites.

### TRBC2 Targeting

[0177] SEQ ID NOs: 5226-5246 show the nucleotide sequences of sgRNAs engineered to function with an MG29-1 nuclease in order to target TRBC2.

[0178] SEQ ID NOs: 5247-5267 show the DNA sequences of TRBC2 target sites.

### TRBC1/2 Targeting

[0179] SEQ ID NOs: 5642-5660 show the nucleotide sequences of sgRNAs engineered to function with an MG29-1 nuclease in order to target TRBC.

[0180] SEQ ID NOs: 5661-5679 show the DNA sequences of TRBC target sites.

### FAS Targeting

[0181] SEQ ID NOs: 5268-5366 show the nucleotide sequences of sgRNAs engineered to function with an MG29-1 nuclease in order to target FAS.

[0182] SEQ ID NOs: 5367-5465 show the DNA sequences of FAS target sites.

### PD-1 Targeting

[0183] SEQ ID NOs: 5466-5473 show the nucleotide sequences of sgRNAs engineered to function with an MG29-1 nuclease in order to target PD-1.

[0184] SEQ ID NOs: 5474-5481 show the DNA sequences of PD-1 target sites.

### HPRT Targeting

[0185] SEQ ID NOs: 5482-5561 show the nucleotide sequences of sgRNAs engineered to function with an MG29-1 nuclease in order to target HPRT.

[0186] SEQ ID NOs: 5562-5641 show the DNA sequences of HPRT target sites.

### HAO-1 Targeting

[0187] SEQ ID NOs: 5788-5829 and 5831-5834 show the nucleotide sequences of sgRNAs engineered to function with an MG29-1 nuclease in order to target human HAO-1.

[0188] SEQ ID NOs: 5836-5845 show the nucleotide sequences of sgRNAs engineered to function with an MG29-1 nuclease in order to target mouse HAO-1.

### APO-A1 Targeting

[0189] SEQ ID NOs: 5847-5860 show the nucleotide sequences of sgRNAs engineered to function with an MG29-1 nuclease in order to target mouse APO-A1.

[0190] SEQ ID NOs: 5861-5874 show the DNA sequences of APO-A1 target sites.

### Mouse ANGPTL3 Targeting

[0191] SEQ ID NOs: 5875-5952 show the nucleotide sequences of sgRNAs engineered to function with an MG29-1 nuclease in order to target mouse ANGPTL3.

[0192] SEQ ID NOs: 5953-6030 show the DNA sequences of mouse ANGPTL3 target sites.

### MG29-1 Human GPR146 Targeting

[0193] SEQ ID NOs: 6060-6068 show the nucleotide sequences of sgRNAs engineered to function with an MG29-1 nuclease in order to target human GPR146.

[0194] SEQ ID NOs: 6069-6077 show the DNA sequences of human GPR146 target sites.

### MG29-1 Mouse GPR146 Targeting

[0195] SEQ ID NOs: 6078-6079 show the nucleotide sequences of sgRNAs engineered to function with an MG29-1 nuclease in order to target mouse GPR146.

[0196] SEQ ID NOs: 6080-6081 show the DNA sequences of mouse GPR146 target sites.

### Human ANGPTL3 Targeting

[0197] SEQ ID NOs: 6082-6177 show the nucleotide sequences of sgRNAs engineered to function with an MG29-1 nuclease in order to target human ANGPTL3.

[0198] SEQ ID NOs: 6178-6273 show the DNA sequences of human ANGPTL3 target sites.

### DETAILED DESCRIPTION

[0199] While various embodiments of the invention have been shown and described herein, it will be obvious to those skilled in the art that such embodiments are provided by way of example only. Numerous variations, changes, and substitutions may occur to those skilled in the art without departing from the invention. It should be understood that various alternatives to the embodiments of the invention described herein may be employed.

[0200] The practice of some methods disclosed herein employ, unless otherwise indicated, techniques of immunology, biochemistry, chemistry, molecular biology, microbiology, cell biology, genomics, and recombinant DNA. See for example Sambrook and Green, Molecular Cloning: A Laboratory Manual, 4th Edition (2012); the series Current Protocols in Molecular Biology (F. M. Ausubel, et al. eds.); the series Methods In Enzymology (Academic Press, Inc.), PCR 2: A Practical Approach (M. J. MacPherson, B. D. Hames and G. R. Taylor eds. (1995)), Harlow and Lane, eds. (1988) Antibodies, A Laboratory Manual, and Culture of Animal Cells: A Manual of Basic Technique and Specialized Applications, 6th Edition (R. I. Freshney, ed. (2010)) (which is entirely incorporated by reference herein).

[0201] As used herein, the singular forms “a”, “an” and “the” are intended to include the plural forms as well, unless the context clearly indicates otherwise. Furthermore, to the extent that the terms “including”, “includes”, “having”, “has”, “with”, or variants thereof are used in either the detailed description and/or the claims, such terms are intended to be inclusive in a manner similar to the term “comprising”.

[0202] The term “about” or “approximately” means within an acceptable error range for the particular value as determined by one of ordinary skill in the art, which will depend in part on how the value is measured or determined, i.e., the limitations of the measurement system. For example, “about” can mean within one or more than one standard deviation, per the practice in the art. Alternatively, “about” can mean a range of up to 20%, up to 15%, up to 10%, up to 5%, or up to 1% of a given value.

[0203] As used herein, a “cell” generally refers to a biological cell. A cell may be the basic structural, functional and/or biological unit of a living organism. A cell may originate from any organism having one or more cells. Some non-limiting examples include: a prokaryotic cell, eukaryotic cell, a bacterial cell, an archaeal cell, a cell of a single-cell eukaryotic organism, a protozoa cell, a cell from a plant (e.g., cells from plant crops, fruits, vegetables, grains, soy bean, corn, maize, wheat, seeds, tomatoes, rice, cassava, sugarcane, pumpkin, hay, potatoes, cotton, cannabis, tobacco, flowering plants, conifers, gymnosperms, ferns, clubmosses, hornworts, liverworts, mosses), an algal cell, (e.g., Botryococcus braunii, Chlamydomonas reinhardtii, Nannochloropsis gaditana, Chlorella pyrenoidosa, Sargassum patens C. Agardh, and the like), seaweeds (e.g., kelp), a fungal cell (e.g., a yeast cell, a cell from a mushroom), an animal cell, a cell from an invertebrate animal (e.g., fruit fly, cnidarian, echinoderm, nematode, etc.), a cell from a vertebrate animal (e.g., fish, amphibian, reptile, bird, mammal), a cell from a mammal (e.g., a pig, a cow, a goat, a sheep, a rodent, a rat, a mouse, a non-human primate, a human, etc.), and etcetera. Sometimes a cell is not originating from a natural organism (e.g., a cell can be a synthetically made, sometimes termed an artificial cell).

[0204] The term “nucleotide,” as used herein, generally refers to a base-sugar-phosphate combination. A nucleotide may comprise a synthetic nucleotide. A nucleotide may comprise a synthetic nucleotide analog. Nucleotides may be monomeric units of a nucleic acid sequence (e.g., deoxyribonucleic acid (DNA) and ribonucleic acid (RNA)). The term nucleotide may include ribonucleoside triphosphates adenosine triphosphate (ATP), uridine triphosphate (UTP), cytosine triphosphate (CTP), guanosine triphosphate (GTP) and deoxyribonucleoside triphosphates such as dATP, dCTP, dITP, dUTP, dGTP, dTTP, or derivatives thereof. Such derivatives may include, for example, [αS]dATP, 7-deaza-dGTP and 7-deaza-dATP, and nucleotide derivatives that confer nuclease resistance on the nucleic acid molecule containing them. The term nucleotide as used herein may refer to dideoxyribonucleoside triphosphates (ddNTPs) and their derivatives. Illustrative examples of dideoxyribonucleoside triphosphates may include, but are not limited to, ddATP, ddCTP, ddGTP, ddITP, and ddTTP. A nucleotide may be unlabeled or detectably labeled, such as using moieties comprising optically detectable moieties (e.g., fluorophores). Labeling may also be carried out with quantum dots. Detectable labels may include, for example, radioactive isotopes, fluorescent labels, chemiluminescent labels, bioluminescent labels, and enzyme labels. Fluorescent labels of nucleotides may include but are not limited fluorescein, 5-carboxyfluorescein (FAM), 2′7′-dimethoxy-4′5-dichloro-6-carboxyfluorescein (JOE), rhodamine, 6-carboxyrhodamine (R6G), N,N,N′,N′-tetramethyl-6-carboxyrhodamine (TAMRA), 6-carboxy-X-rhodamine (ROX), 4-(4′dimethylaminophenylazo) benzoic acid (DABCYL), Cascade Blue, Oregon Green, Texas Red, Cyanine and 5-(2′-aminoethyl) aminonaphthalene-1-sulfonic acid (EDANS). Specific examples of fluorescently labeled nucleotides can include [R6G]dUTP, [TAMRA]dUTP, [R110]dCTP, [R6G]dCTP, [TAMRA]dCTP, [JOE]ddATP, [R6G]ddATP, [FAM]ddCTP, [R110]ddCTP, [TAMRA]ddGTP, [ROX]ddTTP, [dR6G]ddATP, [dR110]ddCTP, [dTAMRA]ddGTP, and [dROX]ddTTP available from Perkin Elmer, Foster City, Calif; FluoroLink DeoxyNucleotides, FluoroLink Cy3-dCTP, FluoroLink Cy5-dCTP, FluoroLink Fluor X-dCTP, FluoroLink Cy3-dUTP, and FluoroLink Cy5-dUTP available from Amersham, Arlington Heights, Il.; Fluorescein-15-dATP, Fluorescein-12-dUTP, Tetramethyl-rodamine-6-dUTP, IR770-9-dATP, Fluorescein-12-ddUTP, Fluorescein-12-UTP, and Fluorescein-15-2′-dATP available from Boehringer Mannheim, Indianapolis, Ind.; and Chromosome Labeled Nucleotides, BODIPY-FL-14-UTP, BODIPY-FL-4-UTP, BODIPY-TMR-14-UTP, BODIPY-TMR-14-dUTP, BODIPY-TR-14-UTP, BODIPY-TR-14-dUTP, Cascade Blue-7-UTP, Cascade Blue-7-dUTP, fluorescein-12-UTP, fluorescein-12-dUTP, Oregon Green 488-5-dUTP, Rhodamine Green-5-UTP, Rhodamine Green-5-dUTP, tetramethylrhodamine-6-UTP, tetramethylrhodamine-6-dUTP, Texas Red-5-UTP, Texas Red-5-dUTP, and Texas Red-12-dUTP available from Molecular Probes, Eugene, Oreg. Nucleotides can also be labeled or marked by chemical modification. A chemically-modified single nucleotide can be biotin-dNTP. Some non-limiting examples of biotinylated dNTPs can include, biotin-dATP (e.g., bio-N6-ddATP, biotin-14-dATP), biotin-dCTP (e.g., biotin-11-dCTP, biotin-14-dCTP), and biotin-dUTP (e.g., biotin-11-dUTP, biotin-16-dUTP, biotin-20-dUTP).

[0205] The terms “polynucleotide,” “oligonucleotide,” and “nucleic acid” are used interchangeably to generally refer to a polymeric form of nucleotides of any length, either deoxyribonucleotides or ribonucleotides, or analogs thereof, either in single-, double-, or multi-stranded form. A polynucleotide may be exogenous or endogenous to a cell. A polynucleotide may exist in a cell-free environment. A polynucleotide may be a gene or fragment thereof. A polynucleotide may be DNA. A polynucleotide may be RNA. A polynucleotide may have any three-dimensional structure and may perform any function. A polynucleotide may comprise one or more analogs (e.g., altered backbone, sugar, or nucleobase). If present, modifications to the nucleotide structure may be imparted before or after assembly of the polymer. Some non-limiting examples of analogs include: 5-bromouracil, peptide nucleic acid, xeno nucleic acid, morpholinos, locked nucleic acids, glycol nucleic acids, threose nucleic acids, dideoxynucleotides, cordycepin, 7-deaza-GTP, fluorophores (e.g., rhodamine or fluorescein linked to the sugar), thiol-containing nucleotides, biotin-linked nucleotides, fluorescent base analogs, CpG islands, methyl-7-guanosine, methylated nucleotides, inosine, thiouridine, pseudouridine, dihydrouridine, queuosine, and wyosine. Non-limiting examples of polynucleotides include coding or non-coding regions of a gene or gene fragment, loci (locus) defined from linkage analysis, exons, introns, messenger RNA (mRNA), transfer RNA (tRNA), ribosomal RNA (rRNA), short interfering RNA (siRNA), short-hairpin RNA (shRNA), micro-RNA (miRNA), ribozymes, cDNA, recombinant polynucleotides, branched polynucleotides, plasmids, vectors, isolated DNA of any sequence, isolated RNA of any sequence, cell-free polynucleotides including cell-free DNA (cfDNA) and cell-free RNA (cfRNA), nucleic acid probes, and primers. The sequence of nucleotides may be interrupted by non-nucleotide components.

[0206] The terms “transfection” or “transfected” generally refer to introduction of a nucleic acid into a cell by non-viral or viral-based methods. The nucleic acid molecules may be gene sequences encoding complete proteins or functional portions thereof. See, e.g., Sambrook et al., 1989, Molecular Cloning: A Laboratory Manual, 18.1-18.88 (which is entirely incorporated by reference herein).

[0207] The terms “peptide,” “polypeptide,” and “protein” are used interchangeably herein to generally refer to a polymer of at least two amino acid residues joined by peptide bond(s). This term does not connote a specific length of polymer, nor is it intended to imply or distinguish whether the peptide is produced using recombinant techniques, chemical or enzymatic synthesis, or is naturally occurring. The terms apply to naturally occurring amino acid polymers as well as amino acid polymers comprising at least one modified amino acid. In some cases, the polymer may be interrupted by non-amino acids. The terms include amino acid chains of any length, including full length proteins, and proteins with or without secondary and/or tertiary structure (e.g., domains). The terms also encompass an amino acid polymer that has been modified, for example, by disulfide bond formation, glycosylation, lipidation, acetylation, phosphorylation, oxidation, and any other manipulation such as conjugation with a labeling component. The terms “amino acid” and “amino acids,” as used herein, generally refer to natural and non-natural amino acids, including, but not limited to, modified amino acids and amino acid analogues. Modified amino acids may include natural amino acids and non-natural amino acids, which have been chemically modified to include a group or a chemical moiety not naturally present on the amino acid. Amino acid analogues may refer to amino acid derivatives. The term “amino acid” includes both D-amino acids and L-amino acids.

[0208] As used herein, the “non-native” can generally refer to a nucleic acid or polypeptide sequence that is not found in a native nucleic acid or protein. Non-native may refer to affinity tags. Non-native may refer to fusions. Non-native may refer to a naturally occurring nucleic acid or polypeptide sequence that comprises mutations, insertions and/or deletions. A non-native sequence may exhibit and/or encode for an activity (e.g., enzymatic activity, methyltransferase activity, acetyltransferase activity, kinase activity, ubiquitinating activity, etc.) that may also be exhibited by the nucleic acid and/or polypeptide sequence to which the non-native sequence is fused. A non-native nucleic acid or polypeptide sequence may be linked to a naturally-occurring nucleic acid or polypeptide sequence (or a variant thereof) by genetic engineering to generate a chimeric nucleic acid and/or polypeptide sequence encoding a chimeric nucleic acid and/or polypeptide.

[0209] The term “promoter”, as used herein, generally refers to the regulatory DNA region which controls transcription or expression of a gene and which may be located adjacent to or overlapping a nucleotide or region of nucleotides at which RNA transcription is initiated. A promoter may contain specific DNA sequences which bind protein factors, often referred to as transcription factors, which facilitate binding of RNA polymerase to the DNA leading to gene transcription. A ‘basal promoter’, also referred to as a ‘core promoter’, may generally refer to a promoter that contains all the basic elements to promote transcriptional expression of an operably linked polynucleotide. Eukaryotic basal promoters can contain a TATA-box and/or a CAAT box.

[0210] The term “expression”, as used herein, generally refers to the process by which a nucleic acid sequence or a polynucleotide is transcribed from a DNA template (such as into mRNA or other RNA transcript) and/or the process by which a transcribed mRNA is subsequently translated into peptides, polypeptides, or proteins. Transcripts and encoded polypeptides may be collectively referred to as “gene product.” If the polynucleotide is derived from genomic DNA, expression may include splicing of the mRNA in a eukaryotic cell.

[0211] As used herein, “operably linked”, “operable linkage”, “operatively linked”, or grammatical equivalents thereof generally refer to juxtaposition of genetic elements, e.g., a promoter, an enhancer, a polyadenylation sequence, etc., wherein the elements are in a relationship permitting them to operate in the expected manner. For instance, a regulatory element, which may comprise promoter and/or enhancer sequences, is operatively linked to a coding region if the regulatory element helps initiate transcription of the coding sequence. There may be intervening residues between the regulatory element and coding region so long as this functional relationship is maintained.

[0212] A “vector” as used herein, generally refers to a macromolecule or association of macromolecules that comprises or associates with a polynucleotide and which may be used to mediate delivery of the polynucleotide to a cell. Examples of vectors include plasmids, viral vectors, liposomes, and other gene delivery vehicles. The vector generally comprises genetic elements, e.g., regulatory elements, operatively linked to a gene to facilitate expression of the gene in a target.

[0213] As used herein, “an expression cassette” and “a nucleic acid cassette” are used interchangeably generally to refer to a combination of nucleic acid sequences or elements that are expressed together or are operably linked for expression. In some cases, an expression cassette refers to the combination of regulatory elements and a gene or genes to which they are operably linked for expression.

[0214] A “functional fragment” of a DNA or protein sequence generally refers to a fragment that retains a biological activity (either functional or structural) that is substantially similar to a biological activity of the full-length DNA or protein sequence. A biological activity of a DNA sequence may be its ability to influence expression in a manner attributed to the full-length sequence.

[0215] As used herein, an “engineered” object generally indicates that the object has been modified by human intervention. According to non-limiting examples: a nucleic acid may be modified by changing its sequence to a sequence that does not occur in nature; a nucleic acid may be modified by ligating it to a nucleic acid that it does not associate with in nature such that the ligated product possesses a function not present in the original nucleic acid; an engineered nucleic acid may synthesized in vitro with a sequence that does not exist in nature; a protein may be modified by changing its amino acid sequence to a sequence that does not exist in nature; an engineered protein may acquire a new function or property. An “engineered” system comprises at least one engineered component.

[0216] As used herein, “synthetic” and “artificial” can generally be used interchangeably to refer to a protein or a domain thereof that has low sequence identity (e.g., less than 50% sequence identity, less than 25% sequence identity, less than 10% sequence identity, less than 5% sequence identity, less than 1% sequence identity) to a naturally occurring human protein. For example, VPR and VP64 domains are synthetic transactivation domains.

[0217] As used herein, the term “Cas12a” generally refers to a family of Cas endonucleases that are class 2, Type V-A Cas endonucleases and that (a) use a relatively small guide RNA (about 42-44 nucleotides) that is processed by the nuclease itself following transcription from the CRISPR array, and (b) cleave DNA to leave staggered cut sites. Further features of this family of enzymes can be found, e.g. in Zetsche B, Heidenreich M, Mohanraju P, et al. Nat Biotechnol 2017; 35:31-34, and Zetsche B, Gootenberg J S, Abudayyeh O O, et al. Cell 2015; 163:759-771, which are incorporated by reference herein.

[0218] As used herein, a “guide nucleic acid” can generally refer to a nucleic acid that may hybridize to another nucleic acid. A guide nucleic acid may be RNA. A guide nucleic acid may be DNA. The guide nucleic acid may be programmed to bind to a sequence of nucleic acid site-specifically. The nucleic acid to be targeted, or the target nucleic acid, may comprise nucleotides. The guide nucleic acid may comprise nucleotides. A portion of the target nucleic acid may be complementary to a portion of the guide nucleic acid. The strand of a double-stranded target polynucleotide that is complementary to and hybridizes with the guide nucleic acid may be called the complementary strand. The strand of the double-stranded target polynucleotide that is complementary to the complementary strand, and therefore may not be complementary to the guide nucleic acid may be called noncomplementary strand. A guide nucleic acid may comprise a polynucleotide chain and can be called a “single guide nucleic acid.” A guide nucleic acid may comprise two polynucleotide chains and may be called a “double guide nucleic acid.” If not otherwise specified, the term “guide nucleic acid” may be inclusive, referring to both single guide nucleic acids and double guide nucleic acids. A guide nucleic acid may comprise a segment that can be referred to as a “nucleic acid-targeting segment” or a “nucleic acid-targeting sequence” or “spacer sequence.” A nucleic acid-targeting segment may comprise a sub-segment that may be referred to as a “protein binding segment” or “protein binding sequence” or “Cas protein binding segment”.

[0219] The term “sequence identity” or “percent identity” in the context of two or more nucleic acids or polypeptide sequences, generally refers to two (e.g., in a pairwise alignment) or more (e.g., in a multiple sequence alignment) sequences that are the same or have a specified percentage of amino acid residues or nucleotides that are the same, when compared and aligned for maximum correspondence over a local or global comparison window, as measured using a sequence comparison algorithm. Suitable sequence comparison algorithms for polypeptide sequences include, e.g., BLASTP using parameters of a wordlength (W) of 3, an expectation (E) of 10, and the BLOSUM62 scoring matrix setting gap costs at existence of 11, extension of 1, and using a conditional compositional score matrix adjustment for polypeptide sequences longer than 30 residues; BLASTP using parameters of a wordlength (W) of 2, an expectation (E) of 1000000, and the PAM30 scoring matrix setting gap costs at 9 to open gaps and 1 to extend gaps for sequences of less than 30 residues (these are the default parameters for BLASTP in the BLAST suite available at https://blast.ncbi.nlm.nih.gov); CLUSTALW with the Smith-Waterman homology search algorithm parameters with a match of 2, a mismatch of −1, and a gap of −1; MUSCLE with default parameters; MAFFT with parameters of a retree of 2 and max iterations of 1000; Novafold with default parameters; HMMER hmmalign with default parameters.

[0220] The term “optimally aligned” in the context of two or more nucleic acids or polypeptide sequences, generally refers to two (e.g., in a pairwise alignment) or more (e.g., in a multiple sequence alignment) sequences that have been aligned to maximal correspondence of amino acids residues or nucleotides, for example, as determined by the alignment producing a highest or “optimized” percent identity score.

[0221] Included in the current disclosure are variants of any of the enzymes described herein with one or more conservative amino acid substitutions. Such conservative substitutions can be made in the amino acid sequence of a polypeptide without disrupting the three-dimensional structure or function of the polypeptide. Conservative substitutions can be accomplished by substituting amino acids with similar hydrophobicity, polarity, and R chain length for one another. Additionally, or alternatively, by comparing aligned sequences of homologous proteins from different species, conservative substitutions can be identified by locating amino acid residues that have been mutated between species (e.g., non-conserved residues) without altering the basic functions of the encoded proteins. Such conservatively substituted variants may include variants with at least about 20%, at least about 25%, at least about 30%, at least about 35%, at least about 40%, at least about 45%, at least about 50%, at least about 55%, at least about 60%, at least about 65%, at least about 70%, at least about 75%, at least about 80%, at least about 85%, at least about 90%, at least about 91%, at least about 92%, at least about 93%, at least about 94%, at least about 95%, at least about 96%, at least about 97%, at least about 98%, at least about 99% sequence identity to any one of the endonuclease protein sequences described herein (e.g. MG11, MG13, MG26, MG28, MG29, MG30, MG31, MG32, MG37, MG53, MG54, MG55, MG56, MG57, MG58, MG59, MG60, MG61, MG62, MG70, MG82, MG83, MG84 or MG85 family endonucleases described herein, or any other family nuclease described herein). In some embodiments, such conservatively substituted variants are functional variants. Such functional variants can encompass sequences with substitutions such that the activity of one or more critical active site residues or guide RNA binding residues of the endonuclease are not disrupted. In some embodiments, a functional variant of any of the proteins described herein lacks substitution of at least one conserved or functional residue. In some embodiments, a functional variant of any of the proteins described herein lacks substitution of all conserved or functional residues.

[0222] Also included in the current disclosure are variants of any of the enzymes described herein with substitution of one or more catalytic residues to decrease or eliminate activity of the enzyme (e.g. decreased-activity variants). In some embodiments, a decreased activity variant as a protein described herein comprises a disrupting substitution of at least one, at least two, or all three catalytic residues.

[0223] Conservative substitution tables providing functionally similar amino acids are available from a variety of references (see, for e.g., Creighton, Proteins: Structures and Molecular Properties (W H Freeman & Co.; 2nd edition (December 1993)). The following eight groups each contain amino acids that are conservative substitutions for one another:
[0224] 1) Alanine (A), Glycine (G);
[0225] 2) Aspartic acid (D), Glutamic acid (E);
[0226] 3) Asparagine (N), Glutamine (Q);
[0227] 4) Arginine (R), Lysine (K);
[0228] 5) Isoleucine (I), Leucine (L), Methionine (M), Valine (V);
[0229] 6) Phenylalanine (F), Tyrosine (Y), Tryptophan (W);
[0230] 7) Serine(S), Threonine (T); and
[0231] 8) Cysteine (C), Methionine (M)

### Overview

[0232] The discovery of new Cas enzymes with unique functionality and structure may offer the potential to further disrupt deoxyribonucleic acid (DNA) editing technologies, improving speed, specificity, functionality, and ease of use. Relative to the predicted prevalence of Clustered

[0233] Regularly Interspaced Short Palindromic Repeats (CRISPR) systems in microbes and the sheer diversity of microbial species, relatively few functionally characterized CRISPR/Cas enzymes exist in the literature. This is partly because a huge number of microbial species may not be readily cultivated in laboratory conditions. Metagenomic sequencing from natural environmental niches containing large numbers of microbial species may offer the potential to drastically increase the number of new CRISPR/Cas systems characterized and speed the discovery of new oligonucleotide editing functionalities. A recent example of the fruitfulness of such an approach is demonstrated by the 2016 discovery of CasX/CasY CRISPR systems from metagenomic analysis of natural microbial communities.

[0234] CRISPR/Cas systems are RNA-directed nuclease complexes that have been described to function as an adaptive immune system in microbes. In their natural context, CRISPR/Cas systems occur in CRISPR (clustered regularly interspaced short palindromic repeats) operons or loci, which generally comprise two parts: (i) an array of short repetitive sequences (30-40 bp) separated by equally short spacer sequences, which encode the RNA-based targeting element; and (ii) ORFs encoding the Cas encoding the nuclease polypeptide directed by the RNA-based targeting element alongside accessory proteins/enzymes. Efficient nuclease targeting of a particular target nucleic acid sequence generally requires both (i) complementary hybridization between the first 6-8 nucleic acids of the target (the target seed) and the crRNA guide; and (ii) the presence of a protospacer-adjacent motif (PAM) sequence within a defined vicinity of the target seed (the PAM usually being a sequence not commonly represented within the host genome). Depending on the exact function and organization of the system, CRISPR-Cas systems are commonly organized into 2 classes, 5 types and 16 subtypes based on shared functional characteristics and evolutionary similarity.

[0235] Class I CRISPR-Cas systems have large, multi-subunit effector complexes, and comprise Types I, III, and IV. Class II CRISPR-Cas systems generally have single-polypeptide multidomain nuclease effectors, and comprise Types II, V and VI.

[0236] Type II CRISPR-Cas systems are considered the simplest in terms of components. In Type II CRISPR-Cas systems, the processing of the CRISPR array into mature crRNAs does not require the presence of a special endonuclease subunit, but rather a small trans-encoded crRNA (tracrRNA) with a region complementary to the array repeat sequence; the tracrRNA interacts with both its corresponding effector nuclease (e.g. Cas9) and the repeat sequence to form a precursor dsRNA structure, which is cleaved by endogenous RNAse III to generate a mature effector enzyme loaded with both tracrRNA and crRNA. Cas II nucleases are identified as DNA nucleases. Type 2 effectors generally exhibit a structure comprising a RuvC-like endonuclease domain that adopts the RNase H fold with an unrelated HNH nuclease domain inserted within the folds of the RuvC-like nuclease domain. The RuvC-like domain is responsible for the cleavage of the target (e.g., crRNA complementary) DNA strand, while the HNH domain is responsible for cleavage of the displaced DNA strand.

[0237] Type V CRISPR-Cas systems are characterized by a nuclease effector (e.g. Cas12) structure similar to that of Type II effectors, comprising a RuvC-like domain. Similar to Type II, most (but not all) Type V CRISPR systems use a tracrRNA to process pre-crRNAs into mature crRNAs; however, unlike Type II systems which requires RNAse III to cleave the pre-crRNA into multiple crRNAs, type V systems are capable of using the effector nuclease itself to cleave pre-crRNAs. Like Type-II CRISPR-Cas systems, Type V CRISPR-Cas systems are again identified as DNA nucleases. Unlike Type II CRISPR-Cas systems, some Type V enzymes (e.g., Cas12a) appear to have a robust single-stranded nonspecific deoxyribonuclease activity that is activated by the first crRNA directed cleavage of a double-stranded target sequence.

[0238] CRISPR-Cas systems have emerged in recent years as the gene editing technology of choice due to their targetability and ease of use. The most commonly used systems are the Class 2 Type II SpCas9 and the Class 2 Type V-A Cas12a. The Type V-A systems in particular are becoming more widely used since their reported specificity in cells is higher than other nucleases, with fewer or no off-target effects. The V-A systems are also advantageous in that the guide RNA is small (42-44 nucleotides compared with approximately 100 nt for SpCas9) and is processed by the nuclease itself following transcription from the CRISPR array, simplifying multiplexed applications with multiple gene edits. Furthermore, the V-A systems have staggered cut sites, which may facilitate directed repair pathways, such as microhomology-dependent targeted integration (MITI).

[0239] The most commonly used Type V-A enzymes require a 5′ protospacer adjacent motif (PAM) next to the chosen target site: 5′-TTTV-3′ for Lachnospiraceae bacterium ND2006 LbCas12a and Acidaminococcus sp. AsCas12a; and 5′-TTV-3′ for Francisella novicida FnCas12a. Recent exploration of orthologs has revealed proteins with less restrictive PAM sequences that are also active in mammalian cell culture, for example YTV, YYN or TTN. However, these enzymes do not fully encompass V-A biodiversity and targetability, and may not represent all possible activities and PAM sequence requirements. Here, thousands of genomic fragments were mined from numerous metagenomes for Type V-A nucleases. The diversity of identified V-A enzymes may have been expanded and novel systems may have been developed into highly targetable, compact, and precise gene editing agents.

### MG Enzymes

[0240] Type V-A CRISPR systems are quickly being adopted for use in a variety of genome editing applications. These programmable nucleases are part of adaptive microbial immune systems, the natural diversity of which has been largely unexplored. Novel families of Type V-A CRISPR enzymes were identified through a large-scale analysis of metagenomes collected from a variety of complex environments, and developed representatives of these systems into gene-editing platforms. The nucleases are phylogenetically diverse and recognize a single guide RNA with specific motifs. The majority of these systems come from uncultivated organisms, some of which encode a divergent Type V effector within the same CRISPR operon. Biochemical analysis uncovered unexpected PAM diversity, indicating that these systems will facilitate a variety of genome engineering applications. The simplicity of guide sequences and activity in human cell lines suggest utility in gene and cell therapies.

[0241] In some aspects, the present disclosure provides for novel Type V-L candidates. Type V-L may be a novel subtype and some sub-families may have been identified. These nucleases are about 1000-1100 amino acids in length. Type V-L may be found in the same CRISPR locus as Type V-A effectors. RuvC catalytic residues may have been identified for Type V-L candidates and these Type V-L candidates may not require tracrRNA. One example of a Type V-L are the MG60 nucleases described herein.

[0242] In some aspects, the present disclosure provides for smaller Type V effectors. Such effectors may be small putative effectors. These effectors may simplify delivery and may extend therapeutic applications.

[0243] In some aspects, the present disclosure provides for novel type V effector. Such an effector may be MG70 as described herein. MG70 may be an ultra-small enzyme of about 373 amino acids in length. MG 70 may have a single transposase domain at the N-terminus and may have a predicted tracrRNA.

[0244] In some aspects, the present disclosure provides for a smaller Type V effector. Such an effector may be MG81 described herein. MG81 may be about 500-700 amino acids in length and may contain RuvC, and HTH DNA binding domains.

[0245] In one aspect, the present disclosure provides for an engineered nuclease system discovered through metagenomic sequencing. In some cases, the metagenomic sequencing is conducted on samples. In some cases, the samples may be collected from a variety of environments. Such environments may be a human microbiome, an animal microbiome, environments with high temperatures, environments with low temperatures. Such environments may include sediment.

[0246] In one aspect, the present disclosure provides for an engineered nuclease system comprising (a) an endonuclease. In some cases, the endonuclease is a Cas endonuclease. In some cases, the endonuclease is a class 2, type V Cas endonuclease. In some cases, the endonuclease is a class 2, type V-A Cas endonuclease. In some cases, the endonuclease is derived from an uncultivated microorganism. The endonuclease may comprise a RuvC domain. In some cases, the engineered nuclease system comprises (b) an engineered guide RNA. In some cases, the engineered guide RNA is configured to form a complex with the endonuclease. In some cases, the engineered guide RNA comprises a spacer sequence. In some cases, the spacer sequence is configured to hybridize to a target nucleic acid sequence.

[0247] In one aspect, the present disclosure provides for an engineered nuclease system comprising (a) an endonuclease. In some cases, the endonuclease has at least about 70% sequence identity to any one of SEQ ID NOs: 1-3470. In some cases, the endonuclease has at least about 20%, at least about 25%, at least about 30%, at least about 35%, at least about 40%, at least about 45%, at least about 50%, at least about 55%, at least about 60%, at least about 65%, at least about 70%, at least about 75%, at least about 80%, at least about 85%, at least about 90%, at least about 91%, at least about 92%, at least about 93%, at least about 94%, at least about 95%, at least about 96%, at least about 97%, at least about 98%, or at least about 99% identity to any one of SEQ ID NOs: 1-3470.

[0248] In some cases, the endonuclease comprises a variant having at least about 20%, at least about 25%, at least about 30%, at least about 35%, at least about 40%, at least about 45%, at least about 50%, at least about 55%, at least about 60%, at least about 65%, at least about 70%, at least about 75%, at least about 80%, at least about 85%, at least about 90%, at least about 91%, at least about 92%, at least about 93%, at least about 94%, at least about 95%, at least about 96%, at least about 97%, at least about 98%, or at least about 99% identity to any one of SEQ ID NOs: 1-3470. In some cases, the endonuclease may be substantially identical to any one of SEQ ID NOs: 1-3470.

[0249] In some cases, the engineered nuclease system comprises an engineered guide RNA. In some cases, the engineered guide RNA is configured to form a complex with the endonuclease. In some cases, the engineered guide RNA comprises a spacer sequence. In some cases, the spacer sequence is configured to hybridize to a target nucleic acid sequence.

[0250] In one aspect, the present disclosure provides an engineered nuclease system comprising (a) an endonuclease. In some cases, the endonuclease is configured to bind to a protospacer adjacent motif (PAM) sequence. In some cases, the PAM sequence is substantially identical to any one of SEQ ID NOs: 3863-3913. In some cases, the PAM sequence any one of SEQ ID NOs: 3863-3913. In some cases, the endonuclease is a Cas endonuclease. In some cases, the endonuclease is a class 2 Cas endonuclease. In some cases, the endonuclease is a class 2, type V Cas endonuclease. In some cases, the endonuclease is a class 2, type V-A Cas endonuclease. In some cases, the engineered nuclease system comprises (b) an engineered guide RNA. In some cases, the engineered guide RNA is configured to form a complex with the endonuclease. In some cases, the engineered guide RNA comprises a spacer sequence. In some cases, the spacer sequence is configured to hybridize to a target nucleic acid sequence.

[0251] In some cases, the endonuclease is not a Cpf1 or Cms1 endonuclease. In some cases, the endonuclease further comprises a zinc finger-like domain.

[0252] In some cases, the guide RNA comprises a sequence with at least 80% sequence identity to the first 19 nucleotides or the non-degenerate nucleotides of SEQ ID NO: 3471, 3539, 3551-3559, 3608-3609, 3612, 3636-3637, 3640-3641, 3644-3645, 3648-3649, 3652-3653, 3656-3657, 3660-3661, 3664-3667, 3671-3672, 3677-3678, 3695-3696, 3729-3730, 3734-3735, or 3851-3857. In some cases, the guide RNA comprises a sequence with at least about 20%, at least about 25%, at least about 30%, at least about 35%, at least about 40%, at least about 45%, at least about 50%, at least about 55%, at least about 60%, at least about 65%, at least about 70%, at least about 75%, at least about 80%, at least about 85%, at least about 90%, at least about 91%, at least about 92%, at least about 93%, at least about 94%, at least about 95%, at least about 96%, at least about 97%, at least about 98%, or at least about 99% identity to the first 19 nucleotides or the non-degenerate nucleotides of SEQ ID NO: 3471, 3539, 3551-3559, 3608-3609, 3612, 3636-3637, 3640-3641, 3644-3645, 3648-3649, 3652-3653, 3656-3657, 3660-3661, 3664-3667, 3671-3672, 3677-3678, 3695-3696, 3729-3730, 3734-3735, or 3851-3857. In some cases, the guide RNA comprises a variant having at least about 20%, at least about 25%, at least about 30%, at least about 35%, at least about 40%, at least about 45%, at least about 50%, at least about 55%, at least about 60%, at least about 65%, at least about 70%, at least about 75%, at least about 80%, at least about 85%, at least about 90%, at least about 91%, at least about 92%, at least about 93%, at least about 94%, at least about 95%, at least about 96%, at least about 97%, at least about 98%, or at least about 99% identity to the first 19 nucleotides or the non-degenerate nucleotides of SEQ ID NO: 3471, 3539, 3551-3559, 3608-3609, 3612, 3636-3637, 3640-3641, 3644-3645, 3648-3649, 3652-3653, 3656-3657, 3660-3661, 3664-3667, 3671-3672, 3677-3678, 3695-3696, 3729-3730, 3734-3735, or 3851-3857. In some cases, the guide RNA comprises a sequence which is substantially identical to the first 19 nucleotides or the non-degenerate nucleotides of SEQ ID NO: 3471, 3539, 3551-3559, 3608-3609, 3612, 3636-3637, 3640-3641, 3644-3645, 3648-3649, 3652-3653, 3656-3657, 3660-3661, 3664-3667, 3671-3672, 3677-3678, 3695-3696, 3729-3730, 3734-3735, or 3851-3857.

[0253] In some cases, the guide RNA comprises a sequence with at least about 20%, at least about 25%, at least about 30%, at least about 35%, at least about 40%, at least about 45%, at least about 50%, at least about 55%, at least about 60%, at least about 65%, at least about 70%, at least about 75%, at least about 80%, at least about 85%, at least about 90%, at least about 91%, at least about 92%, at least about 93%, at least about 94%, at least about 95%, at least about 96%, at least about 97%, at least about 98%, or at least about 99% identity to the first 19 nucleotides or the non-degenerate nucleotides of SEQ ID NO: 3471, 3539, 3551-3559, 3608-3609, 3612, 3636-3637, 3640-3641, 3644-3645, 3648-3649, 3652-3653, 3656-3657, 3660-3661, 3664-3667, 3671-3672, 3677-3678, 3695-3696, 3729-3730, 3734-3735, or 3851-3857. In some cases, the endonuclease is configured to bind to the engineered guide RNA. In some cases, the Cas endonuclease is configured to bind to the engineered guide RNA. In some cases, the class 2 Cas endonuclease is configured to bind to the engineered guide RNA. In some cases, the class 2, type V Cas endonuclease is configured to bind to the engineered guide RNA. In some cases, the class 2, type V-A Cas endonuclease is configured to bind to the engineered guide RNA.

[0254] In some cases, the endonuclease is configured to bind to a protospacer adjacent motif (PAM) sequence comprising any one of SEQ ID NOs: 3863-3913.

[0255] In some cases, the guide RNA comprises a sequence complementary to a eukaryotic, fungal, plant, mammalian, or human genomic polynucleotide sequence. In some cases, the guide RNA comprises a sequence complementary to a eukaryotic genomic polynucleotide sequence. In some cases, the guide RNA comprises a sequence complementary to a fungal genomic polynucleotide sequence. In some cases, the guide RNA comprises a sequence complementary to a plant genomic polynucleotide sequence. In some cases, the guide RNA comprises a sequence complementary to a mammalian genomic polynucleotide sequence. In some cases, the guide RNA comprises a sequence complementary to a human genomic polynucleotide sequence.

[0256] In some cases, the guide RNA is 30-250 nucleotides in length. In some cases, the guide RNA is 42-44 nucleotides in length. In some cases, the guide RNA is 42 nucleotides in length. In some cases, the guide RNA is 43 nucleotides in length. In some cases, the guide RNA is 44 nucleotides in length. In some cases, the guide RNA is 85-245 nucleotides in length. In some cases, the guide RNA is more than 90 nucleotides in length. In some cases, the guide RNA is less than 245 nucleotides in length.

[0257] In some cases, the endonuclease may comprise a variant having one or more nuclear localization sequences (NLSs). The NLS may be proximal to the N- or C-terminus of the endonuclease. The NLS may be appended N-terminal or C-terminal to any one of SEQ ID NOs: 3938-3953, or to a variant having at least about 20%, at least about 25%, at least about 30%, at least about 35%, at least about 40%, at least about 45%, at least about 50%, at least about 55%, at least about 60%, at least about 65%, at least about 70%, at least about 75%, at least about 80%, at least about 85%, at least about 90%, at least about 91%, at least about 92%, at least about 93%, at least about 94%, at least about 95%, at least about 96%, at least about 97%, at least about 98%, or at least about 99% identity to any one of SEQ ID NOs: 3938-3953. In some cases, the NLS may comprise a sequence substantially identical to any one of SEQ ID NOs: 3938-3953.

TABLE 1
Example NLS Sequences that may be used with
Cas Effectors according to the disclosure.

| | NLS amino acid | SEQ ID |
|---|---|---|
| Source | sequence | NO: |
| SV40 | PKKKRKV | 3938 |
| nucleoplasmin | KRPAATKKAGQAKKKK | 3939 |
| bipartite NLS | | |
| c-myc NLS | PAAKRVKLD | 3940 |
| c-myc NLS | RQRRNELKRSP | 3941 |
| hRNPA1 M9 NLS | NQSSNFGPMKGGNFGGRSSGP | 3942 |
| | YGGGGQYFAKPRNQGGY | |
| Importin-alpha IBB | RMRIZFKNKGKDTAELRRRRV | 3943 |
| domain | EVSVELRKAKKDEQILKRRNV | |
| Myoma T protein | VSRKRPRP | 3944 |
| Myoma T protein | PPKKARED | 3945 |
| p53 | PQPKKKPL | 3946 |
| mouse c-abl IV | SALIKKKKKMAP | 3947 |
| influenza virus NS1 | DRLRR | 3948 |
| influenza virus NS1 | PKQKKRK | 3949 |
| Hepatitis virus delta | RKLKKKIKKL | 3950 |
| antigen | | |
| mouse Mx1 protein | REKKKFLKRR | 3951 |
| human poly (ADP- | KRKGDEVDGVDEVAKKKSKK | 3952 |
| ribose) polymerase | | |
| steroid hormonc | RKCLQAGMNLEARKTKK | 3953 |
| receptors (human) | | |
| glucocorticoid | | |

[0258] In some cases, the engineered nuclease system further comprises a single- or double stranded DNA repair template. In some cases, the engineered nuclease system further comprises a single-stranded DNA repair template. In some cases, the engineered nuclease system further comprises a double-stranded DNA repair template. In some cases, the single- or double-stranded DNA repair template may comprise from 5′ to 3′: a first homology arm comprising a sequence of at least 20 nucleotides 5′ to said target deoxyribonucleic acid sequence, a synthetic DNA sequence of at least 10 nucleotides, and a second homology arm comprising a sequence of at least 20 nucleotides 3′ to said target sequence.

[0259] In some cases, the first homology arm comprises a sequence of at least 40, at least 50, at least 60, at least 70, at least 80, at least 90, at least 100, at least 110, at least 120, at least 130, at least 140, at least 150, at least 175, at least 200, at least 250, at least 300, at least 400, at least 500, at least 750, or at least 1000 nucleotides. In some cases, the second homology arm comprises a sequence of at least 40, at least 50, at least 60, at least 70, at least 80, at least 90, at least 100, at least 110, at least 120, at least 130, at least 140, at least 150, at least 175, at least 200, at least 250, at least 300, at least 400, at least 500, at least 750, or at least 1000 nucleotides.

[0260] In some cases, the first and second homology arms are homologous to a genomic sequence of a prokaryote. In some cases, the first and second homology arms are homologous to a genomic sequence of a bacteria. In some cases, the first and second homology arms are homologous to a genomic sequence of a fungus. In some cases, the first and second homology arms are homologous to a genomic sequence of a eukaryote.

[0261] In some cases, the engineered nuclease system further comprises a DNA repair template. The DNA repair template may comprise a double-stranded DNA segment. The double-stranded DNA segment may be flanked by one single-stranded DNA segment. The double-stranded DNA segment may be flanked by two single-stranded DNA segments. In some cases, the single-stranded DNA segments are conjugated to the 5′ ends of the double-stranded DNA segment. In some cases, the single stranded DNA segments are conjugated to the 3′ ends of the double-stranded DNA segment.

[0262] In some cases, the single-stranded DNA segments have a length from 1 to 15 nucleotide bases. In some cases, the single-stranded DNA segments have a length from 4 to 10 nucleotide bases. In some cases, the single-stranded DNA segments have a length of 4 nucleotide bases. In some cases, the single-stranded DNA segments have a length of 5 nucleotide bases. In some cases, the single-stranded DNA segments have a length of 6 nucleotide bases. In some cases, the single-stranded DNA segments have a length of 7 nucleotide bases. In some cases, the single-stranded DNA segments have a length of 8 nucleotide bases. In some cases, the single-stranded DNA segments have a length of 9 nucleotide bases. In some cases, the single-stranded DNA segments have a length of 10 nucleotide bases.

[0263] In some cases, the single-stranded DNA segments have a nucleotide sequence complementary to a sequence within the spacer sequence. In some cases, the double-stranded DNA sequence comprises a barcode, an open reading frame, an enhancer, a promoter, a protein-coding sequence, a miRNA coding sequence, an RNA coding sequence, or a transgene.

[0264] In some cases, the engineered nuclease system further comprises a source of Mg²⁺.

[0265] In some cases, the guide RNA comprises a hairpin comprising at least 8 base-paired ribonucleotides. In some cases, the guide RNA comprises a hairpin comprising at least 9 base-paired ribonucleotides. In some cases, the guide RNA comprises a hairpin comprising at least 10 base-paired ribonucleotides. In some cases, the guide RNA comprises a hairpin comprising at least 11 base-paired ribonucleotides. In some cases, the guide RNA comprises a hairpin comprising at least 12 base-paired ribonucleotides.

[0266] In some cases, the endonuclease comprises a sequence at least 70% identical to a variant of any one of SEQ ID NOs: 141, 215, 229, 261, or 1711-1721 or a variant thereof 141, 215, 229, 261, or 1711-1721 or a variant thereof. In some cases, the endonuclease comprises a sequence at least 75% identical to a variant of any one of SEQ ID NOs: 141, 215, 229, 261, or 1711-1721 or a variant thereof. In some cases, the endonuclease comprises a sequence at least 80% identical to a variant of any one of SEQ ID NOs: 141, 215, 229, 261, or 1711-1721 or a variant thereof. In some cases, the endonuclease comprises a sequence at least 85% identical to a variant of any one of SEQ ID NOS: 141, 215, 229, 261, or 1711-1721 or a variant thereof. In some cases, the endonuclease comprises a sequence at least 90% identical to a variant of any one of SEQ ID NOs: 141, 215, 229, 261, or 1711-1721 or a variant thereof. In some cases, the endonuclease comprises a sequence at least 95% identical to a variant of any one of SEQ ID NOs: 141, 215, 229, 261, or 1711-1721 or a variant thereof

[0267] In some cases, the guide RNA structure comprises a sequence of at least 70% identical to the first 19 nucleotides or the non-degenerate nucleotides of SEQ ID NO: 3608. In some cases, the guide RNA structure comprises a sequence of at least 75% identical to the first 19 nucleotides or the non-degenerate nucleotides of SEQ ID NO: 3608. In some cases, the guide RNA structure comprises a sequence of at least 80% identical to the first 19 nucleotides or the non-degenerate nucleotides of SEQ ID NO: 3608. In some cases, the guide RNA structure comprises a sequence of at least 85% identical to the first 19 nucleotides or the non-degenerate nucleotides of SEQ ID NO: 3608. In some cases, the guide RNA structure comprises a sequence of at least 90% identical to the first 19 nucleotides or the non-degenerate nucleotides of SEQ ID NO: 3608. In some cases, the guide RNA structure comprises a sequence of at least 95% identical to the first 19 nucleotides or the non-degenerate nucleotides of SEQ ID NO: 3608. In some cases, the endonuclease is configured to bind to a PAM comprising any one of SEQ ID NOs: 3863-3913.

[0268] In some cases, sequence may be determined by a BLASTP, CLUSTALW, MUSCLE, or MAFFT algorithm, or a CLUSTALW algorithm with the Smith-Waterman homology search algorithm parameters. The sequence identity may be determined by said BLASTP homology search algorithm using parameters of a wordlength (W) of 3, an expectation (E) of 10, and a BLOSUM62 scoring matrix setting gap costs at existence of 11, extension of 1, and using a conditional compositional score matrix adjustment.

[0269] In one aspect, the present disclosure provides an engineered guide RNA comprising (a) a DNA-targeting segment. In some cases, the DNA-targeting segment comprises a nucleotide sequence that is complementary to a target sequence. In some cases, the target sequence is in a target DNA molecule. In some cases, the engineered guide RNA comprises (b) a protein-binding segment. In some cases, the protein-binding segment comprises two complementary stretches of nucleotides. In some cases, the two complementary stretches of nucleotides hybridize to form a double-stranded RNA (dsRNA) duplex. In some cases, the two complementary stretches of nucleotides are covalently linked to one another with intervening nucleotides. In some cases, the engineered guide ribonucleic acid polynucleotide is capable of forming a complex with an endonuclease. In some cases, the endonuclease has at least about 20%, at least about 25%, at least about 30%, at least about 35%, at least about 40%, at least about 45%, at least about 50%, at least about 55%, at least about 60%, at least about 65%, at least about 70%, at least about 75%, at least about 80%, at least about 85%, at least about 90%, at least about 91%, at least about 92%, at least about 93%, at least about 94%, at least about 95%, at least about 96%, at least about 97%, at least about 98%, or at least about 99% identity to any one of SEQ ID NOs: 1-3470. In some cases, the complex targets the target sequence of the target DNA molecule.

[0270] In some cases, the DNA-targeting segment is positioned 3′ of both of the two complementary stretches of nucleotides. In some cases, the protein binding segment comprising a sequence having at least about 20%, at least about 25%, at least about 30%, at least about 35%, at least about 40%, at least about 45%, at least about 50%, at least about 55%, at least about 60%, at least about 65%, at least about 70%, at least about 75%, at least about 80%, at least about 85%, at least about 90%, at least about 91%, at least about 92%, at least about 93%, at least about 94%, at least about 95%, at least about 96%, at least about 97%, at least about 98%, or at least about 99% identity to the first 19 nucleotides or the non-degenerate nucleotides of SEQ ID NO: 3608.

[0271] In some cases, the double-stranded RNA (dsRNA) duplex comprises at least 8 ribonucleotides. In some cases, the double-stranded RNA (dsRNA) duplex comprises at least 9 ribonucleotides. In some cases, the double-stranded RNA (dsRNA) duplex comprises at least 10 ribonucleotides. In some cases, the double-stranded RNA (dsRNA) duplex comprises at least 11 ribonucleotides. In some cases, the double-stranded RNA (dsRNA) duplex comprises at least 12 ribonucleotides.

[0272] In some cases, the deoxyribonucleic acid polynucleotide encodes the engineered guide ribonucleic acid polynucleotide.

[0273] In one aspect, the present disclosure provides a nucleic acid comprising an engineered nucleic acid sequence. In some cases, the engineered nucleic acid sequence is optimized for expression in an organism. In some cases, the nucleic acid encodes an endonuclease. In some cases, the endonuclease is a Cas endonuclease. In some cases, the endonuclease is a class 2 endonuclease. In some cases, the endonuclease is a class2, type V Cas endonuclease. In some cases, the endonuclease is a class2, type V-A Cas endonuclease. In some cases, the endonuclease is derived from an uncultivated microorganism. In some cases, the organism is not the uncultivated organism.

[0274] In some cases, the endonuclease comprises a variant having at least about 20%, at least about 25%, at least about 30%, at least about 35%, at least about 40%, at least about 45%, at least about 50%, at least about 55%, at least about 60%, at least about 65%, at least about 70%, at least about 75%, at least about 80%, at least about 85%, at least about 90%, at least about 91%, at least about 92%, at least about 93%, at least about 94%, at least about 95%, at least about 96%, at least about 97%, at least about 98%, or at least about 99% sequence identity to any one of SEQ ID NOs: 1-3470.

[0275] In some cases, the endonuclease may comprise a variant having one or more nuclear localization sequences (NLSs). The NLS may be proximal to the N- or C-terminus of the endonuclease. The NLS may be appended N-terminal or C-terminal to any one of SEQ ID NOs: 3938-3953, or to a variant having at least about 20%, at least about 25%, at least about 30%, at least about 35%, at least about 40%, at least about 45%, at least about 50%, at least about 55%, at least about 60%, at least about 65%, at least about 70%, at least about 75%, at least about 80%, at least about 85%, at least about 90%, at least about 91%, at least about 92%, at least about 93%, at least about 94%, at least about 95%, at least about 96%, at least about 97%, at least about 98%, or at least about 99% sequence identity to any one of SEQ ID NOs: 3938-3953.

[0276] In some cases, the organism is prokaryotic. In some cases, the organism is bacterial. In some cases, the organism is eukaryotic. In some cases, the organism is fungal. In some cases, the organism is a plant. In some cases, the organism is mammalian. In some cases, the organism is a rodent. In some cases, the organism is human.

[0277] In one aspect, the present disclosure provides an engineered vector. In some cases, the engineered vector comprises a nucleic acid sequence encoding an endonuclease. In some cases, the endonuclease is a Cas endonuclease. In some cases, the endonuclease is a class 2 Cas endonuclease. In some cases, the endonuclease is a class 2, type V Cas endonuclease. In some cases, the endonuclease is a class2, type V-A Cas endonuclease. In some cases, the endonuclease is derived from an uncultivated microorganism.

[0278] In some cases, the engineered vector comprises a nucleic acid described herein. In some cases, the nucleic acid described herein is a deoxyribonucleic acid polynucleotide described herein. In some cases, the vector is a plasmid, a minicircle, a CELiD, an adeno-associated virus (AAV) derived virion, or a lentivirus.

[0279] In one aspect, the present disclosure provides a cell comprising a vector described herein.

[0280] In one aspect, the present disclosure provides a method of manufacturing an endonuclease. In some cases, the method comprises cultivating the cell.

[0281] In one aspect, the present disclosure provides a method for binding, cleaving, marking, or modifying a double-stranded deoxyribonucleic acid polynucleotide. The method may comprise contacting the double-stranded deoxyribonucleic acid polynucleotide with an endonuclease. In some cases, the endonuclease is a Cas endonuclease. In some cases, the endonuclease is a class 2 Cas endonuclease. In some cases, the endonuclease is a class 2, type V Cas endonuclease. In some cases, the endonuclease is a class2, type V-A Cas endonuclease. In some cases, the endonuclease is in complex with an engineered guide RNA. In some cases, the engineered guide RNA is configured to bind to the endonuclease. In some cases, the engineered guide RNA is configured to bind to the double-stranded deoxyribonucleic acid polynucleotide. In some cases, the engineered guide RNA is configured to bind to the endonuclease and to the double-stranded deoxyribonucleic acid polynucleotide. In some cases, the double-stranded deoxyribonucleic acid polynucleotide comprises a protospacer adjacent motif (PAM). In some cases, the PAM comprises a sequence comprising any one of SEQ ID NOs: 3863-3913.

[0282] In some cases, the double-stranded deoxyribonucleic acid polynucleotide comprises a first strand comprising a sequence complementary to a sequence of the engineered guide RNA and a second strand comprising the PAM. In some cases, the PAM is directly adjacent to the 5′ end of the sequence complementary to the sequence of the engineered guide RNA. In some cases, the endonuclease is not a Cpf1 endonuclease or a Cms1 endonuclease. In some cases, the endonuclease is derived from an uncultivated microorganism. In some cases, the double-stranded deoxyribonucleic acid polynucleotide is a eukaryotic, plant, fungal, mammalian, rodent, or human double-stranded deoxyribonucleic acid polynucleotide. In some cases, the PAM comprises any one of SEQ ID NOs: 3863-3913.

[0283] In one aspect, the present disclosure provides a method of modifying a target nucleic acid locus. The method may comprise delivering to the target nucleic acid locus the engineered nuclease system described herein. In some cases, the endonuclease is configured to form a complex with the engineered guide ribonucleic acid structure. In some cases, the complex is configured such that upon binding of the complex to the target nucleic acid locus, the complex modifies the target nucleic acid locus.

[0284] In some cases, modifying the target nucleic acid locus comprises binding, nicking, cleaving, or marking said target nucleic acid locus. In some cases, the target nucleic acid locus comprises deoxyribonucleic acid (DNA) or ribonucleic acid (RNA). In some cases, the target nucleic acid comprises genomic DNA, viral DNA, viral RNA, or bacterial DNA. In some cases, the target nucleic acid locus is in vitro. In some cases, the target nucleic acid locus is within a cell. In some cases, the cell is a prokaryotic cell, a bacterial cell, a eukaryotic cell, a fungal cell, a plant cell, an animal cell, a mammalian cell, a rodent cell, a primate cell, or a human cell.

[0285] In some cases, delivery of the engineered nuclease system to the target nucleic acid locus comprises delivering the nucleic acid described herein or the vector described herein. In some cases, delivery of engineered nuclease system to the target nucleic acid locus comprises delivering a nucleic acid comprising an open reading frame encoding the endonuclease. In some cases, the nucleic acid comprises a promoter. In some cases, the open reading frame encoding the endonuclease is operably linked to the promoter.

[0286] In some cases, delivery of the engineered nuclease system to the target nucleic acid locus comprises delivering a capped mRNA containing the open reading frame encoding the endonuclease. In some cases, delivery of the engineered nuclease system to the target nucleic acid locus comprises delivering a translated polypeptide. In some cases, delivery of the engineered nuclease system to the target nucleic acid locus comprises delivering a deoxyribonucleic acid (DNA) encoding the engineered guide RNA operably linked to a ribonucleic acid (RNA) pol III promoter.

[0287] In some cases, the endonuclease induces a single-stranded break or a double-stranded break at or proximal to the target locus. In some cases, the endonuclease induces a staggered single stranded break within or 3′ to said target locus.

[0288] In some cases, effector repeat motifs are used to inform guide design of MG nucleases. For example, the processed gRNA in Type V-A systems comprises the last 20-22 nucleotides of a CRISPR repeat. This sequence may be synthesized into a crRNA (along with a spacer) and tested in vitro, along with the synthesized nucleases, for cleavage on a library of possible targets. Using this method, the PAM may be determined. In some cases, Type V-A enzymes may use a “universal” gRNA. In some cases, Type V enzymes may utilize a unique gRNA.

### Lipid Nanoparticles

[0289] Lipid nanoparticles as described herein can be 4-component lipid nanoparticles. Such nanoparticles can be configured for delivery of RNA or other nucleic acids (e.g. synthetic RNA, mRNA, or in vitro-synthesized mRNA) and can be generally formulated as described in WO2012135805A2, which is incorporated by reference herein for all purposes. Such nanoparticles can generally comprise: (a) a cationic lipid (e.g. 98N12-5 (TETA5-LAP), DLin DMA, DLin-K-DMA (2,2-Dilinoleyl-4-dimethylaminomethyl-[1,3]-dioxolane), DLin-KC2-DMA, DLin-MC3-DMA, or C12-200), (b) a neutral lipid (e.g. DSPC or DOPE), (c) a sterol (e.g. cholesterol or a cholesterol analog), and (d) a PEG-modified lipid (e.g. PEG-DMG).

[0290] The cationic lipid referred to herein as “C12-200” is disclosed by Love et al., Proc Natl Acad Sci USA. 2010 107:1864-1869 and Liu and Huang, Molecular Therapy. 2010 669-670; both of which are herein incorporated by reference in their entirety. Cationic lipid formulations can include particles comprising either 3 or 4 or more components in addition to polynucleotide, primary construct, or RNA (e.g. mRNA). As an example, formulations with certain cationic lipids include, but are not limited to, 98N12-5, and may contain 42% lipidoid, 48% cholesterol, and 10% PEG (C14 or greater alkyl chain length). As another example, formulations with certain lipidoids include, but are not limited to, C12-200 and may contain 50% cationic lipid, 10% disteroylphosphatidyl choline, 38.5% cholesterol, and 1.5% PEG-DMG.

[0291] In some embodiments, lipid nanoparticles are formulated as described in U.S. Pat. No. 10,709,779B2, which is incorporated in its entirety by reference herein. In some embodiments, the cationic lipid nanoparticle comprises a cationic lipid, a PEG-modified lipid, a sterol, and a non-cationic lipid. In some embodiments, the cationic lipid is selected from the group consisting of 98N12-5 (TETA5-LAP), DLin DMA, DLin-K-DMA (2,2-Dilinoleyl-4-dimethylaminomethyl-[1,3]-dioxolane), DLin-KC2-DMA, DLin-MC3-DMA, and C12-200. In some embodiments, the cationic lipid nanoparticle has a molar ratio of about 20-60% cationic lipid, about 5-25% non-cationic lipid, about 25-55% sterol, and about 0.5-15% PEG-modified lipid. In some embodiments, the cationic lipid nanoparticle comprises a molar ratio of about 50% cationic lipid, about 1.5% PEG-modified lipid, about 38.5% cholesterol, and about 10% non-cationic lipid. In some embodiments, the cationic lipid nanoparticle comprises a molar ratio of about 55% cationic lipid, about 2.5% PEG-modified lipid, about 32.5% cholesterol, and about 10% non-cationic lipid. In some embodiments, the cationic lipid is an ionizable cationic lipid, the non-cationic lipid is a neutral lipid, and the sterol is a cholesterol. In some embodiments, the cationic lipid nanoparticle has a molar ratio of 50:38.5:10:1.5 of cationic lipid:cholesterol: PEG2000-DMG:DSPC or DMG:DOPE. In some embodiments, lipid nanoparticles as described herein can comprise cholesterol, 1,2-dioleoyl-sn-glycero-3-phosphoethanolamine (DOPE), 1,1′-((2-(4-(2-((2-(bis(2-hydroxydodecyl)amino)ethyl) (2-hydroxydodecyl)amino)ethyl) piperazin-1-yl)ethyl) azanediyl)bis(dodecan-2-ol) (C12-200), and DMG-PEG-2000 at molar ratios of 47.5:16:35:1.5.

[0292] Systems of the present disclosure may be used for various applications, such as, for example, nucleic acid editing (e.g., gene editing), binding to a nucleic acid molecule (e.g., sequence-specific binding). Such systems may be used, for example, for addressing (e.g., removing or replacing) a genetically inherited mutation that may cause a disease in a subject, inactivating a gene in order to ascertain its function in a cell, as a diagnostic tool to detect disease-causing genetic elements (e.g. via cleavage of reverse-transcribed viral RNA or an amplified DNA sequence encoding a disease-causing mutation), as deactivated enzymes in combination with a probe to target and detect a specific nucleotide sequence (e.g. sequence encoding antibiotic resistance int bacteria), to render viruses inactive or incapable of infecting host cells by targeting viral genomes, to add genes or amend metabolic pathways to engineer organisms to produce valuable small molecules, macromolecules, or secondary metabolites, to establish a gene drive element for evolutionary selection, to detect cell perturbations by foreign small molecules and nucleotides as a biosensor.

### EXAMPLES

### Example 1—Gene Editing Outcomes at the DNA Level for Human GPR146 in Hep3B Cells

[0293] Nucleofection of MG29-1 RNPs (126 μmol protein/160 μmol guide) was performed into Hep3B cells (100,000) using the Lonza 4D electroporator. Cells were harvested and genomic DNA prepared three days post-transfection. PCR primers appropriate for use in NGS-based DNA sequencing were generated, optimized, and used to amplify the individual target sequences for each guide RNA. The amplicons were sequenced on an Illumina MiSeq machine and analyzed with a proprietary Python script to measure gene editing (FIG. 1).

### Example 2—Gene Editing Outcomes at the DNA Level for Mouse GPR146 in Hepa1-6 Cells

[0294] Nucleofection of MG29-1 RNPs (126 μmol protein/160 μmol guide) was performed into Hepa1-6 cells (100,000) using the Lonza 4D electroporator. Cells were harvested and genomic DNA prepared three days post-transfection. PCR primers appropriate for use in NGS-based DNA sequencing were generated, optimized, and used to amplify the individual target sequences for each guide RNA. The amplicons were sequenced on an Illumina MiSeq machine and analyzed with a proprietary Python script to measure gene editing. (FIG. 2).

### Example 3—Gene Editing Outcomes at the DNA Level for Human ANGPTL3 in Hep3B Cells

[0295] Nucleofection of MG29-1 RNPs (126 μmol protein/160 μmol guide) was performed into Hep3B cells (100,000) using the Lonza 4D electroporator. Cells were harvested and genomic DNA prepared three days post-transfection. PCR primers appropriate for use in NGS-based DNA sequencing were generated, optimized, and used to amplify the individual target sequences for each guide RNA. The amplicons were sequenced on an Illumina MiSeq machine and analyzed with a proprietary Python script to measure gene editing (FIG. 3).

### Example 4—Gene Editing Outcomes at the DNA Level for Human GPR145 in Primary Human Hepatocytes

[0296] Lipofection with MessengerMax of MG29-1 mRNA and guide (1.25 μg mRNA, 1:20 nuclease: guide molar ratio) was performed in primary human hepatocytes (8×10⁵-1.0×10⁶ viable cells/guide depending on donor). Cells were harvested and genomic DNA prepared three days post-transfection. PCR primers appropriate for use in NGS-based DNA sequencing were used to amplify the individual target sequences for each guide RNA. The amplicons were sequenced on an Illumina MiSeq machine and analyzed with a proprietary Python script to measure gene editing (FIG. 4).

### Example 5—Gene Editing Outcomes at the DNA Level for Mouse GPR145 in Primary Mouse Hepatocytes

[0297] Lipofection with MessengerMax of MG29-1 mRNA and guide (0.42 μg mRNA, 1:20 nuclease: guide molar ratio) was performed in primary mouse hepatocytes (1×10⁵ viable cells/guide). Cells were harvested and genomic DNA prepared three days post-transfection. PCR primers appropriate for use in NGS-based DNA sequencing were used to amplify the individual target sequences for each guide RNA. The amplicons were sequenced on an Illumina MiSeq machine and analyzed with a proprietary Python script to measure gene editing (FIG. 5).

### Example 6—in Silico Identification of Novel Type V Nucleases in the MG29 and MG91 Families

[0298] Homology searches were performed to discover proteins predicted to be related to nuclease sequences in the MG29 family of large type V nucleases and the MG91 family of compact type V nucleases. Searches were performed using HMMER software (http://hmmer.org/). Large type V sequence hits were retained if the hmmsearch e-value was ≤10⁻⁵ and the amino acid sequence length was greater than or equal to 700 amino acids. Compact type V nuclease sequence hits were retained if: (1) the hmmsearch e-value was ≤10⁻⁵, (ii) the genes encoding the nuclease were within 1 Kb from a CRISPR array, and (iii) the amino acid sequence length ranged between 350 and 700 aa. MMSegs2 (https://github.com/soedinglab/MMseqs2) was used to separately cluster sequences at 100% amino acid identity, with coverage mode 1 and 80% coverage of the target sequence (parameters --cov-mode 1-c 0.8 --min-seq-id 1.0). Sequence representatives for each family were chosen to build a multiple sequence alignment using MAFFT (https://mafft.cbrc.jp/alignment/software/) with the Needleman-Wunsch algorithm for global alignment, and FastTree (https://doi.org/10.1371/journal.pone.0009490) was used to build a phylogenetic tree. Novel sequences clustering with previously discovered MG29 sequences were identified as additional members of the MG29 family. Additionally, careful examination of individual clades on the compact type V tree phylogenetic tree led to the identification of novel nuclease sequences in the MG91 family (SEQ ID NOs: 6274-6281).

### Example 7—MG91 Family sgRNA Prediction and Nuclease Activity Assays

De Novo Prediction of tracrRNA Sequences Encoded in Intergenic Regions

[0299] Compact type V MG91 nuclease proteins from a distinct clade were targeted for in silico characterization of genomic regions encoding CRISPR Cas systems. To identify intergenic regions potentially encoding tracrRNAs, individual protein clades (with confirmed catalytic residues) were chosen for visual inspection of contigs encoding the compact type V nuclease genes and a CRISPR array. Genomic regions devoid of coding sequence predictions between two genes, or between genes and CRISPR arrays, were manually annotated as intergenic regions. Intergenic regions upstream and downstream from a nuclease gene as well as a CRISPR array (e.g., at the same location relative to a nuclease and the corresponding CRISPR array) were consistently assigned labels across contigs encoding homologous nucleases. Nucleotide sequences of matching intergenic regions were aligned and inspected for conserved motifs across sequences. Similarly, nucleotide sequences from non-matching intergenic regions within clades were aligned and inspected. By comparison, intergenic regions with the highest degree of conservation among them were identified as potentially encoding tracrRNAs (e.g., SEQ ID NO: 6282).

Mapping Active tracrRNA Sequences to Contigs for Identification of tracrRNA Boundaries

[0300] To refine the boundaries of the non-coding intergenic region containing a potential tracrRNA for the MG91-2 nuclease, the sequence of an active tracrRNA from previous assays was mapped to the contig using Geneious 2022.2.2 (https://www.geneious.com). The aligned region was extracted and inferred to correspond to the actual sequence of the tracrRNA.

Covariance Model Prediction of Novel tracrRNA Sequences

[0301] Previously discovered active tracrRNA sequences in the MG91 family were used to generate covariance models to predict additional tracrRNAs. Covariance models were built from a multiple sequence alignment (MSA) of the active and predicted tracrRNA sequences. The secondary structure of the MSA was obtained with RNAalifold (Vienna Package), and the covariance models were built with Infernal packages (http://eddylab.org/infernal/). Contigs containing candidate nucleases (e.g., MG91-10, MG91-69, MG91-107, MG91-155, MG91-201, MG91-666, MG91-668, MG91-671, MG91-672 and MG91-673) were searched using the covariance models with the Infernal command ‘cmsearch’. TracrRNA candidates were tested in vitro, and in an iterative process, sequences from active candidates were used to improve the covariance models and search for additional tracrRNAs in the intergenic regions associated with other nuclease candidates.

Secondary Structure Prediction and sgRNA Design

[0302] Intergenic regions (and extractions) potentially encoding tracrRNAs for MG91-2, MG91-667 (SEQ ID NO: 6275), and MG91-670 (SEQ ID NO: 6278) nucleases were folded with the corresponding repeat sequences using different energy models (Turner 2004 or Andronescu 2007) and parameters (for example, 20° C., 37° C., dangling ends) (FIG. 6A). Similarly, covariance model-predicted tracrRNAs for nucleases MG91-10, MG91-69, MG91-107, MG91-155, MG91-201, MG91-666 (SEQ ID NO: 6274), MG91-668 (SEQ ID NO: 6276), MG91-671 (SEQ ID NO: 6279), MG91-672 (SEQ ID NO: 6280), and MG91-673 (SEQ ID NO: 6281), and their associated CRISPR repeat sequence, were folded for sgRNA secondary structure prediction (FIGS. 6B and 6C). The stability of potential secondary RNA structures was visually inspected based on base pairs probabilities.

[0303] All folds with high base pair probabilities were modified to generate sgRNAs as follows: the 3′ end of the predicted tracrRNA sequence as well as the 5′ end of the repeat sequence were trimmed, and then connected with a GAAA tetraloop. At a later step, strings of four consecutive Us were replaced by single or paired mutations to prevent early termination of transcription and immunogenicity in mammalian cells, while preserving the secondary structure of the sgRNAs.

### In Vitro Cleavage Activity, PAM Sequence and Cut Site Determination

[0304] 5 nM of nuclease amplified DNA templates and 25 nM sgRNA amplified DNA templates (including one of the spacer sequences listed in Table 2) were expressed at 37° C. for 3 hours with PURExpress® In Vitro Protein Synthesis Kit (New England Biolabs Inc.).

TABLE 2
Spacer sequences for tested guides

| Code | Sequence |
|---|---|
| U67 spacer | GTCGAGGCTTGCGACGTGGT |
| U40 spacer | TGGAGATATCTTGAACCTTG |

[0305] Plasmid library DNA cleavage reactions were carried out by mixing 5 nM of the target library representing all possible 8N PAMs, a 5-fold dilution of PURExpress expressions, 10 nM Tris-HCl, 10 nM MgCl₂ and, 100 mM NaCl at 37° C. for 2 hours. Reactions were stopped and cleaned with HighPrep™ PCR clean up beads (MAGBIO Genomics, Inc.) and eluted in Tris EDTA pH 8.0 buffer.

[0306] To obtain the PAM sequences and the target strand cleavage site, 3 nM of the cleavage product ends were blunted with 3.33 μM dNTPs, 1×T4 DNA ligase buffer, and 0.167 U/μL of Klenow Fragment (New England Biolabs Inc.) at 25° C. for 15 minutes. 1.5 nM of the cleavage products were ligated with 150 nM adapters, 1×T4 DNA ligase buffer (New England Biolabs Inc.), and 20 U/μL T4 DNA ligase (New England Biolabs Inc.) at room temperature for 20 minutes. The ligated products were amplified by PCR with NGS primers and sequenced by NGS.

[0307] To obtain the non-target strand cleavage site, 3 nM of the cleavage product ends were blunted with 0.167 U/μL of Mung Bean Nuclease and 1× Mung Bean Nuclease Buffer (New England Biolabs Inc.) at 30° C. for 30 minutes. The ligated products were amplified by PCR with NGS primers and sequenced by NGS.

[0308] Active proteins that successfully cleaved the PAM library yielded a band around 188 or 205 bp in an agarose gel or an Agilent technologies 4200 TapeStation and D1000 ScreenTape System (FIG. 7).

[0309] PAM sequence logos were made using Seqlogo maker, for both the target strand (FIG. 8A) and in most cases, the non-target strand (FIG. 8B) as well. Histograms of the cut sites obtained for the target strand (FIG. 9A) and the non-target strand (FIG. 9B) were made from the counts of reads at each nucleotide position. The preferred cut positions are shown in FIGS. 9A and 9B and Table 3.

TABLE 3
MG91 nucleases preferred cut site

| | | Target strand | Non-target strand |
|---|---|---|---|
| Nuclease | sgRNA | cutsite | cutsite |
| MG91-2 | MG91-2 sgRNA1 | 22 | 11 |
| MG91-10 | MG91-10 sgRNA2 | 22 | 11 |
| | MG91-10 sgRNA3 | | |
| MG91-69 | MG91-69 sgRNA3 | 22 | 11 |
| MG91-107 | MG91-107 sgRNA1 | 22 | 10 & 11 |
| | MG91-107 sgRNA2 | | |
| MG91-155 | MG91-155 sgRNA1 | 21-22 | 11 |
| MG91-201 | MG91-201 sgRNA1 | 20 | TBD |
| MG91-666 | MG91-666_sgRNA1 | 22 | TBD |
| MG91-667 | MG91-667_sgRNA1 | 21 | 11 |
| MG91-668 | MG91-668_sgRNA1 | 21 | 11 |
| MG91-671 | MG91-671_sgRNA1 | 22 | 11 |
| MG91-672 | MG91-672_sgRNA1 | 20 & 22 | 10 & 11 |
| MG91-673 | MG91-673_sgRNA1 | 22 | TBD |

### Example 8—sgRNA Structural Engineering (Prophetic)

[0310] Some of the designed guides for effector candidates are long, and this length may pose an obstacle to large-scale production. Furthermore, guide RNAs can be engineered to be smaller, more active, or both. Informed by predicted sgRNA structures, various truncations of guide RNAs are designed and synthesized. Guide quality is evaluated by in vitro RNP activity (cleavage of a linear DNA substrate), RNP stability, and in vivo editing in mammalian cells. Following the initial round of screening, combinatorial truncations are designed in sequential rounds to further improve guide design.

### Example 9—Protein Expression and Purification (Prophetic)

[0311] Isolating pure and functional proteins is essential for extensive in vitro analysis of biochemical properties and mechanistic studies. The expression and purification of MG91 candidates is optimized to obtain proteins of sufficient quantity and quality for such characterizations. All constructs are expressed in E. coli (NEBExpress Iq Competent E. coli, NEB C30371). Constructs are expressed in either the pMGB expression vector (MBP-fused), or the pMGBΔ expression vector (no fusion protein).

### Protein Expression Optimization

[0312] Protein expression protocols for all vectors are similar. Effector constructs are cloned into various expression vectors, with priority for expression without a fusion protein (pMGBΔ). In cases where expression or yield is insufficient, effectors are expressed with either an N-terminal MBP fusion or N-terminal SUMO fusion (Table 4).

TABLE 4
Sequence element glossary

| Element name | Element amino acid sequence |
|---|---|
| 6xHis | HHHHHH |
| (GS)ₙ | GS |
| (GGS)ₙ | GGS |
| (GGGGS)ₙ | GGGGS |
| PSP | LEVQFQGP |
| TEV | ENLYFQG |
| Nucleoplasmin | KRPAATKKAGQAKKKK |
| bipartite NLS | |
| SV40 NLS | PKKKRKV |
| SUMO sequence | TCGGACTCAGAAGTCAATCAAGAAGCTAAGCCA |
| | GAGGTCAAGCCAGAAGTCAAGCCTGAGACTCAC |
| | ATCAATTTAAAGGTGTCCGATGGATCTTCAGAGA |
| | TCTTCTTCAAGATCAAAAAGACCACTCCTTTAAG |
| | AAGGCTGATGGAAGCGTTCGCTAAAAGACAGGG |
| | TAAGGAAATGGACTCCTTAAGATTCTTGTACGAC |
| | GGTATTAGAATTCAAGCTGATCAGACCCCTGAAG |
| | ATTTGGACATGGAGGATAACGATATTATTGAGGC |
| | TCACAGAGAACAGATTGGTGGA |

[0313] One possible workflow is to remove the fusion protein with a targeted protease. Regardless of expression vector, cultures are grown at 37° C. in 2×YT media (1.6% tryptone, 1% yeast extract, 0.5% NaCl) or TB media (Tcknova T0690) with 100 μg/L Carbonicillin. At OD600≈0.8-1.2, cultures are induced with 0.5 mM IPTG (GoldBio 12481) and incubated at 18° C. overnight or 24° C. for 4-6 hrs, depending on construct. Cultures are then harvested by centrifugation at 6,000×g for 10 min, and pellets are resuspended in Nickel_A Buffer (50 mM Tris pH 7.5, 750 mM NaCl, 10 mM MgCl₂, 20 mM imidazole, 0.5 mM EDTA, 5% glycerol, 0.5 mM TCEP) with protease inhibitors (Pierce Protease Inhibitor Tablets, EDTA-free, ThermoFisher A32965) and stored at −80° C.

Protein Purification without a Fusion Protein

[0314] Proteins expressed in this vector have the following sequence architecture: 6×His-(GS) 2-PSP-nucleoplasmin bipartite NLS-(GGS) 1-(GS) 1-MG91-X-(GGS) 3-SV40 NLS (Table 4). Proteins expressed in this vector are denoted MG91-XA. Cell pellets are thawed and the volume supplemented to 120 mL with Cf=0.5% n-Octyl-β-D-glucoside detergent (P212121, CI-00234). Samples are sonicated in an ice-water bath at 75% amplitude for a total processing time of 3 min using a 15 s on/45 s off cycle. Lysates are clarified by centrifugation at 30,000×g for 25 min, and supernatants batch bound to 5 mL Ni-NTA resin (HisPur Ni-NTA Resin, ThermoFisher 88223) for ≥20 min. Samples are loaded onto a gravity column and washed with 30 CV Nickel_A Buffer, then eluted in 4 CV Nickel_B Buffer (Nickel_A Buffer+250 mM imidazole) before concentrating in a 50 kDa MWCO concentrator (Amicon Ultra-15, MilliporeSigma UFC9050). Samples are taken throughout the purification process and run on an SDS-PAGE protein gel (BioRad #4568126), which is imaged on a ChemiDoc in the stain-free channel following 5 min UV activation. Effectors are then loaded onto an S200i 10/300 GL column (Cytiva 28-9909-44) and run into SEC buffer (20 mM Tris·HCl pH 7.5, 250 mM NaCl, 10 mM MgCl₂, 0.5 mM TCEP, 0.5 mM EDTA, 10% glycerol). Peak fractions are pooled and concentrated in a 50 kDa MWCO concentrator.

Protein Purification with a Fusion Protein

[0315] Proteins expressed in this vector have one of the following sequence architectures: 6×His-(GS) 1-MBP-(GS) 1-TEV-nucleoplasmin bipartite NLS-(GGGGS) 3-(GS) 1-MG91-X-(GGS) 3-SV40 NLS, or 6×His-(GS) 1-SUMO-nucleoplasmin bipartite NLS-GGSGS-MG91-X-(GGS) 3-SV40 NLS (Table 4). Constructs are purified identically to non-fused proteins through lysis, clarification, affinity purification, elution in Nickel_B, and concentration in a 50 kDa MWCO concentrator. If the fusion protein is to be removed from the MBP-fused constructs, TEV protease (GenScript Z03030) is added to each sample (Cf=1 UI/μL) and incubated at 4° C. overnight, gently rotating end-over-end. Samples are then centrifuged (21,000×g, 4° C., 10 min) to pellet aggregates, and the supernatant is then batch-bound to 3 mL amylose resin (NEB E8021L) for 30 min at 4° C., then loaded onto a gravity column. The flow-through is collected and concentrated in a 50 kDa MWCO concentrator. Again, samples are centrifuged (21,000×g, 4° C., 10 min) to pellet aggregates before loading on an S200i 10/300 GL column and run into SEC buffer (20 mM Tris HCl pH 7.5, 250 mM NaCl, 10 mM MgCl₂, 0.5 mM TCEP, 0.5 mM EDTA, 10% glycerol). Peak fractions are pooled and concentrated in a 50 kDa MWCO concentrator. Samples are taken throughout the purification process and run on an SDS-PAGE protein gel (BioRad #4568126), which is imaged on a ChemiDoc in the stain-free channel following 5 min UV activation.

### Example 10—In Vitro Cleavage Efficiency with Purified Protein (Prophetic)

[0316] The active fraction of protein aliquots is determined in a linear DNA substrate cleavage assay. Effector proteins are preincubated with a 2-fold molar excess of sgRNA for 20 min at room temperature to form the ribonucleoprotein complex (RNP). Reactions are set up using 25 nM DNA substrate and a titration of RNP from 0.25× to 10× molar excess over substrate. The reaction buffer contains 10 mM Tris pH 7.5, 10 mM MgCl₂, and 100 mM NaCl. The DNA substrate is 522 bp long. Successful cleavage results in fragments of 172 and 350 bp. The reaction is incubated at 37° C. for 60 min, then incubated at 75° C. for 10 min. RNase (NEB T3018) is added to each reaction (Cf=0.33 μg/L), and samples are incubated at 37° C. for 10 min. Proteinase K (NEB P8107) is added to each reaction (Cf=60 units/mL), and samples are incubated at 55° C. for 15 min. The entirety of each reaction is then run on a 1.5% agarose gel with GelGreen dye (Biotium, #41005) and imaged on a ChemiDoc in the GelGreen channel. Percent cleaved substrate is calculated for each lane through densitometry analysis using BioRad's Image Lab software (Version 6.1.0 build 7). Active fraction is determined by the slope of the linear range of cleavage. Using this assay, effector activity is measured using sgRNAs with various spacer lengths (16 nt-26 nt) to determine the optimal spacer length for each effector.

### Example 11—Fluorescence-Based Measurement of Nuclease Activity (Prophetic)

### Novel Cell Line Engineering

[0317] Current assays used to measure in vivo (i.e., in mammalian cell lines) nuclease activity require extensive data analysis and turnaround times of up to a week. To expedite evaluation of in vivo nuclease activity, an immortalized mammalian cell line is engineered to provide immediate data on editing of genomic DNA. K562 mammalian cells, grown in IMDM (Gibco #12440053) and 10% FBS (Corning™ Regular Fetal Bovine Serum, MT35011CV), are used for this assay. K562 mammalian cells are transfected with 12 μmol Cas9 protein (IDT #1081058), 60 μmol sgRNA (Mali et al. Science 2013, 339 (6121), 823-826.), and 1200 ng plasmid (pUC backbone) containing an expression sequence for an mMBP-(GGS) 3-eGFP protein, as well as a gene for resistance to hygromycin to use as a selection marker. Genomic integration of this construct results in constitutive expression under the synthetic MND promoter. Cells are left to grow in the presence of hygromycin for 6 days, passaging every 3 days. Monogenic cell lines are isolated from single cells by sorting individual GFP-expressing cells into a 96-well plate using a Sony MA900 Cell Sorter.

### Fluorescence-Based In-Vivo Nuclease Activity Screen

[0318] Appropriate sgRNAs are designed to direct nuclease cleavage along the mMBP and eGFP genes, such that indel formation produces a frameshift mutation resulting in loss of fluorescence. RNP complexes are formed by combining 100 μmol protein and 120-200 μmol sgRNA and incubating at room temperature for ≥20 min in a final volume of 5 μL. K562 cells are washed in 1×PBS and resuspended in Nucleofector Solution (SF Cell Line 96-well Nucleofector™ Solution) with approximately 200,000 cells per well. Cells and RNP are combined in a Lonza 96-well nucleofection plate (SF Cell Line 96-well Nucleofector™ Kit, V4SC-2096) in a final volume of 25 μL, nucleofected (K562 cells, FF-120), and recovered in IMDM+10% FBS media+hygromycin. Cells are left to recover for 2-3 days at 37° C. To analyze, cells are washed twice with 1×PBS, then stained with 1×PBS+LIVE/DEAD Fixable Near-IR Dead Cell Stain Kit dye (ThermoFisher L10119) for 20 min at room temperature. Cells are washed once more with 1×PBS before being resuspended in 1×PBS and loaded into an Attune NxT, Acoustic Focusing Flow Cytometer (model AFC2) for fluorescence analysis. Positive unedited controls (nucleofected without RNP) and negative controls (non-fluorescent K562 cells) are used to establish positive and negative fluorescence gates, and cell populations are analyzed for loss-of-fluorescence in the GFP channel to evaluate in vivo nuclease activity.

### Example 12—Gene Editing in Human Cells (Prophetic)

[0319] K562 cells purchased from ATCC are cultured according to ATCC protocols. sgRNAs targeting the TRAC or AAVS1 loci are designed based on a set of MG91-recognized PAMs and plasmid-encoded guides. For gene editing experiments, 500 ng of in vitro-synthesized nuclease mRNA and a titration of the indicated sgRNA encoded in a plasmid with a U6 promoter or engineered chemically-synthesized sgRNA are co-nucleofected in 1.5×10⁵ cells using the Lonza 4D Nucleofector (program FF-120). Cells are harvested 72 hours post-electroporation for genomic DNA extraction using QuickExtract (Lucigen #09050) and processed for amplicon next-generation sequencing on an Illumina Miseq. The resulting data are analyzed with an indel calculator script.

TABLE 5
Listing of PAMs referred to herein not included in the sequence listing

| SEQ ID NO: | Description | Type | Organism | Sequence or Comment |
|---|---|---|---|---|
| 3863 | MG19-2 PAM | nucleotide | artificial sequence | TA (Sanger only) |
| 3864 | MG19-3 PAM | nucleotide | artificial sequence | TA (Sanger only) |
| 3865 | MG19-4 PAM | nucleotide | artificial sequence | TR |
| 3866 | MG19-5 PAM | nucleotide | artificial sequence | TTR (Sanger only) |
| 3867 | MG20-1 PAM | nucleotide | artificial sequence | TTA |
| 3868 | MG28-1 PAM (5′) from NGS | nucleotide | artificial sequence | TTTN |
| 3870 | MG29-1 PAM (5′) | nucleotide | artificial sequence | KTTG |
| 3871 | MG29-1 PAM (5′) from NGS | nucleotide | artificial sequence | YYN |
| 3872 | MG29-5 PAM | nucleotide | artificial sequence | YYYN |
| 3873 | MG30-1 PAM (5′) | nucleotide | artificial sequence | TTTn |
| 3874 | MG31-1 PAM | nucleotide | artificial sequence | TTTR |
| 3875 | MG31-1 PAM (5′) from NGS | nucleotide | artificial sequence | YTTN |
| 3876 | MG31-1, MG32-1 PAM (5′) | nucleotide | artificial sequence | YTTm |
| 3877 | MG32-1 PAM (5′) from NGS | nucleotide | artificial sequence | TTTN |
| 3879 | MG57-1 PAM | nucleotide | artificial sequence | YN |
| 3880 | MG57-2 PAM | nucleotide | artificial sequence | YYNW |
| 3881 | MG59-1 PAM | nucleotide | artificial sequence | YYN |
| 3882 | MG59-2 PAM | nucleotide | artificial sequence | YTTV |
| 3883 | MG77-1 PAM | nucleotide | artificial sequence | TTn |
| 3884 | MG77-2 PAM | nucleotide | artificial sequence | TTn |
| 3885 | MG78-1 PAM | nucleotide | artificial sequence | YYN |
| 3886 | MG79-1 PAM | nucleotide | artificial sequence | TTR |
| 3887 | MG79-2 PAM | nucleotide | artificial sequence | TTR (Sanger only) |
| 3888 | MG79-3 PAM | nucleotide | artificial sequence | TTTn (Sanger only) |
| 3889 | MG79-4 PAM | nucleotide | artificial sequence | TTn (Sanger only) |
| 4012 | mAlb29-1-1 PAM | nucleotide | artificial sequence | TTTA |
| 4013 | mAlb29-1-2 PAM | nucleotide | artificial sequence | GTTC |
| 4014 | mAlb29-1-3 PAM | nucleotide | artificial sequence | GTTG |
| 4015 | mAlb29-1-4 PAM | nucleotide | artificial sequence | TTTA |
| 4016 | mAlb29-1-5 PAM | nucleotide | artificial sequence | TTTT |
| 4017 | mAlb29-1-7 PAM | nucleotide | artificial sequence | TTTT |
| 4018 | mAlb29-1-8 PAM | nucleotide | artificial sequence | TTTC |
| 4019 | mAlb29-1-9 PAM | nucleotide | artificial sequence | GTTG |
| 4020 | mAlb29-1-10 PAM | nucleotide | artificial sequence | TTTT |
| 4021 | mAlb29-1-11 PAM | nucleotide | artificial sequence | TTTG |
| 4022 | mAlb29-1-12 PAM | nucleotide | artificial sequence | TTTG |
| 4023 | mAlb29-1-13 PAM | nucleotide | artificial sequence | TTTT |
| 4024 | mAlb29-1-14 PAM | nucleotide | artificial sequence | TTTT |
| 4025 | mAlb29-1-15 PAM | nucleotide | artificial sequence | TTTT |
| 4026 | mAlb29-1-16 PAM | nucleotide | artificial sequence | TTTC |
| 4027 | mAlb29-1-17 PAM | nucleotide | artificial sequence | TTTG |
| 4028 | mAlb29-1-18 PAM | nucleotide | artificial sequence | TTTA |
| 4029 | mAlb29-1-19 PAM | nucleotide | artificial sequence | GTTC |
| 4030 | mAlb29-1-20 PAM | nucleotide | artificial sequence | TTTA |
| 4056 | hAlb g63 PAM | nucleotide | artificial sequence | TTTA |
| 4057 | hAlb g59 PAM | nucleotide | artificial sequence | TTTG |
| 4058 | hAlb g58 PAM | nucleotide | artificial sequence | TTTT |
| 4059 | hAlb_g56 PAM | nucleotide | artificial sequence | TTTA |
| 4060 | hAlb g72 PAM | nucleotide | artificial sequence | TTTC |
| 4061 | hAlb_g70 PAM | nucleotide | artificial sequence | TTTT |
| 4062 | hAlb_g74 PAM | nucleotide | artificial sequence | TTTA |
| 4063 | hAlb g83 PAM | nucleotide | artificial sequence | TTTA |
| 4064 | hAlb_g85 PAM | nucleotide | artificial sequence | TTTC |
| 4065 | hAlb g89 PAM | nucleotide | artificial sequence | TTTT |
| 4066 | hAlb g88 PAM | nucleotide | artificial sequence | TTTT |
| 4067 | hAlb g77 PAM | nucleotide | artificial sequence | TTTA |
| 4068 | hAlb g69 PAM | nucleotide | artificial sequence | TTTT |
| 4069 | hAlb g66 PAM | nucleotide | artificial sequence | TTTG |
| 4070 | hAlb g75 PAM | nucleotide | artificial sequence | TTTT |
| 4071 | hAlb g79 PAM | nucleotide | artificial sequence | TTTC |
| 4072 | hAlb g82 PAM | nucleotide | artificial sequence | TTTA |
| 4073 | hAlb g80 PAM | nucleotide | artificial sequence | TTTG |
| 4074 | hAlb g84 PAM | nucleotide | artificial sequence | TTTG |
| 4075 | hAlb g81 PAM | nucleotide | artificial sequence | TTTT |
| 4076 | hAlb_g90 PAM | nucleotide | artificial sequence | TTTA |
| 4077 | hAlb g87 PAM | nucleotide | artificial sequence | TTTG |
| 4078 | hAlb g86 PAM | nucleotide | artificial sequence | TTTT |
| 4126 | mH29-1 PAM | nucleotide | artificial sequence | TTTG |
| 4127 | mH29-2 PAM | nucleotide | artificial sequence | TTTT |
| 4128 | mH29-3 PAM | nucleotide | artificial sequence | TTTT |
| 4129 | mH29-4 PAM | nucleotide | artificial sequence | GTTG |
| 4130 | mH29-5 PAM | nucleotide | artificial sequence | GTTT |
| 4131 | mH29-6 PAM | nucleotide | artificial sequence | GTTG |
| 4132 | mH29-7 PAM | nucleotide | artificial sequence | GTTG |
| 4133 | mH29-8 PAM | nucleotide | artificial sequence | GTTC |
| 4134 | mH29-9 PAM | nucleotide | artificial sequence | GTTC |
| 4135 | mH29-10 PAM | nucleotide | artificial sequence | GTTG |
| 4136 | mH29-11 PAM | nucleotide | artificial sequence | GTTC |
| 4137 | mH29-12 PAM | nucleotide | artificial sequence | GTTG |
| 4138 | mH29-13 PAM | nucleotide | artificial sequence | GTTG |
| 4139 | mH29-14 PAM | nucleotide | artificial sequence | TTTT |
| 4140 | mH29-15 PAM | nucleotide | artificial sequence | TTTG |
| 4141 | mH29-16 PAM | nucleotide | artificial sequence | TTTC |
| 4142 | mH29-17PAM | nucleotide | artificial sequence | TTTG |
| 4143 | mH29-18 PAM | nucleotide | artificial sequence | TTTA |
| 4144 | mH29-19 PAM | nucleotide | artificial sequence | GTTG |
| 4145 | mH29-20 PAM | nucleotide | artificial sequence | GTTC |
| 4146 | mH29-21 PAM | nucleotide | artificial sequence | GTTA |
| 4147 | mH29-22 PAM | nucleotide | artificial sequence | GTTG |
| 4148 | mH29-23 PAM | nucleotide | artificial sequence | GTTG |
| 4149 | mH29-24 PAM | nucleotide | artificial sequence | TTTA |
| 4150 | mH29-25 PAM | nucleotide | artificial sequence | TTTA |
| 4151 | IH29-26 PAM | nucleotide | artificial sequence | TTTC |
| 4152 | mH29-27 PAM | nucleotide | artificial sequence | TTTG |
| 4153 | mH29-28 PAM | nucleotide | artificial sequence | TTTG |
| 4154 | mH29-29 PAM | nucleotide | artificial sequence | TTTC |
| 4155 | mH29-30 PAM | nucleotide | artificial sequence | TTTT |
| 4156 | mH29-31 PAM | nucleotide | artificial sequence | GTTA |
| 4157 | mH29-32 PAM | nucleotide | artificial sequence | GTTT |
| 4158 | mH29-33 PAM | nucleotide | artificial sequence | GTTT |
| 4159 | mH29-34 PAM | nucleotide | artificial sequence | GTTG |
| 4160 | mH29-35 PAM | nucleotide | artificial sequence | GTTG |
| 4161 | mH29-36 PAM | nucleotide | artificial sequence | TTTA |
| 4162 | mH29-37 PAM | nucleotide | artificial sequence | TTTC |
| 4163 | mH29-38 PAM | nucleotide | artificial sequence | TTTC |
| 4164 | mH29-39 PAM | nucleotide | artificial sequence | GTTA |
| 4165 | mH29-40 PAM | nucleotide | artificial sequence | TTTT |
| 4166 | mH29-41 PAM | nucleotide | artificial sequence | TTTG |
| 4167 | mH29-42 PAM | nucleotide | artificial sequence | TTTC |
| 4168 | mH29-43 PAM | nucleotide | artificial sequence | TTTG |
| 4169 | mH29-44 PAM | nucleotide | artificial sequence | TTTT |
| 4170 | mH29-45 PAM | nucleotide | artificial sequence | TTTG |
| 4226 | hH29-1 PAM | nucleotide | artificial sequence | TTTA |
| 4227 | hH29-2 PAM | nucleotide | artificial sequence | TTTG |
| 4228 | hH29-3 PAM | nucleotide | artificial sequence | TTTG |
| 4229 | hH29-4 PAM | nucleotide | artificial sequence | TTTG |
| 4230 | hH29-5 PAM | nucleotide | artificial sequence | TTTC |
| 4231 | hH29-6 PAM | nucleotide | artificial sequence | TTTC |
| 4232 | hH29-7 PAM | nucleotide | artificial sequence | TTTT |
| 4233 | hH29-8 PAM | nucleotide | artificial sequence | TTTG |
| 4234 | hH29-9 PAM | nucleotide | artificial sequence | TTTA |
| 4235 | hH29-10 PAM | nucleotide | artificial sequence | TTTT |
| 4236 | hH29-11 PAM | nucleotide | artificial sequence | TTTT |
| 4237 | hH29-12 PAM | nucleotide | artificial sequence | TTTA |
| 4238 | hH29-13 PAM | nucleotide | artificial sequence | TTTT |
| 4239 | hH29-14 PAM | nucleotide | artificial sequence | TTTA |
| 4240 | hH29-15 PAM | nucleotide | artificial sequence | TTTT |
| 4241 | hH29-16 PAM | nucleotide | artificial sequence | TTTT |
| 4242 | hH29-17 PAM | nucleotide | artificial sequence | TTTT |
| 4243 | hH29-18 PAM | nucleotide | artificial sequence | TTTA |
| 4244 | hH29-19 PAM | nucleotide | artificial sequence | TTTC |
| 4245 | hH29-20 PAM | nucleotide | artificial sequence | TTTT |
| 4246 | hH29-21 PAM | nucleotide | artificial sequence | TTTA |
| 4247 | hH29-22 PAM | nucleotide | artificial sequence | TTTC |
| 4248 | hH29-23 PAM | nucleotide | artificial sequence | TTTC |
| 4249 | hH29-24 PAM | nucleotide | artificial sequence | TTTG |
| 4250 | hH29-25 PAM | nucleotide | artificial sequence | TTTG |
| 4251 | hH29-26 PAM | nucleotide | artificial sequence | TTTT |
| 4252 | hH29-27 PAM | nucleotide | artificial sequence | TTTA |
| 4253 | hH29-28 PAM | nucleotide | artificial sequence | TTTC |
| 4254 | hH29-29 PAM | nucleotide | artificial sequence | TTTT |
| 4255 | hH29-30 PAM | nucleotide | artificial sequence | TTTA |
| 4256 | hH29-31 PAM | nucleotide | artificial sequence | TTTC |
| 4257 | hH29-32 PAM | nucleotide | artificial sequence | TTTT |
| 4258 | hH29-33 PAM | nucleotide | artificial sequence | TTTT |
| 4259 | hH29-34 PAM | nucleotide | artificial sequence | TTTG |
| 4260 | hH29-35 PAM | nucleotide | artificial sequence | TTTA |
| 4261 | hH29-36 PAM | nucleotide | artificial sequence | TTTT |
| 4262 | hH29-37 PAM | nucleotide | artificial sequence | TTTC |
| 4263 | hH29-38 PAM | nucleotide | artificial sequence | TTTA |
| 4264 | hH29-39 PAM | nucleotide | artificial sequence | TTTT |
| 4265 | hH29-40 PAM | nucleotide | artificial sequence | TTTG |
| 4266 | hH29-41 PAM | nucleotide | artificial sequence | TTTG |
| 4267 | hH29-42 PAM | nucleotide | artificial sequence | TTTG |
| 6037 | MG91-15 PAM (5′) | nucleotide | Unknown | TtTYn |
| 6038 | MG91-32 PAM (5′) | nucleotide | Unknown | GnYYn |
| 6039 | MG91-87 PAM (5′) | nucleotide | Unknown | wCCC |

TABLE 6
Listing of additional protein and nucleic acid sequences referred to herein not included in the sequence listing

| | SEQ | | | | |
|---|---|---|---|---|---|
| Cat. | ID: | Description | Type | Organism | Sequence |
| MG29-1 | 6060 | MG29-1-human | Nucleotide | N.A. | /AltR1/rUrArArUrUrUrCrUrArCrUrGrUrUrGrUrArGrArUrUrCrArArCrArUrGrGrCrArG |
| sgRNA | | GPR146-A1 | | | rUrGrGrCrArGrGrCrCrU/AltR2/ |
| targeting | | | | | |
| human | | | | | |
| GPR146 | | | | | |
| MG29-1 | 6061 | MG29-1-human | Nucleotide | N.A. | /AltR1/rUrArArUrUrUrCrUrArCrUrGrUrUrGrUrArGrArUrGrGrCrUrCrUrGrGrArCrGrC |
| sgRNA | | GPR146-B1 | | | rCrArCrArCrUrArUrCrU/AltR2/ |
| targeting | | | | | |
| human | | | | | |
| GPR146 | | | | | |
| MG29-1 | 6062 | MG29-1-human | Nucleotide | N.A. | /AltR1/rUrArArUrUrUrCrUrArCrUrGrUrUrGrUrArGrArUrUrGrArArGrGrArUrUrUrCrU |
| sgRNA | | GPR146-C1 | | | rCrCrArArArCrUrCrCrU/AltR2/ |
| targeting | | | | | |
| human | | | | | |
| GPR146 | | | | | |
| MG29-1 | 6063 | MG29-1-human | Nucleotide | N.A. | /AltR1/rUrArArUrUrUrCrUrArCrUrGrUrUrGrUrArGrArUrUrCrCrArArArCrUrCrCrUrG |
| sgRNA | | GPR146-D1 | | | rGrCrCrUrUrCrUrCrCrA/AltR2/ |
| targeting | | | | | |
| human | | | | | |
| GPR146 | | | | | |
| MG29-1 | 6064 | MG29-1-human | Nucleotide | N.A. | /AltR1/rUrArArUrUrUrCrUrArCrUrGrUrUrGrUrArGrArUrUrGrArCrArCrCrArCrUrUrC |
| sgRNA | | GPR146-E1 | | | rUrCrUrArCrCrGrCrUrA/AltR2/ |
| targeting | | | | | |
| human | | | | | |
| GPR146 | | | | | |
| MG29-1 | 6065 | MG29-1-human | Nucleotide | N.A. | /AltR1/rUrArArUrUrUrCrUrArCrUrGrUrUrGrUrArGrArUrUrCrArUrCrArGrCrCrGrUrU |
| sgRNA | | GPR146-F1 | | | rGrGrArGrCrUrUrGrCrU/AltR2/ |
| targeting | | | | | |
| human | | | | | |
| GPR146 | | | | | |
| MG29-1 | 6066 | MG29-1-human | Nucleotide | N.A. | /AltR1/rUrArArUrUrUrCrUrArCrUrGrUrUrGrUrArGrArUrCrArUrCrArGrCrCrGrUrUrG |
| sgRNA | | GPR146-G1 | | | rGrArGrCrUrUrGrCrUrG/AltR2/ |
| targeting | | | | | |
| human | | | | | |
| GPR146 | | | | | |
| MG29-1 | 6067 | MG29-1-human | Nucleotide | N.A. | /AltR1/rUrArArUrUrUrCrUrArCrUrGrUrUrGrUrArGrArUrArUrCrArGrCrCrGrUrUrGrG |
| sgRNA | | GPR146-H1 | | | rArGrCrUrUrGrCrUrGrG/AltR2/ |
| targeting | | | | | |
| human | | | | | |
| GPR146 | | | | | |
| MG29-1 | 6068 | MG29-1-human | Nucleotide | N.A. | /AltR1/rUrArArUrUrUrCrUrArCrUrGrUrUrGrUrArGrArUrGrArGrArArArUrCrCrUrUrC |
| sgRNA | | GPR146-A2 | | | rArCrArArArGrUrGrCrA/AltR2/ |
| targeting | | | | | |
| human | | | | | |
| GPR146 | | | | | |
| DNA | 6069 | MG29-1-human | Nucleotide | N.A. | TCAACATGGCAGTGGCAGGCCT |
| sequence | | GPR146-A1 | | | |
| of human | | | | | |
| GPR146 | | | | | |
| target site | | | | | |
| DNA | 6070 | MG29-1-human | Nucleotide | N.A. | GGCTCTGGACGCCACACTATCT |
| sequence | | GPR146-B1 | | | |
| of human | | | | | |
| GPR146 | | | | | |
| target site | | | | | |
| DNA | 6071 | MG29-1-human | Nucleotide | N.A. | TGAAGGATTTCTCCAAACTCCT |
| sequence | | GPR146-C1 | | | |
| of human | | | | | |
| GPR146 | | | | | |
| target site | | | | | |
| DNA | 6072 | MG29-1-human | Nucleotide | N.A. | TCCAAACTCCTGGCCTTCTCCA |
| sequence | | GPR146-D1 | | | |
| of human | | | | | |
| GPR146 | | | | | |
| target site | | | | | |
| DNA | 6073 | MG29-1-human | Nucleotide | N.A. | TGACACCACTTCTCTACCGCTA |
| sequence | | GPR146-E1 | | | |
| of human | | | | | |
| GPR146 | | | | | |
| target site | | | | | |
| DNA | 6074 | MG29-1-human | Nucleotide | N.A. | TCATCAGCCGTTGGAGCTTGCT |
| sequence | | GPR146-F1 | | | |
| of human | | | | | |
| GPR146 | | | | | |
| target site | | | | | |
| DNA | 6075 | MG29-1-human | Nucleotide | N.A | CATCAGCCGTTGGAGCTTGCTG |
| sequence | | GPR146-G1 | | | |
| of human | | | | | |
| GPR146 | | | | | |
| target site | | | | | |
| DNA | 6076 | MG29-1-human | Nucleotide | N.A. | ATCAGCCGTTGGAGCTTGCTGG |
| sequence | | GPR146-H1 | | | |
| of human | | | | | |
| GPR146 | | | | | |
| target site | | | | | |
| DNA | 6077 | MG29-1-human | Nucleotide | N.A. | GAGAAATCCTTCACAAAGTGCA |
| sequence | | GPR146-A2 | | | |
| of human | | | | | |
| GPR146 | | | | | |
| target site | | | | | |
| MG29-1 | 6078 | MG29-1-mouse | Nucleotide | N.A. | /AltR1/rUrArArUrUrUrCrUrArCrUrGrUrUrGrUrArGrArUrGrCrCrUrCrUrGrGrArCrArC |
| sgRNA | | GPR146-A1 | | | rCrUrUrArCrUrArCrUrU/AltR2/ |
| targeting | | | | | |
| mouse | | | | | |
| GPR146 | | | | | |
| MG29-1 | 6079 | MG29-1-mouse | Nucleotide | N.A. | /AltR1/rUrArArUrUrUrCrUrArCrUrGrUrUrGrUrArGrArUrUrUrGrArUrGrUrArArCrGrG |
| sgRNA | | GPR146-B1 | | | rUrArGrArGrCrArGrUrG/AltR2/ |
| targeting | | | | | |
| mouse | | | | | |
| GPR146 | | | | | |
| DNA | 6080 | MG29-1-mouse | Nucleotide | N.A. | GCCTCTGGACACCTTACTACTT |
| sequence | | GPR146-A1 | | | |
| of mouse | | | | | |
| GPR146 | | | | | |
| target site | | | | | |
| DNA | 6081 | MG29-1-mouse | Nucleotide | N.A. | TTGATGTAACGGTAGAGCAGTG |
| sequence | | GPR146-B1 | | | |
| of mouse | | | | | |
| GPR146 | | | | | |
| target site | | | | | |
| MG29-1 | 6082 | MG29-1-human | Nucleotide | N.A. | /AltR1/rUrArArUrUrUrCrUrArCrUrGrUrUrGrUrArGrArUrUrArUrUrGrUrUrCrCrUrCrU |
| sgRNA | | ANGPTL3-A1 | | | rArGrUrUrArUrUrUrCrC/AltR2/ |
| targeting | | | | | |
| human | | | | | |
| ANGPTL | | | | | |
| 3 | | | | | |
| MG29-1 | 6083 | MG29-1-human | Nucleotide | N.A. | /AltR1/rUrArArUrUrUrCrUrArCrUrGrUrUrGrUrArGrArUrArUrUrGrUrUrCrCrUrCrUrA |
| sgRNA | | ANGPTL3-B1 | | | rGrUrUrArUrUrUrCrCrU/AltR2/ |
| targeting | | | | | |
| human | | | | | |
| ANGPTL | | | | | |
| 3 | | | | | |
| MG29-1 | 6084 | MG29-1-human | Nucleotide | N.A. | /AltR1/rUrArArUrUrUrCrUrArCrUrGrUrUrGrUrArGrArUrUrUrGrUrUrCrCrUrCrUrArG |
| sgRNA | | ANGPTL3-C1 | | | rUrUrArUrUrUrCrCrUrC/AltR2/ |
| targeting | | | | | |
| human | | | | | |
| ANGPTL | | | | | |
| 3 | | | | | |
| MG29-1 | 6085 | MG29-1-human | Nucleotide | N.A. | /AltR1/rUrArArUrUrUrCrUrArCrUrGrUrUrGrUrArGrArUrCrUrCrCrArGrArArUrUrGrA |
| sgRNA | | ANGPTL3-D1 | | | rUrCrArArGrArCrArArU/AltR2/ |
| targeting | | | | | |
| human | | | | | |
| ANGPTL | | | | | |
| 3 | | | | | |
| MG29-1 | 6086 | MG29-1-human | Nucleotide | N.A. | /AltR1/rUrArArUrUrUrCrUrArCrUrGrUrUrGrUrArGrArUrArUrUrCrUrCrUrArUrCrUrC |
| sgRNA | | ANGPTL3-E1 | | | rCrArGrArGrCrCrArArA/AltR2/ |
| targeting | | | | | |
| human | | | | | |
| ANGPTL | | | | | |
| 3 | | | | | |
| MG29-1 | 6087 | MG29-1-human | Nucleotide | N.A. | /AltR1/rUrArArUrUrUrCrUrArCrUrGrUrUrGrUrArGrArUrArGrCrCrArArUrGrGrCrCrU |
| sgRNA | | ANGPTL3-F1 | | | rCrCrUrUrCrArGrUrUrG/AltR2/ |
| targeting | | | | | |
| human | | | | | |
| ANGPTL | | | | | |
| 3 | | | | | |
| MG29-1 | 6088 | MG29-1-human | Nucleotide | N.A. | /AltR1/rUrArArUrUrUrCrUrArCrUrGrUrUrGrUrArGrArUrGrCrCrArArUrGrGrCrCrUrC |
| sgRNA | | ANGPTL3-G1 | | | rCrUrUrCrArGrUrUrGrG/AltR2/ |
| targeting | | | | | |
| human | | | | | |
| ANGPTL | | | | | |
| 3 | | | | | |
| MG29-1 | 6089 | MG29-1-human | Nucleotide | N.A. | /AltR1/rUrArArUrUrUrCrUrArCrUrGrUrUrGrUrArGrArUrUrCrCrArUrArArGrArCrGrA |
| sgRNA | | ANGPTL3-H1 | | | rArGrGrGrCrCrArArArU/AltR2/ |
| targeting | | | | | |
| human | | | | | |
| ANGPTL | | | | | |
| 3 | | | | | |
| MG29-1 | 6090 | MG29-1-human | Nucleotide | N.A. | /AltR1/rUrArArUrUrUrCrUrArCrUrGrUrUrGrUrArGrArUrArArArArArCrUrCrArArCrA |
| sgRNA | | ANGPTL3-A2 | | | rUrArUrUrUrGrArUrCrA/AltR2/ |
| targeting | | | | | |
| human | | | | | |
| ANGPTL | | | | | |
| 3 | | | | | |
| MG29-1 | 6091 | MG29-1-human | Nucleotide | N.A. | /AltR1/rUrArArUrUrUrCrUrArCrUrGrUrUrGrUrArGrArUrArUrCrArGrUrCrUrUrUrUrU |
| sgRNA | | ANGPTL3-B2 | | | rArUrGrArUrCrUrArUrC/AltR2/ |
| targeting | | | | | |
| human | | | | | |
| ANGPTL | | | | | |
| 3 | | | | | |
| MG29-1 | 6092 | MG29-1-human | Nucleotide | N.A. | /AltR1/rUrArArUrUrUrCrUrArCrUrGrUrUrGrUrArGrArUrUrArUrGrArUrCrUrArUrCrG |
| sgRNA | | ANGPTL3-C2 | | | rCrUrGrCrArArArCrCrA/AltR2/ |
| targeting | | | | | |
| human | | | | | |
| ANGPTL | | | | | |
| 3 | | | | | |
| MG29-1 | 6093 | MG29-1-human | Nucleotide | N.A. | /AltR1/rUrArArUrUrUrCrUrArCrUrGrUrUrGrUrArGrArUrArUrGrArUrCrUrArUrCrGrC |
| sgRNA | | ANGPTL3-D2 | | | rUrGrCrArArArCrCrArG/AltR2/ |
| targeting | | | | | |
| human | | | | | |
| ANGPTL | | | | | |
| 3 | | | | | |
| MG29-1 | 6094 | MG29-1-human | Nucleotide | N.A. | /AltR1/rUrArArUrUrUrCrUrArCrUrGrUrUrGrUrArGrArUrUrGrArUrCrUrArUrCrGrCrU |
| sgRNA | | ANGPTL3-E2 | | | rGrCrArArArCrCrArGrU/AltR2/ |
| targeting | | | | | |
| human | | | | | |
| ANGPTL | | | | | |
| 3 | | | | | |
| MG29-1 | 6095 | MG29-1-human | Nucleotide | N.A. | /AltR1/rUrArArUrUrUrCrUrArCrUrGrUrUrGrUrArGrArUrGrArArGrArGrCrArArCrUrA |
| sgRNA | | ANGPTL3-F2 | | | rArCrUrArArCrUrUrArA/AltR2/ |
| targeting | | | | | |
| human | | | | | |
| ANGPTL | | | | | |
| 3 | | | | | |
| MG29-1 | 6096 | MG29-1-human | Nucleotide | N.A. | /AltR1/rUrArArUrUrUrCrUrArCrUrGrUrUrGrUrArGrArUrArGrUrGrArArGrUrUrArCrU |
| sgRNA | | ANGPTL3-G2 | | | rUrCrUrGrGrGrUrGrUrU/AltR2/ |
| targeting | | | | | |
| human | | | | | |
| ANGPTL | | | | | |
| 3 | | | | | |
| MG29-1 | 6097 | MG29-1-human | Nucleotide | N.A. | /AltR1/rUrArArUrUrUrCrUrArCrUrGrUrUrGrUrArGrArUrGrArArUrUrArArGrUrUrArG |
| sgRNA | | ANGPTL3-H2 | | | rUrUrArGrUrUrGrCrUrC/AltR2/ |
| targeting | | | | | |
| human | | | | | |
| ANGPTL | | | | | |
| 3 | | | | | |
| MG29-1 | 6098 | MG29-1-human | Nucleotide | N.A. | /AltR1/rUrArArUrUrUrCrUrArCrUrGrUrUrGrUrArGrArUrUrUrCrUrUrCrUrArGrGrArG |
| sgRNA | | ANGPTL3-A3 | | | rGrCrUrUrUrCrArArGrU/AltR2/ |
| targeting | | | | | |
| human | | | | | |
| ANGPTL | | | | | |
| 3 | | | | | |
| MG29-1 | 6099 | MG29-1-human | Nucleotide | N.A. | /AltR1/rUrArArUrUrUrCrUrArCrUrGrUrUrGrUrArGrArUrUrCrUrUrCrUrArGrGrArGrG |
| syRNA | | ANGPTL3-B3 | | | rCrUrUrUrCrArArGrUrU/AltR2/ |
| targeting | | | | | |
| human | | | | | |
| ANGPTL | | | | | |
| 3 | | | | | |
| MG29-1 | 6100 | MG29-1-human | Nucleotide | N.A. | /AltR1/rUrArArUrUrUrCrUrArCrUrGrUrUrGrUrArGrArUrCrUrUrCrUrArGrGrArGrGrC |
| sgRNA | | ANGPTL3-C3 | | | rUrUrUrCrArArGrUrUrU/AltR2/ |
| targeting | | | | | |
| human | | | | | |
| ANGPTL | | | | | |
| 3 | | | | | |
| MG29-1 | 6101 | MG29-1-human | Nucleotide | N.A. | /AltR1/rUrArArUrUrUrCrUrArCrUrGrUrUrGrUrArGrArUrUrUrCrUrArGrGrArGrGrCrU |
| sgRNA | | ANGPTL3-D3 | | | rUrUrCrArArGrUrUrUrU/AltR2/ |
| targeting | | | | | |
| human | | | | | |
| ANGPTL | | | | | |
| 3 | | | | | |
| MG29-1 | 6102 | MG29-1-human | Nucleotide | N.A. | /AltR1/rUrArArUrUrUrCrUrArCrUrGrUrUrGrUrArGrArUrArArGrUrUrUrUrGrArGrUrU |
| sgRNA | | ANGPTL3-E3 | | | rGrArGrUrUrCrArArGrU/AltR2/ |
| targeting | | | | | |
| human | | | | | |
| ANGPTL | | | | | |
| 3 | | | | | |
| MG29-1 | 6103 | MG29-1-human | Nucleotide | N.A. | /AltR1/rUrArArUrUrUrCrUrArCrUrGrUrUrGrUrArGrArUrGrArGrUrUrGrArGrUrUrCrA |
| sgRNA | | ANGPTL3-F3 | | | rArGrUrGrArCrArUrArU/AltR2/ |
| targeting | | | | | |
| human | | | | | |
| ANGPTL | | | | | |
| 3 | | | | | |
| MG29-1 | 6104 | MG29-1-human | Nucleotide | N.A. | /AltR1/rUrArArUrUrUrCrUrArCrUrGrUrUrGrUrArGrArUrArGrUrUrGrArGrUrUrCrArA |
| sgRNA | | ANGPTL3-G3 | | | rGrUrGrArCrArUrArUrU/AltR2/ |
| targeting | | | | | |
| human | | | | | |
| ANGPTL | | | | | |
| 3 | | | | | |
| MG29-1 | 6105 | MG29-1-human | Nucleotide | N.A. | /AltR1/rUrArArUrUrUrCrUrArCrUrGrUrUrGrUrArGrArUrCrCrUrCrUrUrCrArUrUrUrU |
| sgRNA | | ANGPTL3-H3 | | | rUrGrArCrUrUrGrUrArG/AltR2/ |
| targeting | | | | | |
| human | | | | | |
| ANGPTL | | | | | |
| 3 | | | | | |
| MG29-1 | 6106 | MG29-1-human | Nucleotide | N.A. | /AltR1/rUrArArUrUrUrCrUrArCrUrGrUrUrGrUrArGrArUrUrArUrGrUrArGrUrUrCrUrU |
| sgRNA | | ANGPTL3-A4 | | | rCrUrCrArGrUrUrCrCrU/AltR2/ |
| targeting | | | | | |
| human | | | | | |
| ANGPTL | | | | | |
| 3 | | | | | |
| MG29-1 | 6107 | MG29-1-human | Nucleotide | N.A. | /AltR1/rUrArArUrUrUrCrUrArCrUrGrUrUrGrUrArGrArUrCrUrUrCrUrUrCrUrUrUrGrA |
| sgRNA | | ANGPTL3-B4 | | | rUrUrUrCrArCrUrGrGrU/AltR2/ |
| targeting | | | | | |
| human | | | | | |
| ANGPTL | | | | | |
| 3 | | | | | |
| MG29-1 | 6108 | MG29-1-human | Nucleotide | N.A. | /AltR1/rUrArArUrUrUrCrUrArCrUrGrUrUrGrUrArGrArUrUrUrCrUrUrCrUrUrUrGrArU |
| sgRNA | | ANGPTL3-C4 | | | rUrUrCrArCrUrGrGrUrU/AltR2/ |
| targeting | | | | | |
| human | | | | | |
| ANGPTL | | | | | |
| 3 | | | | | |
| MG29-1 | 6109 | MG29-1-human | Nucleotide | N.A. | /AltR1/rUrArArUrUrUrCrUrArCrUrGrUrUrGrUrArGrArUrArUrUrUrCrArCrUrGrGrUrU |
| sgRNA | | ANGPTL3-D4 | | | rUrGrCrArGrCrGrArUrA/AltR2/ |
| targeting | | | | | |
| human | | | | | |
| ANGPTL | | | | | |
| 3 | | | | | |
| MG29-1 | 6110 | MG29-1-human | Nucleotide | N.A. | /AltR1/rUrArArUrUrUrCrUrArCrUrGrUrUrGrUrArGrArUrArCrUrGrGrUrUrUrGrCrArG |
| sgRNA | | ANGPTL3-E4 | | | rCrGrArUrArGrArUrCrA/AltR2/ |
| targeting | | | | | |
| human | | | | | |
| ANGPTL | | | | | |
| 3 | | | | | |
| MG29-1 | 6111 | MG29-1-human | Nucleotide | N.A. | /AltR1/rUrArArUrUrUrCrUrArCrUrGrUrUrGrUrArGrArUrCrArGrCrGrArUrArGrArUrC |
| syRNA | | ANGPTL3-F4 | | | rArUrArArArArArGrArC/AltR2/ |
| targeting | | | | | |
| human | | | | | |
| ANGPTL | | | | | |
| 3 | | | | | |
| MG29-1 | 6112 | MG29-1-human | Nucleotide | N.A. | /AltR1/rUrArArUrUrUrCrUrArCrUrGrUrUrGrUrArGrArUrGrArArArUrArUrGrUrCrArU |
| sgRNA | | ANGPTL3-G4 | | | UrUrArArrUrUrGrGrCrC/AltR2/ |
| targeting | | | | | |
| human | | | | | |
| ANGPTL | | | | | |
| 3 | | | | | |
| MG29-1 | 6113 | MG29-1-human | Nucleotide | N.A. | /AltR1/rUrArArUrUrUrCrUrArCrUrGrUrUrGrUrArGrArUrArArArUrArUrGrUrCrArUrU |
| sgRNA | | ANGPTL3-H4 | | | rArArUrUrUrGrGrCrCrC/AltR2/ |
| targeting | | | | | |
| human | | | | | |
| ANGPTL | | | | | |
| 3 | | | | | |
| MG29-1 | 6114 | MG29-1-human | Nucleotide | N.A. | /AltR1/rUrArArUrUrUrCrUrArCrUrGrUrUrGrUrArGrArUrGrCrCrCrUrUrCrGrUrCrUrU |
| sgRNA | | ANGPTL3-A5 | | | rArUrGrGrArCrArArArG/AltR2/ |
| targeting | | | | | |
| human | | | | | |
| ANGPTL | | | | | |
| 3 | | | | | |
| MG29-1 | 6115 | MG29-1-human | Nucleotide | N.A. | /AltR1/rUrArArUrUrUrCrUrArCrUrGrUrUrGrUrArGrArUrArGrArCrCrArUrGrUrCrCrC |
| sgRNA | | ANGPTL3-B5 | | | rArArCrUrGrArArGrGrA/AltR2/ |
| targeting | | | | | |
| human | | | | | |
| ANGPTL | | | | | |
| 3 | | | | | |
| MG29-1 | 6116 | MG29-1-human | Nucleotide | N.A. | /AltR1/rUrArArUrUrUrCrUrArCrUrGrUrUrGrUrArGrArUrUrArCrArUrCrGrUrCrUrArA |
| sgRNA | | ANGPTL3-C5 | | | rCrArUrArGrCrArArArU/AltR2/ |
| targeting | | | | | |
| human | | | | | |
| ANGPTL | | | | | |
| 3 | | | | | |
| MG29-1 | 6117 | MG29-1-human | Nucleotide | N.A. | /AltR1/rUrArArUrUrUrCrUrArCrUrGrUrUrGrUrArGrArUrArCrArUrCrGrUrCrUrArArC |
| sgRNA | | ANGPTL3-D5 | | | rArUrArGrCrArArArUrC/AltR2/ |
| targeting | | | | | |
| human | | | | | |
| ANGPTL | | | | | |
| 3 | | | | | |
| MG29-1 | 6118 | MG29-1-human | Nucleotide | N.A. | /AltR1/rUrArArUrUrUrCrUrArCrUrGrUrUrGrUrArGrArUrCrArUrCrGrUrCrUrArArCrA |
| sgRNA | | ANGPTL3-E5 | | | rUrArGrCrArArArUrCrU/AltR2/ |
| targeting | | | | | |
| human | | | | | |
| ANGPTL | | | | | |
| 3 | | | | | |
| MG29-1 | 6119 | MG29-1-human | Nucleotide | N.A. | /AltR1/rUrArArUrUrUrCrUrArCrUrGrUrUrGrUrArGrArUrGrGrCrUrCrUrGrGrArGrArU |
| sgRNA | | ANGPTL3-F5 | | | rArGrArGrArArUrCrArA/AltR2/ |
| targeting | | | | | |
| human | | | | | |
| ANGPTL | | | | | |
| 3 | | | | | |
| MG29-1 | 6120 | MG29-1-human | Nucleotide | N.A. | /AltR1/rUrArArUrUrUrCrUrArCrUrGrUrUrGrUrArGrArUrGrCrUrCrUrGrGrArGrArUrA |
| sgRNA | | ANGPTL3-G5 | | | rGrArGrArArUrCrArArA/AltR2/ |
| targeting | | | | | |
| human | | | | | |
| ANGPTL | | | | | |
| 3 | | | | | |
| MG29-1 | 6121 | MG29-1-human | Nucleotide | N.A. | /AltR1/rUrArArUrUrUrCrUrArCrUrGrUrUrGrUrArGrArUrUrUrUrUrArUrUrUrGrArCrU |
| sgRNA | | ANGPTL3-H5 | | | rArUrGrCrUrGrUrUrGrG/AltR2/ |
| targeting | | | | | |
| human | | | | | |
| ANGPTL | | | | | |
| 3 | | | | | |
| MG29-1 | 6122 | MG29-1-human | Nucleotide | N.A. | /AltR1/rUrArArUrUrUrCrUrArCrUrGrUrUrGrUrArGrArUrArUrUrUrGrArCrUrArUrGrC |
| sgRNA | | ANGPTL3-A6 | | | rUrGrUrUrGrGrUrUrUrA/AltR2/ |
| targeting | | | | | |
| human | | | | | |
| ANGPTL | | | | | |
| 3 | | | | | |
| MG29-1 | 6123 | MG29-1-human | Nucleotide | N.A. | /AltR1/rUrArArUrUrUrCrUrArCrUrGrUrUrGrUrArGrArUrUrUrUrGrArCrUrArUrGrCrU |
| sgRNA | | ANGPTL3-B6 | | | rGrUrUrGrGrUrUrUrArA/AltR2/ |
| targeting | | | | | |
| human | | | | | |
| ANGPTL | | | | | |
| 3 | | | | | |
| MG29-1 | 6124 | MG29-1-human | Nucleotide | N.A. | /AltR1/rUrArArUrUrUrCrUrArCrUrGrUrUrGrUrArGrArUrArCrUrArUrGrCrUrGrUrUrG |
| sgRNA | | ANGPTL3-C6 | | | rGrUrUrUrArArUrUrGrU/AltR2/ |
| targeting | | | | | |
| human | | | | | |
| ANGPTL | | | | | |
| 3 | | | | | |
| MG29-1 | 6125 | MG29-1-human | Nucleotide | N.A. | /AltR1/rUrArArUrUrUrCrUrArCrUrGrUrUrGrUrArGrArUrArUrUrGrUrUrUrArUrArUrU |
| sgRNA | | ANGPTL3-D6 | | | rGrGrUrCrUrUrCrCrArC/AltR2/ |
| targeting | | | | | |
| human | | | | | |
| ANGPTL | | | | | |
| 3 | | | | | |
| MG29-1 | 6126 | MG29-1-human | Nucleotide | N.A. | /AltR1/rUrArArUrUrUrCrUrArCrUrGrUrUrGrUrArGrArUrUrArUrUrGrGrUrCrUrUrCrC |
| sgRNA | | ANGPTL3-E6 | | | rArCrGrGrUrCrUrGrGrA/AltR2/ |
| targeting | | | | | |
| human | | | | | |
| ANGPTL | | | | | |
| 3 | | | | | |
| MG29-1 | 6127 | MG29-1-human | Nucleotide | N.A. | /AltR1/rUrArArUrUrUrCrUrArCrUrGrUrUrGrUrArGrArUrUrArUrUrCrUrUrUrUrArUrC |
| sgRNA | | ANGPTL3-F6 | | | rArGrCrUrCrArGrArArG/AltR2/ |
| targeting | | | | | |
| human | | | | | |
| ANGPTL | | | | | |
| 3 | | | | | |
| MG29-1 | 6128 | MG29-1-human | Nucleotide | N.A. | /AltR1/rUrArArUrUrUrCrUrArCrUrGrUrUrGrUrArGrArUrArUrCrArGrCrUrCrArGrArA |
| sgRNA | | ANGPTL3-G6 | | | CrGrGrArrUrArGrUrArU/AltR2/ |
| targeting | | | | | |
| human | | | | | |
| ANGPTL | | | | | |
| 3 | | | | | |
| MG29-1 | 6129 | MG29-1-human | Nucleotide | N.A. | /AltR1/rUrArArUrUrUrCrUrArCrUrGrUrUrGrUrArGrArUrUrCrArGrCrUrCrArGrArArG |
| sgRNA | | ANGPTL3-H6 | | | rGrArCrUrArGrUrArUrU/AltR2/ |
| targeting | | | | | |
| human | | | | | |
| ANGPTL | | | | | |
| 3 | | | | | |
| MG29-1 | 6130 | MG29-1-human | Nucleotide | N.A. | /AltR1/rUrArArUrUrUrCrUrArCrUrGrUrUrGrUrArGrArUrUrCrUrArUrCrUrUrCrCrArA |
| sgRNA | | ANGPTL3-A7 | | | rGrCrCrArArGrArGrCrA/AltR2/ |
| targeting | | | | | |
| human | | | | | |
| ANGPTL | | | | | |
| 3 | | | | | |
| MG29-1 | 6131 | MG29-1-human | Nucleotide | N.A. | /AltR1/rUrArArUrUrUrCrUrArCrUrGrUrUrGrUrArGrArUrUrGrUrGrGrGrUrUrCrUrUrG |
| sgRNA | | ANGPTL3-B7 | | | rArArUrArCrUrArGrUrC/AltR2/ |
| targeting | | | | | |
| human | | | | | |
| ANGPTL | | | | | |
| 3 | | | | | |
| MG29-1 | 6132 | MG29-1-human | Nucleotide | N.A. | /AltR1/rUrArArUrUrUrCrUrArCrUrGrUrUrGrUrArGrArUrArUrUrGrArUrUrCrUrArGrG |
| sgRNA | | ANGPTL3-C7 | | | rCrArUrUrCrCrUrGrCrU/AltR2/ |
| targeting | | | | | |
| human | | | | | |
| ANGPTL | | | | | |
| 3 | | | | | |
| MG29-1 | 6133 | MG29-1-human | Nucleotide | N.A. | /AltR1/rUrArArUrUrUrCrUrArCrUrGrUrUrGrUrArGrArUrUrUrGrArUrUrCrUrArGrGrC |
| sgRNA | | ANGPTL3-D7 | | | rArUrUrCrCrUrGrCrUrG/AltR2/ |
| targeting | | | | | |
| human | | | | | |
| ANGPTL | | | | | |
| 3 | | | | | |
| MG29-1 | 6134 | MG29-1-human | Nucleotide | N.A. | /AltR1/rUrArArUrUrUrCrUrArCrUrGrUrUrGrUrArGrArUrUrArArCrArGrArGrGrUrGrA |
| sgRNA | | ANGPTL3-E7 | | | rArCrArUrArCrArArGrU/AltR2/ |
| targeting | | | | | |
| human | | | | | |
| ANGPTL | | | | | |
| 3 | | | | | |
| MG29-1 | 6135 | MG29-1-human | Nucleotide | N.A. | /AltR1/rUrArArUrUrUrCrUrArCrUrGrUrUrGrUrArGrArUrUrCrArUrGrUrCrUrArCrUrG |
| sgRNA | | ANGPTL3-F7 | | | rUrGrArUrGrUrUrArUrA/AltR2/ |
| targeting | | | | | |
| human | | | | | |
| ANGPTL | | | | | |
| 3 | | | | | |
| MG29-1 | 6136 | MG29-1-human | Nucleotide | N.A. | /AltR1/rUrArArUrUrUrCrUrArCrUrGrUrUrGrUrArGrArUrCrArUrGrUrCrUrArCrUrGrU |
| sgRNA | | ANGPTL3-G7 | | | rGrArUrGrUrUrArUrArU/AltR2/ |
| targeting | | | | | |
| human | | | | | |
| ANGPTL | | | | | |
| 3 | | | | | |
| MG29-1 | 6137 | MG29-1-human | Nucleotide | N.A. | /AltR1/rUrArArUrUrUrCrUrArCrUrGrUrUrGrUrArGrArUrArUrGrUrCrUrArCrUrGrUrG |
| sgRNA | | ANGPTL3-H7 | | | rArUrGrUrUrArUrArUrC/AltR2/ |
| targeting | | | | | |
| human | | | | | |
| ANGPTL | | | | | |
| 3 | | | | | |
| MG29-1 | 6138 | MG29-1-human | Nucleotide | N.A. | /AltR1/rUrArArUrUrUrCrUrArCrUrGrUrUrGrUrArGrArUrArCrCrUrGrArUrArUrArArC |
| sgRNA | | ANGPTL3-A8 | | | rArUrCrArCrArGrUrArG/AltR2/ |
| targeting | | | | | |
| human | | | | | |
| ANGPTL | | | | | |
| 3 | | | | | |
| MG29-1 | 6139 | MG29-1-human | Nucleotide | N.A. | /AltR1/rUrArArUrUrUrCrUrArCrUrGrUrUrGrUrArGrArUrCrCrUrGrArUrArUrArArCrA |
| sgRNA | | ANGPTL3-B8 | | | rUrCrArCrArGrUrArGrA/AltR2/ |
| targeting | | | | | |
| human | | | | | |
| ANGPTL | | | | | |
| 3 | | | | | |
| MG29-1 | 6140 | MG29-1-human | Nucleotide | N.A. | /AltR1/rUrArArUrUrUrCrUrArCrUrGrUrUrGrUrArGrArUrArUrUrCrArUrUrArUrArUrU |
| sgRNA | | ANGPTL3-C8 | | | rCrArGrGrUrArGrUrCrC/AltR2/ |
| targeting | | | | | |
| human | | | | | |
| ANGPTL | | | | | |
| 3 | | | | | |
| MG29-1 | 6141 | MG29-1-human | Nucleotide | N.A. | /AltR1/rUrArArUrUrUrCrUrArCrUrGrUrUrGrUrArGrArUrUrArGrUrUrCrUrCrCrCrArC |
| sgRNA | | ANGPTL3-D8 | | | rGrUrUrUrCrArUrUrGrA/AltR2/ |
| targeting | | | | | |
| human | | | | | |
| ANGPTL | | | | | |
| 3 | | | | | |
| MG29-1 | 6142 | MG29-1-human | Nucleotide | N.A. | /AltR1/rUrArArUrUrUrCrUrArCrUrGrUrUrGrUrArGrArUrArUrUrGrArArGrUrUrUrUrG |
| sgRNA | | ANGPTL3-E8 | | | rUrGrArUrCrCrArUrCrU/AltR2/ |
| targeting | | | | | |
| human | | | | | |
| ANGPTL | | | | | |
| 3 | | | | | |
| MG29-1 | 6143 | MG29-1-human | Nucleotide | N.A. | /AltR1/rUrArArUrUrUrCrUrArCrUrGrUrUrGrUrArGrArUrGrUrGrArUrCrCrArUrCrUrA |
| sgRNA | | ANGPTL3-F8 | | | rUrUrCrGrArUrGrUrUrG/AltR2/ |
| targeting | | | | | |
| human | | | | | |
| ANGPTL | | | | | |
| 3 | | | | | |
| MG29-1 | 6144 | MG29-1-human | Nucleotide | N.A. | /AltR1/rUrArArUrUrUrCrUrArCrUrGrUrUrGrUrArGrArUrUrGrArUrCrCrArUrCrUrArU |
| sgRNA | | ANGPTL3-G8 | | | rUrCrGrArUrGrUrUrGrA/AltR2/ |
| targeting | | | | | |
| human | | | | | |
| ANGPTL | | | | | |
| 3 | | | | | |
| MG29-1 | 6145 | MG29-1-human | Nucleotide | N.A. | /AltR1/rUrArArUrUrUrCrUrArCrUrGrUrUrGrUrArGrArUrCrUrUrUrUrCrArGrGrArGrA |
| sgRNA | | ANGPTL3-H8 | | | rArUrUrUrUrGrGrUrUrG/AltR2/ |
| targeting | | | | | |
| human | | | | | |
| ANGPTL | | | | | |
| 3 | | | | | |
| MG29-1 | 6146 | MG29-1-human | Nucleotide | N.A. | /AltR1/rUrArArUrUrUrCrUrArCrUrGrUrUrGrUrArGrArUrUrUrUrUrCrArGrGrArGrArA |
| sgRNA | | ANGPTL3-A9 | | | rUrUrUrUrGrGrUrUrGrG/AltR2/ |
| targeting | | | | | |
| human | | | | | |
| ANGPTL | | | | | |
| 3 | | | | | |
| MG29-1 | 6147 | MG29-1-human | Nucleotide | N.A. | /AltR1/rUrArArUrUrUrCrUrArCrUrGrUrUrGrUrArGrArUrCrArGrGrArGrArArUrUrUrU |
| sgRNA | | ANGPTL3-B9 | | | rGrGrUrUrGrGrGrCrCrU/AltR2/ |
| targeting | | | | | |
| human | | | | | |
| ANGPTL | | | | | |
| 3 | | | | | |
| MG29-1 | 6148 | MG29-1-human | Nucleotide | N.A. | /AltR1/rUrArArUrUrUrCrUrArCrUrGrUrUrGrUrArGrArUrArGrGrArGrArArUrUrUrUrG |
| sgRNA | | ANGPTL3-C9 | | | rGrUrUrGrGrGrCrCrUrA/AltR2/ |
| targeting | | | | | |
| human | | | | | |
| ANGPTL | | | | | |
| 3 | | | | | |
| MG29-1 | 6149 | MG29-1-human | Nucleotide | N.A. | /AltR1/rUrArArUrUrUrCrUrArCrUrGrUrUrGrUrArGrArUrGrGrUrUrGrGrGrCrCrUrArG |
| sgRNA | | ANGPTL3-D9 | | | rArGrArArGrArUrArUrA/AltR2/ |
| targeting | | | | | |
| human | | | | | |
| ANGPTL | | | | | |
| 3 | | | | | |
| MG29-1 | 6150 | MG29-1-human | Nucleotide | N.A. | /AltR1/rUrArArUrUrUrCrUrArCrUrGrUrUrGrUrArGrArUrGrUrUrGrGrGrCrCrUrArGrA |
| sgRNA | | ANGPTL3-E9 | | | rGrArArGrArUrArUrArC/AltR2/ |
| targeting | | | | | |
| human | | | | | |
| ANGPTL | | | | | |
| 3 | | | | | |
| MG29-1 | 6151 | MG29-1-human | Nucleotide | N.A. | /AltR1/rUrArArUrUrUrCrUrArCrUrGrUrUrGrUrArGrArUrArCrGrArArUrUrGrArGrUrU |
| sgRNA | | ANGPTL3-F9 | | | rGrGrArArGrArCrUrGrG/AltR2/ |
| targeting | | | | | |
| human | | | | | |
| ANGPTL | | | | | |
| 3 | | | | | |
| MG29-1 | 6152 | MG29-1-human | Nucleotide | N.A. | /AltR1/rUrArArUrUrUrCrUrArCrUrGrUrUrGrUrArGrArUrCrGrArArUrUrGrArGrUrUrG |
| sgRNA | | ANGPTL3-G9 | | | rGrArArGrArCrUrGrGrA/AltR2/ |
| targeting | | | | | |
| human | | | | | |
| ANGPTL | | | | | |
| 3 | | | | | |
| MG29-1 | 6153 | MG29-1-human | Nucleotide | N.A. | /AltR1/rUrArArUrUrUrCrUrArCrUrGrUrUrGrUrArGrArUrUrArCrUrUrGrGrGrArArArU |
| sgRNA | | ANGPTL3-H9 | | | rCrArCrGrArArArCrCrA/AltR2/ |
| targeting | | | | | |
| human | | | | | |
| ANGPTL | | | | | |
| 3 | | | | | |
| MG29-1 | 6154 | MG29-1-human | Nucleotide | N.A. | /AltR1/rUrArArUrUrUrCrUrArCrUrGrUrUrGrUrArGrArUrArCrUrUrGrGrGrArArArUrC |
| sgRNA | | ANGPTL3-A10 | | | rArCrGrArArArCrCrArA/AltR2/ |
| targeting | | | | | |
| human | | | | | |
| ANGPTL | | | | | |
| 3 | | | | | |
| MG29-1 | 6155 | MG29-1-human | Nucleotide | N.A. | /AltR1/rUrArArUrUrUrCrUrArCrUrGrUrUrGrUrArGrArUrCrUrUrGrGrGrArArArUrCrA |
| sgRNA | | ANGPTL3-B10 | | | rCrGrArArArCrCrArArC/AltR2/ |
| targeting | | | | | |
| human | | | | | |
| ANGPTL | | | | | |
| 3 | | | | | |
| MG29-1 | 6156 | MG29-1-human | Nucleotide | N.A. | /AltR1/rUrArArUrUrUrCrUrArCrUrGrUrUrGrUrArGrArUrGrUrGrUrUrUrUrCrUrArCrU |
| sgRNA | | ANGPTL3-C10 | | | rUrGrGrGrArUrCrArCrA/AltR2/ |
| targeting | | | | | |
| human | | | | | |
| ANGPTL | | | | | |
| 3 | | | | | |
| MG29-1 | 6157 | MG29-1-human | Nucleotide | N.A. | /AltR1/rUrArArUrUrUrCrUrArCrUrGrUrUrGrUrArGrArUrCrUrArCrUrUrGrGrGrArUrC |
| sgRNA | | ANGPTL3-D10 | | | rArCrArArArGrCrArArA/AltR2/ |
| targeting | | | | | |
| human | | | | | |
| ANGPTL | | | | | |
| 3 | | | | | |
| MG29-1 | 6158 | MG29-1-human | Nucleotide | N.A. | /AltR1/rUrArArUrUrUrCrUrArCrUrGrUrUrGrUrArGrArUrUrArCrUrUrGrGrGrArUrCrA |
| sgRNA | | ANGPTL3-E10 | | | rCrArArArGrCrArArArA/AltR2/ |
| targeting | | | | | |
| human | | | | | |
| ANGPTL | | | | | |
| 3 | | | | | |
| MG29-1 | 6159 | MG29-1-human | Nucleotide | N.A. | /AltR1/rUrArArUrUrUrCrUrArCrUrGrUrUrGrUrArGrArUrGrCrUrUrUrGrUrGrArUrCrC |
| sgRNA | | ANGPTL3-F10 | | | rCrArArGrUrArGrArArA/AltR2/ |
| targeting | | | | | |
| human | | | | | |
| ANGPTL | | | | | |
| 3 | | | | | |
| MG29-1 | 6160 | MG29-1-human | Nucleotide | N.A. | /AltR1/rUrArArUrUrUrCrUrArCrUrGrUrUrGrUrArGrArUrCrUrUrUrGrUrGrArUrCrCrC |
| sgRNA | | ANGPTL3-G10 | | | rArArGrUrArGrArArArA/AltR2/ |
| targeting | | | | | |
| human | | | | | |
| ANGPTL | | | | | |
| 3 | | | | | |
| MG29-1 | 6161 | MG29-1-human | Nucleotide | N.A. | /AltR1/rUrArArUrUrUrCrUrArCrUrGrUrUrGrUrArGrArUrUrGrArUrCrCrCrArArGrUrA |
| sgRNA | | ANGPTL3-H10 | | | rGrArArArArCrArCrCrA/AltR2/ |
| targeting | | | | | |
| human | | | | | |
| ANGPTL | | | | | |
| 3 | | | | | |
| MG29-1 | 6162 | MG29-1-human | Nucleotide | N.A. | /AltR1/rUrArArUrUrUrCrUrArCrUrGrUrUrGrUrArGrArUrUrUrUrUrCrCrGrGrGrArUrU |
| sgRNA | | ANGPTL3-A11 | | | rGrCrArUrUrGrGrGrGrA/AltR2/ |
| targeting | | | | | |
| human | | | | | |
| ANGPTL | | | | | |
| 3 | | | | | |
| MG29-1 | 6163 | MG29-1-human | Nucleotide | N.A. | /AltR1/rUrArArUrUrUrCrUrArCrUrGrUrUrGrUrArGrArUrCrCrGrGrGrArUrUrGrCrArU |
| sgRNA | | ANGPTL3-B11 | | | rUrGrGrGrGrArCrArUrU/AltR2/ |
| targeting | | | | | |
| human | | | | | |
| ANGPTL | | | | | |
| 3 | | | | | |
| MG29-1 | 6164 | MG29-1-human | Nucleotide | N.A. | /AltR1/rUrArArUrUrUrCrUrArCrUrGrUrUrGrUrArGrArUrCrGrGrGrArUrUrGrCrArUrU |
| sgRNA | | ANGPTL3-C11 | | | rGrGrGrGrArCrArUrUrG/AltR2/ |
| targeting | | | | | |
| human | | | | | |
| ANGPTL | | | | | |
| 3 | | | | | |
| MG29-1 | 6165 | MG29-1-human | Nucleotide | N.A. | /AltR1/rUrArArUrUrUrCrUrArCrUrGrUrUrGrUrArGrArUrGrUrGrArUrUrUrCrCrCrArA |
| sgRNA | | ANGPTL3-D11 | | | rGrUrArArArArArGrArA/AltR2/ |
| targeting | | | | | |
| human | | | | | |
| ANGPTL | | | | | |
| 3 | | | | | |
| MG29-1 | 6166 | MG29-1-human | Nucleotide | N.A. | /AltR1/rUrArArUrUrUrCrUrArCrUrGrUrUrGrUrArGrArUrUrUrGrUrCrUrUrUrCrCrArG |
| sgRNA | | ANGPTL3-E11 | | | rUrCrUrUrCrCrArArCrU/AltR2/ |
| targeting | | | | | |
| human | | | | | |
| ANGPTL | | | | | |
| 3 | | | | | |
| MG29-1 | 6167 | MG29-1-human | Nucleotide | N.A. | /AltR1/rUrArArUrUrUrCrUrArCrUrGrUrUrGrUrArGrArUrCrArGrUrCrUrUrCrCrArArC |
| sgRNA | | ANGPTL3-F11 | | | rUrCrArArUrUrCrGrUrA/AltR2/ |
| targeting | | | | | |
| human | | | | | |
| ANGPTL | | | | | |
| 3 | | | | | |
| MG29-1 | 6168 | MG29-1-human | Nucleotide | N.A. | /AltR1/rUrArArUrUrUrCrUrArCrUrGrUrUrGrUrArGrArUrGrGrArGrGrCrUrGrGrUrGrG |
| sgRNA | | ANGPTL3-G11 | | | rUrGrGrCrArUrGrArUrG/AltR2/ |
| targeting | | | | | |
| human | | | | | |
| ANGPTL | | | | | |
| 3 | | | | | |
| MG29-1 | 6169 | MG29-1-human | Nucleotide | N.A. | /AltR1/rUrArArUrUrUrCrUrArCrUrGrUrUrGrUrArGrArUrArArArUrUrUrGrCrCrUrCrA |
| sgRNA | | ANGPTL3-H11 | | | rGrUrUrCrArUrUrCrArA/AltR2/ |
| targeting | | | | | |
| human | | | | | |
| ANGPTL | | | | | |
| 3 | | | | | |
| MG29-1 | 6170 | MG29-1-human | Nucleotide | N.A. | /AltR1/rUrArArUrUrUrCrUrArCrUrGrUrUrGrUrArGrArUrArArUrUrUrGrCrCrUrCrArG |
| sgRNA | | ANGPTL3-A12 | | | rUrUrCrArUrUrCrArArA/AltR2/ |
| targeting | | | | | |
| human | | | | | |
| ANGPTL | | | | | |
| 3 | | | | | |
| MG29-1 | 6171 | MG29-1-human | Nucleotide | N.A. | /AltR1/rUrArArUrUrUrCrUrArCrUrGrUrUrGrUrArGrArUrCrCrUrCrArGrUrUrCrArUrU |
| sgRNA | | ANGPTL3-B12 | | | rCrArArArGrCrUrUrUrC/AltR2/ |
| targeting | | | | | |
| human | | | | | |
| ANGPTL | | | | | |
| 3 | | | | | |
| MG29-1 | 6172 | MG29-1-human | Nucleotide | N.A. | /AltR1/rUrArArUrUrUrCrUrArCrUrGrUrUrGrUrArGrArUrUrGrArArUrCrUrGrUrUrGrG |
| sgRNA | | ANGPTL3-C12 | | | rArUrGrGrArUrCrArArC/AltR2/ |
| targeting | | | | | |
| human | | | | | |
| ANGPTL | | | | | |
| 3 | | | | | |
| MG29-1 | 6173 | MG29-1-human | Nucleotide | N.A. | /AltR1/rUrArArUrUrUrCrUrArCrUrGrUrUrGrUrArGrArUrUrArGrArGrUrArUrArArCrC |
| sgRNA | | ANGPTL3-D12 | | | rUrUrCrCrArUrUrUrUrG/AltR2/ |
| targeting | | | | | |
| human | | | | | |
| ANGPTL | | | | | |
| 3 | | | | | |
| MG29-1 | 6174 | MG29-1-human | Nucleotide | N.A. | /AltR1/rUrArArUrUrUrCrUrArCrUrGrUrUrGrUrArGrArUrGrArGrArCrUrUrCrCrArArG |
| sgRNA | | ANGPTL3-E12 | | | rArUrArArUrCrCrUrCrU/AltR2/ |
| targeting | | | | | |
| human | | | | | |
| ANGPTL | | | | | |
| 3 | | | | | |
| MG29-1 | 6175 | MG29-1-human | Nucleotide | N.A. | /AltR1/rUrArArUrUrUrCrUrArCrUrGrUrUrGrUrArGrArUrArGrArCrUrUrCrCrArArGrA |
| sgRNA | | ANGPTL3-F12 | | | rUrArArUrCrCrUrCrUrU/AltR2/ |
| targeting | | | | | |
| human | | | | | |
| ANGPTL | | | | | |
| 3 | | | | | |
| MG29-1 | 6176 | MG29-1-human | Nucleotide | N.A. | /AltR1/rUrArArUrUrUrCrUrArCrUrGrUrUrGrUrArGrArUrGrCrUrCrUrUrGrGrUrUrUrG |
| sgRNA | | ANGPTL3-G12 | | | rUrUrArUrArUrUrUrArC/AltR2/ |
| targeting | | | | | |
| human | | | | | |
| ANGPTL | | | | | |
| 3 | | | | | |
| MG29-1 | 6177 | MG29-1-human | Nucleotide | N.A. | /AltR1/rUrArArUrUrUrCrUrArCrUrGrUrUrGrUrArGrArUrCrUrCrUrUrGrGrUrUrUrGrU |
| syRNA | | ANGPTL3-H12 | | | rUrArUrArUrUrUrArCrC/AltR2/ |
| targeting | | | | | |
| human | | | | | |
| ANGPTL | | | | | |
| 3 | | | | | |
| DNA | 6178 | MG29-1-human | Nucleotide | N.A. | TATTGTTCCTCTAGTTATTTCC |
| sequence | | ANGPTL3-A1 | | | |
| of human | | | | | |
| ANGPTL | | | | | |
| 3 target | | | | | |
| site | | | | | |
| DNA | 6179 | MG29-1-human | Nucleotide | N.A. | ATTGTTCCTCTAGTTATTTCCT |
| sequence | | ANGPTL3-B1 | | | |
| of human | | | | | |
| ANGPTL | | | | | |
| 3 target | | | | | |
| site | | | | | |
| DNA | 6180 | MG29-1-human | Nucleotide | N.A. | TTGTTCCTCTAGTTATTTCCTC |
| sequence | | ANGPTL3-C1 | | | |
| of human | | | | | |
| ANGPTL | | | | | |
| 3 target | | | | | |
| site | | | | | |
| DNA | 6181 | MG29-1-human | Nucleotide | N.A. | CTCCAGAATTGATCAAGACAAT |
| sequence | | ANGPTL3-D1 | | | |
| of human | | | | | |
| ANGPTL | | | | | |
| 3 target | | | | | |
| site | | | | | |
| DNA | 6182 | MG29-1-human | Nucleotide | N.A. | ATTCTCTATCTCCAGAGCCAAA |
| sequence | | ANGPTL3-E1 | | | |
| of human | | | | | |
| ANGPTL | | | | | |
| 3 target | | | | | |
| site | | | | | |
| DNA | 6183 | MG29-1-human | Nucleotide | N.A. | AGCCAATGGCCTCCTTCAGTTG |
| sequence | | ANGPTL3-F1 | | | |
| of human | | | | | |
| ANGPTL | | | | | |
| 3 target | | | | | |
| site | | | | | |
| DNA | 6184 | MG29-1-human | Nucleotide | N.A. | GCCAATGGCCTCCTTCAGTTGG |
| sequence | | ANGPTL3-G1 | | | |
| of human | | | | | |
| ANGPTL | | | | | |
| 3 target | | | | | |
| site | | | | | |
| DNA | 6185 | MG29-1-human | Nucleotide | N.A. | TCCATAAGACGAAGGGCCAAAT |
| sequence | | ANGPTL3-H1 | | | |
| of human | | | | | |
| ANGPTL | | | | | |
| 3 target | | | | | |
| site | | | | | |
| DNA | 6186 | MG29-1-human | Nucleotide | N.A. | AAAAACTCAACATATTTGATCA |
| sequence | | ANGPTL3-A2 | | | |
| of human | | | | | |
| ANGPTL | | | | | |
| 3 target | | | | | |
| site | | | | | |
| DNA | 6187 | MG29-1-human | Nucleotide | N.A. | ATCAGTCTTTTTATGATCTATC |
| sequence | | ANGPTL3-B2 | | | |
| of human | | | | | |
| ANGPTL | | | | | |
| 3 target | | | | | |
| site | | | | | |
| DNA | 6188 | MG29-1-human | Nucleotide | N.A. | TATGATCTATCGCTGCAAACCA |
| sequence | | ANGPTL3-C2 | | | |
| of human | | | | | |
| ANGPTL | | | | | |
| 3 target | | | | | |
| site | | | | | |
| DNA | 6189 | MG29-1-human | Nucleotide | N.A. | ATGATCTATCGCTGCAAACCAG |
| sequence | | ANGPTL3-D2 | | | |
| of human | | | | | |
| ANGPTL | | | | | |
| 3 target | | | | | |
| site | | | | | |
| DNA | 6190 | MG29-1-human | Nucleotide | N.A. | TGATCTATCGCTGCAAACCAGT |
| sequence | | ANGPTL3-E2 | | | |
| of human | | | | | |
| ANGPTL | | | | | |
| 3 target | | | | | |
| site | | | | | |
| DNA | 6191 | MG29-1-human | Nucleotide | N.A. | GAAGAGCAACTAACTAACTTAA |
| sequence | | ANGPTL3-F2 | | | |
| of human | | | | | |
| ANGPTL | | | | | |
| 3 target | | | | | |
| site | | | | | |
| DNA | 6192 | MG29-1-human | Nucleotide | N.A. | AGTGAAGTTACTTCTGGGTGTT |
| sequence | | ANGPTL3-G2 | | | |
| of human | | | | | |
| ANGPTL | | | | | |
| 3 target | | | | | |
| site | | | | | |
| DNA | 6193 | MG29-1-human | Nucleotide | N.A. | GAATTAAGTTAGTTAGTTGCTC |
| sequence | | ANGPTL3-H2 | | | |
| of human | | | | | |
| ANGPTL | | | | | |
| 3 target | | | | | |
| site | | | | | |
| DNA | 6194 | MG29-1-human | Nucleotide | N.A. | TTCTTCTAGGAGGCTTTCAAGT |
| sequence | | ANGPTL3-A3 | | | |
| of human | | | | | |
| ANGPTL | | | | | |
| 3 target | | | | | |
| site | | | | | |
| DNA | 6195 | MG29-1-human | Nucleotide | N.A. | TCTTCTAGGAGGCTTTCAAGTT |
| sequence | | ANGPTL3-B3 | | | |
| of human | | | | | |
| ANGPTL | | | | | |
| 3 target | | | | | |
| site | | | | | |
| DNA | 6196 | MG29-1-human | Nucleotide | N.A. | CTTCTAGGAGGCTTTCAAGTTT |
| sequence | | ANGPTL3-C3 | | | |
| of human | | | | | |
| ANGPTL | | | | | |
| 3 target | | | | | |
| site | | | | | |
| DNA | 6197 | MG29-1-human | Nucleotide | N.A. | TTCTAGGAGGCTTTCAAGTTTT |
| sequence | | ANGPTL3-D3 | | | |
| of human | | | | | |
| ANGPTL | | | | | |
| 3 target | | | | | |
| site | | | | | |
| DNA | 6198 | MG29-1-human | Nucleotide | N.A. | AAGTTTTGAGTTGAGTTCAAGT |
| sequence | | ANGPTL3-E3 | | | |
| of human | | | | | |
| ANGPTL | | | | | |
| 3 target | | | | | |
| site | | | | | |
| DNA | 6199 | MG29-1-human | Nucleotide | N.A. | GAGTTGAGTTCAAGTGACATAT |
| sequence | | ANGPTL3-F3 | | | |
| of human | | | | | |
| ANGPTL | | | | | |
| 3 target | | | | | |
| site | | | | | |
| DNA | 6200 | MG29-1-human | Nucleotide | N.A. | AGTTGAGTTCAAGTGACATATT |
| sequence | | ANGPTL3-G3 | | | |
| of human | | | | | |
| ANGPTL | | | | | |
| 3 target | | | | | |
| site | | | | | |
| DNA | 6201 | MG29-1-human | Nucleotide | N.A. | CCTCTTCATTTTTGACTTGTAG |
| sequence | | ANGPTL3-H3 | | | |
| of human | | | | | |
| ANGPTL | | | | | |
| 3 target | | | | | |
| site | | | | | |
| DNA | 6202 | MG29-1-human | Nucleotide | N.A. | TATGTAGTTCTTCTCAGTTCCT |
| sequence | | ANGPTL3-A4 | | | |
| of human | | | | | |
| ANGPTL | | | | | |
| 3 target | | | | | |
| site | | | | | |
| DNA | 6203 | MG29-1-human | Nucleotide | N.A. | CTTCTTCTTTGATTTCACTGGT |
| sequence | | ANGPTL3-B4 | | | |
| of human | | | | | |
| ANGPTL | | | | | |
| 3 target | | | | | |
| site | | | | | |
| DNA | 6204 | MG29-1-human | Nucleotide | N.A. | TTCTTCTTTGATTTCACTGGTT |
| sequence | | ANGPTL3-C4 | | | |
| of human | | | | | |
| ANGPTL | | | | | |
| 3 target | | | | | |
| site | | | | | |
| DNA | 6205 | MG29-1-human | Nucleotide | N.A. | ATTTCACTGGTTTGCAGCGATA |
| sequence | | ANGPTL3-D4 | | | |
| of human | | | | | |
| ANGPTL | | | | | |
| 3 target | | | | | |
| site | | | | | |
| DNA | 6206 | MG29-1-human | Nucleotide | N.A. | ACTGGTTTGCAGCGATAGATCA |
| sequence | | ANGPTL3-E4 | | | |
| of human | | | | | |
| ANGPTL | | | | | |
| 3 target | | | | | |
| site | | | | | |
| DNA | 6207 | MG29-1-human | Nucleotide | N.A. | CAGCGATAGATCATAAAAAGAC |
| sequence | | ANGPTL3-F4 | | | |
| of human | | | | | |
| ANGPTL | | | | | |
| 3 target | | | | | |
| site | | | | | |
| DNA | 6208 | MG29-1-human | Nucleotide | N.A. | GAAATATGTCATTAATTTGGCC |
| sequence | | ANGPTL3-G4 | | | |
| of human | | | | | |
| ANGPTL | | | | | |
| 3 target | | | | | |
| site | | | | | |
| DNA | 6209 | MG29-1-human | Nucleotide | N.A. | AAATATGTCATTAATTTGGCCC |
| sequence | | ANGPTL3-H4 | | | |
| of human | | | | | |
| ANGPTL | | | | | |
| 3 target | | | | | |
| site | | | | | |
| DNA | 6210 | MG29-1-human | Nucleotide | N.A. | GCCCTTCGTCTTATGGACAAAG |
| sequence | | ANGPTL3-A5 | | | |
| of human | | | | | |
| ANGPTL | | | | | |
| 3 target | | | | | |
| site | | | | | |
| DNA | 6211 | MG29-1-human | Nucleotide | N.A. | AGACCATGTCCCAACTGAAGGA |
| sequence | | ANGPTL3-B5 | | | |
| of human | | | | | |
| ANGPTL | | | | | |
| 3 target | | | | | |
| site | | | | | |
| DNA | 6212 | MG29-1-human | Nucleotide | N.A. | TACATCGTCTAACATAGCAAAT |
| sequence | | ANGPTL3-C5 | | | |
| of human | | | | | |
| ANGPTL | | | | | |
| 3 target | | | | | |
| site | | | | | |
| DNA | 6213 | MG29-1-human | Nucleotide | N.A. | ACATCGTCTAACATAGCAAATC |
| sequence | | ANGPTL3-D5 | | | |
| of human | | | | | |
| ANGPTL | | | | | |
| 3 target | | | | | |
| site | | | | | |
| DNA | 6214 | MG29-1-human | Nucleotide | N.A. | CATCGTCTAACATAGCAAATCT |
| sequence | | ANGPTL3-E5 | | | |
| of human | | | | | |
| ANGPTL | | | | | |
| 3 target | | | | | |
| site | | | | | |
| DNA | 6215 | MG29-1-human | Nucleotide | N.A. | GGCTCTGGAGATAGAGAATCAA |
| sequence | | ANGPTL3-F5 | | | |
| of human | | | | | |
| ANGPTL | | | | | |
| 3 target | | | | | |
| site | | | | | |
| DNA | 6216 | MG29-1-human | Nucleotide | N.A. | GCTCTGGAGATAGAGAATCAAA |
| sequence | | ANGPTL3-G5 | | | |
| of human | | | | | |
| ANGPTL | | | | | |
| 3 target | | | | | |
| site | | | | | |
| DNA | 6217 | MG29-1-human | Nucleotide | N.A. | TTTTATTTGACTATGCTGTTGG |
| sequence | | ANGPTL3-H5 | | | |
| of human | | | | | |
| ANGPTL | | | | | |
| 3 target | | | | | |
| site | | | | | |
| DNA | 6218 | MG29-1-human | Nucleotide | N.A. | ATTTGACTATGCTGTTGGTTTA |
| sequence | | ANGPTL3-A6 | | | |
| of human | | | | | |
| ANGPTL | | | | | |
| 3 target | | | | | |
| site | | | | | |
| DNA | 6219 | MG29-1-human | Nucleotide | N.A. | TTTGACTATGCTGTTGGTTTAA |
| sequence | | ANGPTL3-B6 | | | |
| of human | | | | | |
| ANGPTL | | | | | |
| 3 target | | | | | |
| site | | | | | |
| DNA | 6220 | MG29-1-human | Nucleotide | N.A. | ACTATGCTGTTGGTTTAATTGT |
| sequence | | ANGPTL3-C6 | | | |
| of human | | | | | |
| ANGPTL | | | | | |
| 3 target | | | | | |
| site | | | | | |
| DNA | 6221 | MG29-1-human | Nucleotide | N.A. | ATTGTTTATATTGGTCTTCCAC |
| sequence | | ANGPTL3-D6 | | | |
| of human | | | | | |
| ANGPTL | | | | | |
| 3 target | | | | | |
| site | | | | | |
| DNA | 6222 | MG29-1-human | Nucleotide | N.A. | TATTGGTCTTCCACGGTCTGGA |
| sequence | | ANGPTL3-E6 | | | |
| of human | | | | | |
| ANGPTL | | | | | |
| 3 target | | | | | |
| site | | | | | |
| DNA | 6223 | MG29-1-human | Nucleotide | N.A. | TATTCTTTTATCAGCTCAGAAG |
| sequence | | ANGPTL3-F6 | | | |
| of human | | | | | |
| ANGPTL | | | | | |
| 3 target | | | | | |
| site | | | | | |
| DNA | 6224 | MG29-1-human | Nucleotide | N.A. | ATCAGCTCAGAAGGACTAGTAT |
| sequence | | ANGPTL3-G6 | | | |
| of human | | | | | |
| ANGPTL | | | | | |
| 3 target | | | | | |
| site | | | | | |
| DNA | 6225 | MG29-1-human | Nucleotide | N.A. | TCAGCTCAGAAGGACTAGTATT |
| sequence | | ANGPTL3-H6 | | | |
| of human | | | | | |
| ANGPTL | | | | | |
| 3 target | | | | | |
| site | | | | | |
| DNA | 6226 | MG29-1-human | Nucleotide | N.A. | TCTATCTTCCAAGCCAAGAGCA |
| sequence | | ANGPTL3-A7 | | | |
| of human | | | | | |
| ANGPTL | | | | | |
| 3 target | | | | | |
| site | | | | | |
| DNA | 6227 | MG29-1-human | Nucleotide | N.A. | TGTGGGTTCTTGAATACTAGTC |
| sequence | | ANGPTL3-B7 | | | |
| of human | | | | | |
| ANGPTL | | | | | |
| 3 target | | | | | |
| site | | | | | |
| DNA | 6228 | MG29-1-human | Nucleotide | N.A. | ATTGATTCTAGGCATTCCTGCT |
| sequence | | ANGPTL3-C7 | | | |
| of human | | | | | |
| ANGPTL | | | | | |
| 3 target | | | | | |
| site | | | | | |
| DNA | 6229 | MG29-1-human | Nucleotide | N.A. | TTGATTCTAGGCATTCCTGCTG |
| sequence | | ANGPTL3-D7 | | | |
| of human | | | | | |
| ANGPTL | | | | | |
| 3 target | | | | | |
| site | | | | | |
| DNA | 6230 | MG29-1-human | Nucleotide | N.A. | TAACAGAGGTGAACATACAAGT |
| sequence | | ANGPTL3-E7 | | | |
| of human | | | | | |
| ANGPTL | | | | | |
| 3 target | | | | | |
| site | | | | | |
| DNA | 6231 | MG29-1-human | Nucleotide | N.A. | TCATGTCTACTGTGATGTTATA |
| sequence | | ANGPTL3-F7 | | | |
| of human | | | | | |
| ANGPTL | | | | | |
| 3 target | | | | | |
| site | | | | | |
| DNA | 6232 | MG29-1-human | Nucleotide | N.A. | CATGTCTACTGTGATGTTATAT |
| sequence | | ANGPTL3-G7 | | | |
| of human | | | | | |
| ANGPTL | | | | | |
| 3 target | | | | | |
| site | | | | | |
| DNA | 6233 | MG29-1-human | Nucleotide | N.A. | ATGTCTACTGTGATGTTATATC |
| sequence | | ANGPTL3-H7 | | | |
| of human | | | | | |
| ANGPTL | | | | | |
| 3 target | | | | | |
| site | | | | | |
| DNA | 6234 | MG29-1-human | Nucleotide | N.A. | ACCTGATATAACATCACAGTAG |
| sequence | | ANGPTL3-A8 | | | |
| of human | | | | | |
| ANGPTL | | | | | |
| 3 target | | | | | |
| site | | | | | |
| DNA | 6235 | MG29-1-human | Nucleotide | N.A. | CCTGATATAACATCACAGTAGA |
| sequence | | ANGPTL3-B8 | | | |
| of human | | | | | |
| ANGPTL | | | | | |
| 3 target | | | | | |
| site | | | | | |
| DNA | 6236 | MG29-1-human | Nucleotide | N.A. | ATTCATTATATTCAGGTAGTCC |
| sequence | | ANGPTL3-C8 | | | |
| of human | | | | | |
| ANGPTL | | | | | |
| 3 target | | | | | |
| site | | | | | |
| DNA | 6237 | MG29-1-human | Nucleotide | N.A. | TAGTTCTCCCACGTTTCATTGA |
| sequence | | ANGPTL3-D8 | | | |
| of human | | | | | |
| ANGPTL | | | | | |
| 3 target | | | | | |
| site | | | | | |
| DNA | 6238 | MG29-1-human | Nucleotide | N.A. | ATTGAAGTTTTGTGATCCATCT |
| sequence | | ANGPTL3-E8 | | | |
| of human | | | | | |
| ANGPTL | | | | | |
| 3 target | | | | | |
| site | | | | | |
| DNA | 6239 | MG29-1-human | Nucleotide | N.A. | GTGATCCATCTATTCGATGTTG |
| sequence | | ANGPTL3-F8 | | | |
| of human | | | | | |
| ANGPTL | | | | | |
| 3 target | | | | | |
| site | | | | | |
| DNA | 6240 | MG29-1-human | Nucleotide | N.A. | TGATCCATCTATTCGATGTTGA |
| sequence | | ANGPTL3-G8 | | | |
| of human | | | | | |
| ANGPTL | | | | | |
| 3 target | | | | | |
| site | | | | | |
| DNA | 6241 | MG29-1-human | Nucleotide | N.A. | CTTTTCAGGAGAATTTTGGTTG |
| sequence | | ANGPTL3-H8 | | | |
| of human | | | | | |
| ANGPTL | | | | | |
| 3 target | | | | | |
| site | | | | | |
| DNA | 6242 | MG29-1-human | Nucleotide | N.A. | TTTTCAGGAGAATTTTGGTTGG |
| sequence | | ANGPTL3-A9 | | | |
| of human | | | | | |
| ANGPTL | | | | | |
| 3 target | | | | | |
| site | | | | | |
| DNA | 6243 | MG29-1-human | Nucleotide | N.A. | CAGGAGAATTTTGGTTGGGCCT |
| sequence | | ANGPTL3-B9 | | | |
| of human | | | | | |
| ANGPTL | | | | | |
| 3 target | | | | | |
| site | | | | | |
| DNA | 6244 | MG29-1-human | Nucleotide | N.A. | AGGAGAATTTTGGTTGGGCCTA |
| sequence | | ANGPTL3-C9 | | | |
| of human | | | | | |
| ANGPTL | | | | | |
| 3 target | | | | | |
| site | | | | | |
| DNA | 6245 | MG29-1-human | Nucleotide | N.A. | GGTTGGGCCTAGAGAAGATATA |
| sequence | | ANGPTL3-D9 | | | |
| of human | | | | | |
| ANGPTL | | | | | |
| 3 target | | | | | |
| site | | | | | |
| DNA | 6246 | MG29-1-human | Nucleotide | N.A. | GTTGGGCCTAGAGAAGATATAC |
| sequence | | ANGPTL3-E9 | | | |
| of human | | | | | |
| ANGPTL | | | | | |
| 3 target | | | | | |
| site | | | | | |
| DNA | 6247 | MG29-1-human | Nucleotide | N.A. | ACGAATTGAGTTGGAAGACTGG |
| sequence | | ANGPTL3-F9 | | | |
| of human | | | | | |
| ANGPTL | | | | | |
| 3 target | | | | | |
| site | | | | | |
| DNA | 6248 | MG29-1-human | Nucleotide | N.A. | CGAATTGAGTTGGAAGACTGGA |
| sequence | | ANGPTL3-G9 | | | |
| of human | | | | | |
| ANGPTL | | | | | |
| 3 target | | | | | |
| site | | | | | |
| DNA | 6249 | MG29-1-human | Nucleotide | N.A. | TACTTGGGAAATCACGAAACCA |
| sequence | | ANGPTL3-H9 | | | |
| of human | | | | | |
| ANGPTL | | | | | |
| 3 target | | | | | |
| site | | | | | |
| DNA | 6250 | MG29-1-human | Nucleotide | N.A. | ACTTGGGAAATCACGAAACCAA |
| sequence | | ANGPTL3-A10 | | | |
| of human | | | | | |
| ANGPTL | | | | | |
| 3 target | | | | | |
| site | | | | | |
| DNA | 6251 | MG29-1-human | Nucleotide | N.A. | CTTGGGAAATCACGAAACCAAC |
| sequence | | ANGPTL3-B10 | | | |
| of human | | | | | |
| ANGPTL | | | | | |
| 3 target | | | | | |
| site | | | | | |
| DNA | 6252 | MG29-1-human | Nucleotide | N.A. | GTGTTTTCTACTTGGGATCACA |
| sequence | | ANGPTL3-C10 | | | |
| of human | | | | | |
| ANGPTL | | | | | |
| 3 target | | | | | |
| site | | | | | |
| DNA | 6253 | MG29-1-human | Nucleotide | N.A. | CTACTTGGGATCACAAAGCAAA |
| sequence | | ANGPTL3-D10 | | | |
| of human | | | | | |
| ANGPTL | | | | | |
| 3 target | | | | | |
| site | | | | | |
| DNA | 6254 | MG29-1-human | Nucleotide | N.A. | TACTTGGGATCACAAAGCAAAA |
| sequence | | ANGPTL3-E10 | | | |
| of human | | | | | |
| ANGPTL | | | | | |
| 3 target | | | | | |
| site | | | | | |
| DNA | 6255 | MG29-1-human | Nucleotide | N.A. | GCTTTGTGATCCCAAGTAGAAA |
| sequence | | ANGPTL3-F10 | | | |
| of human | | | | | |
| ANGPTL | | | | | |
| 3 target | | | | | |
| site | | | | | |
| DNA | 6256 | MG29-1-human | Nucleotide | N.A. | CTTTGTGATCCCAAGTAGAAAA |
| sequence | | ANGPTL3-G10 | | | |
| of human | | | | | |
| ANGPTL | | | | | |
| 3 target | | | | | |
| site | | | | | |
| DNA | 6257 | MG29-1-human | Nucleotide | N.A. | TGATCCCAAGTAGAAAACACCA |
| sequence | | ANGPTL3-H10 | | | |
| of human | | | | | |
| ANGPTL | | | | | |
| 3 target | | | | | |
| site | | | | | |
| DNA | 6258 | MG29-1-human | Nucleotide | N.A. | TTTTCCGGGATTGCATTGGGGA |
| sequence | | ANGPTL3-A11 | | | |
| of human | | | | | |
| ANGPTL | | | | | |
| 3 target | | | | | |
| site | | | | | |
| DNA | 6259 | MG29-1-human | Nucleotide | N.A. | CCGGGATTGCATTGGGGACATT |
| sequence | | ANGPTL3-B11 | | | |
| of human | | | | | |
| ANGPTL | | | | | |
| 3 target | | | | | |
| site | | | | | |
| DNA | 6260 | MG29-1-human | Nucleotide | N.A. | CGGGATTGCATTGGGGACATTG |
| sequence | | ANGPTL3-C11 | | | |
| of human | | | | | |
| ANGPTL | | | | | |
| 3 target | | | | | |
| site | | | | | |
| DNA | 6261 | MG29-1-human | Nucleotide | N.A. | GTGATTTCCCAAGTAAAAAGAA |
| sequence | | ANGPTL3-D11 | | | |
| of human | | | | | |
| ANGPTL | | | | | |
| 3 target | | | | | |
| site | | | | | |
| DNA | 6262 | MG29-1-human | Nucleotide | N.A. | TTGTCTTTCCAGTCTTCCAACT |
| sequence | | ANGPTL3-E11 | | | |
| of human | | | | | |
| ANGPTL | | | | | |
| 3 target | | | | | |
| site | | | | | |
| DNA | 6263 | MG29-1-human | Nucleotide | N.A. | CAGTCTTCCAACTCAATTCGTA |
| sequence | | ANGPTL3-F11 | | | |
| of human | | | | | |
| ANGPTL | | | | | |
| 3 target | | | | | |
| site | | | | | |
| DNA | 6264 | MG29-1-human | Nucleotide | N.A. | GGAGGCTGGTGGTGGCATGATG |
| sequence | | ANGPTL3-G11 | | | |
| of human | | | | | |
| ANGPTL | | | | | |
| 3 target | | | | | |
| site | | | | | |
| DNA | 6265 | MG29-1-human | Nucleotide | N.A. | AAATTTGCCTCAGTTCATTCAA |
| sequence | | ANGPTL3-H11 | | | |
| of human | | | | | |
| ANGPTL | | | | | |
| 3 target | | | | | |
| site | | | | | |
| DNA | 6266 | MG29-1-human | Nucleotide | N.A. | AATTTGCCTCAGTTCATTCAAA |
| sequence | | ANGPTL3-A12 | | | |
| of human | | | | | |
| ANGPTL | | | | | |
| 3 target | | | | | |
| site | | | | | |
| DNA | 6267 | MG29-1-human | Nucleotide | N.A. | CCTCAGTTCATTCAAAGCTTTC |
| sequence | | ANGPTL3-B12 | | | |
| of human | | | | | |
| ANGPTL | | | | | |
| 3 target | | | | | |
| site | | | | | |
| DNA | 6268 | MG29-1-human | Nucleotide | N.A. | TGAATCTGTTGGATGGATCAAC |
| sequence | | ANGPTL3-C12 | | | |
| of human | | | | | |
| ANGPTL | | | | | |
| 3 target | | | | | |
| site | | | | | |
| DNA | 6269 | MG29-1-human | Nucleotide | N.A. | TAGAGTATAACCTTCCATTTTG |
| sequence | | ANGPTL3-D12 | | | |
| of human | | | | | |
| ANGPTL | | | | | |
| 3 target | | | | | |
| site | | | | | |
| DNA | 6270 | MG29-1-human | Nucleotide | N.A. | GAGACTTCCAAGATAATCCTCT |
| sequence | | ANGPTL3-E12 | | | |
| of human | | | | | |
| ANGPTL | | | | | |
| 3 target | | | | | |
| site | | | | | |
| DNA | 6271 | MG29-1-human | Nucleotide | N.A. | AGACTTCCAAGATAATCCTCTT |
| sequence | | ANGPTL3-F12 | | | |
| of human | | | | | |
| ANGPTL | | | | | |
| 3 target | | | | | |
| site | | | | | |
| DNA | 6272 | MG29-1-human | Nucleotide | N.A. | GCTCTTGGTTTGTTATATTTAC |
| sequence | | ANGPTL3-G12 | | | |
| of human | | | | | |
| ANGPTL | | | | | |
| 3 target | | | | | |
| site | | | | | |
| DNA | 6273 | MG29-1-human | Nucleotide | N.A. | CTCTTGGTTTGTTATATTTACC |
| sequence | | ANGPTL3-H12 | | | |
| of human | | | | | |
| ANGPTL | | | | | |
| 3 target | | | | | |
| site | | | | | |
| MG91 | 6274 | MG91-666 | Protein | Unknown | MANNKNDNEGRFVYTFNCLKTNTAQEHILNEMFKQATSLYNDIQRQMLNTYKFIISHNAYKNAE |
| active | | effector | | | TRKEKNDFIKNFKIDVKSARRGIISKSFNGDKGYIASLSVRYGVNYPYISGTIAEDFGKNAWTAWE |
| effector | | | | | KKLWGNGKRITFHSNENPIKSISTRYKTSNKKLSGMDFDEDVKNVIITVGKHKLTIPIISRGTEYD |
| | | | | | AYAIDLIKNHMFSNGTIVRKKIRGKIKYELQITLKGVPYNKMRKLGKGNVGVDIGMSMVATYG |
| | | | | | NKLSLDALSAENKKEYQKELEVLERKMDRSRRATNPDNYDDKGRIVGKEKRTPWVYSKNYNVL |
| | | | | | KNKHSEIFRRYTNKRKILQNDLSNKLLEMGDTFYIENCNIAGMAKRAKETTVNPKTGRPRSKKR |
| | | | | | LGKSIQSNAPSEFLETLKRKVTTLGGTVYNVNPQIAATQFDFTDGTFKKHSLSERNVTLSNGNKH |
| | | | | | TRDGIAAFNLKHSKVGATEKLVDSYNITEMMNDYDKFIISERQEMNEHKNGLKISKNSMGIFGC* |
| MG91 | 6275 | MG91-667 | Protein | Unknown | MYCIKFPLKTKSSDEARIDKFFIHCCMVYNRVNGILSKEWRRITEECKDDNGKVDYKMRRKIAK |
| active | | effector | | | EISYNEGGISSDATKEGGKTYSMFSRFGITNIIACICKEDIGNGHSYANLGENNISISSKYQSQIALR |
| effector | | | | | LTGAWEKVMKENAVSHKKKCSEWGSMKSNINEKTKHILIDIEKKTLSVKYGKNNYMVIPFVAN |
| | | | | | PSKKEYEAVALSSTIKELGITSEVVRGRKRYYLTATVDGTPYNKGRKLGEGAIGIDPGVSSVTYY |
| | | | | | GKTVGQYKMDTDIKKLEDEKAKLLRYLDRSRRATNKDNYTADGQIKRGIKLNWVKSNRYIVAQ |
| | | | | | NRLREIERSISDKRKREQIDFVNEMLSEGNELHIEKNDVSSWSRRKSGITKGKNGRIKSNKRFGKS |
| | | | | | LHYAAPAQFVTIAKNKFTALGGTVVEVPSSVAAATATDHTSNFERTKRELKERSVKLSDGTVHD |
| | | | | | RDAHAAFNLKHCREDGKYDEEGMLSDYGNFCREEQKAWDQLKYQK* |
| MG91 | 6276 | MG91-668 | Protein | Unknown | MAKKENTNTNPSFVIEFRMHPEPWQADILSKQMEYLRHLYNRANSILLREYKKMIATPEFKEAV |
| active | | effector | | | ESKKKKNIAEVVKNYKFVVDMGVFVQEVTFSEFGFKGLVRRFGKLLIDDNSIYSDKGINTTMLGI |
| effector | | | | | VSNRLWSAYDKLLFDKKCTMTHFKSIGMFNSLPFGFSSGNLIGIQNIDFKNNVIVIRRKKQTGMSI |
| | | | | | RFEGIKTHYDNLALNGGDVTIKQLTIVRRTIRGKERYFVQFTINGTAPSTGRCIGTGTLGLDMGP |
| | | | | | HSLKYVADDAIDYINLSDSSNEDFAEYKRLQRKLDRSRRATNLHMYDEQGCSIKGAKQTVKSNR |
| | | | | | YKKTEAKLNDMKRQAAARRKIAQNIAANQVLVHGNHIVVEDNPFKGWQKRRSGKAFNKKGRQ |
| | | | | | LSKKRFGRSILKGAPSQFVTILENKANASGGWMYKASCKNAASKFDIFTKEVDNDIKLSDRRVT |
| | | | | | MSDGIEHDRDYNAAFKLKHLKPFSKEQKDYDYVAMYRDYPKFCEMEKTRESSLKQ* |
| MG91 | 6277 | MG91-669 | Protein | Unknown | MQFTVVIPFKPSNELKNDIDKGLKLLTTRYNTEAKKLKKRYDFWKNTKAYKIAEKEGIDSVSKF |
| effector | | effector | | | WEERSFNGEYGIDKLFKINNFKTHTKPKKNIYKNTIVNASMLQILRANLWRSVDKLIKGKGKNIR |
| | | | | | YVTMQTIPFKSLRGIKWNQKDSVFSFTHKRGHVITQHIDVKTPYELHAFNNCDMRMVTIKKEIIR |
| | | | | | GKEKYFFHICFEGTPYNKGRALGTASVGIDPSLENMYACFSNGDMEKLSLIQRIDEEFDIYHKVH |
| | | | | | VNKIDLLRQKLDRQRRANNPQFFNENGTINREALKQANYTWNDSNGYKKTRNALKDIQRKIAL |
| | | | | | RRKQCHFALANYILSKANKIIVEHNKFAAFAKKSQKDTYKPNGQQYSKRRFGRSINHGAPSYFIT |
| | | | | | ILKNKALCWGEKASFKLLSEFNGCTKFDHTNQEFNNEIKRNDKVVTLSNGDKVDRDLHAAMNIL |
| | | | | | FCENGIEQNARRRVEKSADHFNIAIMEEFYNQHKDKMIAI* |
| MG91 | 6278 | MG91-670 | Protein | Unknown | MPFKPSNELQHDIEQGFKLLTIRYNTELKKLKKRYDYLIKTQEYEIAKREKHEKTFWEDNNFTK |
| effector | | effector | | | YDFYEFFFRINSFKRAQHPQQSTYDNTIVSSTMLRALGDHLLSSFDKLLYQNGKDVHPKKISSMTF |
| | | | | | RGLVQIRYNSQTQSFEFTHRGRRNIISQKVDIKTDYEIYAFNNPIKEVTIKKQIIRGKEKYFFHICF |
| | | | | | RGTPYNKGRELGTNSVGIDPSMLKMFACYSNGEMIEHSLLDKIDEKSGEICDSKYNSDKYEKLE |
| | | | | | KKIGVLQTQINRRRRIENPKFFKENGEINEEALNQARLEHPNSDPWKYSKATIKMRNKVAQIKR |
| | | | | | NLALHRKECHFRLANYILSKANTIKVENNSYKSFQARAKETTYNANGRPRSKKRFGKSIQKGAPS |
| | | | | | AFITILKNKAASWGDRVSFSEVGASEACTQFDHTNDEFTKHELKERVVELSNGDRVHRDFHAAM |
| | | | | | NILFFKNTVTKSKKGTKKDSDHFDIEGLREFYSQHRENMIT* |
| MG91 | 6279 | MG91-671 | Protein | Unknown | MSDSSTEKSVFVVTFPLKTEKWQEDRINKMMRLLTVFYNEKQKVLLERWMHIRNSAEYKEHKE |
| active | | effector | | | EKSKNSLTAYMRNFGFSEFGFKEFFKDKNQTDSPYITHGLNSAILRNLAKSAWSAWSKKLEEKK |
| effector | | | | | KNIFIHTDKDVSIIKSDFKSSNNKISGFDVNYEDYSITMSASKPHVHTMFTIPFVVDRNSEYELFAL |
| | | | | | GEIQNDPTKLRNLAIVRKEVRGKYKYYVQFSIAGKPYNKGRQLGSGVVGIDPGPSKIAVVSDTAV |
| | | | | | RIIPLAKSIERDERETRRLQRKLDRSRRAMNPDNYNEDGTLSKGKHEWVKSHHYEETRSILADR |
| | | | | | QRKLAAKRKIAHNELANELLQMGNEFHVENNSFRSMQVRAKETTKNANGKNRTKKRFGKSLA |
| | | | | | NRAPSEFLIILENKVKQYENGVYVDIPDSIACTQYDFTSGDFSAHELRERTITTSDGIRHDRDALAA |
| | | | | | FNMKFVRTEQVVEKKKVKKAVDNFDNESMAEFYPLFCQMENKE* |
| MG91 | 6280 | MG91-672 | Protein | Unknown | MPNNIDKSVFVVTFPLKTEVWQEDRINKMMRLLTQLYNDKQDLLLRRYIHLSHSAEFKEARKT |
| active | | effector | | | GIKTFSKFMTEQGFSKFGIEKVFSDSSKSDSLQNQQLLCHGLNSDIIQELSHRSWSAWEKKLFGH |
| effector | | | | | GKFIKTNNEVDTLKSRAHKGNVTGFRCSMVDFTLTMTATKPNKHIVFTIPFVVDRNSEYELFALN |
| | | | | | QEIRNIAIVRKKIRGRYKYFVQFSFAGVPHNKGRKLGKGVVGIDPGPSKIAVVSDTEVKIMPLAES |
| | | | | | IREDEREKARIQRKLDRSRRAMNPDNYNEDGTISKGRHEWNKSNHYIALQSKLADNQRKLATKR |
| | | | | | KIAHNELANELLAMGNEFRVENNSFRSMQARTKDTTKNARGKNRSKKRFGKSLYNCAPSEFLTI |
| | | | | | LQNKVNQYEDGKYVDIPASTACTQYDFTNGQFTKHELRERTITTSDGKQHDRDALAAFNMKFV |
| | | | | | REEKVVGKKKIEKSDKNFDNESMATFYPRFCQMENKH* |
| MG91 | 6281 | MG91-673 | Protein | Unknown | MAHKENQKAFVVTFPLRTEKWQEDRIDKMMRMLTTFYNDRQRKLVRRYIYLSHSKAYKEAKG |
| active | | effector | | | KGVVAFKNYMKENGFSQYGLDAFFKADTKGALYQCGLNSMFLQYLSQCAWSAWDKKLFGKG |
| effector | | | | | DFVKTDKVVNIFCSRNKKGRFCGFDYDLSTFTIRIKSTCTKEIICSIPFVVNKNSEYELYALSQKIC |
| | | | | | RIGILRKLIRSKYKYYVQFTFDGVPYNKGRNIGTGIVGIDPGPSKIAIVGDNKVGIAKLAHGIEEDE |
| | | | | | RKTARLKRKLDRSRRATNPHMYKEDGTIIKGQRQTCFSKAYNETRKQLADAQRKLAAKRKIAH |
| | | | | | NELANTLLEYGDTFKVEANSYKSMQARAKATSMTKSGRIRSKKRYGKSIKNRAPSEFLVILKNK |
| | | | | | LLYYSKGKYYDVPSSYACTQFDFTNESFTEHKISERRIVTSDGIQHNRDTLAAFNIKNAIVNDTST |
| | | | | | KKKKVTKSKEFFDIVKMKASYNEFCVMEHYLLSE* |
| MG91 | 6282 | MG91-670 | Nucleotide | Unknown | GAAATAAAAAAATAGCCAATAGCTTGATATTATTATATCATGGGTTTGTACTACCAGGTAAG |
| intergenic | | intergenic | | | AAGCTATTTGGTACAATCTCAATGGCAACTATGCCATCTTACTAACGTCAAGGCGGTTTAAA |
| region | | region 2 | | | CCTAACTTTCAAGCGCCGTACAAAAAAAATATGGTAAAACATTTTATTTTTGTGTCTTGAATT |
| potentially | | | | | CGATTTTTTCTCGCTGATTGCGACCCTAAGGTGCTGAAATAGAAGAAGATACACGCTATA |
| encoding | | | | | |
| tracrRNA | | | | | |
| MG91 | 6283 | MG91-670 repeat | Nucleotide | Unknown | CTTGTACTTACCCTATATTTTAGGG |
| CRISPR | | | | | |
| repeat | | | | | |
| MG91 | 6284 | MG91-666 sgRNA1 | Nucleotide | Artificial | ACAGAAAAGGAUUUGUUAUCCUACAUCAUCGUUAAGAUGUUUAAUUAACUUUUAGUUCUUU |
| active | | | | sequence | GAAUAUUUGAUGAAAUAAUGUGAGUGGAACAUAAAUAAUAAAGUGUUAGGUAACAGAGAC |
| effector | | | | | ACCUUAAAAUUAUGGAAAAUUUCACUAUCCUUUCGAAAGAAGGGGUAAAACAGG |
| sgRNA | | | | | |
| MG91 | 6285 | MG91-666 sgRNA1 | Nucleotide | Artificial | ACAGAAAAGGAUUUGUUAUCCUACAUCAUCGUUAAGAUGUUUAAUUAACAUAUUGUUCUUU |
| active | | Mutant 1 | | sequence | GAAUAUUUGAUGAAAUAAUGUGAGUGGAACAUAAAUAAUAAAGUGUUAGGUAACAGAGAC |
| effector | | | | | ACCUUAAAAUUAUGGAAAAUUUCACUAUCCUUUCGAAAGAAGGGGUAAAACAGG |
| sgRNA | | | | | |
| MG91 | 6286 | MG91-666 sgRNA1 | Nucleotide | Artificial | ACAGAAAAGGAUUUGUUAUCCUACAUCAUCGUUAAGAUGUUUAAUUAACUAAUAGUUCUUU |
| active | | Mutant 2 | | sequence | GAAUAUUUGAUGAAAUAAUGUGAGUGGAACAUAAAUAAUAAAGUGUUAGGUAACAGAGAC |
| effector | | | | | ACCUUAAAAUUAUGGAAAAUUUCACUAUCCUUUCGAAAGAAGGGGUAAAACAGG |
| sgRNA | | | | | |
| MG91 | 6287 | MG91-667 sgRNA1 | Nucleotide | Artificial | AGGGUAAUGUGAAACCCAAGCGGAAGUUAUACGAAAAACAUAUUGUUCAAAAUAUGUCAGU |
| active | | | | sequence | AGUUUUCCGCAAAUCGUGCGUAAAAUAGAAUCUGGAUAGAUAAUGGUUUACCAUUGUUGAA |
| effector | | | | | AGCGGUUUCUUGCUGAAUUUAUUUCGGACACACGCAGCCUUUCGGAAAUGAAAGGUGAAC |
| sgRNA | | | | | ACAGGU |
| MG91 | 6288 | MG91-667 sgRNA1 | Nucleotide | Artificial | AGGGUAAUGUGAAACCCAAGCGGAAGUUAUACGAAAAACAUAUUGUUCAAAAUAUGUCAGU |
| active | | Mutant 1 | | sequence | AGUCUUCCGCAAAUCGUGCGUAAAAUAGAAUCUGGAUAGAUAAUGGUUUACCAUUGUUGAA |
| effector | | | | | AGCGGUUUCUUGCUGAAUUUAUUUCGGACACACGCAGCCUUUCGGAAAUGAAAGGUGAAC |
| sgRNA | | | | | ACAGGU |
| MG91 | 6289 | MG91-667 sgRNA1 | Nucleotide | Artificial | AGGGUAAUGUGAAACCCAAGCGGAAGUUAUACGAAAAACAUAUUGUUCAAAAUAUGUCAGU |
| active | | Mutant 2 | | sequence | AGACUUCCGCAAAUCGUGCGUAAAAUAGAAUCUGGAUAGAUAAUGGUUUACCAUUGUUGAA |
| effector | | | | | AGCGGUUUCUUGCUGAAUUUAUUUCGGACACACGCAGCCUUUCGGAAAUGAAAGGUGAAC |
| sgRNA | | | | | ACAGGU |
| MG91 | 6290 | MG91-668 sgRNA1 | Nucleotide | Artificial | CAGUGAUACAAAUGAAAUCCCGGUUUUGUUACGCCGGGUAUCAUCUGGACAAAUGUCCAG |
| active | | | | sequence | UUCAGCUGACGUUAAUUGCCGGGUUACUGGCAUAGUCAGCGAAAGUGCGAAACGGAAAAU |
| effector | | | | | AGAACCGUUAAACGACUUCUGCUUGCAGAGGUUCAAGUAGUCUAUGAGUACGUUAGCGUU |
| sgRNA | | | | | ACUUAUAUAGAAAUAUGUUGGUGAUUAACAAG |
| MG91 | 6291 | MG91-668 sgRNA1 | Nucleotide | Artificial | CAGUGAUACAAAUGAAAUCCCGGCGUUGUUACGCCGGGUAUCAUCUGGACAAAUGUCCAG |
| active | | Mutant 1 | | sequence | UUCAGCUGACGUUAAUUGCCGGGUUACUGGCAUAGUCAGCGAAAGUGCGAAACGGAAAAU |
| effector | | | | | AGAACCGUUAAACGACUUCUGCUUGCAGAGGUUCAAGUAGUCUAUGAGUACGUUAGCGUU |
| sgRNA | | | | | ACUUAUAUAGAAAUAUGUUGGUGAUUAACAAG |
| MG91 | 6292 | MG91-668 sgRNA1 | Nucleotide | Artificial | CAGUGAUACAAAUGAAAUCCCGGCUAUGUUACGCCGGGUAUCAUCUGGACAAAUGUCCAG |
| active | | Mutant 2 | | sequence | UUCAGCUGACGUUAAUUGCCGGGUUACUGGCAUAGUCAGCGAAAGUGCGAAACGGAAAAU |
| effector | | | | | AGAACCGUUAAACGACUUCUGCUUGCAGAGGUUCAAGUAGUCUAUGAGUACGUUAGCGUU |
| sgRNA | | | | | ACUUAUAUAGAAAUAUGUUGGUGAUUAACAAG |
| MG91 | 6293 | MG91-671 sgRNA1 | Nucleotide | Artificial | GGGAUUUGUAAUCCCGUUGUGAGCGAUAAUUGACACAAGGUGUCAUUGCUCAUCAAAAGA |
| active | | | | sequence | ACUAAUGGAACAAAAAGUGAACAAUAGGUCGUUCUCUGUACAAAAUCACAAAGAUGGAUGU |
| effector | | | | | CUCUGAAGGUACUAUCGAAAACUUUUAAGUACAUGGUUCAUGCCCUAUUUAUUGAUGAAAU |
| sgRNA | | | | | CAAUUUGUAGGGUAAAUACAAG |
| MG91 | 6294 | MG91-671 sgRNA1 | Nucleotide | Artificial | GGGAUUUGUAAUCCCGUUGUGAGCGAUAAUUGACACAAGGUGUCAUUGCUCAUCAAAAGA |
| active | | Mutant 1 | | sequence | ACUAAUGGAACUAUUAGUGAACAAUAGGUCGUUCUCUGUACAAAAUCACAAAGAUGGAUGU |
| effector | | | | | CUCUGAAGGUACUAUCGAAAACUAAUAAGUACAUGGUUCAUGCCCUAUUUAUUGAUGAAAU |
| sgRNA | | | | | CAAUUUGUAGGGUAAAUACAAG |
| MG91 | 6295 | MG91-671 sgRNA1 | Nucleotide | Artificial | GGGAUCUGUAAUCCCGUUGUGAGCGAUAAUUGACACAAGGUGUCAUUGCUCAUCAAAAGA |
| active | | Mutant 2 | | sequence | ACUAAUGGAACUAAUAGUGAACAAUAGGUCGUUCUCUGUACAAAAUCACAAAGAUGGAUGU |
| effector | | | | | CUCUGAAGGUACUAUCGAAAACUAUUAAGUACAUGGUUCAUGCCCUAUUUAUUGAUGAAAU |
| sgRNA | | | | | CAAUUUGUAGGGUAAAUACAAG |
| MG91 | 6296 | MG91-672 sgRNA1 | Nucleotide | Artificial | UGGAGAAUAAACAUUAAAGGAUUUGUAAUCCCGUUGUGAGCGCUAAUUGACACAGUGGUG |
| active | | | | sequence | UCAUUGCUCAUCGAAAGAGUGAUUGGAACAAAAGCGAACACCGUCUCGCUCUUGGCUUUUC |
| effector | | | | | UUUUUAAUUUUUGAGCUUUGAGAGUAAUGGUCGCAUGACACUUUUUAGUACAACAUUCUUA |
| sgRNA | | | | | CCUUACAUAGAAAUAUGUGGGGUAAAUACAAG |
| MG91 | 6297 | MG91-672 sgRNA1 | Nucleotide | Artificial | UGGAGAAUAAACAUUAAAGGAUUUGUAAUCCCGUUGUGAGCGCUAAUUGACACAGUGGUG |
| active | | Mutant 1 | | sequence | UCAUUGCUCAUCGAAAGAGUGAUUGGAACAAUAGCGAACACCGUCUCGCUCUUGGCUCAUC |
| effector | | | | | UAUAUAAUUGAUGAGCUUUGAGAGUAAUGGUCGCAUGACACAUAUUAGUACAACAUUCUUA |
| sgRNA | | | | | CCUUACAUAGAAAUAUGUGGGGUAAAUACAAG |
| MG91 | 6298 | MG91-672 sgRNA1 | Nucleotide | Artificial | UGGAGAAUAAACAUUAAAGGAUUUGUAAUCCCGUUGUGAGCGCUAAUUGACACAGUGGUG |
| active | | Mutant 2 | | sequence | UCAUUGCUCAUCGAAAGAGUGAUUGGAACAAUAGCGAACACCGUCUCGCUCUUGGCUUAUC |
| effector | | | | | UAUAUAUAUAAUGAGCUUUGAGAGUAAUGGUCGCAUGACACAUAUUAGUACAACAUUCUUA |
| sgRNA | | | | | CCUUACAUAGAAAUAUGUGGGGUAAAUACAAG |
| MG91 | 6299 | MG91-672 sgRNA2 | Nucleotide | Artificial | AUCUAUGGCAACGUUUUAUCCACGUUUUUGCCAAAUGGAGAAUAAACAUUAAAGGAUUUGU |
| active | | | | sequence | AAUCCCGUUGUGAGCGCUAAUUGACACAGUGGUGUCAUUGCUCAUCGAAAGAGUGAUUGG |
| effector | | | | | AACAAAAGCGAACACCGUCUCGCUCUUGGCUUUUCUUUUUAAUUUUUGAGCUUUGAGAGUA |
| sgRNA | | | | | AUGGUCGCAUGACACUUUUUAGUACAACAUUCUUACCUUACAUAGAAAUAUGUGGGGUAAA |
| | | | | | UACAAG |
| MG91 | 6300 | MG91-673 sgRNA1 | Nucleotide | Artificial | GAAAUAAUGGUAUUGUAAACCAACAUUAGCGCUAAUUGACAUAUAGUGUCAUUGCUAAAAU |
| active | | | | sequence | AAAGAUGUAUUGAAAGAAAGCAGAAUGAGAUCAUGUAGAAAACAUUCGUAAGAAUCUUUUC |
| effector | | | | | GAACGAUAUCAGAAACUCUUUAAAGUAAGUACAUCCUAUCCUUUGAAAGAAGGGUAGUUAC |
| sgRNA | | | | | AAG |
| MG91 | 6301 | MG91-673 sgRNA1 | Nucleotide | Artificial | GAAAUAAUGGUAUUGUAAACCAACAUUAGCGCUAAUUGACAUAUAGUGUCAUUGCUAAAAU |
| active | | Mutant 1 | | sequence | AAAGAUGUAUUGAAAGAAAGCAGAAUGAGAUCAUGUAGAUAUCAUUCGUAAGAAUCAUAUC |
| effector | | | | | GAACGAUAUCAGAAACUCUUUAAAGUAAGUACAUCCUAUCCUUUGAAAGAAGGGUAGUUAC |
| sgRNA | | | | | AAG |
| MG91 | 6302 | MG91-673 sgRNA1 | Nucleotide | Artificial | GAAAUAAUGGUAUUGUAAACCAACAUUAGCGCUAAUUGACAUAUAGUGUCAUUGCUAAAAU |
| active | | Mutant 2 | | sequence | AAAGAUGUAUUGAAAGAAAGCAGAAUGAGAUCAUGUAGAUAACAUUCGUAAGAAUCUUAUC |
| effector | | | | | GAACGAUAUCAGAAACUCUUUAAAGUAAGUACAUCCUAUCCUUUGAAAGAAGGGUAGUUAC |
| sgRNA | | | | | AAG |
| MG91 | 6303 | MG91-673 sgRNA2 | Nucleotide | Artificial | UGGAGCAUUAUCUCCUUUCAGAAUAAAGAAAUAAUGGUAUUGUAAACCAACAUUAGCGCUA |
| active | | | | sequence | AUUGACAUAUAGUGUCAUUGCUAAAAUAAAGAUGUAUUGAAAGAAAGCAGAAUGAGAUCAU |
| effector | | | | | GUAGAAAACAUUCGUAAGAAUCUUUUCGAACGAUAUCAGAAACUCUUUAAAGUAAGUACAU |
| sgRNA | | | | | CCUAUCCUUUGAAAGAAGGGUAGUUACAAG |
| MG91 | 6304 | MG91-155 sgRNA1 | Nucleotide | Artificial | AAAAGAAAGGCGUUGUUAGGCCUUGCGGACGUCAAGCUAAUGCCAGUGGGCGGCUGGUCC |
| active | | | | sequence | GACAAACGAUUUGCAGAAUGGUGGAAUGCAAAAAUAACAGUCAGUUCCUUCGAGAACGGG |
| effector | | | | | AGUAUAGAGCAAGUCCCCGAGUAUGCUUAUCAUAGUCUUUUUAUUGAAAAAUGUAGACUAU |
| sgRNA | | | | | UAACAGG |
| MG91 | 6305 | MG91-155 sgRNA1 | Nucleotide | Artificial | AAAAGAAAGGCGUUGUUAGGCCUUGCGGACGUCAAGCUAAUGCCAGUGGGCGGCUGGUCC |
| active | | Mutant 1 | | sequence | GACAAACGAUUUGCAGAAUGGUGGAAUGCAAAAAUAACAGUCAGUUCCUUCGAGAACGGG |
| effector | | | | | AGUAUAGAGCAAGUCCCCGAGUAUGCUUAUCAUAGUCUAUUCAUUGAAAAAUGUAGACUAU |
| sgRNA | | | | | UAACAGG |
| MG91 | 6306 | MG91-155 sgRNA1 | Nucleotide | Artificial | AAAAGAAAGGCGUUGUUAGGCCUUGCGGACGUCAAGCUAAUGCCAGUGGGCGGCUGGUCC |
| active | | Mutant 2 | | sequence | GACAAACGAUUUGCAGAAUGGUGGAAUGCAAAAAUAACAGUCAGUUCCUUCGAGAACGGG |
| effector | | | | | AGUAUAGAGCAAGUCCCCGAGUAUGCUUAUCAUAGUCUAUACAUUGAAAAAUGUAGACUAU |
| sgRNA | | | | | UAACAGG |
| MG91 | 6307 | MG91-201 sgRNA1 | Nucleotide | Artificial | CAUACAGAGGUUUUGUUAAGCCUCACAAUCUUAAUAAUUAAGUGUUCUUUGAAAUAUUUAG |
| active | | | | sequence | UUGAUUGUAAAUCUAUUUUGGGAAAUAAAAAAACAAAAAUUACAGUUAUUAGUUAACUAAG |
| effector | | | | | AAGAGUAUAGAGUUAGUUUUAAAGUACCAAAAUAUACCCUAAAUUAUUGGAAAUAAUAAAG |
| sgRNA | | | | | UUAGGGUACUAACAAGAA |
| MG91 | 6308 | MG91-201 sgRNA2 | Nucleotide | Artificial | CAUACAGAGGUUUUGUUAAGCCUCACAAUCUUAAUAAUUAAGUGUUCUUUGAAAUAUUUAG |
| active | | | | sequence | UUGAUUGUAAAUCUAUUUUGGGAAAUAAAAAAACAAAAAUUACAGUUAUUAGUUAACUAAG |
| effector | | | | | AAGAGUAUAGAGUUAGUUUUAAAGUACCAAAAUAUACCCUAAGAAAUUAGGGUACUAACAA |
| sgRNA | | | | | GAA |
| MG91 | 6309 | MG91-201 sgRNA2 | Nucleotide | Artificial | CAUACAGAGGCAUUGUUAUGCCUCACAAUCUUAAUAAUUAAGUGUUCUUUGAAAUAUUUAG |
| active | | Mutant 1 | | sequence | UUGAUUGUAAAUCUAUAUAGGGAAAUAAAAUAUCAAAAAUUACAGUUAUUAGUUAACUAAG |
| effector | | | | | AAGAGUAUAGAGUUAGAUAUAAAGUACCUAUAUAUACCCUAAGAAAUUAGGGUACUAACAA |
| sgRNA | | | | | GAA |
| MG91 | 6310 | MG91-201 sgRNA2 | Nucleotide | Artificial | CAUACAGAGGCAUCGUUAUGCCUCACAAUCUUAAUAAUUAAGUGUUCUUUGAAAUAUUUAG |
| active | | Mutant 2 | | sequence | UUGAUUGUAAAUCUAUAUUGGGAAAUAAAAUAUCAAAAAUUACAGUUAUUAGUUAACUAAG |
| effector | | | | | AAGAGUAUAGAGUUAGAUAUAAAGUACCAAUAUAUACCCUAAGAAAUUAGGGUACUAACAA |
| sgRNA | | | | | GAA |
| MG91 | 6311 | MG91-107 sgRNA1 | Nucleotide | Artificial | AGAAAUAUGGAUUUGUAAUCCAAUCUUAGCGUUAAUGGCAAACAAUUGCCAUUGCUAAAAC |
| active | | | | sequence | AAAGAUGUGAUGAAAUAAAGCAGAAUGUUAUCAUGUAAAAAUGGCUAUCUUGCCUUUUUGA |
| effector | | | | | ACGAUAGCAAAUACUAUUUAAAGUAAGAACAUCCUAUCCUAGAAAUAGGGUAGUUACAAG |
| sgRNA | | | | | |
| MG91 | 6312 | MG91-107 sgRNA1 | Nucleotide | Artificial | AGAAAUAUGGAUUUGUAAUCCAAUCUUAGCGUUAAUGGCAAACAAUUGCCAUUGCUAAAAC |
| active | | Mutant 1 | | sequence | AAAGAUGUGAUGAAAUAAAGCAGAAUGUUAUCAUGUAUAUAUGGCUAUCUUGCCUAUAUGA |
| effector | | | | | ACGAUAGCAAAUACUAUUUAAAGUAAGAACAUCCUAUCCUAGAAAUAGGGUAGUUACAAG |
| sgRNA | | | | | |
| MG91 | 6313 | MG91-107 sgRNA1 | Nucleotide | Artificial | AGAAAUAUGGAUUUGUAAUCCAAUCUUAGCGUUAAUGGCAAACAAUUGCCAUUGCUAAAAC |
| active | | Mutant 2 | | sequence | AAAGAUGUGAUGAAAUAAAGCAGAAUGUUAUCAUGUAUUAAUGGCUAUCUUGCCUUAAUGA |
| effector | | | | | ACGAUAGCAAAUACUAUUUAAAGUAAGAACAUCCUAUCCUAGAAAUAGGGUAGUUACAAG |
| sgRNA | | | | | |
| MG91 | 6314 | MG91-107 sgRNA2 | Nucleotide | Artificial | AGAAAUAUGGAUUUGUAAUCCAAUCUUAGCGUUAAUGGCAAACAAUUGCCAUUGCUAAAAC |
| active | | | | sequence | AAAGAUGUGAUGAAAUAAAGCAGAAUGUUAUCAUGUAAAAAUGGCUAUCUUGCCUUUUUGA |
| effector | | | | | ACGAUAGCAAAUACUAUUUAAAGUAAGAACAUCCUAUCCUAACUUUAUUGAAAAAUAUAGG |
| sgRNA | | | | | GUAGUUACAAG |
| MG91 | 6315 | MG91-69 sgRNA2 | Nucleotide | Artificial | UAAAAAAAGAUAUUAGGUUUUGUUAAGCCUAACAAUCGUUAAGUGUUCUUUGGAAUAUUGA |
| active | | | | sequence | UUGUAAAUCUAUUUUGGGAAAUAAAAAAGCAAAAAUUACAGUUAUCAGUUUACUGAGAAGA |
| effector | | | | | GUAUAGAGUUAGUUUUAAAGUACCAAAAUAUACCCUAAAUUAUUGAAAAAUAAAGUUAGGG |
| sgRNA | | | | | UACUAACAAG |
| MG91 | 6316 | MG91-69 sgRNA3 | Nucleotide | Artificial | CACGCAGUUGUACUGUAGGAUAUUAAUAAAAAAAGAUAUUAGGUUUUGUUAAGCCUAACAA |
| active | | | | sequence | UCGUUAAGUGUUCUUUGGAAUAUUGAUUGUAAAUCUAUUUUGGGAAAUAAAAAAGCAAAAA |
| effector | | | | | UUACAGUUAUCAGUUUACUGAGAAGAGUAUAGAGUUAGUUUUAAAGUACCAAAAUAUACCC |
| sgRNA | | | | | UAAAUUAUUGAAAAAUAAAGUUAGGGUACUAACAAG |
| MG91 | 6317 | MG91-69 sgRNA3 | Nucleotide | Artificial | CACGCAGUUGUACUGUAGGAUAUUAAUAAAAAAAGAUAUUAGGCAUUGUUAUGCCUAACAA |
| active | | Mutant 1 | | sequence | UCGUUAAGUGUUCUUUGGAAUAUUGAUUGUAAAUCUAUAUAGGGAAAUAAAAUAGCAAAAA |
| effector | | | | | UUACAGUUAUCAGUUUACUGAGAAGAGUAUAGAGUUAGCUAUAAAGUACCUAUAUAUACCC |
| sgRNA | | | | | UAAAUUAUUGAAAAAUAAAGUUAGGGUACUAACAAG |
| MG91 | 6318 | MG91-69 sgRNA3 | Nucleotide | Artificial | CACGCAGUUGUACUGUAGGAUAUUAAUAAAAAAAGAUAUUAGGCAUAGUAAUGCCUAACAA |
| active | | Mutant 2 | | sequence | UCGUUAAGUGUUCUUUGGAAUAUUGAUUGUAAAUCUAUAUAGGGAAAUAAAAUAGCAAAAA |
| effector | | | | | UUACAGUUAUCAGUUUACUGAGAAGAGUAUAGAGUUAGCUAUAAAGUACCUAUAUAUACCC |
| sgRNA | | | | | UAAAUUAUUGAAAAAUAAAGUUAGGGUACUAACAAG |
| MG91 | 6319 | MG91-2 sgRNA1 | Nucleotide | Artificial | AUAAAAAUAACAUACAGAGGUUUUGUUAAGCCUCACAAUCUUAAUAAAUAAGUGUUCUUUG |
| active | | | | sequence | AAAAUAUUUAGUUGAUUGUAAAUCUAUUUUGGGAAAUAAAAAAACAAAAAUUACAGUUAUU |
| effector | | | | | AGUUAACUAAGAAGAGUAUAGAGUUAGUUUUAAAGUACCAAAAUAUACCCUAAGAAAUUAG |
| sgRNA | | | | | GGUACUAACAAG |
| MG91 | 6320 | MG91-2 sgRNA1 | Nucleotide | Artificial | AUAAAAAUAACAUACAGAGGCUUUGUUAAGCCUCACAAUCUUAAUAAAUAAGUGUUCUUUG |
| active | | Mutant 1 | | sequence | AAAAUAUUUAGUUGAUUGUAAAUCUAUAUAGGGAAAUAAAAAAUCAAAAAUUACAGUUAUU |
| effector | | | | | AGUUAACUAAGAAGAGUAUAGAGUUAGAUUUAAAGUACCUAUAUAUACCCUAAGAAAUUAG |
| sgRNA | | | | | GGUACUAACAAG |
| MG91 | 6321 | MG91-2 sgRNA1 | Nucleotide | Artificial | AUAAAAAUAACAUACAGAGGCAUUGUUAUGCCUCACAAUCUUAAUAAAUAAGUGUUCUUUG |
| active | | Mutant 2 | | sequence | AAAAUAUUUAGUUGAUUGUAAAUCUAUAUAGGGAAAUAAAAAUUCAAAAAUUACAGUUAUU |
| effector | | | | | AGUUAACUAAGAAGAGUAUAGAGUUAGAAUUAAAGUACCUAUAUAUACCCUAAGAAAUUAG |
| sgRNA | | | | | GGUACUAACAAG |
| MG91 | 6322 | MG91-10 sgRNA3 | Nucleotide | Artificial | UAUAUUUGCGACAUAAAGGUGUUGUCAGGCCUUGCGUACGUUAAGCUAAUGCCAGUGGGC |
| active | | | | sequence | GGCUGGUGCGACAAACGAUUAUGCAGAAUGGUAGAAUGCAAAAAUAACAGUCAGUUCCUU |
| effector | | | | | CGGGAAUGGGAGUAUAGAGCAGGUCUCCGAGUAUGCAAAUCAUGGCCUUUUUAUUUCGAA |
| sgRNA | | | | | AGAAAUGUAGGCUAUUGACAGG |
| MG91 | 6323 | MG91-10 sgRNA4 | Nucleotide | Artificial | GACAUAAAGGUGUUGUCAGGCCUUGCGUACGUUAAGCUAAUGCCAGUGGGCGGCUGGUGC |
| active | | | | sequence | GACAAACGAUUAUGCAGAAUGGUAGAAUGCAAAAAUAACAGUCAGUUCCUUCGGGAAUGG |
| effector | | | | | GAGUAUAGAGCAGGUCUCCGAGUAUGCAAAUCAUGGCCUUUUUAUUUCGAAAGAAAUGUA |
| sgRNA | | | | | GGCUAUUGACAGG |
| MG91 | 6324 | MG91-10 sgRNA3 | Nucleotide | Artificial | GACAUAAAGGUGUUGUCAGGCCUUGCGUACGUUAAGCUAAUGCCAGUGGGCGGCUGGUGC |
| active | | Mutant 1 | | sequence | GACAAACGAUUAUGCAGAAUGGUAGAAUGCAAAAAUAACAGUCAGUUCCUUCGGGAAUGG |
| effector | | | | | GAGUAUAGAGCAGGUCUCCGAGUAUGCAAAUCAUGGCCUAUUCAUUUCGAAAGAAAUGUA |
| sgRNA | | | | | GGCUAUUGACAGG |
| MG91 | 6325 | MG91-10 sgRNA3 | Nucleotide | Artificial | GACAUAAAGGUGUUGUCAGGCCUUGCGUACGUUAAGCUAAUGCCAGUGGGCGGCUGGUGC |
| active | | Mutant 2 | | sequence | GACAAACGAUUAUGCAGAAUGGUAGAAUGCAAAAAUAACAGUCAGUUCCUUCGGGAAUGG |
| effector | | | | | GAGUAUAGAGCAGGUCUCCGAGUAUGCAAAUCAUGGCCUUAACAUUUCGAAAGAAAUGUA |
| sgRNA | | | | | GGCUAUUGACAGG |
| MG91 | 6326 | MG91-2 PAM (5′) | Nucleotide | Artificial | tnTYn |
| active | | | | sequence | |
| effector | | | | | |
| PAM (5′) | | | | | |
| MG91 | 6327 | MG91-10 PAM (5′) | Nucleotide | Artificial | GnGYCn |
| active | | sgRNA3 | | sequence | |
| effector | | | | | |
| PAM (5′) | | | | | |
| MG91 | 6328 | MG91-69 PAM (5′) | Nucleotide | Artificial | TTTY |
| active | | sgRNA3 | | sequence | |
| effector | | | | | |
| PAM (5′) | | | | | |
| MG91 | 6329 | MG91-107 PAM (5′) | Nucleotide | Artificial | Cc |
| active | | sgRNA1 | | sequence | |
| effector | | | | | |
| PAM (5′) | | | | | |
| MG91 | 6330 | MG91-155 PAM (5′) | Nucleotide | Artificial | Gnkynn |
| active | | sgRNA1 | | sequence | |
| effector | | | | | |
| PAM (5′) | | | | | |
| MG91 | 6331 | MG91-201 PAM (5′) | Nucleotide | Artificial | ttTYnAA |
| active | | sgRNA2 | | sequence | |
| effector | | | | | |
| PAM (5′) | | | | | |
| MG91 | 6332 | MG91-666 PAM (5′) | Nucleotide | Artificial | nnnCn |
| active | | sgRNA1 | | sequence | |
| effector | | | | | |
| PAM (5′) | | | | | |
| MG91 | 6333 | MG91-667 PAM (5′) | Nucleotide | Artificial | yYt |
| active | | sgRNA1 | | sequence | |
| effector | | | | | |
| PAM (5′) | | | | | |
| MG91 | 6334 | MG91-667 PAM (5′) | Nucleotide | Artificial | yYy |
| active | | sgRNA1 | | sequence | |
| effector | | | | | |
| PAM (5′) | | | | | |
| MG91 | 6335 | MG91-668 PAM (5′) | Nucleotide | Artificial | TtGc |
| active | | sgRNA1 | | sequence | |
| effector | | | | | |
| PAM (5′) | | | | | |
| MG91 | 6336 | MG91-668 PAM (5′) | Nucleotide | Artificial | tngn |
| active | | sgRNA1 | | sequence | |
| effector | | | | | |
| PAM (5′) | | | | | |
| MG91 | 6337 | MG91-671 PAM (5′) | Nucleotide | Artificial | gnGY |
| active | | sgRNA1 | | sequence | |
| effector | | | | | |
| PAM (5′) | | | | | |
| MG91 | 6338 | MG91-672 PAM (5′) | Nucleotide | Artificial | mCm |
| active | | sgRNA1 | | sequence | |
| effector | | | | | |
| PAM (5′) | | | | | |
| MG91 | 6339 | MG91-673 PAM (5′) | Nucleotide | Artificial | ryCC |
| active | | sgRNA1 | | sequence | |
| effector | | | | | |
| PAM (5′) | | | | | |
| MG29 | 6340 | MG29-15 effector | Protein | Unknown | GRTAEEGKKKIQGLNEYINLYNQKQEKNKRLPKLKLLYKQILSDRISTSFMAESFSEDQEVIDAIE |
| effector | | | | | EYYKFHLLAFQAEDKDDTENILEKVKELLSNIKEYDLSKIYLRNDTKITAISQKIFGNYGVFNTAL |
| | | | | | EYYYATAVKPDFQKEYEKANQKKRDTLDKAQTQFVKQPYVSIELLQTAIDAYIATIDKGEEIYKR |
| | | | | | YSPTCIADYFKNNFKAEKKEKNDKEYGFIDNIKAKYSCIQGILGTPYPKDKKLIQQKNDIPNIKAF |
| | | | | | LDSLMELLHFTQPLSIVDEREVTKILTSDRLKIDKEWAEEANKSFFEKDKKFYEQFDLYFKELQK |
| | | | | | LIPLYNKVRNYATKKPYSTEKFKLNFENKGQFLGGWVDSHTENSDNATQAGGYLFRKKNQIGE |
| | | | | | YDYFLGVSSDSKLFRSHLRNEIVDEDKSEFERLDYYQLKSASVYGNSYIGNQSYDKDKENLFDSII |
| | | | | | EFANRNNPAAKEDFNKYISSQKGDNKPTPNGLLKILQEKHSKALEELMIDGDFIRINTIVTDNLKN |
| | | | | | TILSLNRIPKSQEYKNTIFTLFTEPIQVIEELSKEKSFSYFPVSAKELEDSLNRELKPLLLFKISNQDL |
| | | | | | SYADSFSQGKRKSRGRENMHTLYFRQLMSGSQNILDIGTGEVFFRKSSIENPTIHKANEAVINKN |
| | | | | | PLAKKKDSAFEYDIIKDRRFTVDKFQFHLSIIMNYQKPQKASDFNFEVLEFLQNNPNVNIIGLDRG |
| | | | | | ERHLIYLTLINQKGEILLQESLNNISSENYPITTPYHDLLATKEKERDEARKSWGTIENIKELKEG |
| | | | | | YISQVVHKIAKLMVEHNAIVVMEDLNFGFKRGRFKVEKQVYQKLEKMLIDKLNYLVFKDKDPN |
| | | | | | EIGGLYKGLQLANKFESFQKMGKQSGFLFYVPAWNTSKIDPTTGFVNLFDTRYENLDKAKAFFS |
| | | | | | KFEDIRYNRTEKYFEFVVENYADFNAKAEGTKQDWTICSFGERIKNFRNPDALNQWDNKILNLT |
| | | | | | EEFKTLFTHNKIDITTELKEQIAQQNEAKFFKSLLELFKLTIQMRNSITNSEVDYLISPVKNKQGQ |
| | | | | | FFDSRKADDTQPKDADANGAYNVAQKGLMWLEQINKFDGKDWKKLDLDKTNKGWLQFIQNK |
| | | | | | TQ |
| MG29 | 6341 | MG29-16 effector | Protein | Unknown | MFLGFINKYQLSKTLRFELKPIGKTLEFIEQKGLIVEDEARAEDYKRVKELIDKYHKEFIHQALS |
| effector | | | | | GIRLDGLDRYEELFFIQNRDEKTQKEFEKLQDDLRKQIVAGFKAHEAFKNIDKKELITVELPKFL |
| | | | | | KDEKDKKDREIVKKFDSFTTYFTGFHENRKNIYSDKAQHSSIGYRVIHENLSIFLSNKRAFESIQQ |
| | | | | | NFPEIAQTAQNSLLEHLEGGVVEDMFGLDYFSRTLTQTYIDIYNTMLGGKVLKDGTKIQGLNEHI |
| | | | | | NLYRQKYNIEKRKLPNLKALHKQILSDRESMSWLHESFANRDELNSTVEKFYKESIISFKQYNDA |
| | | | | | VDITEELINILSDESDYDLGKVFVKNDISLTAISQEIFKDYRVIKDALWQKHLADNPKATKSKDITV |
| | | | | | DEEKYFSRKNSYFSISQIEKALNKAELSDEAKKEKENYKGLFDFFKTKVAESSKAVKENFTDWQN |
| | | | | | NKEDKKLTKSLLDSMLNLQRAIKPLSVKAEDADDRSFYALFSTYFESLSGVIRIYDKVRNFESKKP |
| | | | | | YSMEKFKLNFENKGNFLGGWVDSSTEKSDNGTQSGGYLFRKRNGIGEFDYYLGISSDPKLFRSH |
| | | | | | LQDEIEKEDISDFERLDYYQLKSATVFGNSYVGDSYSKDRDLLYQKILEFVENTEPLKADIDKYVS |
| | | | | | SQKGTNQPTPSGIISIVKEKYPELLQKLKDDQGFSEINKTVTDRLKKTILSLHRIPRSQEYKNHNFS |
| | | | | | LFTEAIEVIEELSSEKSFAYFKVSKSELENALNRDSKPLFLFKITNKDLSFADSFIAGKRKSRGTDN |
| | | | | | LHTLYFKALMSGSQNVFDIGTGEVFYRKEDYKGKKIVHKANEPIENKNRLNDKKHSLFEYDIVK |
| | | | | | NRRYLVDKFQFHLSIVQNYIKPKKYPDFNTEVNQAIKGASDIKVIGVDRGERHLLYLSLIDSSGRI |
| | | | | | VEQYSLNQIINSHNGKKHIVDYHQKLADKEKERAEARENWGVVENIKELKEGYMSHVIHRIATL |
| | | | | | MVKHNAIVALEDLNFGFKRGRFKVEKQVYQKFEKMLIDKLNYLVDKQKSPNELGGLLKAFQLT |
| | | | | | NKFVSFEKLGKQSGFLFYVPAWNTSKIDPVTGFVNLLDTRYQSIEKSKEFFSKFDAIRYNDQKGY |
| | | | | | FEFEFDYKNFTTKADGTRTKWTLCTYGTRIKTFRNRDKNHQWDNVEVDLTAEFKSLFGLHSGD |
| | | | | | LKELIISQDRKEFFETLLYLLRLTLQMRNSVTNSEIDYLISPVADKNGNFYDSRVASDDLPRDADA |
| | | | | | NGAYNIARKGLMIIEKIAKSKSGEKLNLTISNKEWLAYAQR |
| MG29 | 6342 | MG29-17 effector | Protein | Unknown | MFKNFTNQYQLSKTLRFELKPIGKTLNNINSKMLLEQDEKRASEYKVVKKIIDEYHKDFMNEAM |
| effector | | | | | DGFLFDNDDINSYERLFYIKDKSDEDKKAIESVQQKMRKKIAEKFQKHPLYKNLFAKELIKQDLL |
| | | | | | SWLDKKDNKFVTKIREITSDNTLMIDNMKTIVSNFSNFTTYFSGFHENRKNIYKADEKHTAVAYR |
| | | | | | VVHENLPIYLTNKRAFEKLNEKYPKLVSDAKNTVEHHLLGAVVEDMFTNDYFNHTASQTHIDLY |
| | | | | | NTMIGGTVLDDGTKVQGLNEKINLYRQQNGLTKKDIPNLKPLYKQILSDRELTSWLPESFESDNE |
| | | | | | LLNAINDFYNNEIVNFNCCDGVINILDKLKEHFADTLLFDKERIYIRNDLSMTNISKDIFGDWSVIK |
| | | | | | GAIEEKYKLDNPREVKAKDGLEKIEKKIEKTKYFSIAHIEEALRSYLRDKDELRAKMSSDVIFDYF |
| | | | | | NNWDKTTVEHTVSNNIFDRIIDSFIAIKPLLSSEYSLDKKLSNDQDSKSKIKNFMDAITNLQRFVKP |
| | | | | | LHAKIDSELDIAFYANFDTYFEQLSLGVKLYDMVRNYLTKKPFSTDKFKLNFESGYLLNGWSQD |
| | | | | | YDTRAGLLFEKDGNYYLGVNVKKLTEDEKQYLLDNPNENLSKRVILDFQKPDNKNIPRLFIRSK |
| | | | | | GDNFAPAVTIYNLPIQSVIEIYDNGKFKTEYRKKNPKDYLDSLHKLIDYFKQGFLQHESYKHYKF |
| | | | | | GWKNTKDYLDIAQFYKDVETSCYEVKYEEVNWDRLMNYVESGKLYLFQIYNKDFSPYSKGTPN |
| | | | | | MHTLYWKMLFDKDNLSNVVYKLNGQAEIFFRKKSITNNIVTHDANEPINNKNSDNPKKSSTFDY |
| | | | | | DIIKDKRYTVDKFGFHVPITMNFKANGNDNINQQVNQAIKESNDIKVIGIDRGERHLLYLSLIDSS |
| | | | | | GKIIEQYSLNEIVNEHNCTTYKTNYHKLLDAKEKERGDARVNWGVVENIKELKEGYMSQVIHK |
| | | | | | VATLMVKHNAIVVLEDLNFGFKQGRFKVEKQVYQKFEKALIDKLNYFVDKKKDVNKLGGVLN |
| | | | | | ALQLTSKFISFEKIGKQSGFLYYVPAWNTSKIDPITGFVNLFDTRYTSVEKAKEFFGKFESIKYNIS |
| | | | | | KNYFEFKLINYTAFNPKADGTRQNWTVCSYGERILIFRNKDKNSQWDNKEVKPTDGFKKLFDD |
| | | | | | NEIVYMNGQNIKDFILVKDEKAFFEVLLGCFKLTLQMRNSVTNSDIDYLISPVCDKNGIFYDSRAV |
| | | | | | EDSLPKDADANGAYNIARKGLWVIEQIKKVDDLRKIKLAISNKEWLSYVQTNDNYK |
| MG29 | 6343 | MG29-18 effector | Protein | Unknown | MAENKAIFDGFANKYSLQKTLRFGLIPDSESKKWIEKNLVIEKDEKLAEEYKKAKKIIDKVHKAF |
| effector | | | | | IESALEKLKLNEKALTAFEKETAKTKKERDKKTIEKIQASLRNEVADSFNKDKEEFKAMFSEKMI |
| | | | | | KENAPRFCNTAEEKATMKLFDNFTTYFKEFHKNRKNIYSNEAKATSIAFRIVHENLVTFVDNLRI |
| | | | | | FAKIREGGLDLDKAEYELKSILGKEKIEKLFSIEYFNKVLSQSGIDFYNRIIGGEFEEGSRKKIRGL |
| | | | | | NELINLHNQKERGKLPRFKQLKKQILSDRKKSLDFGFLDDSELLQAIEEFYLKELSDENGKRTPE |
| | | | | | MLRALFERAEEFDIEKIHLRNDSTLRELSNKLFGDWSAIENALSEHYEKENPSKDTKKYEKDKEK |
| | | | | | WLKQDQFPIATIETALSLYEHEKVDKGKCKGLFFRQFSSFKKEEDDKENLLERLEISYNRAKPIL |
| | | | | | ENKSPGNRLASDEQAKGKLKALLDALIDILHFVKSLRLKDAAISDKDYSFYGEFDPLFERLDGIV |
| | | | | | GIYNKTRNYLTKKPYSTEKIKLNFENSVLLGGWDRNIEDTKGGVIFRKDGQFYLGIINKNNKTIL |
| | | | | | KNPPKAKDGEVAFEKMFYKLIPNPARDLHHTILSKKRSAKYKPTKTLLEKYEQKKHIKGDNFDK |
| | | | | | KFCHELIDFFKESIKKNPDWETFNFKFSETSSYEDISGFYREVGRQGYKVVFERIPASYIETLVKE |
| | | | | | GKLYLFKIWSKDFSKDSKGTPNMHTLYWRALFDEKNLKEPIYKLNGEAEMFFRKRSVEPKITHP |
| | | | | | AGKPIPNKNPDNLKKESVFKYDLIKDRRYSLDKFQFHVPITTNFGSEGQEFIDYDVRDAIKKSPVR |
| | | | | | IIGIDRGERNLLYLSMIDENGKILLQESLNKITSLYGGGKKTTDYNSLLARSEAGRDEARRDWKK |
| | | | | | IENIKEIKEGYLSQAVHKIATLMVENEAIVVMEDLNSGFKRGRTKVEKQVYQKFERMLIEKLNY |
| | | | | | LVFKKRSPEEAGGLRNALQLTSKFKSFEKLGKQSGFLFYIPAAMTSKIDPVTGFANELNPKYESV |
| | | | | | GKSKEFFSKFERISYNSKKNWFEFSFDYSNFKTKDGLEGKWVVCSTPHERFYRNGGAKGGAKG |
| | | | | | ETLPMNANEELKKLFGEFGIEYSTGDCLKKEIVSKDSKEFFKKLTRVLASILSLRQNNGKTGQDE |
| | | | | | QDYILSPVEPFFCSLDGKDGLPKDADANGAYNIARKGLLAVRQIRSAEDPKKARLAIRNKEWLEF |
| | | | | | AQAMK |
| MG29 | 6344 | MG29-20 effector | Protein | Unknown | MQQMNTENIWGGLTNQYSLSKTLRFELKPVGFDGEELVIDESLNSIEKIIEEDKQRNEDFKIVKKI |
| effector | | | | | ADEYFKEFIERSLKFTKISKTKLEEFENIYLEFIRDKQNKNKRDNFDKLNKELRKNLKELVKLKF |
| | | | | | KDEFSTFFKKEFYEKVLPLWLDKRNRIEDKKLVEKFKGFTTYFTGFNSNRENVFSENNIPTSIFYR |
| | | | | | IVDDNLPKYLANYDKFKKILEVSNDKFGELQVELKDELEGLTLLEFLSIQNYNLFLNQSGIEKYN |
| | | | | | KRIIGKINSRINELIQRDKDLTREQIKILKKSKLQVLFNQILSDKESLFTFDKENSDYEVLTKIDEFY |
| | | | | | NNLNSKNQFDEFSNLFENLDSENFDLSLIKIKNGKFISDISQNIFGDYNVIKEDLKREYIKSRNYDIE |
| | | | | | KLNKKQQEEIEKYLKTDYFCFKEIQNSISRIKETRDDSDEHITLFDFFKDFKFSVEHKSIDLLKNIED |
| | | | | | SYKSFNSIKFEEFKNESQKKLTQDKYNEVVNVIKEFLDALQNYYHFVKLLKFENEYRDEHFYQIY |
| | | | | | DELLNLISQITPLYNKVRNYISQKPFSTQKFKLNFQSSSFLNGWDSNFETKSAVILKKKINNKTNY |
| | | | | | YIAISPKKIENNENDFSVNKGNFEILNYDFQKPDNKNIPRLFIRSKGDNFSPNVEKYNLPVQEIIEIY |
| | | | | | DKGYFKTEFRKTNFSKFKESLVKLIDYFKLGFQRHESYKHFKFNWKESREYEDISQFYFDVESSC |
| | | | | | YQLNFKKINEEYIKQLVEENKLYLFQIYNKDFSQNKIKKENYNSKKNLHTMYFEELFSEENLEDV |
| | | | | | VFKLNGQAEIFYREKSTEYKPTHPKNLPTKNKDPINGKEESLFSYDIGKNKRYTQDKVLFHVPITL |
| | | | | | NFKSNSRVRINNEVNKVIKQNSKNINILSLDRGERHLLYYTLLDTKGNIKEKGSFNLINDSFNRKV |
| | | | | | NYHQKLSKLEKERDEKRKSWQNISTIKELKEGFLSQIIHKISKIAVENNAIIVLEDLNYGFKRGRF |
| | | | | | KVEKQVYEKFEKMLISKLNFLVFKDKKNDEIGGNLKAYQLTPEVNVLKDIGKQTGILFYIDPYLT |
| | | | | | SKICPKTAFVNRLYPKYENESQAKDFINKFDSIRYLKDEDLFEFSFKYSSFGVKDLVKDDWKIYSN |
| | | | | | GIKLVQSRDKNQNNNWTTKSVNVNEELKKLFNDFNIKIEESQNLIDDIVKQNKFFLENIIKNLKLI |
| | | | | | LQLRNSYTDNELKINKITEKEGDYILSCVKNKKGYFFDSRNANKEEVDNADCNGAYHIGLKGLM |
| | | | | | VLNKIKEFEDIEKIKFNDLKIERNEFLNEMIRRNWS |
| MG29 | 6345 | MG29-21 effector | Protein | Unknown | MSTLATQFTGKFPLSKTIRFELIPRFGTKELLNGLFDSDYKRAELAPTVKEILNMYYQDFINICLE |
| effector | | | | | DANLQNVKIKGISALDYAFDAYKNNDSKKVTTANTALMTYISKCFTDKNKFGLDEYLNLLKLEK |
| | | | | | KKSPTILVKWINEKVNKGIFSKEKAAEYKNAISFFDKFITYFSGFKKTKENMFKPEDKASSIAHRT |
| | | | | | ISENLYRFFDNILLENKISEKYPDLAKELLPFKDAFTIQYFATRINQNAIDEYNHNIIGSSSENIDHN |
| | | | | | GVNSILNAYRQKHHLRTKDIPVMSRLYKQILSDSEEKFFFLQVTSKEQALALINDTTLSLKTSCK |
| | | | | | KLQDLFSTYVIEDNSSHIYLKTSQLHTISMSLYNRWDLFDVAIKDKASTLSTKDSNQLLAKYKDVI |
| | | | | | SIQELNNIFFNYYQSLDKDKQKEIGPIRNLTEYFQRAPKINISIDELKEKSITEFKTQLDTLLGPTHF |
| | | | | | YKAFHLYNGRKAISVPDRDISFYNEFEAAYRQLACASTTYDAIRNFATKKQYSLDKIPVFFGKSSL |
| | | | | | LISWENGYNAKSCLLFQQGNNYYLGILNKKLDETDIKKLHTDAIADPATRFIINSQKVDNKNVPR |
| | | | | | LFIHSKGDNLAPSVKKYNLPIQNILNLYTQGYYKTDYAKINPKKFKASLIKLIDYFKLGFSQHEDF |
| | | | | | KNFTFQWKESEEYNNINEFYHDVAVSCYAISKEHVNFSALKSLVKENKLYLFQIYNKDFSTHSHG |
| | | | | | TPNLHTLYWKALFDDRNNLNKVFKLNGGATIYLRKGSIAKKITHPKNQPIESKNPLHKKQSVFG |
| | | | | | YDLIKDKRFTEDKLFLHCPITINFKYPANIYLNNDVNNYLENHPEVNIIGIDRGERHLLYYTIIDQK |
| | | | | | GNILEQDTFNQIKYAYLDKKSNETVPVVVDYHTLLDNKQIQRTDARKAWETIENIKELKAGFLS |
| | | | | | QVIHQLAELVIKYNAIVVLENLNTRFKQTRVKVEKQVYQKFEKALIEKLNYLVFKDHQYDDLGS |
| | | | | | YAKGYQLTNPSDINQSGISQNGILFYIVPSYTSHICPKTGFVNLLTGKLHYKNIEASQEILKNFDGI |
| | | | | | KFNLANDYFEFKLDYRKFNIEMSQPCWTICTYGDERYAYTRTENNKTQVAKINVTQELKELFTK |
| | | | | | YEIDYTKGNNLLAKILELNDKSFFSSLLFLLNLTMQIRYTKPGTQDDCDYILSPIQYAKKSFFDSRF |
| | | | | | AQNNEPKNADANGAYNIALKGLKLICSIKDGALPKQEKGTERKEWFEFVQKKLYLDKD |
| MG29 | 6346 | MG29-23 effector | Protein | Unknown | MKDFTNCYQLSKTLRFELKPIGKTFDFIQEKGLLKQDEQRAESYKKVKKLIDEYHKAFIEKCLE |
| effector | | | | | TVFIPNKDIIEFESLFFKQEKDDKDKKELENLQKNLRTIIADSFRKSDNFKRLFGKELIKEDLLEFF |
| | | | | | KNEEELTLVGEFKDFTTYFIGFNENRKNMYDSDEKSTAIAYRLIHENLPKFLANKRTFDKIKTNY |
| | | | | | PKIIEDAKTIIEPELFGIPLEDMFSYKYVNQTFKQSDISLYNLMLGGKSDGNEKKQGLNELINLYR |
| | | | | | QTNELSKKDIPNLNVLYKQILSDRETFSFVSEKFENQNELLQSIQSFYTEQLLEWNNNDTTENVFL |
| | | | | | KLIQIIKEHENYDKSKMFLKNDIFITHISKQLFNDWSVIPTALKEQFYNTNPKLKQTETNDKKFEK |
| | | | | | IKFYSFFEIESALKDYCQDKDDFKGLYKDDILFSYFNNFKLKDKDNTLIENINQKYEEVETLLKTD |
| | | | | | YPENKSLISDDESIKKIKIFLDTLMDFLHFIKPLTAKGFIGEKEDAFYADFNVYFEQFENVTKIYDK |
| | | | | | VRNYLTQKPYSIEKYKLNFENSTLLDGWDQNKETANTSILFKKNGLYYLGVIDKKHNKVFENLIP |
| | | | | | ENTDNYFEKIVYKLLPGASKMLPKVFFSSKNINYYCPDENILKIRNHGTHTKNGEPQKGYNKLDF |
| | | | | | NIIDCRNMVDFYKKSIEIHKDWKNFGFQFSPTDNYNSIDEFYREVENQGYTIAYQKISKKYIDELV |
| | | | | | NQGKLYLFQIYNKDFSPYSKGKPNLHTLYWKELFSDENLKDVVYKLNGQAEIFFRQKSLQYTDE |
| | | | | | TLKKGHHYDKLKDKFDYPIISKKRFAFDKFQFHVPITLNFKAKGRDNINQNVLEYLKKTPKNDIH |
| | | | | | IIGIDRGERHLLYLSLIDINGNIKKQYTLNDIVNQYQGKTFATNYHNLLSEKEKSRADGRKEWKTI |
| | | | | | ETIKELKEGYISQVVHQVAKMIVEHNAILIMEDLNFGFKKGRFKVEKQVYQKFEKMLIEKLNFY |
| | | | | | VDKNKKKTELGGTLKALQLTSKFTSFREMGKQSGFIFYVPAWNTSKIDPVTGFVNYFYSKYENI |
| | | | | | KKAQEFFIRFSNISWNNDKNFFEFVVNNYTAFNPKAEGTRQDWVICTQGIRLENFRNQEKNNEW |
| | | | | | DTKEIDLNNDFKALFNKFKIDFSHDLQAQIVNQTEKTFFENLYHLFRLTLQMRNSRTGTDEDYLI |
| | | | | | SPIANDKGIFYDSRNYEKQENPVLPKDADANGAYNIARKGIILLDKIKKADLSKKVDLSQNNRDW |
| | | | | | LNFAQKIK |
| MG29 | 6347 | MG29-24 effector | Protein | Unknown | FKQTACIKQFLDSSRNLWAFVKDWNMEIKEIPEDAFTDWYDCIQNFVDNFPVINLYNKTRNHLT |
| effector | | | | | QKAYSKDKVKINFEKSTLLNGWDRNKESANFSIILERDGLFYLAVMTPGNNDIFGYDEIPGEIGK |
| | | | | | KKEKKENLRKLALAGKGENCYRKMNYKQIANVGKDIFTLCWDNKENIAIRKTKGREKIWGNQI |
| | | | | | TRIKETKSYSDNTEDRLVYFSYLIRCAKSYWKHFNLQLKRPEEYKTMQELLTCIGNQGYKISFDN |
| | | | | | IKESYIEENVDKGNLYLFQIYNKDFSRNKKAGGKDNLHTSYWKLLFDEDNLKDNVLKLNGQAEI |
| | | | | | FFRQASVKWSEEKMKKGHHYEKLKDKFDYPIIKDRRFTQDKFFFHCPITLNNKAPSNPARFNST |
| | | | | | VRNFLKKNPEVNVIGIDRGEKHLLYYSVVDRQGNIIEQNSFNTISTGFKPAGQSQEQKIDYRRLLD |
| | | | | | EKEKNRDKARKSWSAIENIKELKAGYLSQVVHKLAQLIINYNAIVVLEDLNYGFKRGRFKVEKQ |
| | | | | | VYQKFERALIDKLNYLVFKDRENRLQPGHYLNAYQLTNKFESFKKLGSQSGILFYTAASYTSTTD |
| | | | | | PVSGFMKNVYYTYSSIDKAVEFWKSFDSIIYNAEQNRIEFTYTLEKIMSKKLEKEKDEKSVEKTS |
| | | | | | WTVVSSVQRSKYIKKDRKTEILDVNTELKKLLDSNRIEYKDGADLRNRLAERNERGDASFHKSM |
| | | | | | VYYFNSILNIRASNPQAETGTGENDFIMSPVEPFFDSRKKYPGLPLDGDANGAYNIARKGIFMLNT |
| | | | | | LNNSENPEKENLNVSKKDWQNFAQADETVKRQKAKMK |
| MG29 | 6348 | MG29-25 effector | Protein | Unknown | MLKEFVGKYSLSKTLRFELKPVGKTIEHIEQKGLISTDEARAEDYKKAKELIDEYHKEFIHQALS |
| effector | | | | | SVRLIGLDSYEVLFLKQNRDEKDQKEFEKIQDDLRKQIVAGFKNHPHFKNIDKKELIKDDLPRFL |
| | | | | | QNQEDRDLIERFSSFTTYFTGFHENRKNIYSSEAKHSSIGYRVIHENLPIFLINKKAFLAINSNYPQI |
| | | | | | AQEAQSSLLEHLNGGIVEDMFANDYFSFTLIQTYIDIYNTMLGGKTLADGTKIQGLNELINLYRQ |
| | | | | | KHNIDKRELPNLKPLYKQILSDRDGMSWIPEAFECREDLNLAIQTFYNKNIVAFECCDGVVDITE |
| | | | | | KFLEVLTQTSSYDREKIFIKNDLSLTAISHVLCEDYRVIKDALWQKHLQENPKAIKSKDIAGDEER |
| | | | | | FFGRKNSYFSISEIAKALDLIEKPSDLFGYFKTEVEKQSKQVKSSFKEWELDPNNKKLTKEFLDST |
| | | | | | LDLQRTLKPLYVRSDIDKDIAFYALFDGYFDSLSAIVKLYDKVRNFESKKPYSTEKFKLNFENKG |
| | | | | | AFLGGWVDSYTDKSDNGTQSGGYLFRKKNAIGEYDYYLGISKDTKLFRSHLQNDIDENDISEYER |
| | | | | | LDYYQLKTASVFGNSYVDGSYSEDKIEIKNSIYNFVKSTDLGKELEDYISSKEAKEATPNKMINYI |
| | | | | | KEKNPTLYEELLEDEEFSKINKTVTKKLKETILSLHRVPKSQEYKEASFNLFTEPIEAIEKLSEEKT |
| | | | | | FVYFSISSREFENALANKDKPLLLFKITNKDLSYAETFLNGKRKSRGLDNLHTLYFKALMSGEQA |
| | | | | | VFDIGTGEVFYRKKSIEYSEEKMQKGHHYDKLKEKFSYPII |
| MG29 | 6349 | MG29-26 effector | Protein | Unknown | MKLNKFTHQYPISKTLRFELKPVGETADYIEDFKSQYLKDIVIQDQQRAEDYESIKVIIDEYHRHY |
| effector | | | | | IEEKLSEPFDKKTGELFISGDEFENAFSYYQRFRENSKDEKARKEWIEVQNSLRKSLVKVFSDRK |
| | | | | | KRLFQKELITKELPSWLKEKGEWEDKKNVVENFNRFTTYFTGFNENRENMYSIIEEQSTAISFRL |
| | | | | | MNENLPKYFNNCIQYHKAIESYDGLSFTVNPDLLNEMGVSILSEIFQPSYYIQLFTQSGIDKFTELL |
| | | | | | GGFTKENGEKVQGLNETINLFRQQKAIKAKAFPNFISLYKQILSDRETSSFIPDQFENDNDLLKSL |
| | | | | | GKFIKEMVKEDGLFKKLEDSIKLITDADLHRTFIKNGVEITKISQSIFGNYSILKSAIYHHAESVLY |
| | | | | | PDPISGKISEALKEKRIKYVNKQVVFSIAELETILSNYASQMTDDNPDKEIIAQCENSEHPIRTYFL |
| | | | | | NAIENVKNDKDIEFGKAIENVLPLISLENLNKGKDGQAQTHKIQKMLDAFLAVTHAVKPLHLVK |
| | | | | | GRKPIDIPDMDMGFYAEFSKAFENFEQLVITLYNKTRNHLTKKTFSTDKIKINFENPTLLDGWDA |
| | | | | | NKEKDNSGVLFEKDGNYYLGIMHPKHKNIFNYIKGINDIESEKRSLSKDELFNKIVDGESEHYQKI |
| | | | | | VYKLLPGVNKMLPKVFFSGRRIDFFAPSTEVLKIRNSASHSKNGSPQKGFEKEDFNLKDCHTIIDF |
| | | | | | FKKSIEKHPEWKEFEFEFSPTSSYEDLSGFYREVEHQGYKMDFHPIKKSYIDQCIEEGKLFLFQIY |
| | | | | | NKDFSPYSKGKPNLHTLYWKALFDTENLKDVVAKLNGQAEIFYRKHSIKKDERTIHRANKSLQN |
| | | | | | KNENNPKKTSLFEYDIIKDRRYTVDKFQFHVPITLNFKMEKMTQFAHNEKVNQMIVKSENTHVI |
| | | | | | GIDRGERHLLYYSVINPKGHIVEQGTLNTISTDKGYEVDYQQKLDSKEKARDTARKSWTTVENI |
| | | | | | KELKAGYLSHVIHKIAFLIEKYNAIVCLEDLNFGFKRGRFKVEKQVYQKFEKALIDKLNYLVFKD |
| | | | | | AKPNEPGHVLNAFQLTAPFDSFKKLGKQTGLLYYVQASYTSKIDPVSGFINFLYPKYESLLKSKIF |
| | | | | | FESMDGIRYNADKDYFEFSFDYRKMTPNRNLEGYQTKWTACTFGEKRFKNIRNAHGNWESVEV |
| | | | | | NVTEALKKILKNEDVDFKSGHDLRFEISKVKSTKFYKKLFKLLQITLSLRHSKTGTDEDFILSPIV |
| | | | | | DENGKFFDSRNAPKDQPMDADGNGAYHIALKGLWNLEQIRNWDGESRLNLAMKNVDWFSFAY |
| | | | | | QKPFKK |
| MG29 | 6350 | MG29-27 effector | Protein | Unknown | MINSSKSIWDGFVNKYSLSKTLRFELQPISRTLDFIKEKGLIEQDKEREKEFNLVKKIIDSYYIEFIE |
| effector | | | | | NVLSKITIDSDLLKEYSAVYKNLKNDKYSSDLKKEFKLIQDKVRSEVYKQIYNFPNFKLLFGKELI |
| | | | | | KVILPKWLEYKNRLEDKELILKFDKWTTYFVGFFENRKNVFSKDPIPTSVIYRIVHDNLPKFLDNI |
| | | | | | EKFNKIKLLDNFDYFSIEKELSVELNNKNLDYYFNLSNFNLFLNQRGIELENTIIGGKSTENIKIKG |
| | | | | | LNELINLYSQKEKDLIKSKNIRKLKMSPLFKQILSEKQSFSDKFDLIKDNSSLITQINTFYTDEFNT |
| | | | | | NLPKILELISKLDQYDLDQIYINKNSITNISSNIFKDWSIISSGLKEYFIKNYNLSNKKIESRLNQKYF |
| | | | | | SISEIQEGVKLLNLDRINYNDFSDHFISDYFKNLINEKIIDEITNHKLDFDKINYNNLNSFSDNEKQL |
| | | | | | IKILLDSILGFYNSIKPLYVNIKSSQEEKTQEAYELDSDFYNDFQIIIDSFKKIIPIYNKTRNYLTKKP |
| | | | | | YTTKKFKLNFDNSTLLDGWDINKEKDNYSLLFKKDNQYYLGICSKGNSTDISKYIQKKVFNSGDY |
| | | | | | FEKIDYKLLPGPYKMLPKVFFSKTNIEYFSPSEEIISIRNYASYSKNGTPQKDFDKEEFNITDCHKLI |
| | | | | | NFYKFSLNKHHEWKNFNFNFKPTDQYKDINEFYQDVEDQGYNLSFKNIDSKYILDLVDSGKLFLF |
| | | | | | KIYNKDFSKFSKRTPNLHTIYWNELFSEENLSKLIYKLNGKAEIFFREKSNIKNNTIHGKNQLIQN |
| | | | | | KNPINNKTESIFEYDIIKDKRYTQDKFLFHCPITINFKSRGNGKDIHKQINNYIKDFEGNINILSIDR |
| | | | | | GERHLLYYTLLNSDGKIISQNSFNNISDGFNRSFDYQDKLDQREKERDQSRKSWTAIENIKYLKE |
| | | | | | GYLSRVIHEIAKIAIENNAHIVLEDLNFGFKRGRFKIEKQIYQKFEKMLIDKFNFLIFKKRSKESIGG |
| | | | | | ALNGYQLTNKFESFSKLGKQSGILFYVPASYTSKIDPTTGFFDLIRPKYESVDKSIQLIKKFEYIKY |
| | | | | | NSDMDMFEFNYNYFNFNNELKLDRKNWCIYSNGSRLYNFRNKDKNNEWDTKEINLTKELKDLF |
| | | | | | ESYSIDYNSTQNLIDRIILIDHKDFFEKLIYILKLMLQLRNSIPNSKEDYILSCVKNKDGLFYDTRKN |
| | | | | | MTSKSLPVNADSNGAYNIGIKGIMIIDKIKNNLEIKITKEEYVNFIINKNDYGK |
| MG29 | 6351 | MG29-28 effector | Protein | Unknown | MKNLSEFTNLYSLSKTLRFELRPVGETAERIEDFKNKALCDVVRRDEKRALEYVKMKKILDDYY |
| effector | | | | | RDFISYVLDQKIFTERDIKDAFEVYKKTRQPTQDRDKQKKEFQTVQKKLRDKTAKAFNERLKEK |
| | | | | | GLDEYSSLINTKGKDDKLKKPLLWHWLKKKYDGKLLSKEEFEDAEKTLKSFDKFTTYFKGLKQ |
| | | | | | NRDNMFSKKDQRTAISYRLINENMIKHFDNCMRLENIKKNHKSLYNEIKESANSLKPDSFMIFLN |
| | | | | | QTGIDNYNRIIGGDSIDQNKTGVNQKINLYRQKHNIKGKDLPLMAKLYKQILSKTEDKFVIDKFE |
| | | | | | SHKDMLDTIDEYMCNILDSKNIRAISSFIENHITPENMEYIFIKNDTTLTDISQFMFKDWGFIKRAM |
| | | | | | TKYSENEISGKKEREKWLKSDIFSLKDIQTSIDKYLVDLEEKDFTQTDIGLFFKSFINADGNIFDKI |
| | | | | | NESRKEAEPVIRSGEFNVNNERPDNKTDTDKIKNLLDSIMKLIHFLKPFHLVKKGKPIETDNADSD |
| | | | | | FYEPFNNSYNDLCLLIPVYNKTRNLLTQKPYSTDKIKINFDKGTLLDGWDVNKETDNLSAILLRE |
| | | | | | GKYYLAVMDKSSNMILTKENTSGFDLKNEDCYLKMNYKLLPNPSKMLPKVFFAEKNIEYFAPG |
| | | | | | DDIIRIRDKGLYKKEADDIESVHIWIDFCKESIKRHEEWNNYFNFNFRPTKKYSDVSGFYNEVAEQ |
| | | | | | GYALTYTPVSAKYIDDKVSKGELYLFEIYNKDLSIKKKNINGTPNLHTLYWKAIFNEDNLKDVVV |
| | | | | | KLNGEAEIFFRHASIDANSRVVHKAGTALYSKNPLNKKNSTFEYDIIKDRRFSKDKFFFHCPITLN |
| | | | | | FKAQGEKRFNERVNRFLENNDDIKFIGIDRGERHLLYYSVIDGRGRIIEQDTFNVLKNSYESNGSI |
| | | | | | VEKKTDYRDLLDRKEKERDEARKKWSAIENIKELKSGYLSHIIHELAKLMIKHNAVIVLEDLNFG |
| | | | | | FKKGRFKIEKQVYQKFEKALIEKLNYLVFKNEKPGNAGYVLKAYQLTDEFESFDKLGKQSGFLF |
| | | | | | YVPAGYTSKIDPATGFVNLENTYYENIDKSKEFFGKFDSIRYNKDRDYFEFAFDYKKFTDRSGGK |
| | | | | | TKWTVCSFGNERYYYDARSRSYVCHDITRNLKLLFGHLKYENGENIIEKILEQTEAGFFKSLYFN |
| | | | | | LKVLFSLRYTGKDDKGNEFDYILSPVGNFFDSRKADENMPLDADANGAYHIALKGMMTVKGIR |
| | | | | | DGKLPKTEKGMMNKEWFAFVQERNMKN |
| MG29 | 6352 | MG29-29 effector | Protein | Unknown | MSAQSALSTLINKYSLSKTLRFELIPIGKTKESIDRKGLLSQDVKRAQSYKEVKKIIDEYHKEFIEK |
| effector | | | | | SLINAKLKGLEEFSKLYYKLQKEDKDKKNIKKMQDNLREQISDLFKNNKKDKWNILFKEDLIKK |
| | | | | | ELPLFAKDDKQKNLINEFNKFTTYFTGFHKNRKNMYAEEEKSTSIPYRIIHQNLPKFLDNIRIFEKI |
| | | | | | KKNKINTDVIEKELSLFLNGIKINDIFSINFFNDVLNQKGITFYNTILGGVSEKDRTKIKGINEYVNT |
| | | | | | EYNQKQLDKKSKIPKLKQLYKQILSDTETASFVLEQFENDNQLLEKIEQFYNTELINYETEGKTQ |
| | | | | | SVFLQFEQLFKNMQNYDASKIYISNLSIANISKIIFGDWSIICNALAEWYDKHNTKGKKINEYKKE |
| | | | | | NFLKQDFSIQQIEDAVLEYKNDTLNKEINFLLNYFASFLNEKSKKNIIQRIETEYSKVKDLLNTDYP |
| | | | | | EKKKLASDKDNVSKIKAFLDSLMDFLHFVKPFNIKKDTGLEKEENFYSIYVPLFEQIDKIIPLYNK |
| | | | | | VRNYLTKKPYSTEKIKLNFENSTLLDGWDLNKESDNTSVVLRKDDLYYLGIMDKKHNRIFKELP |
| | | | | | SQNGNESSYEKMIYKLLPGPNKMLPKVFFSKKGKKQFKPSKKLLKKYEDGTHLKGDNFNINDC |
| | | | | | HNLIDFFKESIAEHEDWKQFDFKFSSTSSYKDLSNFYKEVEKQGYKITFQNISENYINQLIDEGKL |
| | | | | | YLFQIYNKDFSKYNKGTPNLHTLYWKMLFDNDNLKNIVYKLNGKAEVFYRKSSLILGDNIVHKA |
| | | | | | GEAIINKNPDNEKKHSTFDYDLIKDKRFTLDKFQFHVPITLNFKSEGRQNLNEDVRKFLKNNPDI |
| | | | | | NIIGIDRGERHLLYLTLINQKGKILFQKSLNEITNEYNNKNGKSQIKSTNYHSLLDKKEKKRDEAR |
| | | | | | KNWGIIENIKELKEGYMSQIVHYISKLMIEKNAILSLEDLNFGFKRGRQKVEKQVYQKFEKMMI |
| | | | | | DKLNYLVFKDKKANETGGLLNALQLTNKFESFAKLYNQSGFIFYVPAWNTSKIDPITGFVNLLKP |
| | | | | | YYENLNKSQEFFKKFNNIKYNPKQEYFEFNFDYKNFTNKAEGSKNVWEICTTNNERFMWDKTL |
| | | | | | NSGKGAQKAVDVTQELKKLFDSSKINYLNGNDIKEDIINQNSADFFRKLMKLLSVVLSLRHNNGL |
| | | | | | KGKDEKDFILSPVEPFFNSLNAKMEEPKDADANGAYNIALKGLLILKQINESEDLRKIKENLSNKE |
| | | | | | WLKFAQSKSF |
| MG29 | 6353 | MG29-30 effector | Protein | Unknown | MQECRNNCRRLMALFDFEDIKGEKLMALIADEFLGQYSLSKTLKFELVPQGKTKDLIKNINDSIL |
| effector | | | | | AIDAKRAAEYKNVKKILDDYYRFFIEQVLEKNIFEKSEVEEAYIAFQQRAKDNKAFEKTQDNMR |
| | | | | | KKIAKALKDGRSGSQLDAYEKLFKTDDKSELYKWLNYGKDRKELTEELYESYKKSLQQFDKFT |
| | | | | | TYFTGYKDNRENLFSAEEKSSAISYRIVNENMVRFFENCQRFDDIKKKHAGLYEQLEVNQAIFQY |
| | | | | | NKFSELLGQSKIDEYNQMIGFSIENSDTKGINSLINEYRQKNHIRNKELPMMVQLYKQLLSDREK |
| | | | | | SFVIDEITSDEEMEEKAIECCREAREIEKKLALLVKEYVNEDNTVRIYLRGSKLTDLSQNIYGQWD |
| | | | | | IINKALLMRLESLTTKKQREEFDKRTKKVININELQGILQEYLAGLDSEEYKKIQDKVTISELIVE |
| | | | | | NIPAVEYSPVLNGLRFGSKEEKINKIKGVVDQIISMLHYYKIFYLYEGNKQLEVAEKDAFFYSEFD |
| | | | | | ALYNALSLATKVYDHVRNYVTKKPYSENKIKVNFNAPTLLNGWDINKEESNLSVLLEKNGLYYL |
| | | | | | AIMDTNHRKCFDLKDIAVAKAAFSDVNGAYFNKIEYKQVTGANKMLPKVFFAESNIDYYAPSSEI |
| | | | | | RTIREKGLYKKDANNIEARWQWIEFCKQSITKHPEWNNYFKFNFKPTKNYMDVNGFYRDFDNQ |
| | | | | | AYSIKKVRISEKYISDLVAAGQLYLFQIYNKDFSQYSKGKQNLHTMYWRMLFDSQNLKNIELNA |
| | | | | | NAKIFKLNGEAEIFFRRQSLEKKITHAKDMSIANKNPHNPKKQSTFEYDLIKDKRYTENKLFFHC |
| | | | | | PITINFRASSLPAQFNKKVNKFVANNPDINIIGIDRGERHLLYFTIINQNGEILKQGSLNHIKDNYIS |
| | | | | | NGKEVPIDTDYHELLDRKEKERDAARKNWTAIENIKELKAGYLSQVVHQLAELMIKYNAIVVLE |
| | | | | | NLNAGFKNGRVKVEKQVYQNFEKALINKLNYLVFKDCSLNKPGGVLNGYQLTAPFDSFRSLGSQ |
| | | | | | SGFLYYVYPSYTSHICPKTGFVDLLHPKHQSVAEAQKFFEKFEFVRFNQDKQYFEFGLDYNRFG |
| | | | | | KQMNKNRWVVCTYGEERYGFDGKEMTAKKYNITEEIRALLDKAKIVYDNGCDIKNAICTQDDK |
| | | | | | SFFKSLLYYLCLTMQMRNTNGGINDDNDYILSPVRDKNGNFFDSREATDTEPKNADANGAYHIA |
| | | | | | LKGLKLISSIDEEGKLVLKKTETQDWFNFAQEKPYLK |
| MG29 | 6354 | MG29-31 effector | Protein | Unknown | DSISDKDDAFYSQFAPLYEQLNKLIPLYNMVRNYLTQKLYCTDKIKLNFENSTLLDGWDVNKEP |
| effector | | | | | DNTSVILRKDGLYYLVIMDKAGKKVFMDVPKIAYSGTFYEKMNYKLLPLVNQQLPRVFFAKSRI |
| | | | | | EFFKPSEAIQENYKKETHKKGDTFNIKDCHALIDFFKASLAKHEDWKHFNFKFSPTKSYQDLSGF |
| | | | | | YREVEHQGYKMSFENIPTDYIDKMIEEGKIYLFQIYNKDFSAFSKGLPNMHTLYWKALFDENNL |
| | | | | | ADVVYKLNGQAEVFFRKSSIEEKNKVIHKAHELLKSKNPNTPNNNNTFDYDLIKDRRYTVDKFQ |
| | | | | | FHVPININFKASGSEIINAQTNDFLKNNRDVKIIGLDRGERNLIYLTLIDQKGNIIIQESLNTISNKER |
| | | | | | KIETPYHTLLNIKEKERDAARKSWNTIENIKELKEGYISQVVHKIAEMMVKHHAIVVMEDLNFG |
| | | | | | FKRGRFKVEKQVYQKLEKMLIDKLNYLVFKDAQPTQPGGLLNALQLTNKFESFKKMGKQSGF |
| | | | | | LYYVPAWNTSKIDPATGFVDFLKPKYENVEKAKAFFSKFDSIKYNTVKDYFEFAFDYKNFTTKAE |
| | | | | | GSKTDWIVCTHGDLRFRYNAQTKESEAVNVSQEIKKALKKHEITFEQGKDFKNLLIAKEGKEIFS |
| | | | | | ALLHLLALTLSLRQTKSGSEIDFILSPVTNRKGVFFDTRNADEKMPIDADANGAYHIALKGLWCL |
| | | | | | KQISQSDDMKKVKLAISNKEWLEFVQNKRF |
| MG29 | 6355 | MG29-32 effector | Protein | Unknown | MFTNLYPTSKTLRFSLIPHGDTLNNIEKAGILTEDEKLAEDFKKVKKIADDWLKNFINESLAGVSL |
| effector | | | | | SLENLLIYEEKYNLFPRNEKDEEEFNDIKTKLRKEVVSYLAKNPKFKLLGSADLIRKELPEFAKTE |
| | | | | | EEKNLINKFKTFTTYFVNYYKTRENIYSAEEKHASHAYRVINENLPLFITNKKNFDIIKNSYPELIE |
| | | | | | DIKKSVEPLLNGEKVEDMFSTEWFSKTLTQSGIDLYNKMIGGESLEDGKKIQGFNEKVNLFRQA |
| | | | | | NKLDGKSVPMLKQLKKQILGDKNVPAWITEGFKNKDSMNNAIVEFMDNIKPVLSTAADAFVTEE |
| | | | | | SHDYNKIFIKSRFLTDLSHELFKDWNFLKNILLEKYTAKNPKSKNPEKEFAKISYFSIAEIQAILPN |
| | | | | | LSKDFIFKFLYNKTINIVAEIRQSYELWNTNQKNVPVLKSLMDNIIQLHRTFKPFDIDEADKDPVF |
| | | | | | YELFDRIFEGIDGAVKLYNEVRNFITKKPYSLEKIKLNFGNSTLLAGWDVNKESDNSSILLRKGND |
| | | | | | YYLAIMNKSHNKVFKNAPLVKNNEESYKKMEYKLLPKSYMMLPKVFFSEGNKHKYEPSDEIMR |
| | | | | | IYENGTFKAGDNFNADDLHALIDFYKDSIEKNPEWACYKFNFRPTEEYQKINEFYDDVDSQGYVI |
| | | | | | TFRDIKASYIDELVKDGKLYLFKIYNKDFSVYSKGTSNLHTLYFKMLFDERNLKDTVYKLNGGA |
| | | | | | EMFYRKKSLNYSEEIMKNGHHVEELKGKFDYAIIKDRRFAFDKFQFNVPITLNPN |
| MG29 | 6356 | MG29-33 effector | Protein | Unknown | MSKIYQQFTRLYKIQKTLRFGLKPVGETANAIDDFKSQYLQDVVQEDGQRAEDYKVVKDLIDDY |
| effector | | | | | HRVYIEEKLSQPVDRATGEMWVTPEHLEAAYYDYQNLKNNDPKDNKIKKAWAETQKSLRKQL |
| | | | | | VKSFSDNSDLFRKKLITRDLPAFLKGQGKWDENEKAVKSFNKFTTYFKGFHENRKNMYSDEDQS |
| | | | | | TAIAYRVMNENLPKFFNNYLSYQKIKDKLKFSVEKELFTKMGISGIGDIFQPRYFIKLFTQSGLDN |
| | | | | | HQELLGGKTNEDGRKIQGLNEQINLYNQQQSDRQNKLPRFTSLYKQILSDREAHSFIPEVFKDDQ |
| | | | | | ELLKTLQGYIEKATKKEGLLDNLEKSIALLSTADNEKVYVKTVGLTDISSALFGSYDIIGAALSHH |
| | | | | | AENTAHQNHTKKPASKTLIKKRESFCKQDVFSTAKLDEMITAYIAQLEKTDPLHQQLKKLKTPK |
| | | | | | RPIQIYFLEAFQQAKKEYGFDACIKNITPLLSLESLSKKRQAPTSEGEQGDKGYQQLHSIQKMLD |
| | | | | | AFMAISYKLKPLHLVKGRKAIDMPDMDMRFYTKFSESYEDYSDTIINLYNKARNHLTKKPFSKD |
| | | | | | KIKLNFGNPTLLDGWDANKETDNSSLIFEKDGFYYLGIMHPKHKDLLNYITGIDDIGNDKKTKK |
| | | | | | KELLKKNIEANKNEQHYRKIVYKLLPGANKMLPKVFFSGKRQDYFSPSSEILRIRNSASHSKNGN |
| | | | | | PQEGHAKAEFNIDDCRKIIDFFKVSISKHPEWRAFDFQFSPTQNYQDLSDFYREVEQQAYRVDFD |
| | | | | | LIKQSYIDECIIKGKLFLFQIYNKDFSPYSKGKPNLHTLYWKGLFDPENLKDVVLKLNGEAEVFY |
| | | | | | RPSSINVADRTIHRANEAIDNKNKEFHRKSTSTFAYDIIKDRRYTQDKFQFHVPITLNFKDQGKPH |
| | | | | | FNDKVNLKLRNTKDTHVIGIDRGERHLLYYTVVNSKGEIIEQDTLNNISTDQGYAIDYQNKLHKR |
| | | | | | EKERDAARKSWSNIENIKELKAGYLSHVVHKLAELIIKHNAIVCLEDLNFGFKRGRFSVEKQVYQ |
| | | | | | KFEKALIDKLNYLVFKNSTLQKPGHYLNAYQLTAPFESFEKLGKQSGILFYVQAAYTSKIDPSTG |
| | | | | | FIDFLKPKYKSLSASKEFFETMSSVTFNKAKDYFEFSFDYKKFNPSQKFGSYTTAWKACSFGKIR |
| | | | | | YHNKRNNKGKWETCSINVTEELKKLFDNADIQYQTGQELKESLSLVKDTKFYKTLFWLLRLLLS |
| | | | | | LRHSKTGTDDDFILSPIADKNGDFFDSREAKDGKPKDADANGAYNIALKGLWNLQQIKQWDGKS |
| | | | | | SLNLAMKNEDWFSFIHDWHNQ |
| MG29 | 6357 | MG29-34 effector | Protein | Unknown | SSFIPDQFENDNDLLKSLGKFIKEMVKEDGLFKKLEDSIKLITDADLERTFIKNGVEITKISQSIFG |
| effector | | | | | NYSILKSAIYHHAESVLYPDPISGKISEALKEKRIKYVNKQVVFSIAELETILSNYASQMTDDNPDK |
| | | | | | EIIAQCENSEHPIRTYFLNAIENVKNDKDIEFGKAIENVLPLISLENLNKGKDGQAQTHKIQKMLD |
| | | | | | AFLAVTHAVKPLHLVKGRKPIDIPDMDMGFYAEFSKAFENFEQLVITLYNKTRNHLTKKTFSTD |
| | | | | | KIKINFENPTLLDGWDANKEKDNSGVLFEKDGNYYLGIMHPKHKNIFNYIKGINDIESEKRSLSK |
| | | | | | DELFNKIVDGESEHYQKIVYKLLPGVNKMLPKVFFSGRRIDFFAPSTEVLKIRNSASHSKNGSQQ |
| | | | | | KGFEKEDFNLKDCHTIIDFFKKSIEKHPEWKEFEFEFSPTSSYEDLSGFYREVEHQGYKMDFHPI |
| | | | | | KKSYIDQCIEEGKLFLFQIYNKDFSPYSKGKPNLHTLYWKALFDTENLKDVVAKLNGQAEIFYR |
| | | | | | KHSIKKDERTIHRANKSLQNKNENNPKKTSLFEYDIIKDRRYTVDKFQFHVPITLNFKMEKMTQF |
| | | | | | AHNEKVNQMIVKSENTHVIGIDRGERHLLYYSVINPKGHIVEQGTLNTISTDKGYEVDYQQKLDS |
| | | | | | KEKARDTARKSWTTVENIKELKAGYLSHVIHKIAFLIEKYNAIVCLEDLNFGFKRGRFKVEKQV |
| | | | | | YQKFEKALIDKLNYLVFKDAKPNEPGHVLNAFQLTAPFDSFKKLGKQTGLLYYVQASYTSKIDP |
| | | | | | VSGFINFLYPKYESLLKSKIFFESMDGIRYNADKDYFEFSFDYRKMTPNRNLEGYQTKWTACTFG |
| | | | | | EKRFKNIRNAHGNWESVEVNVTEALKKILKNEDVDFKSGHDLRFEISKVKSTKFYKKLFKLLQIT |
| | | | | | LSLRHSKTGTDEDFILSPIVDENGKFFDSRNATKDQPMDADGNGAYHIALKGLWNLEQIRNWDG |
| | | | | | ESRLNLAMKNVDWFSFAYQKPFKK |
| MG29 | 6358 | MG29-35 effector | Protein | Unknown | MGMIGDQFIGQYFLQKTLRFELRPIGETQKLLRDFKEGVQGNLLEYDAERARAYPTVKKILDDY |
| effector | | | | | YRYFIDQVLSGFAFDSQTINEVFEMYKKAKKDAEAAKEYAVHTKKLREQLSAAFKALITYYMLD |
| | | | | | KYEHLFNRNRESRLFEWLDIRFENDHLTENEYDEIKDVLDKFDKFTTYFTGYKENRANLFVADE |
| | | | | | KATAIAYRVVNENMPRFFENCIRMENIKKRHSDLYKLLVSFEGYFVPQAYANIICQPAITDYNKII |
| | | | | | GRPTQNPDEKGVNSIINEYRQKNQIKNRELPMMAQLYKQLLSDRVTVFSDPVINNDEEMQSIIAE |
| | | | | | TIEIARGLFSEVINLTAIHALADNSENIYINSSALANLSHRFCDDWNLIYRACEAKMIKLSGKQKK |
| | | | | | GLENKLKMAIPMSELQNIIEEYIATLDEELKLSYNNIPVLCDYFQNPPLDDFESATLKFEQIVKTT |
| | | | | | MSRTDLIQAIKEVLDKAMEVVRFFKPLYLFKGRSPLEVPDRNEDFYNEFERLYAELNLISKIYDR |
| | | | | | VRNYATKKQFSQDKIKLNFNNPTLLDGWDLNKEQDNLCVILIRDGNYYLALMNRDYRRLFDLK |
| | | | | | NDEVRNKALGKAGDHCYSKLEYKQVTGASKMLPKVLFAATNSDLFKPSQEILDIRKAGSHKKE |
| | | | | | AGNIEALHKWIDFCKQSIATHPEWNDHFDFKERSTSEYSELTEFYNDFDRQAYKIKFVDIKVEYID |
| | | | | | QLVKEGKLYLFQIYNKDFSPYSKGRPNLHTTYWRMLFGNENLANITMDPDRPIFKLNGEAEIFFR |
| | | | | | KASLEKQITHAKGQPITNKSKKDNGKKSESIFEYDLIKDKRYTEDKLFFHCPITINFRAPGTTVGS |
| | | | | | FNRKVNCFVERNPEVNIIGIDRGERHLLYYTIIDQKGNILEQGSLNQLHNSYTSAGRVVEHNINYR |
| | | | | | DLLHEKEKGREEARKNWETIENIKDLKAGYLSQIVNLMSNLMIKYNAVLVLEDLNAGFKRSRIK |
| | | | | | VEKQVYQKFEKAMIDKLNYLVFKELPPGSSGHYLNGYQLTAPFTSFRDLGRQSGFLYYVYPSYT |
| | | | | | SHICPKTGFVNLLNTRYESIEKAISFFEKFNRIKYNPGSDYFEFDFDYASFGKDVARSQWCVCTAG |
| | | | | | EKRYYYANHDKTSRECNATQQIKELLDKYNIEYIRGKDLLPEIIKMNDKGFLNGLMFLLGVVLQ |
| | | | | | MRYTVSGTSNDDDFILSPVMDEQGQFFDSRSAATSEPQNADANGAYHIALKGLKMISSISDGKLK |
| | | | | | TVNKNERQDWFAYVQNKMYR |
| MG29 | 6359 | MG29-36 effector | Protein | Unknown | MNSIFEQFTQQYPLSKTLRFELKPVGNTAKLISEFNESLPESSVAKDEEKSNAYPLVKKILDDYYR |
| effector | | | | | DFINEVLSKSDLDALKIKQAFNCYKECQSKNAAADAESKKAEYKAQKSILRKDTASFFSSESLKLS |
| | | | | | AMFKGTKKSCAIYEYGELFKEASPLFIWLQNRLEKQVISQEEFDRQAGLISKFNGFTTYFTKYKA |
| | | | | | NRENLFANEEKASSIAFRVVDENMEKFFDNCIAYKKITQKYPSEELAAELIKCEQFFTPENYGICL |
| | | | | | TQSGIDVYNQIIGKKSDDTYGKGINQQINEFRQKNALRRNDAPLMTVLFKQLMSESERVEVIETI |
| | | | | | DSDEELFSVVKDAYNTCIALVEGLSILCDSSLTDENLSDIFIRPDGLSNLSQKVFGKWDIIDSALNM |
| | | | | | KKESIGQKKFDAKYSKVISLLDLQTMCDAYISVIDDSEIRRNCTFSDYFKTFESSLIKSAYLEAEEV |
| | | | | | LNSIGLDKDKSMPTNDTDLGGKGFRQLQKIKQLLDSINEAVHFYKPFLLEKEGKAIEAEENNKEF |
| | | | | | YNEFLLNYRDLSVFPKIYDKVRNYATKKPYSKDKFLLNFDKPTLLDGWDVNKEESNLALLFIKD |
| | | | | | GKYYLGIMKNPRLFSNLPVKGIANENEPAYEKVIYKQVSGACKMFPKVFFADLNRELYKPGSEI |
| | | | | | QRIREEKSHLKGGSEDSKNKWIQFCIDCIDKQPEWKTYFKFNFKEPQEYPDVNSFYKDADAQMY |
| | | | | | SISFTKISCEYVNDAIKKGELFLFELYNKDFSEYSKGRPNLHTLYWKMLFDENNLHNIMNNPDKG |
| | | | | | IFKLNGEAEMFYRKASLPDKATHPANKPITNKNPLNQKMQSTFEYDIKKDRRYMSDKFMLHCPL |
| | | | | | TINFRKEKVGQGQFNNKVNTTIEQNLDDVKIIGIDRGERHLLYYTMINSKGEIIKQGSLNSVTADC |
| | | | | | GVTTDYRSKLDDKEKSRTAGRENWGQIETIKELKQGYLSQVVHMISQLMIENNAVIVLEDLNSG |
| | | | | | FKNGRKKVEKQVYQNFEKALIDKLN |
| MG29 | 6360 | MG29-37 effector | Protein | Unknown | MKNNFNEFVGMYSLSKTLRFELIPQGKTLENIQKKGIIATDTARNESYKEMKKTIDEYHKDFINQ |
| effector | | | | | ALSEAKLNKLDEYYQLYNLNAEKKKDENFKKKFDDVKKELRKEIANSFKSGAVKGIFERIDKKE |
| | | | | | LIKEDLENWINENNNNKYFDKDFKTFTTYFKGYHENRKNMYSDEEKSTAIAYRLINENLPKFIDN |
| | | | | | LNIFEKVKNSQVAENFEAIYKDLEAILNVNSIQDIFTLNYFNEVLTQPQIEAYNAVIGGKSENELKI |
| | | | | | KGLNEYINLFNQKQTEKSDKIPKLKPLFKQILSEKLHISFLPEAFESTDEMLTAIEKYYKNNLILC |
| | | | | | DINNNGKQLNILCEIQKILADLKEYDLAKIYLRNDTKITNISQKIFGNYNIIGEALSNYYDKIIKPDF |
| | | | | | ENLYQKADEKKREKLDKKREKLDKEKEKFAKKDYIAIEELQKSIDLYIADFDNSDENKSVKERY |
| | | | | | SKTCIADYFKNHFFAETKEEKGKSFDFISNISAKYNCVKGILNISFNNSDLTMEQKYNIKLFLDSIM |
| | | | | | EMLHFVKPIYLKSDEISQKDENFYSTFDPLFEQLSLVTKLYDKVRNFVTKKPYSIEKVKLNFDCST |
| | | | | | LMDGWDENKESSNSSILFMKGGSYYIGIMDKRNTHIFEDIEETFEENNYAKIVYKLLPGPNKMLP |
| | | | | | KVFFSKSRIDEFAPSNEILEIYEKESFKKGQEFNINDCRKLIGFFKDSIQKHSDWKKFNFVFSDTSQ |
| | | | | | YNDISEFYKEISQQGYKITIKYISNKYIEQMINDGKLYLFQIYNKDFSSYSKGKPNMHTLYWKALF |
| | | | | | DEENLKNVVYKLNGQAEIFYRKASIEEKNKTTHKANKPINAKNPKTPNKTNIFEYDIVKDKRYTI |
| | | | | | EKFQFHCPITINFKANENPKVNSKVFEYLKNNPDVNIIGIDRGERHLLYISVIDQKGNVLKDKNGK |
| | | | | | SIQYTLNEIVGQYKNSKGETVDFKTPYHTLLDIKENEKAKARENWSTIENIKELKEGYISQVVHLI |
| | | | | | SKLMLEYNAIVVMEDLNFGFKRGRFKVEKQVYQKFEKMLINKLNYLVFKDKAPNEIGGLYKAM |
| | | | | | QLTNQFKSFKEMGKQNGFIFYVPAWNTSKIDPTTGFVDFLKPHYKSIEDSREFINKFDSIRYNKEK |
| | | | | | DYFEFAFDYDNFTTKAEGTRTQWTVCTYDIERYAWNKSLNQNKGDYEKINVTQKIKELFTENNI |
| | | | | | EFSSGNDLKRLITNINNSKFYSKLLKYLSVTLSMRYSSSKDGKDFILSPVINSNNEFYYSENASKEL |
| | | | | | PQDADANGAYHIALKGLWVLNEINNTDDFKKLRIAISNKEWLNFAQDIAKRK |
| MG29 | 6361 | MG29-38 effector | Protein | Unknown | LGQSKIDEYNRMIGFSIENSDTKGINSLINEYRQKNHIKNRELPMMVQLYKQLLSDREKSFVIDEI |
| effector | | | | | TSDEEMDEKATECCLEVREIEKKIALLVKEYVTGDNTGRIYLRGSKLTDLSQNIFGQWDIINKAL |
| | | | | | QMKLETLATKKHKEEFDKRSKKAININELNDILQEYFIGLDSGEYKIMQEKPALSELIIENIPVVE |
| | | | | | YSPVLNGLGFGTKEERINKIKGVFDQIISMLHYYKIFYLYEGNKQLEVAEKDAFFYSEFDGLYND |
| | | | | | LSLATKVYDHVRNYVTKKPNSEIKIKVNFNAPTLLNGWDINKEESNLNVLLEKNGLHYLAIMDT |
| | | | | | NHRRCFDLKDIEVAKVAFCDLDKPYFNKIEYKQVTGANKMLPKVFFAESNIDYYAPSSEIRTIRE |
| | | | | | KGLYKKDANNIEAMWQWIDFCKQSTEKHPEWNKYFKVNFKPTKNYMDVNGFYRDFDDQAYSI |
| | | | | | KKVRISEKYINDLVAEGQLYLFQIYNKDFSQYSKGKQNLHTMYWRMLFDSQNLKNIELNANAKI |
| | | | | | FKLNGEAEIFFRRQSLEKNITHAKDMPIENKNPHNPKKQSTFEYDLIKDKRYTENKLFFHCPITIN |
| | | | | | FRAASLPVQFNKKVNKFVANNPDINIIGIDRGERHLLYFTIINQKGEILKQGSLNHIKDNYISNGKE |
| | | | | | VPVDTDYHELLDRKEKERDAARRNWTTIENIKELKSGYLSQVVHQLAELMIEYNAIVVLENLNA |
| | | | | | GFKNGRVKVEKQVYQNFEKALINKLNYLVFKDCSLNQPGGVLKGYQLTAPFDSFRSLGSQSGFL |
| | | | | | YYVYPSYTSHICPKTGFVDLLHPKYQSVAEAQRFFERFEFIRFNQDEGYFEFGLDYDRFGKKMN |
| | | | | | KSKWIVCTYGEERYGFDGKDMTAKKYNVTDEISALLDKVKIVYGGGRDIKNDISTQDDKAFFKS |
| | | | | | LLYFLCLTMQMRNTNGGTNDDNDYILSPVQDKKGNFFDSREANDTEPKNADANGAYHIALKGL |
| | | | | | KLISSIDEEGKLVLKKTETQDWFNFAQEKSYLK |
| MG29 | 6362 | MG29-39 effector | Protein | Unknown | YDEIYQDAILPLKDILLHLAHYDLNRVYLKNDTGITNISQKIFGDWGVITKAIVKSFTKQYKGKA |
| effector | | | | | KPGTEKWDSELNKYQKGFESFSINFINESLLLLESPEYHFSIEKYFIIGGKCKSGANMFQAVEDKY |
| | | | | | SIARQLLNNVYPEDKNLSQQQGDVDKIKQLLDSIKDLQWFLKPLLGSGKEPEKDERFYGEFSTL |
| | | | | | MDLLDQVTPLYDKVRNYMTAKPYSTEKIKLNFDNSLFLSGWARDYDTKAGLLFFKDGKYYLGI |
| | | | | | NNKKLTVDEKNELNSSNSALSGKRIILDFQKPDNKNIPRLFIRSKGDSFAPAVAKYNLPINEVIDIY |
| | | | | | DSGKFKTEYRKTNEADYKKSLSRLIDYFKEGFSKHESYNHYSFCWKETSQYKDISEFYKDVEVSC |
| | | | | | YQVLEETINWESLMEFVETGKIYLFQIYNKDFSSYSSGTPNLHTLYWKILFDKENTQDVVYKLNG |
| | | | | | QAEMFFRKASIQHKNRILHKANRPVDNKNELNPKRQNVFQYDLIKDKRYTVDKFQFHVPITMNF |
| | | | | | KATGINNINPLVNEFIRDNNDVHIIGINRAENHLLYIVVIDSKGHIVKQFSLNEIINEYNGNKYHTN |
| | | | | | YSQLLNKREAERNEARLNWSTIEGIKTLKEGYLSQVIHQICQLIVQYNGIVVLEDLNMEFKQGRQ |
| | | | | | KVEKSVYQQFEKKLIDKLNYLVDKKKSLSEVGGTLKALQLTNKFESFQKMGRQSGFLFYVPAW |
| | | | | | FTSNIDPATGFVNMIDTRYQNIEKSKELFSRFADIRYNAEKEYFEFEIKDYTQFNPKSEGTRQNWII |
| | | | | | CTFGTRIEKFRNPDKNNQWDSREIDVTECFKALFEQYNVNFNENLKEQIVNINDKAFFEQMLDFL |
| | | | | | YLTLQMRNSEIGNAGSDYIISPVCDPNGRFFDSRTAGHQYPENASANGAYNIARKGLYYVNQIKQ |
| | | | | | ADDIRALRLGLTNNEWLKFVQD |
| MG29 | 6363 | MG29-40 effector | Protein | Unknown | YANAKTENQIKHLNDTKNKWNSDFISLGLLQKTLAKYIETLDADSEIRKIYTPTIITDYFKRHIIKK |
| effector | | | | | EVEEAKNNETIKKTTDVELFYSITGQYLGVKGLLNIEKTDNKTLAQEKEKVHQLKSFLDSILELN |
| | | | | | HFVKPLFLTDDSISDKDDAFYSQLAPLYEQLNKLIPLYNMVRNYLTQKLYCTDKIKLNFENSTLL |
| | | | | | DGWDVNKEPDNTSVILRKDGLYYLVIMDKAGKKVFMDVPKIAYSGTFYEKMNYKLLPLVNQQL |
| | | | | | PRVFFAKSRIEFFKPSEAIQENYKKETHKKGDTFNIKDCHALIDFFKASLAKHEDWKHENFKFSP |
| | | | | | TKSYQDLSGFYREVEHQGYKMSFENIPTDYIDKMIEEGKIYLFQIYNKDFSAFSKGLPNMHTLYW |
| | | | | | KALFDENNLADVVYKLNGQAEVFFRKSSIEEKNKVIHKAHELLKSKNPNTPNNNNTFDYDLIKDR |
| | | | | | RYTVDKFQFHVPININFKASGSEIINAQTNDFLKNNRDVKIIGLDRGERNLIYLTLIDQKGNIIIQES |
| | | | | | LNTISNKERKIETPYHTLLNIKEKERDAARKSWNTIENIKELKEGYISQVVHKIAEMMVKHHAIV |
| | | | | | VMEDLNFGFKRGRFKVEKQVYQKLEKMLIDKLNYLVFKDAQPTQPGGLLNALQLTNKFESFKK |
| | | | | | MGKQSGFLYYVPAWNTSKIDPATGFVDFLKPKYENVEKAKAFFSKFDSIKYNTVKDYFEFAFDY |
| | | | | | KNFTTKAEGSKTDWIVCTHGDLRFRYNAQTKESEAVNVSQEIKKALKKHEITFEQGKDFKNLLI |
| | | | | | AKGGKEIFSALLHLLALTLSLRQTKSGSEIDFILSPVTNRKGVFFDTRNADEKMPIDADANGAYHI |
| | | | | | ALKGLWCLQQISQSDDMKKVKLAISNKEWLEFVQNLCWH |
| MG29 | 6364 | MG29-41 effector | Protein | Unknown | MKSTLDQFSHLYPMSKTLRFELIPQGATTANIESRGFLKKDEERAESYKKMKETIDRFHQDFIEK |
| effector | | | | | AMAHVRLSNLEDFENLYNAPNEEKKEDKYKKQLEKVQERLRKEIAKGFKSGEVKAIFLKIDKK |
| | | | | | DLVTKLLEKWIEENNLEDVHFDPEFKKFTTYFSGFHQNRKNMYTDKAQSTAIAYRLVHENLPKF |
| | | | | | IDNINIFKKVSEIPELKQNLEKLYKEIEEYLGIVSIEEAFELGYFNEVLSQKGIDVYNLILGGRSEKE |
| | | | | | NKKKIQGLNEHINLYNQKQDKKNKIPKLKVLYKQILSDRTSTSFLPDAFEDDDNSTASQKVLAAI |
| | | | | | HQFYHTQLLDYQPSDKAETINVLKSFQGLLADINNFDLDKVYLRNDKSISTIAQKMAGNYGVLR |
| | | | | | DALNYYYENKIDPEFQIKYDKATTDKKRENLDKEKSKFTRQSYISISTLQTALDTYVESFDETHDV |
| | | | | | KQVYSPTCIADYFKDHFKAEPKEGSDKEFDFVSNIEAKLSTIKGLLNTPYPENERLQQDKKKIDAI |
| | | | | | KLFLDSIMEYLHFIKPLALPEDFTLEKDEHFYTLFEEWYEQMQLLIPLYNKVRNYATQKPYSTEK |
| | | | | | FKLNFENSSFLSGWAPDYNTKGGLIIKKQDNFYLCIVEKKLKKEDVEFLKTSPEDHLAHRVIYDF |
| | | | | | QKPDNKNVPRIFIRSKGSSFPPAVHTYDLPVRSIIHIYDEGLYKTDFKKENP |
| MG29 | 6365 | MG29-42 effector | Protein | Unknown | MSNYYDSFMGIYKVQKTVRNELIPVGKTKDFIDRFVSEQNEILQADKERADAYPFVKEILDDYYR |
| effector | | | | | EFFNEVLSDFNFPEDDLQKAFILYKASIKDRSQQKDLSKFELDERNSVASALEKSKSKYALDKNK |
| | | | | | TLFNEKNGLLNSWLDRKYESGSLSKDEYEKAKKNISRFSNFSVYFTGYQQNRENMFSNEEKSTSV |
| | | | | | AFRIVNENMIRFFNNCLNFDAVCHTYPELQSKLQKYADFFVPSAFNKVISQNGEKQGIGYYNKKI |
| | | | | | LGQTEQGKESNGVNQIINLYRQKNGLKSKEVPVMAKLYRQILSVDENEKEELIEINSDQELFTVV |
| | | | | | SESAKKAASLSETLKTLLQEKMAAENFSNMFIRTDSLANLSNQLFGNWYFIKSALINAGIKKITEE |
| | | | | | YISLAALQDKLNAYIQTLDEKPDISITESLTGYFLQNMDERIKKAFESAQPSLSLQKLDADRSLPST |
| | | | | | QKPDGGKGFRQVAPIKELMDAIQEAIHLYNLFLMEFDGKEELPEEIDKDFYARFSSVFPDLKHLT |
| | | | | | KSYDMVRNYVTRKPYSTDKYKINFDRPTLLAGWDVNKEKDNLCVIFREKDQYYLGIMAAASNK |
| | | | | | LLDEESKYICPPSEEHYEKMVYKQVSGSSKMFPKVFFAKANDNLFSPSDEILEIREKGLYRKSAD |
| | | | | | DLNSLHKWIDFCKNCIAKHPEWSHYFQFHFKETNQYSNINEFYKDADDQMYNLSFINVKKSYID |
| | | | | | NAVEKGQLYLFQIYNKDRSAHSKGRENLHTIYWDNLFSEENMDRIAHSNEPVFKLNGEAEIFFRK |
| | | | | | ASLESEKPTHPANKSIQNKQQPGKALFPYDIIKDKRYTQNKLFFHCPLTINYRADDTKSKAFNTA |
| | | | | | MNKAVLADSSVKIIGIDRGERHLLYYSIIDQQGRILEQNSLNLVGNGEGETVDYHKILSDKEIQRQ |
| | | | | | NARQSWGEIEQIKDIKTGYLSQIVHRLSDLMIKNNAVIVLENLNGGFKNSRIKIEKQVYQRFEQA |
| | | | | | LIDKMNYLVFKDRSADDPGGSLHGYQLAAPFESFEKLHDQSGILYYVVPSYTSKIDPVTGFVSFL |
| | | | | | NLHYENREKSCLFIKKLTGFAYHSEADEFEIGLDYRKFGKFPGKQEWTICASNQSRYIYNHHENK |
| | | | | | YECILASDEFKKLFDSYGIEYRSGCDLRQAAASQQSADFFRQLLRLIQITWQLRYTASGASGDED |
| | | | | | DYILSPVRDEKGNFFDSRKLSDEDGGVLEPKNADANGAYHIALKGLLLLKRIQPDGTLKRVPDE |
| | | | | | KADWIDFAQNKKQLLSE |
| MG29 | 6366 | MG29-43 effector | Protein | Unknown | MEQLTNFTNLYSLSKTLRFELIPQGKTLEHIQEKGLLSQDEKRAESYKKVKKIIDEYHKEFIEKA |
| effector | | | | | LHRITLSKLYDFDFQYRLPKEQRNEDAFSKIKESLRKEIVAAFGKDETKEQFANLFKKELIKEDL |
| | | | | | LYWVGAEDKELVKEFERFTTYFTGFIIENRKNMYSADDASTAIAYRIVIIENLPKFIDNISIYENIKS |
| | | | | | NNKDLDFSPILNEMEDIIQGKTLDEIFTLDFFNNILSQNGIDFINHIIGGRSGEAGEKKSKGLNEHIN |
| | | | | | LYNQQQKDKKKRAPKFKKLYKQILSDRGSISWLPEAFEKDEEVLDAINNFYREGLENSVIDEKN |
| | | | | | VNILNEIELSFKSLLNYDDFSKIYIRNDTAITDISQTLFSDYSILGRALNYYYETFVNPKWITDYSKA |
| | | | | | TETKREKLEKERDKFTKSTYISIDILQKSLAEYIKTLDTDSEIKQKYTPTLIANYFTHHFYAKDEN |
| | | | | | GNETEKTLTYQIVSEYNGLKGFLNTEHSEDYKLIQDKERVHQLKTFLDSIMNLLHFAKPLYLDK |
| | | | | | NASEEKNELFYTEFTPIYDELAKIVPLYNMVRNYLTKKPYSTEKFKLNFENSTLLDGWDVNKEK |
| | | | | | DNTGVILLKDDNYYLAIMNKQNNTVFEEIPKAINPQNTFKKMNYKLLPGPNKMLPKVFFSKSRT |
| | | | | | KEFGVSEKMLENYENGTHKKGDNFNLSDCHQLIDFFKASIQKHEDWKQFDFNFSE |
| MG29 | 6367 | MG29-44 effector | Protein | Unknown | MPKKSLDQFTFQYSVNKTLRFALTDPQGDMEKFLANMREGELKRILVEDKQRAEDYKQVKKII |
| effector | | | | | DAYHREFIEEVLGQKGVLTEEDMNEYVTIYEEFKGLSRDSKNREKVIKKKRDIEKRLREAIVKKF |
| | | | | | KKNAKYKKLFNAKLITELLPQWLEERRNQKEIYDEAKYSEEKHLVEKFNRFATYFTDFHQNRA |
| | | | | | NMYVEKDQNTAIPYRIVNVNLPKFLDNYLNYEKLIQNHSGIDFSSIEKDLKGELRDLKLSEFMKP |
| | | | | | SNFLACLNQSGIDSYNTIVGGKTLEAGKKIQGINEILNQYRMKLDKSEAKKIPLMTSLYKQILSDR |
| | | | | | ESHSFLPEQFTSDQEMLKAIREFYESISETKEGEKKSLLNNIKEFLDSFPSENTDRIYIKATEITRIS |
| | | | | | HTLFAGDWALIHRALEYSKLDSQLKKEHIISIEEIETALQKYKEDIDEEDEAIKKKLGNPHPVIDF |
| | | | | | FKSAEKVEKVEETKNESNSNPTPYKKFNIFATINQHYQAAKEILKLEELHKDRLSPQKEGDKGG |
| | | | | | KGFQQVTKIKNLLDAIKDLLDLISPLYLEYKRQKIDVSDKDDRFYVELDILYDELFSIVPLYNKVR |
| | | | | | NHVTKKNRNEERFKINFDKTTLLDGWDVNKETANLGVILRKDNNYYLAIVHKKHSSVFNYVKK |
| | | | | | RGDSNNKLKIKDGLRRDIIAQNGEGCYEKMLYKLIKEPARDLPHAVFPEKKKNNFNPPSEEIQRI |
| | | | | | YNKYKKEKQFVNRAQMHQLIDFYKESIKRNIDWNGFNFEFSFTKEYNDIQEFYNEVKRQSYKID |
| | | | | | FDKIKSSYIEDKIKKGELFLFKIYNKDFSPHSKGSPNLHTSFWRLLFDEKNLKDTVAKLDGQAEIF |
| | | | | | FRPASIKKSERKIHKKDVPIENKNLNNAKKESKFKYDLIKDRRYTQDKFLFHVPITLNFSTQNKTA |
| | | | | | KQFNTEVNHFLQHNTNVNIIGIDRGERNLLYYTVIDQEGKILEQESLNIIANRIPNQNNIIETDYHSI |
| | | | | | LDKKEHERDRARKDWGTIENIKELKAGYLSQVVHKLTNLIIKYNAIVMLEDLNIGFKRGRFKVE |
| | | | | | KQVYQKFGELYT |
| MG29 | 6368 | MG29-45 effector | Protein | Unknown | MTMKKFVGLYPVTKTLKFELISQGKTSTHIQRKGLLSQDEQLAEQYKKVKEIIDEYHKDFIEKA |
| effector | | | | | LSGIRLTKLDDFYSQYILSKEQRDDNFFDKIKEELRKEIVAAFSKGELKIQFANMFKKELIKEDLL |
| | | | | | NWIGDEKRNSVKEFENFTTYFTGFHENRKNMYSAEEKSTAIAYRIIHENLPKFIDNIRIYDTIKFK |
| | | | | | HKNLDFSPILNELKDIIQGKSLDEIFTLDYFNNLISQNGIDFLNSIIGGRSGKSSEKKIKGLNEYINQ |
| | | | | | YNQKQNDKKDRIPKFKQLYKQILSDRSSISWMPQAFEKDTEVFDAINDFYHVELGNAEIDGRSVN |
| | | | | | ILNAVKTIVKSLSDYEELDKIYLRNDLSITTISQTIFSDYGVLGRALNHYYETFVSPQWLVDYAKA |
| | | | | | KETKRKKLEAEKEKFIKSTYISIAVLQTALAEYVKTLDDDSSIKQKYSATLIADYFTKYFYAKDEN |
| | | | | | GNEAKNTLTDQITIEYGDFKNVLDNKRSVDYKLIQDKKHVHQIKIFLDSIMNLLHFVKPLYVDKS |
| | | | | | ASEEKNELFYGEFTPVYEELAKIVPLYNKTRNYLTQKPYSIEKFKLNFENSTLLDGWDANKERDN |
| | | | | | TAVILIKDDRYYLGIMDKRHNTIFEKIPETNNRNAVFKKINYKLLPGPNKMLPKVFFSEKRMPEF |
| | | | | | GVPEEIYEKYNAGTHKKGDNFNLSDCHQLIDFFKSSIQKHEDWKRFDFKFSPTKSYKDVSGFYRE |
| | | | | | VEQQGYKITFSDVSEEYINQLVEEGKLYLFQIYNKDFSPNKKDQGKPNLHTLYWKALFAPENLA |
| | | | | | DVVYKLNGQAEMFFRKKSIDAKKTIIHKANEIIENKNPSASKKTSKFKYDIIKDRRYTVDKFQFH |
| | | | | | VPITMNFKVSGSDYINPKVNAFLRNNPNVKIIGLDRGERHLIYLTVIDLQGRIIRQESLNTIKNKQY |
| | | | | | NMETLYHELLDKREKERDAARKSWNTIETIKELKEGYISQVVHKITTMMIEHNAIVVLEDLNFG |
| | | | | | FKRGRFKVEKQVYQKLEKMLIDKLNYLVMKDNKDNEAGGLYKALQLTNKFSSFKDMGKQTGF |
| | | | | | LFYVPAWNTSKIDPVTGFVNLFNTRYENVEKAKDFFSKFDSIIFNSKEKYFEFEAKDYSKFSDKAE |
| | | | | | GTRLDWTICTHGERIETFRNSEKNNNWSHRKINITNELLKLFGTENGDFKNLIQEKTDRAFFERL |
| | | | | | LYLFKMTVQMRNSDNVEDYMISPVADKSGKFYDSRDYAKINEPSLPENADANGAYNIARKGLWI |
| | | | | | LQQINETKTEDDLKKLKLNISNKEWLQFAQRQGLVNK |
| MG29 | 6369 | MG29-46 effector | Protein | Unknown | MEEIFTEITNKNAFSLQKTLRFELKPMIFNEEKNQLQPISESDSYLKNFNSGYLEKLKQIIKHDEE |
| effector | | | | | RAEDYQEIKVYIDELHKQFIDRVLPEIKSLEIDFKKAFEMYELTKKRYAKPSSDKEEEEQSKEKK |
| | | | | | NNLKAWQDFQKEARKKISNFLKKQPEYENLFEKELFSDLIPKSNYSKQLGEKSPNDLAKSFSGFT |
| | | | | | TYFQGFHENRKNIYADEGSTSLAHRIINENLPKFFTNILQYVILNKDHNLLVGQFKENYSDEELTE |
| | | | | | LFNPNSFVSFLNQSGVDRYNEIIEAKKGIETAKSKDGLKQLANRYKQAKQIKNLPNFTPLYDQIL |
| | | | | | GKRGLDQNDESILRAGVTDDKNLLNSLKDFNKNIQPSVFELINICSELNKANAEEIFIMGSSLESLS |
| | | | | | SSVFGDYSVLSRVMKHHYIESRISASRTTEKKLEKDSEAYLKQETYSLQEIQSAIDYYIEKGNELES |
| | | | | | KSLFDYFTACKYNSNHTLSEEIKIAWDNLQPILELEQIDKDRAIPKTQEEQGGKGFQQVEKIKLF |
| | | | | | LDSYMQLLHFAKPLHLVKKRNPVTVSKKDEAFYAIFDKNYTNLEAELIPVYNQTRNYLTKKPYS |
| | | | | | LEKFKINFEKGTLLNGWDLNKEKDNLGVLFLKNNNYYLGIMSNNKIFDFQKQNIKKEALSLSGQ |
| | | | | | QDGYHKVIYKYLAGPNKMLPKVFFAKSNLEKFSASEEILRIRNTSSFTKNGEPQPSYKKAEFNLN |
| | | | | | DCHAMIDFYKQSLASHEDWSQFGFQFLETSQYSDISQFYEDVAKGGYKISFVNISDNYINEKVKA |
| | | | | | ADLFLFQIYNKDFSEQKKRKDGKPNLHTMYWNAAFRPWLDRSESNVKLNGEAEIFFREHSIERK |
| | | | | | ITHRSGEPIDRKNPKNPGESLFSYDLIKDKRFTSDKFFFHVPITINYKNKKERNNKQFNDVVNSVI |
| | | | | | KNNRDVNIIGIDRGERNLLYYTVIDQDGRILEQNSFNEISSQCSTSEKSSTFDYHKKLDEKEDERK |
| | | | | | QARKSWGTIENIKELKSGYLSHVIHKLAKLILKYNAVVCLEDLNAGFKRGRMKIEKQVYQKFEL |
| | | | | | ALIHKLNCLVLKDREEGEFGSYTNPYQLSGKITSYQDIFSQTGIVFYVNPAYTSKICPKTGFVNFL |
| | | | | | DLRYENLEKAKSLIENFNSIRFNNHENYFEFDLDYKKIPQTQNKECGEKTQWTVCTYGNERFIYN |
| | | | | | PKTRGYDTYNVTEKLAHLFKKHNISYEDGLDLREKILASTQDAVSFFKELLFLLRLTMSLRHVNE |
| | | | | | NHDCILSPIKHPELGFFDSRDVKDSTEAEEPRDADANGAYHIAMKGLQIFAEKISSENPKLSIKKE |
| | | | | | DWFRFIQNHHETKWKEKSLSPI |
| MG29 | 6370 | MG29-47 effector | Protein | Unknown | MFTNLYSTSKTLRFSLIPQGDTLNNIEKAGILAEDERLAEDFKKVKKIANDWLKNFINESLAGVSL |
| effector | | | | | SLENLLIYEEKYNLFPRNEKDEEEFDGIKTKLRKEVVSYLAKNPKFKLLGSADFIRKELPEFAKTE |
| | | | | | EEKNLINKFKTFTTYFVNYYKTRENIYSAEEKHASHAYRVINENLPLFITNKKNFDIIKNSYPELIE |
| | | | | | DIKKSVEPLLNGEKVEDMFSTEWFSKTLTQSGIDLYNKMIGGESLEDGKKIQGFNEKVNLFRQA |
| | | | | | NKLDGKSVPMLKQLKKQILGDKNVPAWITEGFKNKDSMSNAIVEFMDNIKPVLFTAADLFVAEE |
| | | | | | SHDYNKIFIKSRFLADLSHELFKDWNFLKNILLEKYTAKNPKSKNQEKEFAKISYFSVAEIQAALP |
| | | | | | NLSKDFIFEFFYNKTIKIVAEIRQSYELWNTNQENVIILKSLMDNILQLHRTFKLFDIDEADKDPVF |
| | | | | | YELFDRIFEGIDGAVKLYNKVRNFITKKPYSLEKIKLNFGNSTLLAGWDVNKESDNSSVLLRKGN |
| | | | | | DYYLAIMDKSHNKVFKNAPLVKNNEESYKKMEYKLLPKSYMMLPKVFFSGGNKHKYEPSDEIM |
| | | | | | RIYENGTFRTGDNFNINDLRKLIDFYKDSIKKNPEWSCYNFNFKPTEEYQKINEFYEDVDSQGYVI |
| | | | | | TFRDITASYIDELVKDGKVYLFKIYNKDFSVYSKGTPNLHTLYFKMLFDERNLKDTVYKLNGGA |
| | | | | | EMFYRKKFLNYSEEIMKNGHHAEELKGKFDYALIKDRRFAFDKFQFNVPITLNPNTSGHGNINDI |
| | | | | | CRDFIKSNDINVVGVHRAENHLVYITVLGSAGNIIEQHSLNEIEGYNGKNINYMEKLEKRGEERD |
| | | | | | EARVNWGVIGNIKELKEGYLSNVISKIAALMVRYNAVCAMEDLSFSFIRERSAIEKQIYQKFEKM |
| | | | | | LIDKLNFYVDKKKEPEELGGLLKPLQLANKFVSFEKMGKESGMIFYVSPYKVTDIDPVTGFVNLF |
| | | | | | DTRYFNIEKALQFFAKFKDIRYNKNTDLFEFKFDYVDFTDKDRIQSARTEWTVYTYGERIEREND |
| | | | | | NNQPKFRKIDLTKEFKNLFSEYSVDYKGDLKESILSLNEKDFFVRLLSLFRLTVQMRNGDFIISPV |
| MG29 | 6371 | MG29-48 effector | Protein | Unknown | MEIKEKTLDNFTNQYQLSKTLRFELKPVGQTAEWIKKHNIIAVDGDTLTGVDADRAKNYKYAK |
| effector | | | | | LLLDELHRLFIEDALKLAPEAESTEKLKDKIIELYSASEIKDANLPGELFKQILDDKADEWIKLYQ |
| | | | | | KEMPQYWREDISVLKDKSSRETDKKEIRNLDRIAAKLNKLCETGQSFKKTGIEILYGANEDPLKL |
| | | | | | LEWAVRCGKIRPSFKDLKQSKSDSAMPQEHIVSYIRNFDNFCTYFTGFNENRANVYDVTGAKSTS |
| | | | | | LIHRIFMQNMQFHFNNIRKWEIVRKSLEGYTNGFVEKDYNWKLKLDECEKSLSFSSDEIFTPQAF |
| | | | | | INFINQSGIDRYNEIIGGLAQEGGKTKTQGINESINLVRQHAGAKRNEFPPLQLFYKQILSKSDRTF |
| | | | | | ISAFETDEEMFDRIKDFRQKCFIEMETGKLPIIQEFIKDIDKLISESLDEKSNVFISKDKLTRISQEL |
| | | | | | TGSYNTINLRLLSELGEKVFNRNVCFSVQQIDDALNAMVDGEKFSSRNQNIKVEYQSTSGNILYD |
| | | | | | FFSKRLNTSLSSIEASWKNLNENGVFSGKELDKTRENEKEKGFEQIAAIKGFLDNSIDFLGFVKD |
| | | | | | WTLQEKKTSGNINNVWYETLQLFCDHFPIIKLYNMVRNHVTQKAHSDEKLKINFDNSTLLDGW |
| | | | | | DRNKESSNYGILLEKEGLYFLGIMTPESNSIFDYEISDSDSQTKKQGKQELANAIKASDGENLYKK |
| | | | | | VVYKQIADVSKDIFTLCWNEKENKAIRKTKGRESVWGENITRIKESKSYQNNEADRKCYFEYLIK |
| | | | | | CANSYWKHFNVKLKPADEYEDFSSLINDIDAQGYKISFDNIKKSYIDEKVFKGEFYLFQIYSKDFS |
| | | | | | QKKKSGGKDNLHTSYWKLLFDAENLKDTVLKLNGQAEVFFRKASVSLTEEKKTKGHHYERLK |
| | | | | | NKFKYPIIKDRRFAEDKFFFHCPISLNFKAEKSIPQDKYKPSFNSKFNLQIKAFLQNNSSVNIIGIDR |
| | | | | | GEKHLLYYSVTDRNGNVIEQGSLNSIAGFKGNEINYHEKLDKKEGNRDKARKSWSLIQNIKELK |
| | | | | | AGYLSQVVHKLSQLIIQHNAIVVLEDLNYRFKRGRFKVEKQVYQKFEKALIDKLNYLVFKDKKH |
| | | | | | RLEPGHCLNAYQLSGSYHLDSLKFQKQSGILFYTAASYTSTTDPVTGFMKNVYVSYESVEKSLKF |
| | | | | | WESFDSITYNPAKDRFEFKYTLGKIASKSMDKEKDEEKITKKQWTVCSCVVRSSYNQKNKTHEL |
| | | | | | HDVNQELKDLFDGKLKKLVNGKLDYLNGRDLRDSICQIQEKGFLEELVRLFNAIMAMRVIDSGK |
| | | | | | ESGTDENDFILSPVEPFFDSRKGYVGLPENGDANGAYNIARKGIC |
| MG29 | 6372 | MG29-49 effector | Protein | Unknown | MNLNQFTHLYPISKTLRFELKPVGETSDYIENFKSQYLKDIVKNDIQRASDYDIIKEIIDDYHRYYI |
| effector | | | | | EEKLSNPINTKTGEFYVNEEEIENAFSYFQKFKQNPKDDKLKKEWNDTQILLRKQLVKVFSDRK |
| | | | | | KQLFGKELITKHLPEWLQENGTWEDNKRIVENFNKFTTYFTGFHENRENMYSAEEQSTAISYRL |
| | | | | | INENLPKFFINCIQYSKIKNQFTDIEFKIDSNLLQKMGVSTIFDIFQPRYFIKLFTQTGIDNFLELLG |
| | | | | | GYTKDDGEKVKGLNEFINLYRQKNSIKSRLLPNFTALFKQILSDRETNSFIPLEFNNDNELLESLH |
| | | | | | QFIAEMGKNNGVLFKFENAVQLLQDADLSKTYIKGGINLTDISQKVFGNYGIIKIAILHYAETITYP |
| | | | | | TPKNGKISDTLMNKRKNIVNQEIFSISELESMVLQYANHLEDGHQDKEMILQFEQPILNHFLSIIK |
| | | | | | KIKQKKGEEIENIIQNVLPLLELENLSKGKAGQEQTQKIQTMLDAFLSLGHAIKPLHLVKGRKPI |
| | | | | | DIPDIDMGFYAEFSEIYEIYENLVVGLYNKTRNHLTKKPFSTDKIKINFENPTLLDGWDANKEKD |
| | | | | | NSGVLIEKNGNYYLGIMHPKYKNLFNYNKGINDLESVKRSQTKDELFDKIIDGNLNHYKKIVYKL |
| | | | | | LPGANKMLPKVFFSGGRIDFFAPSNEVLKIRNTASHSKNGAPQKGFEKAEFNLKDCHTIIDFFKES |
| | | | | | IEKHPEWREFKFNFSATSEYNDLSDFYREVAHQGYKMDFHPIKDSYINQCIQEGKLFLFQIYNKD |
| | | | | | FSPFSSGKPNLHTLYWKALFDPENIKDVVAKLNGQAEIFYRKHSIKKDERTIHKANTSLQNKNEN |
| | | | | | NPKKDSNFNYDIIKDKRYTVDKFQFHVPITLNFKAEGVTRFNDKVNHNLATQKNTHVIGIDRGER |
| | | | | | HLLYYSVINPEGKIVEQGSLNRIDTDQNYSVDYQQKLDTKEKARDKARKAWTTVDNIKDLKAGY |
| | | | | | LSHVVHKLALLIVKYNAIICLEDLNFGFKRGRFKVEKQVYQKFEKALIDKLNYLVFKDAKPNDP |
| | | | | | GYVLNALQLSAPFESFKKLGKQTGLLYYVRADYTSKIDPVTGFINFLYPKYESLAKSKIFFESFDG |
| | | | | | IRFNSSRGYFEFKIDYKKMTPSRDLIGYQTKWVACSFGDKRFKNIRNANGNWESVEVNVTEELK |
| | | | | | LLLKNENIEFKSGLDLRYDISSIKNTKFYKKLFKLLQILLSLRHSKTGTDEDFILSPIADNNGVFFD |
| | | | | | SRNANKTQPKDADANGAYNIALKGLWNIDRIKNWDGKSKLNLAMKNVEWFEFALNKPFLK |
| MG29 | 6373 | MG29-50 effector | Protein | Unknown | FDSFTTYFTGFHENRKNIYSDKAQHSSIGYRVIHENLSIFLANKRAFELVQQNFPEIAQIAQDSLLE |
| effector | | | | | HLEGGVVEDMFELDYFSLTLTQKYIDIYNTMLGGKVLEDGTKVQGLNEHINLYRQKHNIEKRK |
| | | | | | LPNlKALHKQILSDREGMSWLPDAFENRDELNSTVESFYKESIVEFACCDGVVDITEKFVETLSD |
| | | | | | DSNYDLSKIFVKNDISLTAISQEIFKDYRVIKDALWQKHLADNPKAIKSKDITADEEKYFSRKNSY |
| | | | | | FSILEIEKALDEAGQAQKLLDFFKVREIESSKTVKESFADWQNNKEDKKLTKSLLDSMLNLQRAI |
| | | | | | KPLFVKAEIDKDIAFYASFDTYFESLSGIVKLYDKVRNFESKKPYSLEKFKLNFENSTLLDGWDLN |
| | | | | | KEPDNTSVLFKKDGLFYLGIMDKKHNKIFTKISENNSKDIYQKIEYKLLPGANKMLPKVFFSNKN |
| | | | | | IDYYAPSEALLANYRDGVHKKGDNFDLDFCHELIDFFKSSIEKHPDWRNFEFSFSDTSSYEDMSGF |
| | | | | | YREVEQQGYKISYKDIDSSYIDQLVDDGKLYLFQIYNKDFSPYSKGTPNMHTLYWKMLFDETNL |
| | | | | | KDVVYKLNGQAEIFYRKKSIEYSKEKMLQGHHYDKLKDKFAYPIIKDRRFAMDKFQFHVPITLN |
| | | | | | FKAVGSDRLNDDTNELIRTNRNNIKVIGIDRGERHLLYLSLIDSSGRIVEQYSLNQIINSHNGKKHI |
| | | | | | VDYHQKLADKEKERAEARENWGVVENIKELKEGYMSHVIH |
| MG29 | 6374 | MG29-51 effector | Protein | Unknown | LDQIYIRNDVSLTNISKKIFKDYNAIKFCLETYFEKDCGKKNSEKWVSNQNYISIKDIENSIIKYFIS |
| effector | | | | | DETISSNPICDFFNSFKVHDVDLFAAISESYQVLSKDKIDLKDKLNEKDVVKIKSFLDAVMDLMHF |
| | | | | | VKPLDFNLKGKSKDKLVGAFELDAGFYDNFNKIYNGIDKDQNPNVISFVSTIVSIYNKTRNFVTK |
| | | | | | KKFSSKKFKLNFRNATLLDGWDVNKETDNYSVILLKDNDYYLGVMTKDSNKIFKSLPNCDDNDY |
| | | | | | FEKINYKLLPGPNKMLPKVFFSKKFIDYYSPSEEILNIRNCSSHTKNGNPKEGYDKKEFNLDDCH |
| | | | | | KIIDFFKKSLAKHPEWSVFNFKFKDTSKYKDISEFYKDVETAGYTLDFIKVSSKYISDLVDDGKLY |
| | | | | | LFKIWNKDFSKFSKGKPNLHTMYWKSLFSKENLENIVYKLNGQAEIFYRRKSLDKKITHPKNVPI |
| | | | | | VNKDPINNKSSSIFEYDLFKDKRYTEDKFLFYCPLTINFKSRGNDKEISKFVNQKIMNLKEDISILG |
| | | | | | IDRGERNLIYCTLIDSKGKIIGKQSMSLNGITDEFNRTSDYHKKLDDLEGKRDVARKSWTKIENIK |
| | | | | | ELKEGYLSQVIHKISKLVIDNNAIVVLEDLNFGFKRGRFKIEKQVYQKFEKMLINKFNYLVFKDK |
| | | | | | DLSKSNILKGYQLTNKFTSFQKLGHQSGILYYIPASFTSKIDPKTGFVNLLYPHYR |
| MG29 | 6375 | MG29-52 effector | Protein | Unknown | MKNFTNIYPQSKTLKFELRPYGATLDNIHKSGLIDQDETLKADYHAVKKMIDEYHKVVIDESLTN |
| effector | | | | | FKLTDLPAYEELYYKSRTEVEDKEFEIIQSNLRKQIHKAFSENKRFKSIFKKELIQKDLPAFVKKE |
| | | | | | EEREQISRFYHFTTYFTGFHENRKNIYTAEAKATSVCNRLIHENLPKFLDNRKTYLNYISNFIDLD |
| | | | | | LSQVEEDLQEVLGDITVDDLFSLDSFNHTLTQRDIDIYNLALCGRSIEGEKKIQGINECINIYRQKN |
| | | | | | RLKARQLPNIKPLYKQILSESKSGSFLLDKFEKDEDLFDSLRNFYHCLNSFNYKGEQDKSTFIELM |
| | | | | | TLFGRFSESDMTRVYLRNDASLSRLSKKLFGDWSLIVSALKYYYDAEANPLMGKKATNKYIKEK |
| | | | | | ENWLNKSSNFSIDVINKSLLRYGTINETVNSQFTDDMIFEHFSSFMIEEKNLLNTVAENYMLVSEV |
| | | | | | LSRGSLDKNQNKKKKEIKTIKTFLDTVLDLLHFIKPLSVQYVGAEKDEGFYSDFDVLYDQLSQVI |
| | | | | | PVYNKTRYYLTKKPYSMEKFKMNFKNNTLLDGWDVNKETANKGILLQKEGLFYLAIMNKDHS |
| | | | | | KSFYNIMDTGDTTGYQKMNYKLLPGPNKMLPKVFFGVKNLNFFNPSDEVLRIRNTSSHSKNGNP |
| | | | | | QEGFEKADFSLSDCHSLIDFFKASLNKHTDWKKFAFDFSPTQSYDDISEFYREVENQGYKITYTNI |
| | | | | | SDAYIHELVKEGKIYFFQIYNKDFSPFSKGKPNLHTLYWRALFDEKNLADVVYKLNGQAEVFYR |
| | | | | | KKSIEYSEEKWIQGHHHEQLKDGFAYPIIKDKRFAFDKFQFHVPITMNFKALGAPVINMKVREY |
| | | | | | LKTNPDVKIIGLDRGERHLLYLTLIDQNGNIEEQYSLNEIVNSYNGKVYKKDYQQLLHVKEGDR |
| | | | | | KKAKKNWETIEAIKELKEGYLSHVVHKIVNMMVEHNAIVVMEDLNFGFKRGRFHIEKQIYQKF |
| | | | | | EKMLIDKLNYLVLKDTQDPKTPTGLLNALQLSNKFESFQKLGKQSGFIFYLPAYLTSKIDPTTGF |
| | | | | | VNQLRIKYDSIVKSQAYYRQFDTIVYNNTSDWFEFSFRYVNFANTTPSARKIPWTICTTHHPRYA |
| | | | | | WNINSNVGNGGTEEYNVTKELKKLFDQHKIAYEEGTDLIESIASNTAVDFFKRLNKLLYITASLR |
| | | | | | HNNGKKGKEEHDFILSPVANSEGGFFNSLEADETQPENADANGAYHIALKGLWALQSIRKTDTD |
| | | | | | RLSKLNLAVSNEEWLNFAQAKQYRSQNSS |
| MG29 | 6376 | MG29-53 effector | Protein | Unknown | MKEIFNLYRQQLHSSQQEFEKKKKSFPKLAILYKQILSDCSGHSSSIEAYKTDREMLYELERLRN |
| effector | | | | | QFANKNTGCPIYNLKKLLEDIDSFDRHTIFIKSESLAEISKFLFGTWNTTRIALGEYANFLFREATK |
| | | | | | DEKIILKKQKEDFLENSGQMVFLKASDLKKYRERFIKADTFSIHDLETALYRYSQTHQDDMEGV |
| | | | | | KETGLITSYFKSFTQKINNSKVNIFNQLNEARSKIKDIVELKELSTNRNKDAKGFEQVETIKFYLDS |
| | | | | | LMNIIHFARPLHLYKGQKKIDSEGVDSEFYADFDFFYNELLDVITTYNKTRNFLTKKPYSNTKFK |
| | | | | | VNFKNPTLLAGWDVNKEKDNSGILLKKDDLYYLGIMAQGHSKNFDTGTKNSSSKNDDYQKLIY |
| | | | | | KLLPGASKMLPKVFFSDKNIDVYNPSNKVLSIRNHASHTKNGTPQKGYKKKDFNLSDCHIMINFF |
| | | | | | KSSILKHPEWVNFGFKFKDTKDYEDISEFYKEVEHQGYSVRFQSISREYIQKKIASNQLYLFQIYN |
| | | | | | KDFSPHSRGRANLHTLYWRGLFDTENSKNTCLKLNGEAEVFYRHRSIKKADQVVHKANSPVQN |
| | | | | | KNPKNPKKESQFEYDIIKDKRFTQSKLFLHVPVTLNFKAEASGKYGQFNEAVNQKLKNDLSVNII |
| | | | | | GIDRGERNLLYYTVINQRGGILEQGSLNSIKTHYKNKKNEFVEVETSYHDLLDKKEKERDLARK |
| | | | | | SWSTIENIKELKSGYLAQIVHKLAQLMIQHNAIVVLEDLNFGFKKGRFKVEKQIYQKFEKALIDK |
| | | | | | LNYLVFKDRKGGVVGSFRKAYQLTAQFQSFKKLGKQSGFLFYMPAYHTSKIDPTTGFINLVNLK |
| | | | | | YQNKEHASDFISKLESIKYNKEADHFEFDMDYKKLSDRECGPKTRWLICTHGATRYRYVPQDQK |
| | | | | | MESVDVTGQLKDLLNGAGINYMDGENLASQVLKQNDAAFFKSLLSLLNLTMTLRHSNSQKGED |
| | | | | | FILSPIRNKTGGFYDSSVVENEHESSLPQNADANGAYHIALKGAWTLRQIHDRADGAKLKLAMS |
| | | | | | NKDWFKFVQRKEYLSTPLPEEQKLKVMKGSAKGLSTPSTIGNTPQSDIQPVLKMENKK |
| MG29 | 6377 | MG29-54 effector | Protein | Unknown | MKLNKFTIIQYPISKTLRFELKPVGETADYIEDFKSQYLKDIVIQDQQRAEDYESIKVIIDEYIIRIIY |
| effector | | | | | JEEKLSEPFDKKTGELFISGDEFENAFSYYQRFRENSKDEKARKEWIEVQNSLRKSLVKVFSDRK |
| | | | | | KRLFQKELITKELPSWLKEKGEWEDKKNVVENFNRFTTYFTGFNENRENMYSHEEQSTAISFRL |
| | | | | | MNENLPKYFNNCIQYHKAIESYDGLSFTVNPDLLNEMGVSILFEIFQQSYYIKLFTQSGIDKFTEL |
| | | | | | LGGFTKENGEKVQGLNETINLFRQQKAIKAKAFPNFISLYKQILSDRETSSFIPDQFENDNDLLKS |
| | | | | | LGKFIKEMVKEDGLFKKLEDSIKLITDADLHRTFIKNGVEITKISQSIFGNYSILKSAIYHHAESVL |
| | | | | | YPDPISGKISEALKEKRIKYVNKQVVFSIAELETILSNYASQMTDDNPDKEIIAQCENSEHPIRTYF |
| | | | | | LNAIENVKNDKDIEFGKAIENVLPLISLENLNKGKDGQAQTHKIQKMLDAFLAVTHAVKPLHLV |
| | | | | | KGRKPIDIPDMDMGFYAEFSKAFENFEQLVITLYNKTRNHLTKKTFSTDKIKINFENPTLLDGWD |
| | | | | | ANKEKDNSGVLFEKDGNYYLGIMHPKHKNIFNYIKGINDIESEKRSLSKDELFNKIVDGESEHYQ |
| | | | | | KIVYKLLPGVNKMLPKVFFSGRRIDFFAPSTEVLKIRNSASHSKNGSPQKGFEKEDFNLKDCHTII |
| | | | | | DFFKKSIEKHPEWKEFEFEFSPTSSYEDLSGFYREVEHQGYKMDFHPIKKSYIDQCIEEGKLFLFQ |
| | | | | | IYNKDFSPYSKGKPNLHTLYWKALFDTENLKDVVAKLNGQAEIFYRKHSIKKDERTIHRANKSL |
| | | | | | QNKNENNPKKTSLFEYDIIKDRRYTVDKFQFHVPITLNFKMEKMTQFAHNEKVNQMIVKSENTH |
| | | | | | VIGIDRGERHLLYYSVINPKGHIVEQGTLNTISTDKGYEVDYQQKLDSKEKARDTARKSWTTVE |
| | | | | | NIKELKAGYLSHVIHKIAFLIEKYNAIVCLEDLNFGFKRGRFKVEKQVYQKFEKALIDKLNYLVF |
| | | | | | KDAKPNEPGHVLNAFQLTAPFDSFKKLGKQTGLLYYVQASYTSKIDPVSGFINFLYPKYESLLKS |
| | | | | | KIFFESMDGIRYNADKDYFEFSFDYRKMTPNRNLEGYQTKWTACTFGEKRFKNIRNAHGNWES |
| | | | | | VEVNVTEALKKILKNEDVDFKSGHDLRFEISKVKSTKFYKKLFKLLQITLSLRHSKTGTDEDFILS |
| | | | | | PIVDENGKFFDSRNATKDQPMDADGNGAYHIALKGLWNLEQIRNWDGESRLNLAMKNVDWFSF |
| | | | | | AYQKPFKK |
| MG29 | 6378 | MG29-55 effector | Protein | Unknown | FDYYLGISSDPKLFRSHLQDEIEKEDISDFERLDYYQLKSATVFGNSYVGDSYSKDRDLLYQKILE |
| effector | | | | | FVENTEPLKADIDKYVSSQKGTNQPTPSGIISIVKEKYPELLQKLKDDQGFSEINKTVTDRLKKTI |
| | | | | | LSLHRIPRSQEYKNHNFSLFTEAIEVIEELSSEKSFAYFKVSKSELENALNRDSKPLFLFKITNKDLS |
| | | | | | FADSFIAGKRKSRGTDNLHTLYFKALMSGSQNVFDIGTGEVFYRKEDYKGKKIVHKANEPIENK |
| | | | | | NRLNDKKHSLFEYDIVKNRRYLVDKFQFHLSIVQNYIKPKKYPDFNTEVNQAIKGASDIKVIGVD |
| | | | | | RGERHLLYLSLIDSSGRIVEQYSLNQIINSHNGKKHIVDYHQKLADKEKERAEARENWGVVENIK |
| | | | | | ELKEGYMSHVIHRIATLMVKHNAIVALEDLNFGFKRGRFKVEKQVYQKFEKMLIDKLNYLVDK |
| | | | | | QKSPNELGGLLKAFQLTNKFVSFEKLGKQSGFLFYVPAWNTSKIDPVTGFVNLLDTRYQSIEKSK |
| | | | | | EFFSKFDAIRYNDQKGYFEFEFDYKNFTTKADGTRTKWTLCTYGTRIKTFRNRDKNHQWDNVE |
| | | | | | VDLTAEFKSLFGLHSGDLKELIISQDRKEFFETLLYLLWLTLQMRNSVTNSEIDYLISPVADKNGN |
| | | | | | FYDSRVASDDLPRDADANGAYNIARKGLMIIEKIAKSKSGEKLNLTISNKEWLAYAQR |
| MG29 | 6379 | MG29-56 effector | Protein | Unknown | MDFIEECYKPIKNILLSQNEFNEEEIKNLQNFLNPFIPNRPENSDSYNGKEKNEKLKQDQYNTERG |
| effector | | | | | SVGLIGLLRLIKPVYPEKDKKKIMDLEKDASFYNEFEKLYEELSNGFPLYNKIRNYITKNSHRTEK |
| | | | | | IKINFEDSTLLDGWDVNKETDNLSVILRKKDEVTGWKYYLGVMNKHEFKGANKIFDYHIESDES |
| | | | | | DKTRQEKKKLKQTILHKEDNENFYEKMNYKFLPDPSKMLPKVFFAKKNISFFSPSSEILEIKNKK |
| | | | | | TYTKNNGDTFSLNDCHKLIDFYKASIQKHKEWGVIFNFKFSHTKKYEDISEFFAEVASQGYRLSF |
| | | | | | DRMKSSYIVDKVKKGELLLFEIYNKDFSKNSKGKTNLIITSYFKLLFEEKNLKDIVYKLNGQAEIF |
| | | | | | YRKASKQKKISHKANVPVENKNPDNPKKTSQFKYDLIKDRRFTEDKYFFHVPIDLNFKTRKTNPS |
| | | | | | KFNQNVLKFLKDNKNINIIGIDRGERHLAYYTVINQRGAILEQGSENKITANYKDQNNKNVKITT |
| | | | | | NYHALLERKEIERDQNRKAWTKIENIKELKAGYLSHLAHQISHLMIKHNAIVIFEDLNRGFKRGR |
| | | | | | MKFEKQVYQKLEKALIDKLNYLVFKEKNHEQPGGLLNAYQLTAPFESFNKLGKQTGFIFYTPSY |
| | | | | | YTSKVCPLTGFVNLIYPKYENMKKSKIYFNNFKKIYFDSKKGYFVFEYQDGKVNPSRKSESNAQ |
| | | | | | WEVCTQGPERYKYNWKARKYEKHNVTDELKKLFKEYNINYKAEEDLRESIEKQDEKKFFEGLT |
| | | | | | QALYLTLQLRHINTEEKDSDKKDFILSPVADNEGRFFDSRRVKDSEPKNADANGAYHIALKGLK |
| | | | | | MFEDIRNTKQQKLSSLKNKEWFEFIRTKPFLFDSRKAS |
| MG29 | 6380 | MG29-57 effector | Protein | Unknown | ELYTQLAPWQAYFVPENYSSILAQSAIDNYNYCVIGRLADNTDAAGVNIVINQYRQKNNIDNKIL |
| effector | | | | | HPMVQLQKQILSDKPSFVPVIETNEEAVSLVKVNYCKLQELNDKLQALISEQITPETIGDFYFRSI |
| | | | | | KLTGISLDVYLDWNYINQAKDIYIQFLNEKQQKAFYEKEWGKVINISTLIRIITGFKRVRIGESSNV |
| | | | | | SEESTIKELLTYVNAAPDFTVDIEKISANNIANYKDVLDKMNANIQFYKMFSLYDGNKKINVTNK |
| | | | | | KDYFYNAFDSIYSEMKAISRDYDKIRNFATKRTKGENKVKLNFANAQLLSGWDMNTEKNYHSVL |
| | | | | | FAKDNKFYLGILGNKASGVFNFSNPDIVLKANEPGQKYQKMMYKQMGGANKMLPKYAKDLAT |
| | | | | | KHALPKHIQEIYEKKLYTKEANNPNAMYIWIEWCKEALKTNPNWANYYSFNLLDSQQYKNMNE |
| | | | | | FYTAVDNQAYFVEWADVSEAYIDELIDSGKLYFFQIYNKDFSDKKSKPGTDDLHTLYWKALFSPE |
| | | | | | NLSRKEGPIFKLCGNGEIFWRQPSVEYHVTHRANQPLQNKNPFNPKRESVFSYDLVKNKRFTEN |
| | | | | | KYFFHVPIKLNFRSGNTVFKYNEKVNRYVEGNKDINIISIDRGERHLLYYTVIDQQGKILEQNSLN |
| | | | | | VIYNTHLIENNTIWTKINYRDLLDKKEKQRADARLAWENIESIKELKTGYLSQVVHQVTKLMEK |
| | | | | | YNAVVVMENLNTK |
| MG29 | 6381 | MG29-58 effector | Protein | Unknown | MNFNNFTHQYSLSKTLRFELKPIGETADYIEDFKSQYLKDIVTQDQQRAEDYKVLKEIIDDYHRH |
| effector | | | | | YIEEKLSEPFDKKTGELFISEEDFENAFSYYQRFKEDPKDEKSKKDWLDTQSSLRKSVVKIFSDRK |
| | | | | | KRLFQKELITKELPAWLKEKGEWEEKKNVVENFNRFTTYFTGFNENRENMYSDEEKSTAISFRL |
| | | | | | MNENLPKFLNNCLQFGVIIEKHIDLDLKIESKLLQKMGVSNLNEVFQPSYFIQLFTQTGIDNYSEL |
| | | | | | LGGWTKENGEKIQGLNELINLHRQKYSIKAKGLPNFIGLYKQILSDRESSSFIPDQFENDKALLES |
| | | | | | LKIFVKEMAKTDGIFVNLKKAVTLLKEADLDKTFIKGGVEISKISQAIFGQYSIIRSAIYNYAETV |
| | | | | | MYPTPKTGKVSDVLEEKRKKYANNEDIFSIAELESMLTSYREQLEDEHPDKEIITHCENSEHPIRT |
| | | | | | YFLNIIDNVKNDKDIELGKSIENVLPLLSLENLNKGKAGQTQTHLIQKMLDAFLAVTHAVKPLHL |
| | | | | | VKGRKPIEVPDIDMGFYADFSSAFEIYQQMIIGLYNKTRNHLTKKPFSTDKIKINFENPTLLDGWD |
| | | | | | ANKENDNSGILFKKDGNYFLGIMHPKHKNIFNYIKGINDIESEKRSLSKDELFDKIVDGNSDHYQK |
| | | | | | IVYKLLPGVNKMLPKVFFSGRRIDYFAPSTEVLKIRNTASHSKNGKPQKGFEKADFNLKDCHTII |
| | | | | | DFFKQSLEKHPEWKEFEFDFSPTSSYEDLSGFYREVEHQGYKMDFHPIKKSYIDQCIEDGKLFLF |
| | | | | | QIYNKDFSPYSKGKPNLHTLYWKALFDPENLKNVVAKLNGQAEIFYRKHSIIKDDRTIHRSNKSL |
| | | | | | QNKNENNPKKTSLFEYDIIKDKRYTVDKFQFHVPITLNFKAEGVTRENDKINRELSKNSIQTFAW |
| | | | | | SK |
| MG29 | 6382 | MG29-59 effector | Protein | Unknown | MLSHFTNQYQLSKTLRFELKPVGETLKHIELKGLLAQDETRSQEYQEIKIIIDKYHKAFIEEALHD |
| effector | | | | | VSLSKLAEYETAFFDKNRDEKAFEKLQDALRKEIVMQFKKDAIIYATLFKKELIKADLQNWQEL |
| | | | | | SDAEKELVSHFDNFTTYFTGFHENRANMYTDEAKHSSIAYRIIHENLPIFLINKKLFEIISQKAPQL |
| | | | | | AQETQDALLEHLNGAIVADMFELSYFNRLLSQSHIDLYNQMIGGVKKDELKIQGFNEKINLYRQ |
| | | | | | ANGLSKRDLPNLKPLHKQILSDRETLSWLPEAFENYEELVQGVQAYFNSEVLTFECCDGKVNLL |
| | | | | | EKLPELLNQIQDYDLSKIYFKNDVALTSASQAIFKDYRIIKEALWEVNKPQKSKDLAADEEKFFN |
| | | | | | KKNSYFSIEQIDDALKEAKLFASMMAYFQSESSKTIEQIQVAYAQWKQNTSNKELLKAFLEVLLS |
| | | | | | YQRLLKPLNAPNDLDKDVAFYVYFDTYFASLSGIVKLYDKVRNFMTRKPYSLEKFKLNFENKGD |
| | | | | | FLGGWVDSHTENSDNGTQAGGYLFRKKNHIGEYDYYLGISKDTKLFRSHLQNEIQEEDKSEFER |
| | | | | | LDYYQLKSASVYGNSYIGGSYDEDKKMLLKSIYKFAENNHPLKADFDKYIASQKGDNQPTPNGM |
| | | | | | INIVVEKYPQLMQELVKNEEFEAANKMVIERLKQTILSLHRVPKSQDYRDKVFSLFIEPIQIIEELS |
| | | | | | KEKSFFYFHVSDNEFKSALARDEKPLLLFKITNKDLSFADSFASGKRKSRGTENLHTLYFKALMS |
| | | | | | GNQNVYDIGTGEIFFRKKSIEYSEERLKKGHHFDDEKKLKDKFAYPIIKDRRFAFDKFQFHMSIIQ |
| | | | | | NYMYPKQPKGFEEKVNLAIHDADNIKVIGIDRGERHLLYLSLIDSNGKIIFQETLNSIVNTFNNEPI |
| | | | | | DYHSKLDAKEKDRDKARKEWGVVENIKELKEGYLSHVVHKIATLIVEHGAVVAMEDLNFGFKR |
| | | | | | GRFKVEKQVYQKFEKALIDKLNYLVDKKKQPDELGGILNALQLTNKFQSFEKMGKQNGFLFYV |
| | | | | | PAWNTSKIDPVTGFVDLFDTRYASVEKSKAFFAKFKTIRYNEAKDYFEFAFDYNDFTDKAKDTRS |
| | | | | | EWTLCTYGERIVSFRNAEKNHQWDSKTLHLTTEFKNLFGSYTGDLKATILAHDDKEFFEKLLRL |
| | | | | | LRFTLQMRNSITGTDIDYLVSPVADEQGNFYDSRKADASLPKDADANGAYNIARKGLMLMRRIQ |
| | | | | | KAEDPKKVNLAISNRDWLRCAQGLEK |
| MG29 | 6383 | MG29-60 effector | Protein | Unknown | MQKNDTVLKFNKHSNKLLCSFTRKYPLSKTLRFELKPVDDTKKYLKDFVQSDQERAGDYKELK |
| effector | | | | | KIIDEYHKDYIEKSLSKNDILSLDDLNNLKEHIKKSGSLQPLEEKQKNEKSIKKELHTLNKTTKSK |
| | | | | | PKKNEESIIKKLQNTLRKQITQAFQLKENKDRLFGKKLINEVLPEWLDSCSLEDIEHKKEILKKF |
| | | | | | QKFTTYLTGFHENRKNIYSDKEQSVAVPHRIINENLPKFLSNLNTYEKIEKHFPGLKTHFESLKEQ |
| | | | | | LKAEFEYFEIQNIKDLFKINLFNRCLTQEGIDNYNAIIGGRVLGSGQKIRGINEKINRFRQIQPEKG |
| | | | | | DRETIRIISNKNLPIMQTLYKQILSDRESHSFYFEEFKSRKEVLDSVNLYWESIFKKRGNQSVVQRI |
| | | | | | KNLFTNLKKYELDKIYFKSSDLSHVSNKLFGDYSVIGSALNFHAEKKFSKKKEREQYVEKDFFSF |
| | | | | | DEIHKALSGYLKENKEIQVSKHFSGFKEIHKALSGDSQTGQNNILAVYFNWEFSKKKYNNKSLLD |
| | | | | | FIEECYKPIKNILLSQNEFNEEEIKNLQNFLNPFIPNRPENSDSYNGKEKNEKLKQDQYNTERGSV |
| | | | | | GLIGLLRLIKPVYPEKDKKKIMDLEKDASFYNEFEKLYEELSNGFPLYNKIRNYITKNSHRTEKIK |
| | | | | | INFEDSTLLDGWDVNKETDNLSVILRKKDEVTGWKYYLGVMNKHEFKGANKIFDYHIESDESDK |
| | | | | | TRQEKKKLKQTILHKEDNENFYEKMNYKFLPDPSKMLPKVFFAKKNISFFSPSSEILEIKNKKTY |
| | | | | | TKNNGDTFSLNDCHKLIDFYKASIQKHKEWGVIFNFKFSHTKKYEDISEFFAEVASQGYRLSFDRI |
| | | | | | KSSYIVDKVKKGEFLLFEIYNKDFSVASKGKPNLHTSYFKLLFEEKNLKDIVYKLNGQAEIFYRK |
| | | | | | ASKQKKISHKANVPVENKNPDNPKKTSQFKYDLIKDRRFTEDKYFFHVPIDLNFKTRKTNPSKEN |
| | | | | | QDVLKFLKDNKNINIIGIDRGERHLAYYTVINQRGAILEQGSENKITANYKDQNNKNVKITTNYH |
| | | | | | ALLERKEIERDQNRKAWTKIENIKELKAGYLSHLAHQISHLMIKHNAIVIFEDLNRGFKRGRMK |
| | | | | | FEKQVYQKLEKALIDKLNYLVFKEKNHEQPGGLLNAYQLTAPFESFNKLRKQTGFIFYTPSYYTS |
| | | | | | KVCPLTGFVNLIYPKYENMKKSKIYF |
| MG29 | 6384 | MG29-61 effector | Protein | Unknown | VEKDLKDILNSSNLKEFLSLENFNNCLNQKGIDKFNLLIGGKSEEGNKKIQGLNERINLFSQKLEK |
| effector | | | | | KESHLFRKLKMVPLFKQILSDRVYSSFVLEKFKDKKELFETINCFYNGSTSEGGDEFEGFKKISIK |
| | | | | | IKNLITTLKENDLDHVYVKKDSLSKISQELFGDYNKLNECLGEKFSKGLEGKLNTKGKLFTPAQI |
| | | | | | KKEVEKLLKNKFFSLKEIEDAIHFLDEEEQNKSVINDYFLLFKQKGLHESDLFKQIDQNYYEYSKI |
| | | | | | DKNSPYKLNERKSELDVEVIKKLLDAILDFYHFIKPFHTKIKKDDNDKGADALEKDAEFYGSFDS |
| | | | | | AFEDLEKIIPLYNKVRNFVTQKPFSTKKFKLNFDNSTFAAGWDVNKEKDNSTVILRKFNSKRNDF |
| | | | | | DYFLGIISGIDKKIFEKTSLVSTKSSFYEKLRYKQIADVSKDIQNLMVINGKTVSKKGRKNTQGIN |
| | | | | | QQLEDLKNKYLPKEINLIRKKKSYLKNESTFSKKDLALFIDYYKKRLDYWDFKFELKKSEEYTD |
| | | | | | FNDFTTHLGSQGYKLSFISLSEEYINNLINEGKLYLFQIWNKDFSEYSKGRPNLHTIYWRELFSEE |
| | | | | | NLRNIVYKLNGEAELFYRRASIKEKIFHKRGVKIAKKWFKDKPVPKEIVLKLNRYYEGKISKDDL |
| | | | | | NNDDLKFINNFVIKEQEEGKNDVIIKDKRYTEDKFLFHCPITLNFKAKGSEKNVHKLINKHINETR |
| | | | | | DEINIIGIDRGERNLAYYSLINSKGEILEQNSFNIISDDLQRKLDYQEKLDQIEGDRDKARKNWKKI |
| | | | | | ANIKEIKEGYLSQVIHKIAALAIEKNAIIVLENLNFGFKRGRFKIEKQVYQKFEKMLIDKLNYLVF |
| | | | | | KSNASEDKGGSLNAYQLTNKFETFQKLGTQSGILYYVDAYKTSKICPRTGFINLLFPKFETIKQSK |
| | | | | | EFFSKFNFIKYCSKEDLFEFNFDYSSFSGDKKTIYHKLVKDNWSVWSNGIKLINKRDKNSNNKWK |
| | | | | | TFEFDANKELKSLFEEYHIDYSSQENLINSILAVDNKSFFELLIFNLKSILQLRNSYLDFEVKSFKEK |
| | | | | | EGESYKESNYDYILSCVKDKNGLLFDSRKAKNFEIQDADANGAYHIALKGLMLIEKIKEEPDYNN |
| | | | | | KTKIDLKIDRTKFVNYVIKKNS |
| MG29 | 6385 | MG29-62 effector | Protein | Unknown | MKINKFNDFKNLYQLSKTLRFELIPQGKTLEHIEKNGLLQQDEQRAKDYQQVKKIIDDYHKHFI |
| effector | | | | | DEALANTKLENLQQYYDLYIKRDKSDDDKKQLENIKKELRIRLIEAVKSNTKFTTIFKKELIKDD |
| | | | | | LVAWLEKQAREQENEVNLIKKFSDFTTYFSGFHENRKNMYSDEEKSTSIAFRLIHQNLPKFVDNL |
| | | | | | QIFEKVKSSGLDFSSMSLLLGDVPLEDFFKLEYFNQTLTQVGIGLYNLMLGGQSSDDGFKLQGLN |
| | | | | | ELINLYNQRQDDKKNRLPKLKPLFKQILSDRDGYSFVLESFKNDGDVCNALSDYYVKKLSNSECI |
| | | | | | FERLPTIFNHINEYDTKQIYINKSALTNLSAKLYGSWDVISKALEFYYITKIDNDSNKNETAIKKKE |
| | | | | | KWLKQEYFTLCDLDEVIKFYVDNQQIDKCAVTQYLVNYFAQIFTDPNNLIAQITSQYNAVQALIQ |
| | | | | | NIQPDTKNLIQEKENVAEIKKLLDLIMELLHVCKLFVIKSDIAEKEHNFYSELEYCLALLNPVIAL |
| | | | | | YNQIRNYLTQKPYSLEKFKLNFENSTLLDGWDRNKEPSNTSILLRKNGNYYLGIMNKRHNRVFE |
| | | | | | VLPQILETNNSYEKVVYKLLPGANKMLPKVFLSTKGKSTFQPSQELLDNYKSETHKKGDNFNLD |
| | | | | | HCHKLIDYFKDSINKHSDWKKFNFNFSDTATYEDISRFYREVESQGYKITFDLISEQYINELVNDG |
| | | | | | KLYLFQIYNKDFSPHSKGTPNMHTMYWKALFSEENLANIVYKLNGQAEIFYRERSITKDKIIKHA |
| | | | | | ANQPINNKNIDNDKKQSTFAYDLIKDKRFTMDKFQFHVPITLNFKAQGRDDINLEVKEYLKTNPD |
| | | | | | THVIGIDRGERHLLYVSVVNPQGEIIKQFSLNEIINEYKGNTYKVDYHNLLNNKEGDRKKAREN |
| | | | | | WGVVENIKELKEGYLSQVIHKICQLVIEYQAIIIMEDLNSGFKNSRIKVEKQVYQKFEKMLIDKL |
| | | | | | QYLAFKNPRGNQPDIYNALQLASKFDSFTELEKRKQSGFIFYVPAWNTSKIDPATGFVDLLKPKY |
| | | | | | ETVAKAQEFIRKFDEIKYNQNKDWFEFSFNYSKFTEKVDGIRLNWTVCTTNVNRYSWNRKLNN |
| | | | | | GKGEQQLFEISKCLKALFDIYKIDYQTSENLIEQIARQSEKDFYVCLMRYLSITLNLRHNNGKSGI |
| | | | | | DEEDYIASPVADNSGAFFDSRVEVGKGKDKNGNWVSKLPVDADANGAYHIAKKGLWVLQQLK |
| | | | | | KADDLRKVKLAISNKEWLEFTQN |
| MG29 | 6386 | MG29-63 effector | Protein | Unknown | MLSNFTNQYQLSKTLRFELKPIGNTLEHIEQKGLLSQDEQRAENYTVIKEVIDTYHKAFIEESLAS |
| effector | | | | | VVFDNLERFEELYLKSNKDEKEQKEFEKLQENLRKEIVKNFKVHPKWNNLFKKELIKEDLLAFE |
| | | | | | QITDEQKEVVKEFTNFTTYFTGFHENRANMYTDKEQHSSIAYRIVHDNLPTFVNNKKAFESILQK |
| | | | | | YPQLISDAKSSIEEELLGAVFEDMFLLQYFNHLPSQTHIDLYNTMLGGVKRDDLKIQGFNEKINL |
| | | | | | YRQANGLNKKELPNLKPLYKQILSDKDTLSWLPEAFETQEELVGAVESFYQEKILAFECCDGRV |
| | | | | | NLLEKFKEIFSQTQLYDTSKIFIKSDKPLTDISQALFKNYGLLKEALWQKHLDDNPKLQKSKKIE |
| | | | | | ESEEKFFKQKYFTLSSLQEAIEFAKLSANVWNYFQENLDTYIKQIEENHTIWETDKTNTATTKSF |
| | | | | | LDSLINLQRFLKPLNVQTDSDKDIAFYSTFDSYFEALTQIVKLYDKVRNFKTKKPYSLEKFKLNFE |
| | | | | | NSTLLDGWDVNKEPDNTSILLRKNNLYYLAIMDKKYNKLFCNLEKSTQSDVYEKIEYKLLPGAN |
| | | | | | KMLPKVFFSNKNIDYYNPSKKLLENYKDGIHKKGDNFDIDFCHELIDFFKVSIQKHEDWKHFKF |
| | | | | | NFSPTKSYEDLSGFYREVEQQGYKISYKNIDTKLVESWVNDGKLYLFQIYNKDFSPYSKGTPNMH |
| | | | | | TLYWKALFDEQNLANVVYKLNGQAEIFYRKKSIEYTEDKLKKGHHHEELKDKFAYPIIKDRRFA |
| | | | | | FDKFQFHVPITLNFKAEGNENLNQKTIEYIKTNDIKIIGIDRGERHLLYLSLIDLNGRIVEQYSLNQ |
| | | | | | IINSYNGKEYPIDYHEKLAKKEDERALAREEWGVIENIKELKEGYMSHVIHSITTLMVEHNAIVV |
| | | | | | LEDLNFGFKQGRFKVEKQVYQKFEKALIDKLNYLVDKKKTPSDLGGVLNALQLTNKFVSFEKM |
| | | | | | GKQNGFLFYVPAWNTSKIDPVTGFVNLFDTRCSSVEKAKEFFGKFKSIRYNSVKEYFEFEFDYND |
| | | | | | FHNKALDTQTQWTICTYGERIKTFRNKDKNSQWDNETIHLTTAFKNHFGNYQGELKEYILVQD |
| | | | | | KKEFFKQLLDLFKLTLQMRNSITNSEVDYLISPVADKNGNFYDSRKADSSLPKDADANGAYNIAR |
| | | | | | KGLMLVERIKESTDVKKVDFKLTNKEWLQFAQRG |
| MG29 | 6387 | MG29-64 effector | Protein | Unknown | FGEFNTIKVDLRNEFIRNNNYNVDKLNKTQEKEIEKYLKKEYFTFQEIEDSILRIKNSKDDSSDIKS |
| effector | | | | | LFGYFKDFEFSVEHKKISLLETIEEKYKSFKSINFRDFEDSTQKKLTQNDYVEVVNTIKEFLDLLL |
| | | | | | HYYHFVKVLHYTGEDRDEHFYKEYDELLESISQITSLYNKVRNYISQKPFSTEKFKLNFEKSTLA |
| | | | | | DGWDLNKERQNLSVIFRKNSNYYLGIISKEDTKIFADIEEDLSGEYFEKMEYKLLPGASKMLPKV |
| | | | | | FFSKSNIDYYKPNDEVLRIRNTSSHTKGGDPQKGFSKFDFNIDDCRKMIDFYIISLNKHPEWKDEN |
| | | | | | FKFRKLDEYGSIDEFYREVEEQGFKLNFKKISQDYIKQLVDENKLYLFQIYNKDFSENKTKKENY |
| | | | | | SSKKNLHTMYFEELFSKENLEDVVFKLNGQAEIFYREKSMEYKPTHPKNLSTLNKDPINGKKESI |
| | | | | | FSYDIGKNKRYTQDKVLFHVPITLNFKSNSRVKINNEVNKIIQKNHNFVNILSLDRGERHLLYYTL |
| | | | | | LDNKGNILDKGTFNLVNDKFDRNVDYHQKLSVLEKERDEKRKSWQNISTIKELKEGFLSQIIHKI |
| | | | | | SKIAVDNNAVIVLEDLNYGFKKGRFKVEKQVYEKFEKMLISKLNFLMFKDKHNNEIGGSLKAYQ |
| | | | | | LAPQVNVLKDIGKQTGILFYVDPYLTSKICPKTSFVNRLHPKYENEKQARDFFKKFDSIKYLEDE |
| | | | | | DLFEFSFNYSSFGVKGLVKDDWKIYSNGIKLVQSRDKSQNNNWVTKEVNVNEELKKLFNDFNIEI |
| | | | | | SNSTNLIDDITNQNKFFLESLIRNLKLILQLRNSYTDNELNVKKISEKDGDYILSCVKDKEGNFFDS |
| | | | | | RKAQDNDVDNADCNGAYHIGMKGLMVLNKIKEFEDIEKLKFNDLKIERQEFLNEMIKRNWG |
| MG29 | 6388 | MG29-65 effector | Protein | Unknown | MFTNLYPTSKTLRFSLIPQGDTLNNIEKAGILTEDEKLAEDFKKVKKIADAWLKNFINESLTGVSL |
| effector | | | | | SLENLLIYEEKYNLFPRNEKDEEEFDGIKAKLRKEVVSYLAKNHKFKLLGSADFIRKELPEFAKT |
| | | | | | EEEKNLINKFKTFTTYFVNYYKTRENIYSAEEKIIASIIAYRVIIIENLPLFIINKKNFNAIKNSYPELI |
| | | | | | EDIKKSVEPLLNGEKVENMFSTEWFSKTLTQSGIDLYNKMIGGESLEDGKKIQGFNENVNLFRQ |
| | | | | | ANKLDGKSVPMIKQLRKQILGDKNTPEWITEGFKDKDSMNEAIVKFIKNIEHANDNLTGELFIRS |
| | | | | | KPYDYNKIFIKNRFITNISHELFKDWNLLKNNMLEQYKSKNPKSKNPEKEFAKIPYFSIAEIQESIP |
| | | | | | NQNKHFPDFIIDHFHDKIMTLIPTEKKIHELWKDNKDSIPALKNLMDYYLELYRISKPFDADCAD |
| | | | | | KDPVFYELFDEIFNDFSKVVKLYNEVRNFITKKPYSVEKIKLNFGNSTLLAGWDVNKESDNSSVL |
| | | | | | LRKGNDYYLAIMDKSHNKVFKNAPLVKNNEESYKKMEYKLLPKSYMMLPKVFFSRSNKHTYEP |
| | | | | | SDEIMRIYENGTFKAGDNFNADDLHALIDFYKDSIKKNPEWSCYNFNFRPTEEYQKINEFYNDVD |
| | | | | | SQGYDITFRNIKASYIDELVRDGKIYLFKIYNKDFSTYSKGTPNLHTLYFKMLFDERNLKDTVYK |
| | | | | | LNGGAEMFYRKKSLNYPEEIMKNGHHAEELKDKFDYAIIKDRRFAFDKFQFNVPITLNPNAQDR |
| | | | | | GNINDICKNFIKSNDINVIGVHRAENHLVYITVLDSAGKIIEQHSFNEIEGYNDKTINYMEKLAARS |
| | | | | | NERDEARVNWGVIGNIKELKEGYLSNVISKIAALMVKYNAVCVMEDLSYDFIRERSAIEKQIYQK |
| | | | | | FEKMLIDKLNFYVDKKKEPEELGGLLKPLQLANKFVSFERIGKESGMIFYVSPYKVTDIDPVTGF |
| | | | | | VNLFDTRYFNVNKSKDFFGKFKNIRYNEKTNLFEFTFNYDNFTDKDKIQSARTEWTVYTYGERIE |
| | | | | | RFNDNNQPKFRKIDLTKEFKNLFSDYSVDYKGDLKESILSLNEKDFFVRLLSLFRLTVQMRNGDF |
| | | | | | IISPVMDKTGKFFDSRKPNGKALPENAAANGAYNIARKGLILLNRIKQSENIRKVDLRLSGDEWL |
| | | | | | QFAQGGDL |
| MG29 | 6389 | MG29-66 effector | Protein | Unknown | MKDFNQFTNLYSLSKTLKFELKPIGKTLDYITEKSLLNEDEQRAESYKRVKKIIDEYHKKFIDSCL |
| effector | | | | | RGVKIGNLQEFESLYFSSNKDEKELTSLQKKMRKEIADRFTKTDAYKRLFGKELIKEDLAQIVQD |
| | | | | | ESILKDIEDFKNFTTYFTGFHENRKNMYSADEKATALAYRLIHENLPRFLSNKRIFEKITKEHPQII |
| | | | | | EQAKKSVEPHLFGISIADMFNPEYFNQTLRQEDIDIYNLMLGGKSDSNTKIQGLNESINLYRQRK |
| | | | | | GLTKRDIPNLTVLYKQILSDRESFSSVLEKFEKPQDLLEAVKEFYINRLTKWADGDNVYNVLEQL |
| | | | | | KFIVSDDGQYDTSKIFIKNDTSLTDISQQLFGSWSVISNALKQDYYLSNSKLKPSDENDAKFEKIKF |
| | | | | | YSIQKIEDVLKRYCAEMDDLKEKYTENIILKYFASFRRKDDTLTLIQKAENYYVEAADLLNAEYP |
| | | | | | PNKSLISDDDAIEKIKNLLDAVMDIIHFVKPLRAKGYEGEKDEAFYAEFLKFADQLDKLIPLYNKV |
| | | | | | RNYLTQKPYSVEKFKLNFENSTLLDGWDQNKESANTSVLFAKNGLFFLGVMDKKHNKLFEKTP |
| | | | | | PHKTEDCFEKINYKLLPGASKMLPKVFFSAKNITYFAPDENVIRIRNHGTHTKNGEPQKGFEKKD |
| | | | | | FSISDCRIMIDFFKSSIEKHPEWKNFKFKFNQTSSYNSIDEFYRQVENQGYNISYQKIDKEYIDELV |
| | | | | | SQGKLYLFQIYNKDFSEHSKGKPNLHTLYWKALFSPDNLKDVIYKLNGQAEIFFRKKSLQYSDET |
| | | | | | LKRGHHADKLKDKFAYPIISNKRFAFDKFQFHVPITMNFKASGRDNINQEVIEFLKSVPENEIHFI |
| | | | | | GLDRGERHLLYLSMINSKGEILKQFTLNDIVNEYNNQKYTTDYHKLLAEKEKNRAESRTQWKTI |
| | | | | | ETIKELKEGYISQVVHIVAKMMVENRAILLLEDLNFGFKRGRFKVEKQVYQKFEKMLIDKLNYY |
| | | | | | VDKSKSPTEPGGVLNALQLASKFTSFKDLGKQSGFIFYVPAWNTSKIDPVTGFVNLFNTKYENVA |
| | | | | | NSQKFFEKFQDIRWNEAQNHIEFHVKNYTDFNPKAEGTRQNWIICSHGTRLENFRNEKQNSRWE |
| | | | | | TREVPLTEEFLKHFHDHNIKPQTGLKEQIVARQDKQFFERLHHLLKLTLQMRNSSKETGEDYLI |
| | | | | | SPVADEKGVFFDSRHFAKQEISEMPKDADANGAYNIARKGLLLLNKIKESKSDSKVDLKQTNKD |
| | | | | | WLNFVQKSTLK |
| MG29 | 6390 | MG29-67 effector | Protein | Unknown | NSYFLAIMDKQNNRIFENVPKIRNNQVVFKKVNYKLLPGANKMLPKVFFSKSRIKEFGVSAKML |
| effector | | | | | ENYKAGTHTKGNNFDISDCHQLIDFFKSAIQKHDDWKQFDFNFSKTESYEDTSGFYREVEQQGY |
| | | | | | KITFSDVPEEYIYQLVEEGKLYLFQIYNKDFSEHSKGKPNLHTIYWRSLFSPENLSNVIYKLNGQA |
| | | | | | EIFYRKKSINPEKATVHKANLELENKKCRDGLLSVFTTPEPKKYSIFCYDIIKDRRYTIDKFQFHV |
| | | | | | PITMNFKSTGNDYINPIVNEYLRNNKDIKIIGLDRGERHLIYLTLIDLQGNIILQQTLNTIKDDQHDI |
| | | | | | ETPYHQLLDKKETERDKARKSWDTIENIKELKAGYISQVIHKIAQMMYQYNAIVVLEDLNFGFK |
| | | | | | QGRFKVEKQIYQKLEKMLIDKLNYLVVKENDANQPGGIYKALQLTNKFSSFKDMGKQTGFLFY |
| | | | | | VPAWNTSKIDPVTGFVDFLKPKYESIEQAKLFLSKFKKICFNTAKNYFEFSFDYSDFTTKAAETRT |
| | | | | | NWTICTFGDRIETFRNPEKQNKWDNRDVVLVKEFTGLFDKYNLNYKNGTDIKEQISKQTEKGFF |
| | | | | | EKLLYLLRLTLQMRNSKTGSDIDYLISPVADKNGNFYDSRNVETDKYLSLPEKKKNVQVVETYN |
| | | | | | YTPLPQNADANGAYNIARKGLWIIEQINKTDNLKKINLAISNKEWLQFVQK |
| MG29 | 6391 | MG29-68 effector | Protein | Unknown | MKSDFFKNFTSQYKLSKTLRFELKPIGKTLESIQSKGLLEKDEQRASSYKRVKKIIDEYHKYYIEL |
| effector | | | | | ALKNIQLSKLAEYYELFSQNKEVRNEDAFKNLKNELRKEIVKELTKGAYKEMFERLFSKELIKE |
| | | | | | DLKLWIKDRPEFQEELQFIKEFDNFTTYFTGFNENRRNMYTDQEQSTAIAYRIVHENLPKFIENIK |
| | | | | | MYESIKLKYPDLNFTPVLKDMEDLIQGKTLDEIFSLEYFNNVLSQHGIEFLNFIIGGRTREDGTKI |
| | | | | | KGLNEYINLYNQQQMEKNKRSPKFKQLYKQILSDRTSISLRFEAFENDSELLDAIEEFYQTELCE |
| | | | | | YESEGKTKNVFDEIKNLVTSIEAYDLEKIYLRNDTNLTNISQRIFGAFGVFKDAVSYYYDHVIDPQ |
| | | | | | FQTKIAKAKGEKALKKLNDLKAKWNKEYISIAVLQTALDKYMESVDDSLEIKKTYTLKVIADYF |
| | | | | | KNHFKVIDEEKKETDLVYNIKSQYLGVKGLLNIEKSENKILAQDKEKVHQLKSFLDSILELNHFV |
| | | | | | KPLNLIADALLEKDEVFYSQFAPLYEQLNKLTPLYNMVRNYLTQKPFSTDKIKLNFENSTLLDG |
| | | | | | WDVNKEPDNSSVILRKEGLYYLAIMDKDNKRIFLNVPGIENETGFYEKMNYKLLPGANKMLPKV |
| | | | | | FFAKSRIDFFNPTQEILENYKNETHKKGDTFNIDDCRALIDFFKSSLEKHEDWKQFNFKFSPTNTY |
| | | | | | QDLSGFYREVEHQGYKMSFENIAADYINKLVEEGKLYLFQIYNKDFSTFSKGKPNLHTMYWKAL |
| | | | | | FDEKNLANVVYKLNGEAEVFFRKSSIEEKNKVVHKANESIISKNPLTKGKLNTFEYDLIKDRRYT |
| | | | | | VDKFQFHVPITMNFKATGSEFINFQTNEFLKNNPEVKIIGLDRGERNLIYLTLIDQKGNILIQESLN |
| | | | | | TIKNKVRDIEINTPYQELLNKKEKERDEARKSWGTIENIKELKEGYISQVVNKIATMMVEHNAIV |
| | | | | | IMEDLNFGFKRGRFKVEKQVYQKLEKMLIDKLNFLVFKDKPSTDTGGLLNALQLTNKFESFQK |
| | | | | | MGKQSGFLFYVPAWNTSKIDPVTGFVDFLKPKYENIEQSQKFFSRFDMIKYNSSKDHFEFTFDYK |
| | | | | | NFTEKADGTRTQWTVCTAGNERYYYNPADKITSKINITEKMKELFEKENFNYKNGENIKQQITN |
| | | | | | SESKYFFIMLSKYLGITLALRYSNSADGRDFILSPVTNEKDEFYHSETADKLLPRDADANGAYHIA |
| | | | | | LKGLWVLQQLAKQEDLKKIKLAIGNKEWLSFVQNKNY |
| MG29 | 6392 | MG29-69 effector | Protein | Unknown | LLHFLKPLYLKTDAEVQRDDLFCSTFTPLYEQLGSITKLYDKVRNFVTRKPFSTEKIKLNFKCST |
| effector | | | | | LLDGWDVNKETQNLGILLKKENAYYLGIMNKSDNKAFSKLPEYSGPDAYQKVMYKLLPGPNK |
| | | | | | MLPKVFFSKSRIEEFAPDESIIEIYKKGSFKKGADFSVQDCRKLIDFYKASIEKHPDWKEFGFRFSP |
| | | | | | TEEYNDISEFYREVSDQGYKITFKAVPEIFIDSLVSEGKLYLFKIYNKDFSPYSKGKPNLHTLYWK |
| | | | | | ALFDGRNLENVVYKLNGQAEVFYRKRSIPEDNRTIHPAGQPLSAKNPELQGKTSSFGYDIIKDRR |
| | | | | | YTVDKFQFHVPVTMNFTAAGTPRINEEVCDYIKNNPDINIIGIDRGERHLLYISMIDRDGNVVKDS |
| | | | | | SGRYIQYSLNTITGEYKNTEGEKVAFSTPYHELLGNRESERERARENWSVIENIKELKSGYLSQV |
| | | | | | VHHIAGLMADYNAVLVLEDLNSGFKNSRKKVEKQVYQNFEKAIIEKLNYLVFKDLSPDETGGLY |
| | | | | | HALQLTDRFASFRNLTKQSGFIFYVPAWNTSKIDPVTGFVDLIKPKYKNIPEAKEFFKKFESIKYN |
| | | | | | KEKDYFEFSFDYSRFTDKAEGTRTGWTVCTYGALRYAYEKSLNNGRGGYAKWNVTEKLKELF |
| | | | | | VRYGIDYKEGDLIGAIAEQNSSGFYATLIKCLQVTLAMRYSSAEDNKDFILSPVADRDGNFYCSEG |
| | | | | | RSDGLPQDADANGAYNIARKGLYVLNQIDRAENYKDWTTKISNKQWLSFVQSLN |
| MG29 | 6393 | MG29-70 effector | Protein | Unknown | MKKTLFDFTNIYSLSKTLRFELIPQGKTLENIEIKGLLKQDEDRAEKYKKVKIIIDEYHKDFIEKSL |
| effector | | | | | NGLILDGLHDYMSLYLMTIKEDKDKKAFDKEKEKLRKQIANAFKNNEKFKTLFAKELIKEDLM |
| | | | | | NFANEQDYEYIKAFKDFTTYFTGFHQNRENMYVVDEKATAIAYRLINENLPKFIDNLKIFEKIKN |
| | | | | | EAPGLINQLNKVLSEMEEIVQGKTLEEIFSLNYFNQTLTQTGIDLYNIVIGGRTPEENKIKIKGLNE |
| | | | | | YINTDFNQKQTDKKKKQPKFKQLYKQILSDRHSVSFMPESFENDNQLLESIEKFYTNELLHYSTE |
| | | | | | GKSINIFEAIKNAVGNLSSFNLSKIYLRSDTSLTDISQKVFGDWGMINKALQDYYEKIYPLKPKEK |
| | | | | | QEKYEERKNKWLKQDIDIQTLQTAIDHYENETVKEKNNGKIITDYFAKFGISDESKIDLLQNVYQ |
| | | | | | NYNIIKDLLNTPFPESEKLGSNKELVSLIKTFLDSIMNVIHFVKPLSLKDSDKEKDESFYSLFAGLY |
| | | | | | DQLNHTISIYNQVRNYLTQKPYSTEKIKLNFENSTLMDGWDLNKEADNTTIILRKDNLFYIGIMD |
| | | | | | KKNNHVFQHIPERTDNEPHYDKMIYKYFPDASKMIPKCSTQLKTVVSHFESNITDKIIEGKSFDSA |
| | | | | | LKITKRIFELNNFVYDDISKTMVLSEDNEKRPKMFQKKYLEISKDIDGFKDALKDWINFCIDFLN |
| | | | | | KYESTKHYSFNFKNSELYNSLDEFYGDIDTQTYKITYKNIPVSFIESLVNEGKLYLFQIYNKDFSPF |
| | | | | | SKGKPNLHTLYWKMLFDDENLNDVVYKLNGQAEVFYRKSSIKESNKIIHKANEVLINKNPDNK |
| | | | | | KTTSKFDYDIIKDKRYTLDKFQFHVPITMNFKADGILNINPKVNEFLKNNPAVNIIGIDRGERHLL |
| | | | | | YYTLINQKGEILEQDTLNVIANEKQKVDYHNLLDKKEGIRAEARKDWGTIETIKELKEGYLSQVI |
| | | | | | HKLTDLMVKNNAIIVMEDLNFGFMRGRQKVEKQVYQKFEKMLIDKLNYLVDKNKNNNEQGGV |
| | | | | | LHALQLANKFESFKSMGKQNGFIFYVPAWNTSKMDPVTGFVNLFDTRYENLEKAKVFFNKFNSI |
| | | | | | HYNQTKGYFEFEFDYNNYTAKAEGTKTNWTLCTYQNRIETFRNPEKNNQWDNREIELTNEFIKL |
| | | | | | FEQHGIDYKNNNELKSAIVMQTEKAFFERLLYLLKLTLQMRNSITGTETDYLISPVVNDKGEFYD |
| | | | | | SRNANNLLPQNADANGAYNIARKGLWCLQQINKTDDLKKIKLAISNKEWLQFVQNNN |
| MG29 | 6394 | MG29-71 effector | Protein | Unknown | MNAQNSIWDKFTNMYSLQKTLRFELKPIGRTLKLIKEKNLIEEDEEREKEFNQIKKIMDDYYKEF |
| effector | | | | | IELCLSKLNIPNQEIEEFKKTYDTLKKDHKNEKLKEQYAKNQTALRKLIYNSIKKTNNFNYLFGK |
| | | | | | EFINQTLPNWLEEKNRLDDKKLVLKFKKWVTYFEGFFDNRKNVFSEREIPTSIIYRIVHDNLPKF |
| | | | | | LDNISKFDELEKLSDFDYKSIEDEFKSELNGKSLREFLSLNNFENCLNQSGIERFNLIVGGKTTENN |
| | | | | | VKIKGLNEKINEYSQKQKDNKEQKKIRTLKLSPLFKQILSNRESESFILEKIKDKKELFEKIDNFY |
| | | | | | KSFNEFSNKLKNSVEKLKNCNHDNVYVKNDKQLTKISQEMFGNWDEINSGLRAYYGSKPKKTIK |
| | | | | | SLMKSKYFSINEIEEGLKTLETDNKQSIVEHFLNFTKKYNNTNINLFADISEKATEFYKINRNEKE |
| | | | | | KLTEKNIETIKEFLDSIMALYHFLKPLHLDLRKTEKEKGSEALETDSDFYNDFNEVFEELSQIVPL |
| | | | | | YNKVRNYVTQKPFSTGKFKLNFENPTLANGWDLNKEKDNYAVILRKINQKTKKYDYYLGIMSG |
| | | | | | SDKKIFEKNKNKNNNNDYYEKIIYKLLPDPKKMLPKVFFCEKNKAFFKPSEEILRIKNSSSHTKH |
| | | | | | GSPKTGFEKKEFDLNDCHKMIDFYKTSLEKHEEWREFNFKFKETNKYEDLSEFYADVANQGYK |
| | | | | | LSFTNIDKNYIDELINQEKLYLFQIWNKDFSEYSKGRPNIHTIYWRELFSEQNLNDIVYKLDGKAE |
| | | | | | LFYRDSSIEKKITHPKNTPIKNKNPIKNKETSKFPYDLIKDKRYSEEKFFFHCPITLNFKAKDQSKR |
| | | | | | IHKIVNNYIQKLGEKINVLGIDRGERNLAYYSLIDSEGKIIEQHSFNIISDKLKRKFNYQERLDEIEG |
| | | | | | NRDKARKNWKKIENIKEMKTGYLSQVIYNIAKLTIEHNAIIVLEDLNFGFKRGRFKIEKQIYQKF |
| | | | | | EKMLIDKMNYLIFKDRKENQTGGCFKAYQLTNKFESFKKLGKQSGIIYYVDAYKTSKVCPKTGF |
| | | | | | VNLLYPRFKNIQKSKEYLKKFKYIKFSPEDNLFELNFNYSNFFSENKNKLIRDNWSIWSNGIKLVQ |
| | | | | | KRNKDKNNSWETKEINVTKELQELFHQNNIDYSSGENLIKQIINIENKSFYETLLNLIRLILKLRNS |
| | | | | | YSDYEIKNFKKNLGDQFNESNYDYILSCVKDKDGNFFDSRNAKDDEVKDADANGAYHIALKGLM |
| | | | | | LINKIKTADTSKKIDLRIDRNDYLNYIIKKAN |
| MG29 | 6395 | MG29-72 effector | Protein | Unknown | DETSANDVEVIKDFLDSIMNIYHFVKPLHIDFKKSEGDKGTDALDLNADFYNGFDEIFGKLGEIL |
| effector | | | | | LYNRVRNYVTQKPFCTKKFKLNFKSATLASGWDLNKEHDKNYSFIFKEGKSFFLGVINVEEDKN |
| | | | | | VLREDKHPEIFIKNSSFMKMIYKDLGNINKQISRLGFSEKAKKGVETVGWNPEIKSIKKEFEEFQ |
| | | | | | KSKEKDKSGRSSNFDKDKLFKLIEYYKSVLKNHSEKYEETYNLSYKPTKDYKNLGEFFDDISSQT |
| | | | | | HKMEFVGIDKNYVNKLIDEGKLYLFQIWNKDFSDFSIRNEMDPNKKSKPNLHTIYWREIFSEENI |
| | | | | | KDPVHKLNGGAELFFRKASSKRDITHPKNQEIKNKNPINGKEKSTFIYDLIKNERYTEDKFFFYCP |
| | | | | | VTLNFKVGEKNKVLNRLVNKYIHNTNEEINILGIDRGERNLAYYVLIDSRGNILEQNSFNIISDDLH |
| | | | | | RKLNYQEKLDFIEGERDKARKTWKNIVNIKEMKTGYLSHAIHKIAKLAIESNAIIVLEDLNFGFQ |
| | | | | | RGRFKIEKQIYQKFEKMLIDKLNYLVFKERNNNQSGGSFKAYQLTNKFDSFKKLGKQSGIIFYVD |
| | | | | | AYKTSNICPKTGFTNLLFPKFENVDNSRNFFKKFKFIRFKNDEDLFEFNFNLFDFSSENNKSRLLR |
| | | | | | DNWSVWSNGTKLIKTKDKENNYNWKTKEINVTKELKELFDYNEIKYTSAENIVDQIIRVEDRSFY |
| | | | | | EKLTELFKRVLQLRNSYTDYEIKEFKKKLGDGFRMSNYDFILSCVKDRKGHFFDSRNAQDHEVK |
| | | | | | DADANGAYHIALKGLMLIEKIKKSDTNEKLDLKIDRFDFINYAVTRAI |
| MG29 | 6396 | MG29-73 effector | Protein | Unknown | MKNFTNIYPQSKTLKFELRPQGATLDNIHKSGLIDQDETLKADYQAVKKMIDEYHKVVIDESLT |
| effector | | | | | NFKLTGLPAYEELYYKDRTEAEDKTFEKIQSNLRKQVHKAFGENKRYKSIFKKELIQKDLPDFV |
| | | | | | NKEEEREQISRFYHFTTYFTGFHENRKNIYTAEAKATSVCNRLIHENLPKFLDNRKTYLNYISNFG |
| | | | | | DLDMSQAEEDLQEVLGGIKVGELFSLDFFNHTLTQQDIDIYNIALGGRSVEGGKKIQGINECINLY |
| | | | | | RQNNQLKARQLPNIKPLYKQILSESESGSFLLDKFEKDEDLFDGLRNFYQGLNSFNYKGEQDKST |
| | | | | | FIELMNLFGRFSESDMTRVYLRNDASLSRLSKKLFGDWSLIVSALRYYYDAEVNPLMGKKATNK |
| | | | | | YIKEKENWLNKSRDFSIDIINKSLLRYGTINETVNSQFTDDIIFEHFSSFMIEEKNLLNTVAENFML |
| | | | | | VSEVLSRGSLDKDQNKKKKEIKTIKTFLDNVLDLLHFIKPLSVQHVGAEKDEGFYSDFDVLYDQL |
| | | | | | SQVIPLYSKTRYYLTKKPYSVAKFKMNFKNNTLLDGWDVNKETANKGVLLQKEGLFYLAIMNK |
| | | | | | DHSKSFYNIMDTGDTTGYQKMDYKLLPGPNKMLPKVFFSVKNLGFFNPSEKVLRIRNTSSHSKN |
| | | | | | GNPQEGFDKADFSLNDCHSLIDFFKASLDKHADWKKFAFDFSPTQSYNDISEFYREVENQGYKIT |
| | | | | | YTNISDEYIHELVNEGKIYLFQIYNKDFSPFSKGKPNLHTLYWRALFDEKNLEDVVYKLNGQAEV |
| | | | | | FYRKKSIEYSEEKWIQGHHYDQLKDRFAYPIIKDKRFAFDKFQFHVPITMNFKASGSPVINMKVR |
| | | | | | EYLKTNPDVKIIGLDRGERHLLYLTLIDQNGNIEEQYSLNEIVNSYNGKVHKKDYQQLLHEKEG |
| | | | | | DRKKARENWETIETIKELKEGYLSHVVHKIVNMMVEHNAIVVMEDLNFGFKRGRFHVEKQIYQ |
| | | | | | KFEKMLIDKLNYLVLKDTQDPKAPTGLLNALQLSNKFESFQKLGKQSGFVFYLPAYLTSKIDPAT |
| | | | | | GFVNQLRIKYDSVVKSQAYYRQFDRIVYNTTTDWFEFGFRYVNFGNTTPSVRQEPWTICTTHHP |
| | | | | | RYAWNKNSNMGKGGTEEYNITEELKKLFDHHNIAYEEGTDLIESIASNTGTDFFKRLNKLLNVT |
| | | | | | ASLRHNNGKKGKEERDFILSPVANSEGAFFNSLEADETQPENADANGAYHIALKGLWALQSIRK |
| | | | | | TDTDRMAKLNLVVSNEEWLNFAQAKQYRSQSSS |
| MG29 | 6397 | MG29-74 effector | Protein | Unknown | MGIGKIDNMLKEELKTSISKEGGNNNNSKSLTFYNVSNFEKSKESIWDEFTNLYSLQKTLRFELK |
| effector | | | | | PLGKTKEFIEKKGLVEEDEEREKEFNQVKKIMDDYYREFIEICLSEIKIETEDIEALERVYNGLKK |
| | | | | | DTKNQTLREEYTKYQKDLRAKIYDKIKKIKNFGVLFGKDFINKILPDWLDCKNRQQDKDLVLKF |
| | | | | | KRWVTYFNGFFKNRKNIFSEKEIPTSIIFRIVHDNMPKFLDNVSRFKEARKLIDFDYKKIEENFKSE |
| | | | | | LNGQSLEEFFSLDNISNCLNQAGIELHNLLIGGKSLEHNLKIKGVNEYIEELSKTLQEKTEQKKIR |
| | | | | | KLKLSPLFKQILSDRESASFVLEQFKDKNEVFQKIDEFYVHFNNISDKIQSVIAKLKECDVDSVYL |
| | | | | | KNDNNLTKISQNIFGDWNKIHEGLKEYFILESKSKDLTEKQCIKEVEKKMKSKYFSISEIEGGISLI |
| | | | | | NVEKKQSLIDYFLNFSGVIDNANMNLFEDLKEKYSAFKQIDRNKDGDLKDETSANDVEVIKDFLD |
| | | | | | SIMNIYHFVKPLHIDFKKSEGDKGTDALDLNADFYNGFDEIFGKLGEIILLYNRVRNYVTQKPFCT |
| | | | | | KKFKLNFKSATLASGWDLNKEHDKNYSFIFKEGKSFFLGVINVEEDKNVLREDKHPEIFIKNSSF |
| | | | | | MKMIYKDLGNINKQISRLGFSEKAKKGVETVGWNPEIKSIKKEFEEFQKSKEKDKSGRSSNFDK |
| | | | | | DKLFKLIEYYKSVLKNHSEKYEETYNLSYKPTKDYKNLGEFFDDISSQTHKMKFVGIDKNYVNK |
| | | | | | LIDEGKLYLFQIWNKDFSDFSIRNEMDPNKKSKPNLHTIYWREIFSEENIKDPVHKLNGGAELFFR |
| | | | | | KASSKRDITHPKNQEIKNKNPINGKEKSTFIYDLIKNERYTEDKFFFYCPVTLNFKVGEKNKVLN |
| | | | | | RLVNKYIHNTNEEINILGIDRGERNLAYYVLIDSRGNILEQNSFNIISDDLHRKLNYQEKLDFIEGE |
| | | | | | RDKARKTWKNIVNIKEMKTGYLSHAIHKIAKLAIESNAIIVLEDLNFGFQRGRFKIEKQIYQKFE |
| | | | | | KMLIDKLNYLVFKERNNNQSGGSFKAYQLTNKFDSFKKLGKQSGIIFYVDAYKTSNICPKTGFTN |
| | | | | | LLFPKFENVDNSRNFFKKFKFIRFKNDEDLFEFNFNLFDFSSENNKSRLLRDNWSVWSNGTKLIK |
| | | | | | TKDKENNYNWKTKEINVTKELKELFDYNEIKYTSAENIVDQIIRVEDRSFYEKLTELFKRVLQLR |
| | | | | | NSYTDYEIKEFKKKLGDGFRMSNYDFILSCVKDRKGHFFDSRNAQDHEVKDADANGAYHIALKG |
| | | | | | LMLIEKIKKSDTNEKLDLKIDRFDFINYATKRYI |
| MG29 | 6398 | MG29-75 effector | Protein | Unknown | MNNSIWNEMTNKYSLSKTLRFELKPIGKTEEFIEKNGLIIEDEQRNRDFLYGKELLNEYYSYLIEK |
| effector | | | | | RLGEIKIDLGILKDYYEKYKNFSKLKQKGKVVDSKELKKSEIELIDIQNHLRKALHKVFFFDKNL |
| | | | | | SDKRDEKDIIAAVKYHVENGLVKEKSDRLNNFITNRCTTYFTGFFNNRDNVFTSDEIPASVFYRTI |
| | | | | | NENLPFFIKNIEKFEKLKNLIPENEFIALEKNLKNELGEFSVKEVFSIKYENNCLNQKGIDKYDQI |
| | | | | | MGGIKKETIQIKGFNGLINEFSQKGDKNIRKLRMTVLYKQILSKSDSKSFKIESIKNGKELKDIIN |
| | | | | | GFYDSICSLNKDLDESIIISLENLLKADKDLDLSGIYINSKKLKDISNKVFGDWYLIESALKQQYKS |
| | | | | | QIKSKGKKEKTESKKDEETEEWFKKLKQFSISEINSSLSNIENDLVTKENNTIWTYFSTFEDSNGK |
| | | | | | NLVNEIKNSFKELKTIQFGEDKELLNDDNEENVRKIKKALDSVQELFWFISPLMYDKPKEEVFDL |
| | | | | | DLDAGFYEKFNVIYEGLRQIIPLYNKTRNFIAQKPFNVSKFKLNFENSTLLNGWDRNKEADNWSI |
| | | | | | LFRKDDNYYLGIIASGKGNNKIFEKIPEYKEGDYYEKMNYILWSNPSRMLPKVFFANTNFDLYNP |
| | | | | | SEEILNIRKNSSFTKNGEAQKGFDKNEFNLNDCHKMIDFYKNCFNKHPRWSNFGLVFKNTKDYL |
| | | | | | DISEFYKDVADQIYQLSFQKVSSKFVDELVNEGKLYLFKIWSKDFSEYSTGKPNLHTMYWRELFS |
| | | | | | DNNLNNVVYKLNGQAEIFFRKKSLPIKITHPKNINIKNKDPIKDKENSVFKYDLIKDKRYTENKYL |
| | | | | | FHCPITMNFKAKGNSFINNEINEFILKNHNKINILGIDRGERNLLYCSLLDPSGKILFQKSFNVMPD |
| | | | | | KFGRDVKYYDKLDAKEKERDKARKEWKNIKNIKELKEGYLSQIIHEIAKLVIRYNAIVILEDLNF |
| | | | | | GFKRGRFKFEKQVYQKFELKLIEKLNYLAFKDKKPTETGGLLHAYQLTNEFESFKKLGKQSGIL |
| | | | | | YYVGASYTSKIDPKTGFVNLLHPNYENLNKSKEFFEKFDSIKFNKNEDMFEFDFKYSNFNKESKL |
| | | | | | EKDQWEIFTNKERIIHERTSNNNYSPKNINLTEEIKKLFDNERIPFADGINLKEYIISSDSKNLHKG |
| | | | | | LINLLKYTLQLRNSNSETGEDYILSCVKYDKKNFFDSRNAKENEPKDADANGAYNIGLKGLMLIE |
| | | | | | KIITQNNNKKQINEKQKYDFKMSNEEYFNWVIRRNLTK |
| MG29 | 6399 | MG29-76 effector | Protein | Unknown | MDSNITSFSFKYSLSKTLRFELKPVGKTLENIQNKGLIAKDEERSKSYARMKKTIDAFHKYFIELA |
| effector | | | | | MKEVELTKLNEYVEHYYESAERKKEDSFIKSFDKVKADLRKEIVKGFNSDKVKEIFSKIDKKELI |
| | | | | | TELLEDWIQNQPNKEEIYFDEGFKTFTTYFGGFHENRKNMYSDKEQSTAIAYRLIHENLPKFLDN |
| | | | | | IKNFEDAVQKLGEEKIAEIEKTLEPILQGKTLGEVFILEYFNHTLTQTGIELYNTILGGYTQNEGR |
| | | | | | IKIQGLNEYFNLYNQTQQDKKNKAAKLKPLYKQILSDRGTTSFLIEKFENSQEVLDAINEFYLFNL |
| | | | | | IEYKPEDKDETENVLSKLKELLAELSQYDLSKIYLKNDRAITDISQTIFGDWNIIKVALEQHWLNA |
| | | | | | NTDKNKALTKKQEEAKSKFLSKSQFSIAEIEAALFAYKNEADVLKDLKESDHPIADYFKTHFKAK |
| | | | | | KEKETDKDFDLIANIDAKHSCIKGVLNSDYPEDKKLYQQQKDIDNIKIFLESIMELLHFVKPLALT |
| | | | | | KGNSLEKEDKFYGQFETWFEQLSLLTPLYDKVRNYATQKAYSIEKFKLNFESGYFFSGWGIDYD |
| | | | | | SKSCLVVIKDENYYLLIVDKKLQKSEIEFLKENVNKNPAQRVIYDFQKPDNKNVPRLFIRSKGDRF |
| | | | | | APAVHRYNLPIDSIIDIYDNGYFKTEYRAQNLSHFKECLSKLIDYFKLGFERHESYKHYQFNWKN |
| | | | | | STQYNDIAEFYKDVINSCYQLKLEEINFDNLLELINLQKGYLFQIYNKDFSEYSKGKPNMHTMYW |
| | | | | | RALFDEENLKDVVYKLNGEAELFYRKKSIDDDKKIIHKANEKLANKNPLNPKRESKFEYELIKDK |
| | | | | | RFTVDKFSFHVPITMNFKADGNDYINQDVLKFLKNNPDVNIIGLDRGERHLIYLTLINQKGEILDG |
| | | | | | LQFSLNEILNTYKNSKGENVELKTSYHTLLDAKEKERDEARKTWKSIENIKELKEGYISQVVHIIA |
| | | | | | KMMVEFNAIVVMEDLNFGFKRGRFKVEKQVYQKLEKMLIDKLNYLVFKDVEESKSGGLYNAL |
| | | | | | QLTNKFTSFKEMGKQSGFLFYVPAWNTSKIDPTTGFVNLFDTRYESIEKAQQFFKKFKSIQYNSQ |
| | | | | | KQYFEFAFDYSEFTNRAEGSKINWKVCTQGDRIITFRNPESNNQWINKKVNLSQEFEDFFGKHN |
| | | | | | VIYGNGENFQPQIEAQTTKEFFEKLLQLFKLTVQMRNSKSDEDYLISPVINKTGEFYDSREANDT |
| | | | | | LPKDADANGAYHIAKKGLWVLEQINETEDYKKLKLAISNKEWLQFVQKNN |
| MG29 | 6400 | MG29-77 effector | Protein | Unknown | MQKNVFDTFTCLYSLSKTLRFELRPIDENGRWITDQRFENFTSALQGIIGNDNQRAKYYKQAKPL |
| effector | | | | | IDEYHRYYIDEKLESPVDPKTDEAVLDEDNIVKAFECYRELRNAAGNRRQDTEAFQAAQKKWSK |
| | | | | | FQDVLRKSLVKCFGDKKDHLFSKTLIKSTLPEWLEKQGRWEENRACVEAFEKFTGYFIGYNQN |
| | | | | | RENMYVDEPQKTAIAFRLMNENLSKFFNNCLAYEKIRKNHSDLVFSADNEIPEKSHVADVLTILE |
| | | | | | PGFFLKLFTQSGIDAYNTLIGGINKQINLYRQKHDIKPRNLPNLTPLYKQILSDRESHSFILEEFEN |
| | | | | | DQNLLDTLRDFVNPARALIEKLKTTLETLPDSDLDRVYIRGSELRTISQWLFNDYSFIGSAQTLHA |
| | | | | | ENIFPSSPKGKVTKKLEKEREKYPKQDVFSIAELDDALKSYIELRKQESPDEEFLSGVDTNFPVRN |
| | | | | | YFLTEAKKWKNHQGLQDAIQKFETVCSSNKISADRRAPGSDNETDGGGEGYRQVQSVRNMLDE |
| | | | | | FMTFLQLTRPLHLVRKGKPIDIPDMDMSFYADFSAAYENYQDRLLPLYNKTRNYLTKKPYSPDK |
| | | | | | IKLNFDKPNFLEGWDLNKEKANLGVLLRRDDNYFLAVMRPEHNNVFRNYPTPEGDEEIYGKINY |
| | | | | | KQISGMNKMLPKVFFSKKWRKEHDVPGEIDTLYKNEEHIQNENFNQESLHKLIDFFKARINEYE |
| | | | | | KDGFPWRNFDFHFPDTKEYQNIADFYREVEEQAYKIWFIKVPVSHIENLVREEKIFLFQIYNKDFS |
| | | | | | QHSKGRPNLHTLYWRALFEKKNLNNVVIKLNGGAEVFYRPHSIKENERIIHKAHQSLNNKNKNN |
| | | | | | PRKTSCFAYEIVKDRRYTQDKFLFHVPLTLNFKAPKAKSLNDCVNNAIRNEPDVHIIGIDRGERH |
| | | | | | LLYLTVIDQKGNIVKQCSLNEIETDKNYNVQYREKLDQKEKERDKARKSWSSIENIKDLKSGYLS |
| | | | | | QIVHSLAKLIIEYNAIVCLEDLNFGFKRGRFMIEKQVYQKFEKALIDKLNYLVFKDAKPGQAGHY |
| | | | | | LKAYQLTERFRSFEKLGKQSGILYYVPAAYTSKADPATGFVNFLYPKYESLEKSKQFFSKMELIR |
| | | | | | YNTGDEYFEFTFKYSNFPIRQDLKNYPDEWTICTHGDARYWNKRENNRWISEEINVTQQLAALL |
| | | | | | DSKNIDYRDGRDIKQDIAAAKDTKFYKKLYRLLQVTLSLRYSKSGTDIDFILSPTRDKSGTFFDSR |
| | | | | | QAPSTMPENADANGAYHIALKGLWHLQQLRKQEEGQNLKLEKITNSEWFDFLIQQVKKS |
| MG29 | 6401 | MG29-78 effector | Protein | Unknown | FTKTTPEVHLAHHVIYAFPKPENKNVPRILIRSKGTSFAPAVQKYDLPVESIIHIYDEGLYKTDFK |
| effector | | | | | KENPAVFKKSLVQLIDYFKLGFSRHDSYKHYDFEWKESEEYENIADFYQDVINSCYELRDEAINF |
| | | | | | DHLHQLIDQGKLYLFQTYNKDFSKHSKGKPNLHTMYWKALFEKQNLKDVVYKLNGEAEMFYR |
| | | | | | KKSIQDKNRVVHKKNIKVARKFYKDDKKTERVPDETVLRLNKFYKGQIQESGLKKEDLKFKDN |
| | | | | | YSLFHEQGKDIDLIKDKRYTVDKFQFHVPITLNFKAKGNDYINNEVLDYLKDNPDVNIIGLDRGE |
| | | | | | RHLIYLTLIDQEGNIIEQETLNSIVNKKHAITTNYHQLLDDKERERDKARKNWGTVETIKELKEG |
| | | | | | YISQVVHKIAKMMVEHNAIVVMEDLNMGFKRGRFKVEKQVYQKLEKMLIDKLNYLVLKDKKP |
| | | | | | DEPAGIYNALQLTNKFESFQKIGKQSGFLFYVPAWNTSKIDPTTGFVNLFHVKYESVNKAKTFFS |
| | | | | | HFKSIRYNKNQGYFEFDFDYNDFTTRAEGTRSEWTVCTYGERIKTFRNPDKVNQWDNQEINLTE |
| | | | | | AFEDFFGKHEIVYGDGTDFKDQISVKDNKDFFAELIHLFRLTLQMRNSITNSEVDYLISPVKNSSG |
| | | | | | TFYDSRKADASLPKDADANGAYHIAKKGLQWVNQIQEFDGDDWKKLKLNKTNKGWLKFVQCN |
| | | | | | T |
| MG29 | 6402 | MG29-79 effector | Protein | Unknown | TKNLIQEKENVAEIKTLLDLIMELLHLCKLFVIKADIAEKEHNFYSELEYCLELLNPIIALYNQTR |
| effector | | | | | NYLTQKPYSLEKFKLNFENATLLDGWDRNKETSNTSILLRKNGNYYLGIMNKRHNRVFEALPQI |
| | | | | | LKTNNSYEKIVYKLLPGANKMLPKVFLSTKGKATFQPSQEILDNYKSETHKKGDNFNLDHCHKL |
| | | | | | IDYFKDSINKHSDWKNFNFNFSETSSYEDISGFYREVEAQGYKIIFDLISEQYIDELINEGKLYLFQI |
| | | | | | YNKDFSPHSKGTPNMHTMYWKALFSEENLANVVYKLNGQAEIFYRKKSITADKTIKHLANQPIN |
| | | | | | NKNINNAKKQSTFAYDLIKDKRFTMDKFQFHVPITLNFKAQGRDDINLEVKEYLKSNPHTHVIGI |
| | | | | | DRGERHLLYVSVVNPQGEIIKQFSLNEIINEYKGNTYKVDYHNLLNNKEGDRKKARENWGVVEN |
| | | | | | IKELKEGYLSQVIHKICQLVIEYQAIIVMEDLNSGFKNSRIKVEKQVYQKFEKMLIDKLQYLAFK |
| | | | | | NPQENQPSIYGALQLASKFESFQKLGTQSGFIFYVPAWNTSKIDPATGFVDLLKPKYETVAKAQE |
| | | | | | FIHKFDDIKYNQSKDWFEFNFNYSKFTEKADGTRLNWTICTTNINRYSWNRKLNNGKGGQQLFE |
| | | | | | ITKCLKALFDNYKINYQSGENLVVQIATQSEKDFYVCLLKYLSITLNLRHNNGKSGIDEEDYIASPI |
| | | | | | ADNAGAFFDSRNEVIKGKNEIGDWLSKLPVDADANGAYIIIAKKGLWVLIIQLEKADNLRKVKLA |
| | | | | | ITNKEWLEFTQN |
| MG29 | 6403 | MG29-80 effector | Protein | Unknown | MKLNKFTHQYPISKTLRFELKPVGETADYIEDFKSQYLKDIVIQDQQRAEDYESIKVIIDEYHRHY |
| effector | | | | | IEEKLSEPFDKKTGELFISGDEFENAFSYYQRFRENSKDEKARKEWIEVQNSLRKSLVKVFSDRK |
| | | | | | KRLFQKELITKELPSWLKEKGEWEDKKNVVENFNRFTTYFTGFNENRENMYSHEEQSTAISFRL |
| | | | | | MNENLPKYFNNCIQYHKAIESYDGLSFTVNPDLLNEMGVSILSEIFQPSYYIQLFTQSGIDKFTELL |
| | | | | | GGFTKENGEKVQGLNETINLFRQQKAIKAKAFPNFISLYKQILSDRETSSFIPDQFENDNDLLKSL |
| | | | | | GKFIKEMVKEDGLFKKLEDSIKLITDADLHRTFIKNGVEITKISQSIFGNYSILKSAIYHHAESVLY |
| | | | | | PDPISGKISEALKEKRIKYVNKQVVFSIAELETILSNYASQMTDDNPDKEIIAQCENSEHPIRTYFL |
| | | | | | NAIENVKNDKDIEFGKAIENVLPLISLENLNKGKDGQAQTHKIQKMLDAFLAVTHAVKPLHLVK |
| | | | | | GRKPIDIPDMDMGFYAEFSKAFENFEQLVITLYNKTRNHLTKKTFSTDKIKINFENPTLLDGWDA |
| | | | | | NKEKDNSGVLFEKDGNYYLGIMHPKHKNIFNYIKGINDIESEKRSLSKDELFNKIVDGESEHYQKI |
| | | | | | VYKLLPGVNKMLPKVFFSGRRIDFFAPSTEVLKIRNSASHSKNGSPQKGFEKEDFNLKDCHTIIDF |
| | | | | | FKKSIEKHPEWKEFEFEFSPTSSYEDLSGFYREVEHQGYKMDFHPIKKSYIDQCIEEGKLFLFQIY |
| | | | | | NKDFSPYSKGKPNLHTLYWKALFDTENLKDVVAKLNGQAEIFYRKHSIKKDERTIHRANKSLQN |
| | | | | | KNENNPKKTSLFEYDIIKDRRYTVDKFQFHVPITLNFKMEKMTQFAHNEKVNQMIVKSENTHVI |
| | | | | | GIDRGERHLLYYSVINPKGHIVEQGTLNTISTDKGYEVDYQQKLDSKEKARDTARKSWTTVENI |
| | | | | | KELKAGYLSHVIHKIAFLIEKYNAIVCLEDLNFGFKRGRFKVEKQVYQKFEKALIDKLNYLVFKD |
| | | | | | AKPNEPGHVLNAFQLTAPFDSFKKLGKQTGLLYYVQASYTSKIDPVSGFINFLYPKYESLLKSKIF |
| | | | | | FESMDGIRYNADKDYFEFSFDYRKMTPNRNLEGYQTKWTACTFGEKRFKNIRNAHGNWESVEV |
| | | | | | NVTEALKKILKNEDVDFKSGHDLRFEISKVKSTKFYKKLFKLLQITLSLRHSKTGTDEDFILSPIV |
| | | | | | DENGKFFDSRNATKDHPMDADGNGAYHIVLKGL |
| MG29 | 6404 | MG29-81 effector | Protein | Unknown | NYPPTITYSDEVKKILKRLPDRNAGDDSVTICSTDDAMEPKKSIWDDCTNLYSLQKTLRFELKPIG |
| effector | | | | | RTKDFINQKRLIEDDEELAKKFNEAKKIMDDYYKFFIEDRLKKVRIEECDLKEFKKIYQDLKQSR |
| | | | | | GKDKKIRAEFSELQEKIRNDIYKKFFTETLEKFLFEKNFLTKILSEWLESNNRKEDSNTIEEFQRG |
| | | | | | TTYFTGFFDNRKNVFSKDDIHTSFIYRIVHDNLPKYIDNLERYDKLKQYSDFNYEQIGKDFSSELK |
| | | | | | SQTLSEFFTLENFNECLNQSGIERFNLIIGGKSLNNNKKIQGLNEAINLYSQKTNEENKRAVRKLF |
| | | | | | MRPLFKQILSDRTSASFILSVIEDDAAVIFSINELYSNISKDFDLLQNIFKGLFEFNTGQIYINKKLLN |
| | | | | | HVSKQIYDDWGILEISLKCFAKEKLNLTTEKKIEEWFKKSAYFSLEEIKQGIECLKSENAAWEKF |
| | | | | | VEYHRAITRDNKQLIDAIKEEYTAVKGLNLNKGERTLLTEQKEDDVTKIKQFLDSVMNIYHFLK |
| | | | | | PFIMVLDADSEKESFTVEIDTEFYKDENDIYDRLCEVVPLYNKVRNYVTQKPFRTNKFKLNFNES |
| | | | | | TLLGGWDKNKEHNKNYSFIFRENDSFFLGITNTDEDKNILREDKHPEIFVENSLFKKMICKDLGD |
| | | | | | IKMQLPRIGFSDKAKNGVEDVGWNQEIQEIKNEFDSFQEQKKNDKDLWTEKFNRDKLFRLIDYY |
| | | | | | KGVLKNHSERYEKTCNITYKSTSNYRNLGDFFNHVSFQTYNVKFVGIDKSYIESLVSEGKLYLFQI |
| MG29 | 6405 | MG29-82 effector | Protein | Unknown | MKNLSEFTNLYSLQKTLRFELIPVGKTQKHIEYNGIIDCDTKRAESYKKMKKTIDKYHKDFIESS |
| effector | | | | | LRKASLSGLDEFYVLYTSNTEEKKTDAYKKRFSAAKQSLRKEIVKRFKDGPKKDIFKNLDKKKLI |
| | | | | | QDELEKWLQEKDNELYFNSDFKSFTTYFTGYNTNRMNMYSDEEKSTAIAYRLINENLPKFIDNM |
| | | | | | LIFEEIKNTTIYNKFPQIYEEIKEYLYVTRIEEIFELEYFNNTLTQTMIENYNAILGGVKIGNRKIKG |
| | | | | | LNEYINEYNQKSKDKRIPNLKMLYKQILSERETFSYLPEEFESTQEMLDAIAKFYENQLCSYSDEY |
| | | | | | SGEEINIVDSLKSIVSSLREHKLNKVYIRNDSSVDTISNRLFGDFSVIKASLEYYYENVVAPGFQESY |
| | | | | | KKASDKKRKQLEKQKKDYISGPAYFPIGLIQDALGCYVEQLDKNEYANIHAKYSDSCVADYFSA |
| | | | | | FEAKDGVNLINELNQKYKKAQDLFNISFPDGYNLLDYEKGILKAFLDSILSLLHFVKPLYLTPDSE |
| | | | | | LSKDELFYSAFSPLFEQLQKITEIYDKTRNYLTKKPYSTEKVKLNFSNPTLLEGWDVNKEPDYGA |
| | | | | | VLFERDGLYYLGILNDRNLFKNIESRFDLHSSEKGSYRKIVYKQIPDAAKYISSKQILPQNPPQKII |
| | | | | | NILEKKKTNAQSLKREEIHSFIDYCKNDFLKNYSCLKDANGKDYFDFNLKPADEYETLKHFFDDV |
| | | | | | KKQAYSISFLGITEKFINEAVEEGKLYLFKIWNKDFSSFSKGKPNLHTMYWRALFADENLKNVSY |
| | | | | | KLNGNAELFHRKASISKDNMVIHKANQPIACKNPNLKQKTSVFEYDIIKDRRYTCDKYQFHVPIT |
| | | | | | LNFKANGQTNINERVLKYLKNNQDINVIGIDRGERHLLYISLLNREGNVIMDEDGNPLQYSLNDI |
| | | | | | VGVYRDNSGALVSIKTPYRELLDKREIKRKDARKNWETIERIKDLKEGYMSQVIHHIAKLMVKY |
| | | | | | NAIIVMEDLNSGFKNSRVKIEKQVYQKFEKLLINKLNYMIFKDLPEKEPGGLYKAFQMINKFESF |
| | | | | | KRMTRQNGFVFYVPPWNTSRIDPVTGFVDLLKPKYTNIPDARSFFSKFDSISFNSQSDYFEFEFDY |
| | | | | | SQFTEKANGTRTRWTVCTYGNERYTYNRSLNGGLGGYEKWNVTEKLKSLFDNVSIYYNSEENLI |
| | | | | | PQIISQENSAFFLELIKNLKITLALRYSDGNDRDFILSPVSNEGRFFYSEECEKTLPQDGDANGAFH |
| | | | | | IARKGLCLLKKIDLMEDLKKPDLKISNKEWLSFVQTRLV |
| MG29 | 6406 | MG29-83 effector | Protein | Unknown | MKLNKFTHQYPISKTLRFELKPVGETADYIEDFKSQYLKDIVIQDQQRAEDYESIKVIIDEYHRHY |
| effector | | | | | IEEKLSEPFDKKTGELFISGDEFENAFSYYQRFRENSKDEKARKEWIEVQNSLRKSLVKVFSDRK |
| | | | | | KRLFQKELITKELPSWLKEKGEWEDKKNVVENFNRFTTYFTGFNENRENMYSHEEQSTAISFRL |
| | | | | | MNENLPKYFNNCIQYHKAIESYDGLSFTVNPDLLNEMGVSILSEIFQPSYYIQLFTQSGIDKFTELL |
| | | | | | GGFTKENGEKVQGLNETINLFRQQKAIKAKAFPNFISLYKQILSDRETSSFIPDQFENDNDLLKSL |
| | | | | | GKFIKEMVKEDGLFKKLEDSIKLITDADLHRTFIKNGVEITKISQSIFGNYSILKSAIYHHAESVLY |
| | | | | | PDPISGKISEALKEKRIKYVNKQVVFSIAELETILSNYASQMTDDNPDKEIIAQCENSEHPIRTYFL |
| | | | | | NAIENVKNDKDIEFGKAIENVLPLISLENLNKGKDGQAQTHKIQKMLDAFLAVTHAVKPLHLVK |
| | | | | | GRKPIDIPDMDMGFYAEFSKAFENFEQLVITLYNKTRNHLTKKTFSTDKIKINFENPTLLDGWDA |
| | | | | | NKEKDNSGVLFEKDGNYYLGIMHPKHKNIFNYIKGINDIESEKRSLSKDELFNKIVDGESEHYQKI |
| | | | | | VYKLLPGVNKMLPKVFFSGRRIDFFAPSTEVLKIRNSASHSKNGSPQKGFEKEDFNLKDCHTIIDF |
| | | | | | FKKSIEKHPEWKEFEFEFSPTSSYEDLSGFYREVEHQGYKMDFHPIKKSYIDQCIEEGKLFLFQIY |
| | | | | | NKDFSPYSKGKPNLHTLYWKALFDTENLKDVVAKLNGQAEIFYRKHSIKKDERTIHRANKSLQN |
| | | | | | KNENNPKKTSLFEYDIIKDRRYTVDKFQFHVPITLNFKMEKMTQFAHNEKVNQMIVKSENTHVI |
| | | | | | GIDRGERHLLYYSVINPKGHIVEQGTLNTISTDKGYEVDYQQKLDSKEKARDTARKSWTTVENI |
| | | | | | KELKAGYLSHVIHKIAFLIEKYNAIVCLEDLNFGFKRGRFKVEKQVYQKFEKALIDKLNYLVFKD |
| | | | | | AKPNEPGHVLNAFQLTAPFDSFKKLGKQTGLLYYVQASYTSKIDPVSGFINFLYPKYESLLKSKIF |
| | | | | | FESMDGIRYNADKDYFEFSFDYRKMTPNRNLEGYQTKWTACTFGEKRFKNIRNAHGNWESVEV |
| | | | | | NVTEALKKILKNEDVDFKSGHDLRFEISKVKSTKFYKKLFKLLQITLSLRHSKTGTDEDFILSPIV |
| | | | | | DENGKFFDSRNATKDQPMDADGNGAYHIALKGLWNLEQIRNWDGESRLNLAMKNVDWFSFAY |
| | | | | | QKPFKK |
| MG29 | 6407 | MG29-84 effector | Protein | Unknown | LSSFTRKYPLSKTLRFELKPVDDTKKYLKEFVQYDQKRAEDYKKLKTIIDEYHKDYIEKSLSKND |
| effector | | | | | ILSLDDLNSLKEHIEKSGSLQLLEEKQKKEKSIKELQNTLRGQIVKDFQIDTKQEKDRLFGAKLIK |
| | | | | | DVLPEWLDSGSLENIEYKKEIVKEFQKFNTYLTGFHENRKNIYSDKEQSTAVSHRIINENLPKFLS |
| | | | | | NLNTYEKIKTNFPELKAQFESLKKDLKAEFEYFKIQNIKDLFKIQFLNKCFTQTGIDNYNSIVGVR |
| | | | | | VLESGQKIQGINEKINLFRQAQSSKGNQETRKISNTSLPVMQTLYKQILSDRESHSFYFEEFKSRN |
| | | | | | EVLESINCYWESIFNKERQSEYIAKRQTRHKEGDQSVLQRMENLFTNLDKYELDKIYFKSNDLSF |
| | | | | | VSKKLFEDYSVIGSALNFHAENKFSKKKEKEQYVKKDFFSFDEIQTSLSDYLKENEEIKFSSRFPG |
| | | | | | LKEIEKDLSVDPKKEQSNVLVVYFNLEFSKKKYNNKSLLDFIEELYKHVKKEIPPSLQTQNEFNK |
| | | | | | KEVQIIQNYLKPFIPNCPENSDSYNGKEKNETLKQGQYNTERGSVGLMDLLHLIKPVYLEKDKK |
| | | | | | KIMDLEKDASFYNEFEELYNKLSQIIPLYNKVRNYITKNKRCTEKIKINFEKSTLLNGWDINSETD |
| | | | | | YLSVILRKKDKVIGWKYYLGVMNTHRFEKANRMFDYHIKSDKSDKKQQEELRQKILHKEDNEN |
| | | | | | FYEKMNYKLLPKPSKMLPKVFFSKRNLSFFSPSPEILEIKKSKRSYSKNNGDTFSLNDCHKLIDFY |
| | | | | | KKSIQKHKEWGAIFNFNFSHTRNYRDISEFFAEVASQGYRLSFDKIKSSYIEGKVKTGEFLLFEIY |
| | | | | | NKDFSTHSKGRPNLHTSYFKLLFAEENLKDIVYKLNGHAEIFYRKASKQKKISYKAQVPIKNRNP |
| | | | | | DNQKKTSQ |
| MG29 | 6408 | MG29-85 effector | Protein | Unknown | LRKEIVKGFSIGEAKEIFNKIDKKELITDLLEQWVKKQSDDFYFDENFKNFTTYFGGFHENRKNM |
| effector | | | | | YSDKAQSTAIAYRLIHENLPKFLENIKIFERIKAVPKVYEKCQTLYKEIEEYLNITQIDEAFELDYY |
| | | | | | NEVLTQTQIDVYNLIIGGRTAEEGKKKIQGLNEYINLYNQKQEKNKRLPKLKLLYKQILSDRISTS |
| | | | | | FMAESFSEDQEVIDAIEEYYKFHLLAFQAEDKDDTENILEKVKELLSNIKEYDLSKIYLRNDTKIT |
| | | | | | AISQKIFGNYGVFNTALEYYYATAVKPDFQKEYEKANQKKRDTLDKAQTQFVKQPYVSIELLQT |
| | | | | | ATDAYIATIDKGEEIYKRYSPTCIADYFKNNFKAEKKEKNDKEYGFIDNIKAKYSCIQGILGTPYPK |
| | | | | | DKKLIQQKNDIPNIKAFLDSLMELLHFTQPLSIVDEREVTKILTSDRLKIDKEWAEEANKSFFEKD |
| | | | | | KKFYEQFDLYFKELQKLIPLYNKVRNYATKKPYSTEKFKLNFENKGQFLGGWVDSHTENSDNA |
| | | | | | TQAGGYLFRKKNQIGEYDYFLGVSSDSKLFRSHLRNEIVDEDKSEFERLDYYQLKSASVYGNSYI |
| | | | | | GNQSYDKDKENLFDSIIEFANRNNPAAKEDFNKYISSQKGDNKPTPNGLLKILQEKHSKALEELM |
| | | | | | IDGDFIRINTIVTDNLKNTILSLNRIPKSQEYKNTIFTLFTEPIQVIEELSKEKSFSYFPVSAKELEDS |
| | | | | | LNRELKPLLLFKISNQDLSYADSFSQGKRKSRGRENMHTLYFRQLMSGSQNILDIGTGEVFFRKS |
| | | | | | SIENPTIHKANEAVTNKNPLAKKKDSAFEYDIIKDRRFTVDKFQFHLSIIMNYQKPQKASDENFEV |
| | | | | | LEFLQNNPNVNIIGLDRGERHLIYLTLINQKGEILLQESLNNISSENYPITTPYHDLLATKEKERDE |
| | | | | | ARKSWGTIENIKELKEGYISQVVHKIAKLMVEHNAIVVMEDLNFGFKRGRFKVEKQVYQKLEK |
| | | | | | MLIDKLNYLVFKDKDPNEIGGLYKALQLANKFESFQKMGKQSG |
| MG29 | 6409 | MG29-86 effector | Protein | Unknown | MKLNKFTHQYPISKTLRFELKPVGETADYIEDFKSQYLKDIVIQDQQRAEDYESIKVIIDEYHRHY |
| effector | | | | | IEEKLSEPFDKKTGELFISGDEFENAFSYYQRFRENSKDEKARKEWIEVQNSLRKSLVKVFSDRK |
| | | | | | KRLFQKELITKELPSWLKEKGEWEDKKNVVENFNRFTTYFTGFNENRENMYSHEEQSTAISFRL |
| | | | | | MNENLPKYFNNCIQYHKAIESYDGLSFTVNPDLLNEMGVSILSEIFQPSYYIQLFTQSGIDKFTELL |
| | | | | | GGFTKENGEKVQGLNETINLFRQQKAIKAKAFPNFISLYKQILSDRETSSFIPDQFENDNDLLKSL |
| | | | | | GKFIKEMVKEDGLFKKLEDSIKLITDADLIIRTFIKNGVEITKISQSIFGNYSILKSAIYIIIIAESVLY |
| | | | | | PDPISGKISEALKEKRIKYVNKQVVFSIAELETILSNYASQMTDDNPDKEIIAQCENSEHPIRTYFL |
| | | | | | NAIENVKNDKDIEFGNAIENVLPRISVENLNKGKDGQAQTHKIQKMLDAFLAVTHAVKPLHLVK |
| | | | | | GRKPIDIPDMDMGFYAEFSKAFENFEQLVITLYNKTRNHLTKKTFSTDKIKINFENPTLLDGWDA |
| | | | | | NKEKDNSGVLFEKDGNYYLGIMHPKHKNIFNYIKGINDIESEKRSLSKDELFNKIVDGESEHYQKI |
| | | | | | VYKLLPGVNKMLPKVFFSGRRIDFFAPSTEVLKIRNSASHSKNGSPQKGFEKEDFNLKDCHTIIDF |
| | | | | | FKKSIEKHPEWKEFEFEFSPTSSYEDLSGFYREVEHQGYKMDFHPIKKSYIDQCIEDGKLFLFQIY |
| | | | | | NKDFSPYSKGKPNLHTLYWKALFDTENLKDVVAKLNGQAEIFYRKHSIKKDERTIHRANKSLQN |
| | | | | | KNENNPKKTSLFEYDIIKDRRYTVDKFQFHVPITLNFKMEKMTQFAHNEKVNQMIVKSENTHVI |
| | | | | | GIDRGERHLLYYSVINPKGHIVEQGTLNTISTDKGYEVDYQQKLDSKEKARDTARKSWTTVENI |
| | | | | | KELKAGYLSHVIHKIAFLIEKYNAIVCLEDLNFGFKRGRFKVEKQVYQKFEKALIDKLNYLVFKD |
| | | | | | AKPNEPGHVLNAFQLTAPFDSFKKLGKQTGLLYYVQASYTSKIDPVSGFINFLYPKYESLLKSKIF |
| | | | | | FESMDGIRYNADKDYFEFSFDYRKMTPNRNLEGYQTKWTACTFGEKRFKNIRNAHGNWESVEV |
| | | | | | NVTEALKKILKNEDVDFKSGHDLRFEISKVKSTKFYKKLFKLLQITLSLRHSKTGTDEDFILSPIV |
| | | | | | DENGKFFDRRNATKDQPMDTDGNGA |
| MG29 | 6410 | MG29-87 effector | Protein | Unknown | KYEHLFNRNRESRLFEWLDIRFENDHLTENEYDEIKDVLDKFDKFTTYFTGYKENRANLFVADE |
| effector | | | | | KATATAYRVVNENMPRFFENCIRMENIKKRHLDLYKLLDSFEGYFVPQAYANTICQPATTDYNKTI |
| | | | | | GRPTQNPDEKGVNSIINEYRQKNQIKNRELPMMAQLYKQLLSDRITVFLDPVINNDEEMQSIVAE |
| | | | | | TIEIARGLFSEVINLTAIHALADNSENIYINSSALANLSHRVYDDWNLIYRACEAKMIKLEGKQKK |
| | | | | | GLENKLKMAIPMSELQNIIEEYIATLDEELKLSYYKIPILCNYFQNPPLDDFESATLKFEQIVKTTT |
| | | | | | PRTDLIHAIKEVLDKAMEVVRFFKPLYLFKGRSPLEVPDRNEDFYNEFERLYAELNLISKIYDRVR |
| | | | | | NYATKKQFSQDKIKLNFNNPTLLDGWDLNKEQDNLCVILIRDGNYYLALMNRDYRRLFDLKND |
| | | | | | EVRNKALGKAGDHCYSKLEYKQVTGANKMLPKVLFAATNSDLFKPSQEILDIRKTGSHKKEAG |
| | | | | | NIEALHKWIDFCKQSIATHPEWNDHFDFKFRSTSEYSELTEFYNDFDRQAYKIKFVDIKVEYIDQL |
| | | | | | VKEGKLYLFQIYKKDFSPYSKGRPNLHTTYWRMLFGNENLANITMDTDRPIFKLNGEAEIFFRK |
| | | | | | ASLEKQITHAKGQPITNKSKKDNGKESESIFEYDLIKDKRYTEDKLFFHCPITINFRAPGTTVGSF |
| | | | | | NRKVNYFVERNPEVKIIGIDRGERHLLYYTVIDQKGNILEQGSLNQIHNSYTSAGRVVEHNINYRD |
| | | | | | LLHEKEKGREEARKNWETIENIKELKAGYLSQIVNLLSNLMIKYNAVLVLEDLNAGFKRSRIKVE |
| | | | | | KQVYQKFEKAMIDKLNYLVFKELPPGSSGHYLNGYQLTAPFTSFRDLGRQSGFLYYVYPSYTSHI |
| | | | | | CPKTGFVNLLNTRYESIEKAISFFEKFNSIKYNPGSDYFEFDFDYASFGKDVARSQWCVCTAGEK |
| | | | | | RYYYANHDKTSRECNATQQIKELLDKYNIEYIRGKDLLPEIIKKNDKGFFNGLMFLLGVVLQMR |
| | | | | | YTVSGTSNDDDFILSPVMDEQGQFFDSRSAATSEPQNADANGAYHIALKGLKIISSISDGKLKTVN |
| | | | | | KNERQDWFAYVQNKMYR |
| MG29 | 6411 | MG29-88 effector | Protein | Unknown | MKEDIKTKIDIWDDMINQYSLSKTLRFELKPIGRTLENIQYIIEEDKQRDKDFQEVKKIMDKYYS |
| effector | | | | | HFISRVLNNKIKISRDSLDEYKEIYFNLKKKIHDNDLKKQLELVQKKITKNISLMIKSDEDFKNIFG |
| | | | | | KEFVKEILKKYLEEKGNQSELELVSKFNDWTTYFTGFYDNRKNVFSDKDIPTSIIYRIVQDNLPKY |
| | | | | | LDNLYNLEQLDKYDIDFSYLNENFGGSIGNKDLKEYFGIENFNEFLSQDGIDKYNYLIGGYSKDM |
| | | | | | KDKVKGINNIIQEYSQQNKEDSDIKKLKFTSLYKQILSDKDEKISFRFFNFNSVDEMLKCIDIFYNK |
| | | | | | LNDENIFENLNFLFDDLNSEIYDKNKVFIKKNKLTFLSNELFGNYSVINYLLKEYVMKNYKDYNT |
| | | | | | EAKFEKWFKGKELLPLSLIEISIARVFDFFDSNSSEIKRFQNIVGVNFINPISFYLTQFKTEGFNLFE |
| | | | | | EIKSNYEAYRNLLSSNILDKQNLSQEEKEIKSKQVEILKSFLDSILKLNSFVDIFSTYNVKKDIVEKD |
| | | | | | NDFYNNYEELLLCISEVISIYNQVRNYITKKKTDIKKFKLNFEKSTLLDGWDVNKESANLSVVLRR |
| | | | | | NGKYFLGIMNKKDNKIFDKILPEFITSNNESFEKMEYKLLPGPNKMLPKVFFSEKNIKYFNPSQEI |
| | | | | | IDIRNYSSHSKNGEPQKGYSKKDFNLDDCHKMIDFYKESIEKHDEWKSFKFNFKPTQEYIDLSEF |
| | | | | | YSDVSSQGYKLDFLGISNKYVEKLVEDGKLYLFQIYNKDFSNYSKGKKNLHTIYWEELFSEENLK |
| | | | | | DVVYKLNGQAEIFFREKAFDAHITHPRNQDIENKDPIKNKLYSKFQYDLIKDKRYTYDKFLFHCP |
| | | | | | ITINFKAPANALRFNDRINEIIKNNSEDVKILSIDRGERHLAYYTLLNSKGEIEKQESFNLVQDKFG |
| | | | | | RNSDYHNKLNKIEGDRDKARKNWNTIENIKELKEGFLSQIIHKIAKIVVEENAIVVFEDLNFGFKR |
| | | | | | GRFKIEKQIYQKFEKMLIDKLNYLMFKDRDKSSFGGCLKAYQLTSKFDTFQKLGKQTGVIFYVN |
| | | | | | ASYTSKICPVTGFTNHIYPKYETLDKSRDLFKKFKSIKYNADKDYFEFEYMVSDFNKTLKLIKNE |
| | | | | | WKLCTFGERLITIKDKKTGYFKTESIDLTQRLKDLFESYDIDYENDFDLRDLIIKQTESDFFKSLIF |
| | | | | | YLKTLMSLRNSYTESEVKDFMRKEGDSFNLNNYDYILSPVEKDGVFFDSRNVDNLLPKDADANG |
| | | | | | AYNIGLKGLMIIDKIKNSPEVKSLNLKIEKQDYLNFVIGRNM |
| MG29 | 6412 | MG29-89 effector | Protein | Unknown | MKSTLDQFSHLYPMSKTIRFELIPQGATTANIESRGFLKKDEERAESYKKMKETIDRFHQDFIEK |
| effector | | | | | AMAHVRLSNLEDFENLYNAPNEEKKEDKYKKQLEKVQERLRKEIAKGFKSGEVKAIFLKIDKK |
| | | | | | DLVTKLLEKWIEENNLEDVHFDPEFKKFTTYFSGFHQNRKNMYTDKAQSTAIAYRLVHENLPKF |
| | | | | | IDNINIFKKVSEIPELKQNLEKLYKEIEEYLGIVSIEEAFELGYFNEVLSQKGIDVYNLILGGRSEKE |
| | | | | | NKKKIQGLNEHINLYNQKQDKKNKIPKLKVLYKQILSDRTSTSFLPDAFEDDDNSTASQKVLAAI |
| | | | | | HQFYHTQLLDYQPSDKAETINVLKSFQGLLADINNFDLDKVYLRNDKSISTIAQKMAGNYGVLR |
| | | | | | DALNYYYENKIDPEFQIKYDKATTDKKRENLDKEKSKFTRQSYISISTLQTALDTYVESFDETHDV |
| | | | | | KQVYSPTCIADYFKDHFKAEPKEGSDKEFDFVSNIEAKLSTIKGLLNTPYPENERLQQDKKKIDAI |
| | | | | | KLFLDSIMEYLHFIKPLALPEDFTLEKDEHFYTLFEEWYEQMQLLIPLYNKVRNYATQKPYSTEK |
| | | | | | FKLNFENSSFLSGWAPDYNTKGGLIIKKQDNFYLCIVEKKLKKEDVEFLKTSPEDHLAHRVIYDF |
| | | | | | QKPDNKNVPRIFIRSKGTSFAPAVQKYDLPVESIIHIYDEGLYKTDFKKENPAVFKKSLVQLIDYF |
| | | | | | KLGFSRHDSYKHYDFEWKESEEYENIADFYQDVINSSYELRDEAINFDHLHQLIDQGKLYLFQIY |
| | | | | | NKDFSKHSKGKPNLHTMYWKALFEKQNLKDVVYKLNGEAEMFYRKKSIQDKNRVVHKKNIKV |
| | | | | | ARKFYKDDKKTERVPDETVLRLNKFYKGQIQESGLKKEDLKFKDNYSLFHEQGKDIDLIKDKRY |
| | | | | | TVDKFQFHVPITLNFKAKGNDYINNEVLDYLKDNPDVNIIGLDRGERHLIYLTLIDQEGNIIEQET |
| | | | | | LNSIVNKKHAITTNYHQLLDDKERERDKARKNWGTVETIKELKEGYISQVVHKIAKMMVEHNAI |
| | | | | | VVMEDLNMGFKRGRFKVEKQVYQKLEKMLIDKLNYLVLKDKKPDEPAGIYNALQLTNKFESF |
| | | | | | QKIGKQSGFLFYVPAWNTSKIDPTTGFVNLFHVKYESVNKAKTFFSHFKSIRYNKNQGYFEFDFD |
| | | | | | YNDFTTRAEGTRSEWTVCTYGERIKTFRNPDKVNQWDNQEINLTEAFEDFFGKHEIVYGDGTDF |
| | | | | | KDQISVKDNKDFFAELIHLFRLTLQMRNSITNSEVDYLISPVKNSSGTFYDSRKADASLPKDADAN |
| | | | | | GAYHIAKKGLQWVNQIQEFDGDDWKKLKLNKTNKGWLKFVQCNT |
| MG29 | 6413 | MG29-90 effector | Protein | Unknown | MSKTLRFELKPIDDTKKIILEGFVISDQERAKDYKELKKIIDEYIIKYYIEKSLSKNNILSLYDLRNL |
| effector | | | | | ADCIKKLRSLQQLKKKQENEESIEKQQESLRKKIVQAFQLDTKEKRNRLFGKELIEEVLPEWLN |
| | | | | | SSSLKDIEHKKEIVKKFSKWTTYLTGFNENRKNMYSYKEQSTAISHRIINENLPQFLLNLNTYEKI |
| | | | | | EKNFPELETQLESLKEQLKEEFEYFNVRSIKDLFKIGFFNKCLTQKGIDNYNVIIGGKVLEGDQKI |
| | | | | | QGINEKINLFRQAQSNKNDRETIRKISNKNLPLMQTLYKQILSERESHSFYFEEFKSRNEVLESINQ |
| | | | | | YWESIFKKEGDKSILQKTENLFMNLKKYELDQIYFKNGDLPHVSNKIFEDYSVIKSALCFQAEKK |
| | | | | | FSTKKEREQYIKQDFFNFQEIQTALSGYLKENEEIQASEQFSGSEEIKKVLSADSNKGQNNILAVY |
| | | | | | FNLEFSEKQYNNKSLLGFMEELNRHFKEISLSKTQNEFDEKETQIIQNFLKPFIPIQFKKSCSYNG |
| | | | | | RETPKKQDQYNMGRGGVGLVDLLQIIKPVYLKKDRKKIMDLEKDASFYNEFEELYNKLSQVFP |
| | | | | | LYNKVRNYITTNKNQTKKIKINFEDSTLLDGWYVNKETDNLSVILRKKDKVIGWKDYLGVMNT |
| | | | | | HGMREANKIFDYHIKSGKSDKKQKEKNRLKQKVLHKEDNENFYEKMNYKQISNAAKDIQNLIKI |
| | | | | | DGRVCRKTKNLEDIKKKYLPSEIWKIKQNESYKGADKSGEDLKKFINYYKDIAVHYWKQFNLSF |
| | | | | | KDSGEYRDFKDFTDDINSQGYKVWFDKIKSSYIEDKVKAGEFLLFEIYSKDFSADSKGRPNLHTS |
| | | | | | YFKLLFEECNLKDIVYKLNGQAEIFYRKASKQKKISHRANVSIENKNPDNLKKTSKFKYDLIKDR |
| | | | | | RFTEDKYFFHVPIDLNFKARSTSPFNFNQDVLQFLKNKKDINIIGIDRGERHLAYWTVINQKGTIL |
| | | | | | EQGSFNKITTNYKGQNQKNGKMTTNYHALLEGREKERDENRKAWTKIENIKELKAGYLSHLVH |
| | | | | | QIAHLMIKHNAIVIFEDLNRGFKRGRMKFEKQVY |
| MG29 | 6414 | MG29-91 effector | Protein | Unknown | KVFSIADIETALDKEIDGANFAAANIKAEYYKKTDDIFLNYFSNRSKEILKNLLASWKNLEEYGVL |
| effector | | | | | ELKELDEKRGKEGEKGYEQIARLKTFLDNANEFLNFIKDWNVKTDKLPNNAIHDWYEKLNDFIN |
| | | | | | QFHIITLYNKVRNHVTKKPYSLDKVKINFENSTLLAGWDRNKESNNCGILLEKSGLYYLGIMTSL |
| | | | | | SNKLFDYEFSEKDTTKIRAQKLVLAEKVLDKNGTNSYRKVNYKLLPGPNKMLPKVFFAKSNSKL |
| | | | | | FNPSAKITKIKVNKLYSKENIEKYGIQNLHDYIDFCKDALCRHPEWSKAYGFTPASFRKTTQYKSI |
| | | | | | NQFYKDVETMGYSISFANVREAYINEKVENGELYLFQIYNKDFSQERKKERANRKENLHTYYWK |
| | | | | | ALFDERNLKNIVFKLNGQAEIFFRKASIKLSDEKKCKGDHCEKLKDKFNYPIIKNRRFTENKFLF |
| | | | | | HCPIGMNFKAPSIPGRENTKINTFLQNNPNINVIGIDRGEKHLLYYSVVNQDGDTIKQGSLNTIAN |
| | | | | | GFIPKGETVERCIDYHAKLDEKEKKRDLARKSWGVIENIKELKSGYLSQVVHKLAKLIIKYNAIV |
| | | | | | VLEELNQGLRRGRFKVEKQVYQKFEKALIEKLNYLVFKSEKNPLEAGHYLNAYQLINKFESFEK |
| | | | | | VGCQSGILFYTVATYTSGTDPVTGFLKNVYVKYESIEKSVKFWNSFDSIIYNVEKDRFEFTYTLGE |
| | | | | | ISSTKANTGKNESKIVKNQWTVCSSVERSRYIKPELTEEQKQILDYKGIGKLGTHELFKVTDKLK |
| | | | | | ALFDGEINYRENPKLKSRLCTIKDAAFHRKCLYYFNAIMNMRVTDSGANKGTNENDFILSPVEPF |
| | | | | | FDSRCGCKKLPENGDANGAYNIARKGICILKKLNAVPDISRPEILIDKKIWQDYAQSCETLKQQL |
| | | | | | EKMK |
| MG29 | 6415 | MG29-92 effector | Protein | Unknown | MNTSLQPNEKLVQQKDKTLLIKNYLDSIVNLLHFIKSLKPREELSQKDEAFYGRFDELYEALNVI |
| effector | | | | | TPLYNKVRNHLTKKPYSTEKYKLNFENSTLADGWDLNKEADNTTILLRKEGNYYVAVMDKKHN |
| | | | | | KIFRDIPASAKGEAVYEKMVYKLLPGANKMLPKVFFSKSRIEEFNPSTELLENYKNETHKKGESF |
| | | | | | NIQHCYNLINFFKSSICQHEDWKHFNFNFSETGTYEDLSGFYREVEHQGYKITFVNISESYIHKLV |
| | | | | | EEGKLYLFQLYNKDFSKYSKGKPNLHTLYWKMLFDETNLKDVVYKLNGEAEVFYRKKSIEDKN |
| | | | | | KIIIIKANQPISNKNPENVKKQSSFQYDITKDIIRFTKDKFQFIIVPITMNFKAKGILNVNNEANKYL |
| | | | | | RNNPDTHIIGIDRGERHLLYLTLINQQGEIIKQESLNIVANEKQKTDYHKLLEAKEGKRDEARRD |
| | | | | | WGTIENIKELKEGYLSQVVHKIAEMIVDYNAIVVMEDLNFGFKRGRQKVEKQVYQKFEKMLID |
| | | | | | KLNYLVFKTPKPNQPGLLNALQLANKFESFKKLGKQSGFIFYVPAWNTSKMDPVTGFVDFLKPK |
| | | | | | YESVDKAIAFIKQFDAIQYNKAKQYFEFVFDYSNFTEKAEGSKTKWTVCTTNTERYVWNKTLNN |
| | | | | | GKGGQEHNNVTEKLEVLFGNAGITYGNGENIISKITEQTGAEFYKALLKLLSITVSLRHNNGEEG |
| | | | | | EKEQDYILSPVAPFFDSRKATDTLPKNADANGAYHIAKKGLWVLEQINKCEDFKKLKLAISNKE |
| | | | | | WLEFVQKSSIKTNYPQPFA |
| MG29 | 6416 | MG29-93 effector | Protein | Unknown | MNTTVFTNQYPLSKTLKFELIPQGKTLENIQHEGLLEQDNNRAVSYQKIKRLIDEYHKVFIENSL |
| effector | | | | | KGMKLVELEVYSEWYQKKDKVDADKKAFEKVKEALRKQISLTFSSQDIYKTLFSKELIKEDLLA |
| | | | | | FVKQEDKSLVNEFKDFTTYFTGFHENRKNMYVADEKSTAIAYRLINENLPKFIDNLNIFLQIEDKS |
| | | | | | VSLIADFNKALQEMEEIAQGRTLEDIFTLSFFNETVTQHGIELYNIIIGGRTGENGKSKIKGINEYI |
| | | | | | NLYNQQQNNKLNRLPKFKQLYKQILSDRNSVSFVLDNFENDNHLLECIEQFYQSGICHFESDGNS |
| | | | | | IDLLTTIRQFLNGLDSFDQTKIYIRNDNSITDISQKIFGDWNVIRAALTAFYEKTNPIKPRERLDKF |
| | | | | | EERKESWVSKTGYFDINTIQTALDSYDSEAIIDKYSPDCIVKHLGNIGKSKESTIDLVDTIQQNYAV |
| | | | | | IKDLLNNPYPEDEKLGTAKELVAQIKTFLDSLLNLIHFLKPLNVGNDELEKDESFYSIFTPLYEQL |
| | | | | | SEVIPLYNKVRNYLTQKPYSINKVKLNFENSTLLNGWDVNKEVDNSGILFRKNGLYYLGIMDKN |
| | | | | | NNKIFDRNVPQCQDLTTSFEKINYKLLPGANKMLPKVFLSKKGVETYNPTLENIENYNNETHKKG |
| | | | | | DTFNIDDMRKLIDYFKESISLHPDWKHFEHKFSETKSYEDLSGFYREVEKQGYKISFKNIDEAYIN |
| | | | | | KLVEEGKLYLFQIYNKDFSPFSKGTPNMHTLYWKMLFDISNLKNVVYKLNGEAEVFYRKSSIKE |
| | | | | | KNMIVHKANEPLQSKNELNTKKESSFTYDIIKDKRFTLDKFQFHVPITMNFKATGTDNINPSVNQ |
| | | | | | FLQNNKDVNIIGLDRGERHLIYYTLVNQKGEILEQGSLNEISNEKQKVNYKDLLVKKEGDRTQA |
| | | | | | RKDWNTIENIKEIKEGYLSQVVHKIATLMVERNAIVVMEDLNMGFMRGRQKVERQVYQKLEK |
| | | | | | MMIDKLNYLVFKTKATDEPGGVLKALQLTSKFESFKSMGKQSGFLFYVPAWNTSKIDPTTGFVD |
| | | | | | FLKPKYESIDKAKSFFSSFKAIRFNASSNYFEFEFDYNDFNGKAEDTQTNWTVCTVGTERYSWNK |
| | | | | | KLNMGKGAIEKIDITQALQLLLDEANILYAAGNNLIQDINDQNNADFFKKLIKLLSVTLSLSHSNG |
| | | | | | LSGEAEKDFILSPVKNDQGQFFNSNDFDGRLPKDADANGAFHIALKGLWVLRQINEAEDMKKVK |
| | | | | | LSITNKEWLQFVQNKHYKS |
| MG29 | 6417 | MG29-94 effector | Protein | Unknown | MNENNSIWDNFINKYNLSKTIRFELKPVGKTIDFIKENGLIEEDKQREKDFNEVKKIMDEYYVEFI |
| effector | | | | | ENCLKNIKLDLSDLQEYYTIYFELKKDKYNSDLKKQFKNIQKKIANNMYQQIKDVDNFNNIFDEK |
| | | | | | FVNVVLPKWLKEKGREQDEMLLSKFKKWTTYFDGFFNNRQNVLSNDLIPTSIFYRIVVDNLPIFL |
| | | | | | DNIAKYDKLKKINGFPLESIEKNFAKYLNNVSLDYFFSLENFNNLLNQEGIDLENLILGGYVENNS |
| | | | | | KICGLNESINLYSQKPENKETSKQLKQLIMMPLYKQILTEKKSFSEKFGIIQDNQELVNLIDDIYT |
| | | | | | NNYVLNFDNLQKLIKNLNEYDLNQIYVNTLSLQKISKSIFKDLFVIRNGLKEFIKNKEHIKSDKKS |
| | | | | | EKKLEEILNQKYFSIFEIQEGVKLLKLSKEGNSFSDNFMIDYFLENINDKLFETITNNYNQFNSITV |
| | | | | | NLLNKIRLEDIPTIKDLLDSLKKLFDNIKPLYVNLNMGTNTKIQEAYNLDSLFYIEFNKIYIAFSVII |
| | | | | | PTYNKVRNYVTKKQKNVKKFKLNFNCPVLLKGWDVTKEPENHSVLFRKDGDYYLGIMPKGHT |
| | | | | | HMFSNIENIDNDGEYYEKMVYKQISDASKDIQNLFVKDNKTQRIVGRKEKEGDNKGKNVELENA |
| | | | | | RKKYLPEDIQEIKKKKSYLRSSPSFNEADKNRFIDYYKERVIDYENYNMFNFKFKESEEYLDFNDF |
| | | | | | IKDVDNQGYKIEFIKINEQFIMDSVNTGKLYLFQIYNKDFSKNKCESNKNSKPNLHTIYWEELFSE |
| | | | | | ENLKDVIYKLNGEGEIFYRECSKAIPKEVTHPKNIPITNKNPINNKQTSIFPYDLIKDKRYTEDKFL |
| | | | | | FHCPITINFKQNNMLKGFNQQIISYLKENNVTILSIDRGERHLLYYTLLDLQGNIIKSGSLNLVSDD |
| | | | | | VKRQWNYHDLLDQREKERDKARKDWMPIEAIKNLKEGYLSKIIHDISKMVIENNSIIILEDLNFG |
| | | | | | FKNGRFKIEKQVYQKFEKMLIDKLNYLVFKDKPKTEVGGSLKGYQLTDKFVTFNRLKKQSGILF |
| | | | | | YVDAKYTSAIDPTTGFFDMIYPSYTSVDNSIALFKKFNYIKYNTKEDLFEFNFNFSKFNTELKLYK |
| | | | | | DNWSIWSNGVKLVNYRNPNKNNEWETKEVIVNNQLKKLFGDYKINYDNDEDLIPQIISNTTADF |
| | | | | | HKQLIENLKLVLKLRNSRINSDDDYILSCVKNKDGVFFDSRESSNNLPKNGDENGAYNIGIKGIIL |
| | | | | | LNKIRENKEIKKITKEEYINYLIKRGK |
| MG29 | 6418 | MG29-95 effector | Protein | Unknown | MKLNKFTHQYPISKTLRFELKPVGETADYIEDFKSQYLKDIVIQDQQRAEDYESIKVIIDEYHRHY |
| effector | | | | | IEEKLSEPFDKKTGELFISGDEFENAFSYYQRFRENSKDEKARKEWIEVQNSLRKSLVKVFSDRK |
| | | | | | KRLFQKELITKELPSWLKEKGEWEDKKNVVENFNRFTTYFTGFNENRENMYSHEEQSTAISFRL |
| | | | | | MNENLPKYFNNCIQYHKAIESYDGLSFTVNPDLLNEMGVSILSEIFQPSYYIQLFTQSGIDKFTELL |
| | | | | | GGFTKENGEKVQGLNETINLFRQQKAIKAKAFPNFISLYKQILSDRETSSFIPDQFENDNDLLKSL |
| | | | | | GKFIKEMVKEDGLFKKLEDSIKLITDADLHRTFIKNGVEITKISQSIFGNYSILKSAIYHHAESVLY |
| | | | | | PDPISGKISEALKEKRIKYVNKQVVFSIAELETILSNYASQMTDDNPDKEIIAQCENSEHPIRTYFL |
| | | | | | NAIENVKNDKDIEFGKAIENVLPLISLENLNKGKDGQAQTHKIQKMLDAFLAVTHAVKPLHLVK |
| | | | | | GRKPIDIPDMDMGFYAEFSKAFENFEQLVITLYNKTRNHLTKKTFSTDKIKINFENPTLLDGWDA |
| | | | | | NKEKDNSGVLFEKDGNYYLGIMHPKHKNIFNYIKGINDIESEKRSLSKDELFNKIVDGESEHYQKI |
| | | | | | VYKLLPGVNKMLPKVFFSGRRIDFFAPSTEVLKIRNSASHSKNGSPQKGFEKEDFNLKDCHTIIDF |
| | | | | | FKKSIEKHPEWKEFEFEFSPTSSYEDLSGFYREVEHQGYKMDFHPIKKSYIDQCIEEGKLFLFQIY |
| | | | | | NKDFSPYSKGKPNLHTLYWKALFDTENLKDVVAKLNGQAEIFYRKHSIKKDERTIHRANKSLQN |
| | | | | | KNENNSKKTSLFEYDIIKDRRYTVDKFQFHVPITLNFKMEKMTQFAHNEKVNQMIVKSENTHVI |
| | | | | | GIDRGERHLLYYSVINPKGHIVEQGTLNTISTDKGYEVDYQQKLDSKEKARDTARKSWTTVENI |
| | | | | | KELKAGYLSHVIHKIAFLIEKYNAIVCLEDLNFGFKRGRFKVEKQVYQKFEKALIDKLNYLVFKD |
| | | | | | AKPNEPGHVLNAFQLTAPFDSFKKLGKQTGLLYYVQASYTSKIDPVSGFINFLYPKYESLLKSKIF |
| | | | | | FESMDGIRYNADKDYFEFSFDYRKMTPNRNLEGYQTKWTACTFGEKRFKNIRNAHGNWESVEV |
| | | | | | NVTEALKKILKNEDVDFKSGHDLRFEISKVKSTKFYKKLFKLLQITLSLRHSKTGTDEDFILSPIV |
| | | | | | DENGKFFDSRNATKDQPMDADGNGAYHIALKGLWNLEQIRNWDGESRLNLAMKNVDWFSFAY |
| | | | | | QKPFKK |
| MG29 | 6419 | MG29-96 effector | Protein | Unknown | MLQNFTNQYQLSKTLRFELRPVGKTKEHIEAKGLIIQDEQRAEEYKEMKKIIDRYHKAFIEDALN |
| effector | | | | | GIAIEGLETYEKLYFAIKDEKGKKEFEKLQDTLRKRIVELFKKHPKWSTLFKKELIRNELLTFLD |
| | | | | | SEEIPEEQKINEKEIVLKFMDFTTYFTGFHENRANMYIDEALHTAVAYRIVHENLPVFLGNKKTF |
| | | | | | EQIATKYPELIADSKDAIESHLFGAVFEDMFTLAYFSHTLAQNHIDLYNTMIGGKVSNDGSKIQGF |
| | | | | | NEKINLYRQKHGLSKRDLPNLKPLYKQILSDRESLSWLPEAFEDKNELAEAIKTFYQNNIIAFECC |
| | | | | | DGKVNLLEKFPEIFKENQYYDLSKIFIKNDKSLTDIAQAIFGKYGVIKEALWEKHLRDNPKAAKS |
| | | | | | KDISADEERFFNKKDTYFSINDIHIALKAGEDRVQTGLDFSINDIHIALKEAQSPSDILTYFSNEIKP |
| | | | | | LTKAVQVAYKTWLDDQEKTERIKEVMDALLAWQRFLKPLSVKSDVDRDIAFYATFESYFESLSA |
| | | | | | VVKLYDKVRNFMTKKPYSLEKFKLNFENSTLLDGWDVNKETDNTAILLEKNGLFYLGIMDKKH |
| | | | | | NRVFKNTPESQDDSSYRKINYKLLPGANKMLPKVFFSNSRIDEFAPSSDIISNYKKGTHKKGEIFD |
| | | | | | LEHCHKLIDFFKSSIQKHEDWKNFEFKFSDTASYKDLSGFYREVEQQGYKITYKNISQSYIDTLVS |
| | | | | | EGKLYLFQIYNKDFSPYSKGTPNMHTLYWRALFDEKNLADVVYKLNGQAEVFYRKKSIIYSDEV |
| | | | | | MQKGHHAKELVGKFDYPIIKDRRFAFDKFQFHVPITLNFKAQGYTNLNAIVNEMIASGKEDIKII |
| | | | | | GIDRGERHLLYLSLIDAQGKIVEQYTLNQIINSYNGKDHVINYHEKLAKKEDERAKARVNWGTV |
| | | | | | ENIKELKEGYMSHVIHRIATLMVEHRAIVVLEDLNFGFKRGRFKVEKQVYQKFEKMLIDKLNYL |
| | | | | | VDKKKSPNELGGVLNALQLINKFESFEKMGKQNGFLFYVPAWNTSKIDPVTGFVNLFDTRYASV |
| | | | | | EKSKEFFGKFKSIRYNSEKDYYEFEIDNYTQFNPKAEGTRQNWTICTYGDRVLTYRNSEKLNQW |
| | | | | | DNKTVQLTDGFKTLLNGQADNLKEYIVAQNDKAFFEKLLGLFRLTLQMRNSITGTDIDYLVSPV |
| | | | | | VDENGVFYDSRVCDDTLPKDADANGAYNIARKGLMVVKKIKEAQDIKKPDLKITNKEWLQFAQ |
| | | | | | R |
| MG29 | 6420 | MG29-97 effector | Protein | Unknown | MDLKNNNLSEFSNQYQLSKTLRFELKPQGKTIEHIKKKGLISKDEARAKSYEKMKKTIDGFHKY |
| effector | | | | | FIEVAMAQVNLSFLDEFEQLYNAPTEEKKDDTYKKAFEKVQNNLRKEIVRGFKVGEAKDIFSKID |
| | | | | | KKELITKLLEEWISKQQNDDIYFDEKFKTFTTYFGGFHENRKNMYTDKAHTTAIAYRLIHENLP |
| | | | | | KFIDNIKIFEKVKTVPEVYKNCSTLYTNIEAYLNINSIDEAFELAYYNEVLSQKEIDVYNLIIGGQT |
| | | | | | KEEGKKKIQGLNEYINLYNQKQEKKNRIPKLKPLYKQILSDRENISFLPELFEESQDVLDAIESYY |
| | | | | | KANLVDYKPDDKDDTENILKELYSLLKGVNSFDTNKIYIRNDKSLTDISKAIFGDWAIIDAALEFE |
| | | | | | YIQDITIPKSGLTKKQEKEKERYLKQPYFTIQEIEQALKAYRNENEVLADFTEGMVGNYFYSHFK |
| | | | | | TKTDSDKEFDFVSNIEAKYSCIKGVLNTKYPKNQKLNQDKVTVNNIKVFLDSLMELLHFIKPLAL |
| | | | | | PNDVPFDKDETFYGHFETYYEQLQLLIPLYNKVRNYATQKAYSKEKFKLNFENSTLLDGWDVNK |
| | | | | | EEANSCVLFQKEGLYYLGIMDKNHNKVFRNLPSTSSKNTYNKINYKLLPGASKMLPKVFFSSKNI |
| | | | | | AYYNPDKEILRIRNHSTHTKGGSPQKGYEKQDFNVKDCRKMIDFFKTSIHKHPDWKKFGFEFSE |
| | | | | | TAHYNSIDTFYREVESQGYTITHTAIDNDYIDKLVNEGKLYLFQIYNKDFSPYSKGKPNMHTLYW |
| | | | | | KALFEPDNLNDVVYKLNGQAEVFYRKKSIKEKHKVIHKAQEPIINKNPLAQKKTSVEDYDIIKDK |
| | | | | | RYTVDKFQFHVPITLNFKAVGNEYLNTNVLDYLRDNSDVKIIGLDRGERHLIYLSVIDQEGNILEQ |
| | | | | | ESLNTIINKEHNIHTPYHNLLDKREKERDSSRKEWGTIATIKELKEGYISQVVHRITQLMVKHNAI |
| | | | | | VVMEDLNFGFKRGRFKVEKQVYQKLEKMLIDKLNY |
| MG29 | 6421 | MG29-98 effector | Protein | Unknown | MLKQFTNKYQLSKTLRFELIPVGKTKDILDKKGLVLEDEKRSEEYKIVKTLIDDYHRYFIQEALS |
| effector | | | | | RKNLLDLEKFENLFLKKDKNKDEEEDFNKIKTDLRKQIVSFFESNELFKNIDKKELIKVDLLNFL |
| | | | | | TDENDKNIVKKFSDFTTYFTGFHENRKNIYSADEKASSIAYRVIHENLPIFISNKVAFLNILKEYPEI |
| | | | | | IKNTQKNLENHLLGAMVEDMFNLENFSLTLTQIYIDIYNTILGGKTLEDGTKIQGLNELINLYRQ |
| | | | | | KNSIEKRKLPNLKPLHKQILSDKETMSWILEAFTKHEEIETAIEKLYHDNIVDFYCCDKRINILDE |
| | | | | | FENLFSKNDDYDLTKIFIKNDLSITSISQDIFKDYKIIKDALWQKYLNDNPKIAKSKDLSADEEKYF |
| | | | | | SRKNSYFSFFNILEALKFVEIKLDFDLFEYFKNIVKEKSDLIKVSYFEWEKDKNNKKSTKDLLDNI |
| | | | | | LNLQRAIKPIYVKSELDKDIVFYAMFDTYFESLNKIVKLYDMVRNFESKKPYSIEKFKLNFENSTL |
| | | | | | LNGWDLNKETDNTSLLFEKDGLYYLGIMNKKHNKSFLNKKESEENNCYKKIEYKLLPGANKML |
| | | | | | PKVFFSNKNIDFYSPSDNLLENYKNGIHKKGTTFDLNFCHELIDFFKSSINKHPDWKNFNFQFSNT |
| | | | | | LEYNDISDFYREVEQQGYKISFKNIEIKFINNLINEEKLYLFQIYNKDFSPYSKGTPNLHTLYWKM |
| | | | | | VFDKENLKNVVYKLNGQAEIFYRKKSIEYSDDKLNKGHHNEDLKDKFNYPIIKDRRFTIDKFQFH |
| | | | | | VPITINFKALGKNNINNDVNEFIKQNHKDIKIIGIDRGERHLLYLSLIDNNGKIIEQYSLNEIVNNYN |
| | | | | | NQEFKVDYQDLLDKKEKDRAFARENWGIIENIKELKEGYISQVIHKIAKLIVEHNAIVVLEDLNF |
| | | | | | GFKRGRFKVEKQVYQKFEKMLIDKLNYLVDKKITNDEIGGVLNALQLTSKFESFERLGKQSGFL |
| | | | | | FYVPAWNTSNIDPATGFVNFFDTKYQSVEKAKEFFSKFDYIKYNIKKDYFEFAFDYNNFTQKAKD |
| | | | | | TKTKWVLCTYGTRIKTFRNKEKNNQWDNIEVDLTTEFKKLLQATENKDLKEFITSQNTKDFFEQ |
| | | | | | LLYLFRLTLQMRNSITNSKIDYIVSPVADKNDIFYDSRNLSIALPKDADANGAYNIARKGLMIVEKI |
| | | | | | KKSDNNKIDMKITNKEWLQFVQGK |
| MG29 | 6422 | MG29-99 effector | Protein | Unknown | LRNHIANCFKDEKELTIVGKDFIKKILPQWLEDSGSLEYKKLIDEFKDRVTYFTGFDNTRKNIYT |
| effector | | | | | NQAIATSVAYRVVHDNLPIFIDNLQRFKKLQDYREQIDLVQIERDLKVNINEMMQLDYFNQCLTQ |
| | | | | | TGIDLYHQLLGGIEAKEGVEKVQGLNERVNLAQQQLNKNSIDANSKQTKIKLPQLVTLQKQILS |
| | | | | | EKRSGAFANPIDNDRELCSLLDKVVYKNDRLLVSIDKTNTDTGEIKQQQVDVNQLMTNTIDALN |
| | | | | | HADLEQVYIHSDMLNMLSQRKLGVWSFLKEEVWQPYIDSQYSKKTEREKVQKMPLISIADLHNS |
| | | | | | INYFLKQNEGHDAFNNENQQHTALAKLYHWYNDSGEKPLVTYLSNQWQLLNIGQGKEVKSLSQ |
| | | | | | LHQALTPILQKYGTSLEEKLKSNKEAVRQIKEYLDALTDLQHLVKTYQFKVTKKDAKNVAIKAL |
| | | | | | LQDSHFYNHYQQLLDAVSMIVPIYNRVRNYLTKKPYSIEKYKLNFENGTLADGWDVNKESANFT |
| | | | | | VILRKKNDRNKYDYFLAIMPTGKGLNRAFEAGNLATTKNKDGYEKLFYKYLPGPNKSLPKSFLS |
| | | | | | QKGRTNYKPSEELLENYKNKTHTKGDAFNLQHCRDLIDYFKKCIQKHPDWGVFNFTFSNTDSYE |
| | | | | | DISHFYREIEQQGYKVWFENIAQQYIDNLVSAGKLYLFQLYNKDFSPYSTGKPNLHTLYWLSLFS |
| | | | | | SQNIADPIYKLNGEAELFYRPKSIEKRNVTIHRKNQPIKHKIGVPQNSQFGHDIIKDKRFTENYYQ |
| | | | | | FHVPITINRASVTDKNLNDAINQYSCDSPNLTILGIDRGERHLAYFTLIDQNKKILEQGSFNKPNG |
| | | | | | GQDYQKLLDKKEKGRGEARKSWSTIENIKELKAGYLSQVIHKICQMVIEHNAIVILEDLNFGFKR |
| | | | | | GRFKIEKQVYQKLEKMLIDKLNHLVFKDKAVDEAGGLRNGYQLTAPFTTFEKLGKQTGILYYV |
| | | | | | PAYHTSKVCPKTGFVDLLYPKYENLTKAKDFFSKFDFIRWNQQNNYFEIGLDYNKFKAKKDITG |
| | | | | | LRTKWTICTYGDRIHQTKGKVSQQWESRDINLNKQWQTKLEESNIAYTHGNCIVSDIVAKDSIEF |
| | | | | | WRSLFWVLKMTLQMRNSKPNSTDAKDDYLLSPIAYQPNQFFDSRKASDNEPKDSDANGAYHIAL |
| | | | | | KGLMMLEQRKQQVKKLDFSNKAWYQYIQNQ |
| MG29 | 6423 | MG29-100 effector | Protein | Unknown | MDLKNNNLSEFSNQYQLSKTLRFELKPQGKTIEHIKKKGLISKDEARAKSYEKMKKTIDGFHKY |
| effector | | | | | FIEVAMAQVNLSFLDEFEQLYNAPTEEKKDDTYKKAFEKVQNNLRKEIVRGFKVGEAKDIFSKID |
| | | | | | KKELITKLLEEWISKQQNDDIYFDEKFKTFTTYFGGFHENRKNMYTDKAHTTAIAYRLIHENLP |
| | | | | | KFIDNIKIFEKVKTVPEVYKNCSTLYTNIEAYLNINSIDEAFELAYYNEVLSQKEIDVYNLIIGGQT |
| | | | | | KEEGKKKIQGLNEYINLYNQKQEKKNRIPKLKPLYKQILSDRENISFLPELFEESQDVLDAIESYY |
| | | | | | KANLVDYKPDDKDDTENILKELYSLLKGVNSFDTNKIYIRNDKSLTDISKAIFGDWALIDAALEFE |
| | | | | | YIQDITIPKSGLTKKQEKEKERYLKQPYFTIQEIEQALKAYRNENEVLADFTEGMVGNYFYSHFK |
| | | | | | TKTDSDKEFDFVSNIEAKYSCIKGVLNTKYPKNQKLNQDKVTVNNIKVFLDSLMELLHFIKPLAL |
| | | | | | PNDVPFDKDETFYGHFETYYEQLQLLIPLYNKVRNYATQKAYSKEKFKLNFENSTLLDGWDVNK |
| | | | | | EEANSCVLFQKEGLYYLGIMDKNHNKVFRNLPSTSSKNTYNKINYKLLPGASKMLPKVFFSSKNI |
| | | | | | AYYNPDKEILRIRNHSTHTKGGSPQKGYEKQDFNVKDCRKMIDFFKTSIHKHPDWKKFGFEFSE |
| | | | | | TAHYNSIDTFYREVESQGYTITHTAIDNDYIDKLVNEGKLYLFQIYNKDFSPYSKGKPNMHTLYW |
| | | | | | KALFEPDNLNDVVYKLNGQAEVFYRKKSIKEKHKVIHKAQEPIINKNPLAQKKTSVFDYDIIKDK |
| | | | | | RYTVDKFQFHVPITLNFKAVGNEYLNTNVLDYLRDNSDVKIIGLDRGERHLIYLSVIDQEGNILEQ |
| | | | | | ESLNTIINKEHNIHTPYHKLLDKREKERDSSRKEWGTIATIKELKEGYISQVVHRITQLMVKHNAI |
| | | | | | VVMEDLNFGFKRGRFKVEKQVYQKLEKMLIDKLNYLVFKDKLPNEAGGLYNALQLTN |
| MG29 | 6424 | MG29-101 effector | Protein | Unknown | FLKPLHIEDGNKKDNKLQQALELDADFYNNFNELYSKLKEVIPLYNKVRNYITQKPFSTKKFKLN |
| effector | | | | | FQNSTLLLGWDENKETSNWSVLFRKDGKYYLGIMAKGNNKIFENIGSKETNKSDGFYEKVRYK |
| | | | | | LLPGPNKMLPKVFFSKRNIESFEPSEEIKSIRNHSSHTKNGKPKEGFEKKEFNLRDCRKMIDFYKR |
| | | | | | SLKKHPEWNEFDFNFKETKKYEDLSEFYRDVSNQGYKITFEKISEPYIRKLVDEGKLYLFKIWNK |
| | | | | | DFSKYSKGKPNLHTIYWKMLFDENNLKDVVFKLNGEAELFFREKSISRKITHPKNKSIKNKDPFQ |
| | | | | | GKKESKFNYDIVKNRRYTEDKFLFHCPITINFKSKEQSWEINNQINKKIKKSSDDIYILGIDRGERH |
| | | | | | LAHFTLLNPKGDLVLQESFNIIYDDLKRKRNYHKKLDKLEGSRTEARKNWKKIANIKEMKQGY |
| | | | | | LSQVIYKIYNMAIDKNAVIILEDLNFGFKRGRFKIEKQIYQKFEKMLIDKLNFLVFKDMGKKNVG |
| | | | | | GPLRAYQLTRKFESFQKLGKQSGIIFYVPANYTSKICPMTGFVNLLYPKYENVRKSKNFFKNFKF |
| | | | | | IRYNPDENLFEFNFNYSDFKGKNKSEAELKRDNWSIYSFGKRLFNKKKKNSREFETQEIDPTAEL |
| | | | | | KKLFMDNGIDFEDGNNLRGKICSSDDAKFFKSLTFLLKRVLQLRNSRTGGGEDYILSCVKDKHG |
| | | | | | NFFDSRKAENGQPQDADANGAYHIGLKGLMLMKRIKDSDIDRKIDMRIKRNDFINFVIDRNK |
| MG29 | 6425 | MG29-102 effector | Protein | Unknown | MKQKSVWNNFTNQYSLSKTLRFELKPIGDTLQNIKEKGIIEEDKEREKRFNEIKQLMDEYYKDFI |
| effector | | | | | ERALKTVHIDQKDLKAYQEVYLTLKKSKQKKESYEKLEKKYLANQKLLRNEIYKKIKEFKEFN |
| | | | | | YLFKKEFVNKLLPEWLDEKKRFAEANKVREFGRWVTYFTGFFENRKNVFSNEPIATALIYRIVH |
| | | | | | DNFPKFLDNIERYEILKEHKVSFKEVEKNFKNELNGSLDAFFSISTFNDCLNQEGIDRENMIIGGKS |
| | | | | | TEDGHIIKGINQVVNEFSQKHDEKKIRKLKMMPLFKQILSDRESASFIPDKFKNDKELIDSIITYYK |
| | | | | | NQDFNKLKNVLSRLHECDLNQIYIRNDGRLNRLSKELLGDWEFINNGLKEYARSELNKNTDKKL |
| | | | | | DDWFKKEFFAIAEINEGIKRINPDISLKEYFASLKREDKNIVQDIKKNYKEFKKIEVTSDSSLLSKK |
| | | | | | REKDIETIKAFLDSIMDLFHFIKPLYMNSDNAHDIDSDFYIKENKSYEELQEIIPLYNKVRNYVTQK |
| | | | | | PFSTKKFKLNFQCSSLLGGWSSSFTTNAGLILRKDGNFFLAIVPRSLDKDTVNRLKQKGNTIDVL |
| | | | | | NYDFQKPDNKNIPRLFIRSKGENFAPAVQKYNLPINDVLKIYDKGYFRTEYREKDEKVYRESLKR |
| | | | | | LIDYFKEGFRKHESYKHYTFEWKKTEDYKDISEFYHDTEKSCYKPRFYQVNLNVLEEMVSAGKI |
| | | | | | YLFQIWNKDFSTYSKGRKNLHTLYWQELFSSENLKDVVYKLNGEAELFFREKSLEKKITHPKKK |
| | | | | | PIDKEPRKDDKGNLKEKSLFEYDLIKDRRYTEDKFFFHCPITMNFKAGNNKWIVNQRVRDAINS |
| | | | | | GVNVLSIDRGERHLAYYTLLDPKGKILEQGSFNRISDDLGRGKDYHDKLNKLEKSRDKARKNW |
| | | | | | KEIANIKELKEGYLSQIVHKITKMAIEKNAIIVLEDLNFGFKRGRFKIEKQVYQKFEKMLIDKLNY |
| | | | | | LVFKDQKKEEPGGLLKAYQLTSPLESFKKLGKQSGIIFYVPAQYTSKVCPRTGFVNLLKVKYENI |
| | | | | | EKTKNFFRRFETIYYDKNNDYFVFEFKYSDFIDEMKKKKLVRDKWTVCSYGKRLVNRQSSKHK |
| | | | | | GFETAEMDPTKELKTLFNQYELDFKDGNNLVSQICGYQDSKFFKDLIYFFRCILQLRNSRTNDSE |
| | | | | | DYLLSCVPDKKGYFFDSRNAKTAKTDEPHDADANGAYHIGIKGLMLIDRIRSGGKQDFKIDRND |
| | | | | | YFNYIMKNGGKH |
| MG29 | 6426 | MG29-103 effector | Protein | Unknown | MAENRCVLDNLTNMYSLSKTLRFELKPIGKTLEYIEKKRLISEDEKRAESYKKMKKIIDGYHKH |
| effector | | | | | FIEIAMSQVELTKLEEFAELYNASPERKKEDDFKTKFKKVQKDLREEVVAGFKNAKEEVHSSKN |
| | | | | | DKKDTKDKEEVEKSEKSDSSKNDKKDTKGKTFFEKLFMKQLFTELLDDWVKNPEDKKLVDEFK |
| | | | | | TFTTYFRGFFENRKNLYTNKEQSTAIAYRLIHENLPKFLDNIKTFEKIKSIPELYNKCDILYGEIKE |
| | | | | | YLGITCIDDVFELDYYNNILTQKQIDVYNLIIGGRVTEKGQNKIQGLNEYINLYNQKQDKKDKIP |
| | | | | | KLKQLYKQILSDKKSASFLPEAFEESQEVLDSIRDYYQSNLIDFKPDDKEDTENVLKEIRDLLAHL |
| | | | | | KNYDFNKVYIRNDQSLTNISKKLFDDWGIIKSALEFAFLQTLKIGKKGLSKKQEKEKKNYQDQS |
| | | | | | YFSIAEIESALLAYKDETEILKYLKEDTNPVANYFHTYFKATKKDAEKEFDLIANIEAKYSCIKGIL |
| | | | | | NTEYPKDKRLYQDKKLIDDIKAFLDSLMELLHFVKPLSLPSDSPLEKDELFYGQFQIWYDQLQLL |
| | | | | | IPLYNKVRNYATQKPYSTKKFKLNFENVQLLGGWDANKESDNTSVLFRKNRLYYLGIMDKKHN |
| | | | | | KIFKNIPDASPGELVYEKMVYKLLPGAKKMLPKVFFSTSRIKEFAPSEELQKKYHAGTHKKGEE |
| | | | | | FNINDCHNLIDFFKESIAKHEDWKNFEFKFSDTSSYENMAEFYREVEHQGYKITFQNISEDYINQL |
| | | | | | INEGKLYLFQIWNKDFSTHSNGKPNLHTMYWKALFDPKNLKDVVYKLNGQAEIFYRRRSISKER |
| | | | | | RIIHKANEPIENKNPNNPNKNSVFEYDIIKDKRFTVDKFKFHVPITLNFKASGKENINEEVYKYLK |
| | | | | | NNPNVNIIGIDRGERNLIYVSLINQKGEILEQFSLNDIITSYKNWENKDVEVKTQYHALLDKREGE |
| | | | | | RAKARENWGTIETIKELKEGYISQVIHKIAQMMVKHNAIVVMEDLNFGFKRGRFKVEKQIYQKL |
| | | | | | EKKLIDKLNYLVFKDKTDNEIGGLYHALQLTNKFVSFQKLGKQSGFLFYVPAWNTSKIDPTTGF |
| | | | | | VNLFNTRYENLEKAKTFFETFEDIRYNTTKDYFEFEVKEYSKFNSKADDTRQDWIICTYGERIKT |
| | | | | | FRNPDKNNQWDNKEIILSEEFKKLFESHHIDYKTNLKAQIISQENKKFFEELLHLFKLTVQLRNSI |
| | | | | | TKSEVDYLISPVMNSTGQFYDSRKAGKKLPKDADANGAYHIAKKGLWILQQINVHNEDRKKPNL |
| | | | | | AIKNKEWLQFVQSNR |
| MG29 | 6427 | MG29-104 effector | Protein | Unknown | MLSDVKTSSFVPDFFENDNELLTSLDEYIHYGNKRVKDLGDIIEKLSNFDSSEISVNGKHLSSLSLA |
| effector | | | | | MFSNYRAMSDILHAWAEENLPTVKARKNFCKKESFTLYELEAAILFYKLHMEDGDTLEESFGSL |
| | | | | | ESDKPLVSFMVRFFNEKRNAIEGLIPDAKTVIDNGSISKNRRSPKKNGKGGGKGFYQMEAIRGM |
| | | | | | LDAFSEVYRSVKWLHLIKGTDLIEGANTDSDFYEIFAPLYEEFSDTTIVLYNKTRSYLTQKPYSKD |
| | | | | | KMLVNFDAPQLLSGWDINKQKESLGVILKRDEEFYLAIMRKEHNTVFLEAPVAEEGEEFYERLG |
| | | | | | YKLLPSPSKMLPKVFFSRKWLEANNVPEDILDIKRSKSYHRASKDFSLEDCHRLIDFFKANINNYK |
| | | | | | VNESDEFGWDVFSFEFSPTSSYQDIDEFYQEVEQQGYKMWFDNISKEYVDECVKNGEIYLFRIMN |
| | | | | | KDFRPASKGKPNLHTLYWLAIFDDENLENPVIKLNGGAKMYFREHSIEEDDRIIHPANEPIANKTP |
| | | | | | ENPKKESKFGYDIVKDRRFTEDKFKLHVPVTINCKAANKITAELFNRNINKALALQEGMHVIGID |
| | | | | | RGERNLLYYVIIDWKGRIIKQGSLNCLETSQGYSIDYKAKLQRIEKDRDASRKGWATIDDIKNLK |
| | | | | | SGYMSHIVYTISRMMIEYNAIVCLEDLNMGFKHSRKSVERQVYQKFEEALINKLNYLVFKERGR |
| | | | | | SESGGYAAGYQLTAPFVSFDKLGKQSGVLFYVNPSYTSKTDPLTGFVNMLRPKYINMKKAKAFL |
| | | | | | KTFDHIKFNDEAGYFEFHADFKKFVKKVNGIRTKWVICTHGDERYVNRRDSSGRFRSAKVNVTE |
| | | | | | EMKALLHEYGIDYHDEESLQKSILNVDNSKFYRYFLHLVSVVLNMRYSVTGNDDIDFILSPVANA |
| | | | | | NGVFFDSRNADDDMPKDADANGAYHIAMKGLWSLQQIRNHDWDADDNKRLNLMMSNEEWVR |
| | | | | | FIQEAAMRR |
| MG29 | 6428 | MG29-105 effector | Protein | Unknown | LTQPGIDLYNKMIGGESLENGKKIQGFNEKVNLFRQANKLDGKSVPMIKQLRKQILGDKNTPE |
| effector | | | | | WITEGFKDKDSMNEAIVKFIKNIEHANDNLTGELFIRSKPYDYNKIFIKNRFITNISHELFKDWNL |
| | | | | | LKNNMLEQYKSKNPKSKNPEKEFAKIPYFSIAEIQESIPNQNKHFPDFIIDHFHDKIMTLIPTEKKI |
| | | | | | HELWKGNKDSIPALKNLMDYYLELYRISKPFDVDCADKDPVFYELFDEIFNDFSKVVKLYNEVR |
| | | | | | NFITKKPYSLEKIKLNFGNSTLLSGWDINKETDNTAVLLQKDGNYYLAIMNKDHNKIFKNTPVTK |
| | | | | | DEKNSYKKMEYKLLPKSYMMLPKVFFTKGNKDKYEPSEENRIYEEKTFKTGDNFNINDLHKLID |
| | | | | | FYKESVKKNPEWSCYNFNFKPTKEYQKINEFYEETDTQGYNITFKNIPAEYIDNLVKKGQLYLFK |
| | | | | | IYSKDFSSYSKGTPNLHTLYFKMLFDDRNLKNTVYKLNGGAEIFYRKKSVTYPKNIMEKGHHAE |
| | | | | | DLKGKFNYPIIKDRRFTFDKFQFNISITLNPNAQGHGNINDICRNLIKSNNTNIIGIHRAENHLIYIT |
| | | | | | VLNSSGDIIEQRSLNEIKSYGDKTVNYMEKLTERGKERNDARINWETIGNIKELKEGYLSNVISEI |
| | | | | | ANIMIKYNAICVMEDLNYDFIRERTAIEKQIYQKFEKMLIDKLNFYVDKKKSQEETSGILKPLQL |
| | | | | | ANKFTTFEKIGKESGMIFYVSPYKITDIDPVTGFVNLFDTRYFNIEKAVQFFDKFDDIYYNAKTDL |
| | | | | | FGFNFDYDNFINKEKIQNIKTKWTVYSYGERIERFNNNNIPKFKKIDLTKEFKNLFSEYSINYNSNL |
| | | | | | KKSIISLKDKNFFMKLLSLFRLTVQMRNGDFIISPVNDNLGNFFDSRNSDNKTLPENTAANGAYNI |
| | | | | | ARKGLILLNRIKQTSDIKKADLKISGDEWLQYAQDENSYI |
| MG29 | 6429 | MG29-106 effector | Protein | Unknown | MNNKLTAFTGKYQLSKTLRFELKPVGKTLEHIQAKGLISQDEARAASYQKMKKTIDGFHKHFIE |
| effector | | | | | LAMSTVKLTKLEAFQELFNASPERKKEESYKKELEKVQDSLRKEIVKGFSTGEAKEIFAKIDKKE |
| | | | | | LITELLEQWMQRQNEDDFYFDEKFKNFTTYFGGFHENRKNMYSDQAQSTAIAYRLIHENLPKFL |
| | | | | | ENIKIFEKIKAVPEVYEKCQVLYKEIEEYLNINSIDEAFELDYYNEVLTQKQIDVYNLIIGGRIPSEG |
| | | | | | KTKIQGLNEYINLYNQRQEKNKRIPKLKILYKQILSDRVSTSFTLDKFTKDQEVLNAVEEYYKFE |
| | | | | | LLDYKPKDKEDTENVLESVKEIVAHLTDYDLRKIYLRNDTKITTISQKLFGNYGVFSTALAYYYT |
| | | | | | TVIKPNFIEDHQKGNDKKREKLDNEQAQFLKQSYLSLDLLQIALDHYIPTLDQEEDVVKRYSSNC |
| | | | | | LANYFKDYFKAEKEEGKDKEFGLIDNIKAKYSCIQGMLGTDYPEDKKLVQQKEELFNIKAFLDS |
| | | | | | LMELLHFVKPLSLPNDSLLEKDQNFYGQFEPLMEQLNGLIPLYNKVRNYATQKPYSEEKVKLNF |
| | | | | | KNPELLGGWPVDREIATSSVLFRDGENYYLGILDKESKKDFKNLPKPDNPNDVLYKMLYLQAAD |
| | | | | | PSKDVQNLMVIDGKTVKKNGRKEKAGEFMGQNLILEDLKNTYLPDDINTIRKRKSYSKLSDNES |
| | | | | | KSDLIAFIDYYKQRAIEYFHNYQFQFKNSDEYRDFGEFTTHINEQAYQINFTEISWKFIDELVNEG |
| | | | | | KLYLFQIYNKDFSSYSKGKLNMHTMYWKALFEEENLKDVVYKLNGQAEVFYRKSSIKNPVVHK |
| | | | | | ANEAVANKNPLAQKKESVFEYDLIKDKRYTEDKFHFHVPITLNFKATGKEFINQDVIEFLHQNPD |
| | | | | | VNIIGLDRGERHLIYLTLINQKGEIILQESLNNITAENHPITTPYHELLNKKEKERDEARKSWGTIE |
| | | | | | NIKELKEGYISQVVHKIAKLMVQYNAIVVMEDLNFGFKRGRFKVEKQVYQKLEKMLIDKLNYL |
| | | | | | VFKDVEPNEPGGLYNALQLTNKFESFQKMGKQSGFLFYVPAWNTSKIDPTTGFVNLFDTRYENL |
| | | | | | EKAKAFFSKFEEICFNPIDKYFEFKVENYASFNAKAEGSQQDWTVCSFGERIKTFRNPHANNQW |
| | | | | | DNKVNQLTEEWQGLFKKYNIDYRTELKEQILQQTEAGFFKAALDLFKFTLQMRNSITNSEVDYL |
| | | | | | ISPVKNKQGQFFDSRQADATQPKDADANGAYHIAKKGLMWLAQINAFDGADWKKLDLDKSNK |
| | | | | | GWLQFIQNKK |
| MG29 | 6430 | MG29-107 effector | Protein | Unknown | MGMIGDQFIGQYSLQKTLRFELRPIGETQKLLQDFKEEVQGNLLEYDAERARAYPMVKKVLDD |
| effector | | | | | YYRYFIDQVLSGFAFDSQTINEVYEMYKKAKKDAEAAKEYAVHTKKLREQLSAAFKAPITYYML |
| | | | | | DKYEHLFNRNRESRLFEWLDIRFENDHLTENEYDEIKDVLDKFDKFTTYFTGYKENRANLFVAD |
| | | | | | EKATAIAYRVVNENMPRFFENCIRMENIKKRHLDLYKLLDSFEGYFVPQAYANIICQPAITDYNKI |
| | | | | | IGRPTQNPDEKGVNSIINEYRQKNQIKNRELPMMAQLYKQLLSDRITVFLDPVINNDEEMQSIVA |
| | | | | | ETIEIARGLFSEVINLTAIHALADNSENIYINSSALANLSHRVYDDWNLIYRACEAKMIKLEGKQK |
| | | | | | KGLENKLKMAIPMSELQNIJEEYIATLDEELKLSYYKIPILCNYFQNPPLDDFESATLKFEQIVKTT |
| | | | | | TPRTDLIHAIKEVLDKAMEVVRFFKPLYLFKGRSPLEVPDRNEDFYNEFERLYAELNLISKIYDRV |
| | | | | | RNYATKKQFSQDKIKLNFNNPTLLDGWDLNKEQDNLCVILIRDGNYYLALMNRDYRRLFDLKN |
| | | | | | DEVRNKALGKAGDHCYSKLEYKQVTGANKMLPKVLFAATNSDLFKPSQEILDIRKTGSHKKEA |
| | | | | | GNIEALHKWIDFCKQSIATHPEWNDHFDFKFRSTSEYSELTEFYNDFDRQAYKIKFVDIKVEYIDQ |
| | | | | | LVKEGKLYLFQIYNKDFSPYSKGRPNLHTTYWRMLFGNENLANITMDTDRPIFKLNGEAEIFFR |
| | | | | | KASLEKQITHAKGQPITNKSKKDNGKESESIFEYDLIKDKRYTEDKLFFHCPITINFRAPGTTVGS |
| | | | | | FNRKVNYFVERNPEVKIIGIDRGERHLLYYTVIDQKGNILEQGSLNQIHNSYTSAGRVVEHNINYR |
| | | | | | DLLHEKEKGREEARKNWETIENIKELKAGYLSQIVNLLSNLMIKYNAVLVLEDLNAGFKRSRIK |
| | | | | | VEKQVYQKFEKAMIDKLNYLVFKELPPGSSGHYLNGYQLTAPFTSFRDLGRQSGFLYYVYPSYT |
| | | | | | SHICPKTGFVNLLNTRYESIEKAISFFEKFNSIKYNPGSDYFEFDFDYASFGKDVARSQWCVCTAG |
| | | | | | EKRYYYANHDKTSRECNATQQIKELLDKYNIEYIRGKDLLPEIIKKNDKGFFNGLMFLLGVVLQ |
| | | | | | MRYTVSGTSNDDDFILSPVMDEQGQFFDSRSAATSEPQNADANGAYHIALKGLKIISSISDGKLKT |
| | | | | | VNKNERQDWFAYVQNKMYR |
| MG29 | 6431 | MG29-108 effector | Protein | Unknown | MEQKKSIWDECTNLYSLQKTLRFELVPVGRTREHINQKRLIEEDEELAKKENDAKKIMDDYYKF |
| effector | | | | | FIEDRLKKVRIEEANLKEFEKIYRDLKKDRSKDKKKRDEFSKIQKKIRNDIHKKLFEDTPEKSFG |
| | | | | | KDFLTKTLPEWLKSNNREKDSSTIKDFQRWTTYFKGFFKNRENVFSKDDIHTSFIYRIVHDNLPK |
| | | | | | YIDNLDRYDTLKRYSDFKDEQLCKSFSSELKGQTLSEFFIVENFNECLNQSGIERFNLIIGGKSLDD |
| | | | | | NKKIQGINETINLYSQRKTYEEKREVRRLFMLPLFKQILSDRTSSSFVLSAIKDDAEVISYINDFYSI |
| | | | | | ISNYFELLQTVFKQLFEFNTKQIYIHKASLNDVSRQIYDDWMILETGLKFFAKEKLKLTTEKKIEE |
| | | | | | WFKKKAYFSLDEIKQSIEYLQSENVDPKKVVEYHKTITRDNKPIIDAIKADYVAVKELNLNKGER |
| | | | | | KLLTEQREEDVTKIKQFLDSVMNLYHFLKPFSVGVDADSETGSFAVEVDAEFYKDFSEIYARLAE |
| | | | | | VVPLYNKVRNYITQKPFSRNKFKLNFNESALLDGWDKNKEHDKNYSFIFRENDSFFLGITSTDED |
| | | | | | TNILREDIHPEIFVEDSFFRKMVCKDLGDIKRQLPRMGFSNKAKTGVEVIGWNQDIEDIKKDFDE |
| | | | | | FQEKKKNDKKLWGENFDRNKLVKLIDYYKSVLKNHSEKYEETNNITYKPTADYRNLGDFFDHV |
| | | | | | QSQTYKVTFVGIDKDYIDALASEGKLYLFQIWNKDFSPLSKGRKNLHTLYWQELFSPKNLSDVR |
| | | | | | FKLNGKAEVFFRRKSIAPIITHPKNKPITNKNPIRGKKERTLSYDLIKDRRYTEDKFFFHCPITLNF |
| | | | | | KSSGSDNNKYINLKINDIIKKNPDVNILSIDRGERHLLYYTLLNSKGEIREQKSLNTVFDDVQREHS |
| | | | | | YHDKLNTLEVERQAARKAWKTIRNIKELKSGYLSQVVHKICKLSIDHNALIVLEDLNSGFKRERF |
| | | | | | KVEKQVYQKFEKTLIDKMNFLVFKERPHNIPGGVLYAYQLTSKFDTFKKMRKQTGLLYYVDAR |
| | | | | | YTSKICPKTGFVNLLYPKYTNVSAAQNFFRNFESITYNTKEKYFEFKFRYSKFISEQKPSARKNSD |
| | | | | | LPNNYYQKEWTVCSFGNRLVPKRSSKNIVEILDLNPTQ |
| MG29 | 6432 | MG29-109 effector | Protein | Unknown | MKLTDFTNLYSLSKTLRFELIPQGKTLQHIHEKRLIEQDKQRDIDYKKLKKIIDEYHKQFIDQSL |
| effector | | | | | KGIVLNDLDSYRTLYQKKEKDDQEKKNFDKVKSLLRKQISDAFKSQEKFKTLFAKELIKDDLLK |
| | | | | | FVQEEEKELVNEFKDFTTYFTGFHENRKNMYVADEKATSIAFRLINDNLPKFIDNLNIFEQIQKEN |
| | | | | | SNIIENFRTALLEMEDMTQGLELEELFSLNYFNETLSQRGIELYNTMVGGRFVEEGKDKIKGLNE |
| | | | | | YVNLYNQQQSDRKKRLPKFKQLYKQILSDRNSTSFVIDQFQNDSELLECIEQFYQSGICNYESDG |
| | | | | | NTINVLLSLQNSLRSLITFDLSRIYLRNDRSITDISQSVFGDWNVIRSALSDYYESTFPINAKEKIAEY |
| | | | | | EDRKEKWLSKSGYFNISTIQTALNGYKNDNITIKDRGNELINYLASCGFDLESNLNLVEKISKSYA |
| | | | | | DIRDLLNQPYPDQENLKNDKKNIGLIKQFLDGLMDFIHFIKPLNVNEEGLEKDQTFYSLFEPLFD |
| | | | | | QLSKTISLYNKVRNYLTQKPYSIEKIKLNFENKGQFLGGWVDSKTEDSDNGTQAGGYLFRKRNE |
| | | | | | IGEYDYYLGMSNDVKLLRTYLKHRIQEKDKSDYERMDYYQLKTASIYGNSYMGNLSYKEDKER |
| | | | | | LISAIVNYLKKNGEETAFLAINDYLNNNKLTESRTPSGCLNILSKDYQHTFKRIIKDESFLKVNNEV |
| | | | | | VQNLKETLKTLVRVPKGMEYANKQYTLFPEVIADIEELSKIKLFLYFPVCQKELDDALIRTHKPL |
| | | | | | FLFKIVNKDLSFAEEFIKGKRKSRGKDNMHTLYFKQLMSGAQDIIDIGTGEVFYREASIEGNITHP |
| | | | | | AHQAINSKNPLKKGEKRTFKYDIIKDKRFATDKYFLHLSITLNYQKPKQAKDYELIVKKYLRNNP |
| | | | | | DIKIIGIDRGERHLIYLTLIDQQGNIIKQESLNIIEDKKHNINTPYHTLLSEKEKGRADARVSWNTIE |
| | | | | | SIKELKEGYLSQAVHKMATMMVKHNAIVVMEDLNFGFKRGRFKVEKQIYQKLEKMLIDKLNY |
| | | | | | LVFKDIEPTAPGGLSNALQLANKFKSFEKINEQSGFLFYVPAWNTSKIDPATGFVDFLKPKYENIE |
| | | | | | KAKDFFNRFQKIRFNPQKNYFEFHFDYNDFTTKAEGTKTEWTVCTFGDERYAWNRKLNLGKGA |
| | | | | | MEKINVTESLQLLFHDFDISYATGNNLIQDILEQNNADFYKKFIRLLSISLNLRHSNGKTGNEQKD |
| | | | | | FILSPVCNNQGEFFNSENAGETMPKDADANGAYHIALKGLWALNQIDKADDLKKIKLAISNKEW |
| | | | | | LQFVQTKPYNKK |
| MG29 | 6433 | MG29-110 effector | Protein | Unknown | MQTVFDQFTGLYSLSKTLRFELKPIGQTKELLEDFYKHCEGNPIVVDEQRICQYPKMKDLLDDY |
| effector | | | | | YRLFIDKTLSRPIFSAEEITKAYELYCAAKQSHNSKQKESKYQKEYTAAKKSLRKKLAACFAEQK |
| | | | | | EEFGLDKYSHLFGSEQLPLNCWLQSRLQGGQITAAEYEEGLAALKAFERFTTYFTGFKENRDNL |
| | | | | | FAEVDKASAIANRVIEENMEKHFFNCRALADSTQKYPQLAEELGSFLSFFMPAYYGSCLSQQGID |
| | | | | | CYNQAIGKELNGDSTKGVNQIINEYRQKYSLKTKDLPTLITLHKQLLSKKPDCPVSETLTTDQEM |
| | | | | | LQLAKYCYTTAISRLNELQKIMSDYLNDENLQFIYLKTKDLNALSKKMFGEWDTIRNAYFYHCQ |
| | | | | | QLADKEQKRFAANTKEVISLGLLQRLLNSYLPGSENPPPLVDPALYFKSFDLTPLRQAYEAAAPV |
| | | | | | LALTQLDQDKAPPNEGNPKGGLGYRQTILVKNLLDTILRAKDFYKPFLLEQDGKPIAVADSNELF |
| | | | | | YTQFTAAFAKLNCLYKKYNLIRSYASQKPFSTDKFKLNENNSTLLSGWDLNKEEENTNILLRKDG |
| | | | | | QYYLGILKNTKLFADCSKYLCQDSVEHYEKMVYKQVSGVNKMFPKVFFAAKNLELYKPSAQIL |
| | | | | | QIKAQKSHLKEANNPDAKNAWIDFCKDSIAKSEWPQYFKFKFKPAEQYPDVNSFYREADAQMYS |
| | | | | | LTFQNVAGAFVKQAVENGELYLFEIYNKDFSAYSKGKPNLHTLYWQMLFDEQNLHNIADNAEQ |
| | | | | | PVFKLNGEAEIFYRKASLDDRVTHPAKKPICNKNPLNGKKTSTF |
| MG29 | 6434 | MG29-111 effector | Protein | Unknown | MKSFSNLYSLSKTLKFGLIPEGDTLSNIEKAGILAEDEKLAEDFKKVKKIADQWLKTFINDSLTGA |
| effector | | | | | YLNLEDLLIFEEKYSIFPRDEKDEEEFNDIKAKLRKEIVSYFIRNPKFKLIASADLIRKELPAFVVTD |
| | | | | | EEKNLVAKFKTFTTYFTNYHKTRENIYSAEEKHSSYAYRVINENLPLFIANKKNFETIKNSYPELIE |
| | | | | | DIKKSVEPILNGEKVEDMFSLKWFSKTLTQSGIDLYNKMIGGESLEDGKKIQGFNEKVNLFRQSN |
| | | | | | KLDGKSVPMLKQLRKQILGDKNVPSWVTEGFANKESMKNAVMEFHGKIKPVLFTVADIFAIEN |
| | | | | | CDYSNIFIKSRFLTDLSHELFKDFNFLKNILLEKYIVNNPKSKNQEKEFLGIAYFTVADIQSVLPNT |
| | | | | | DKDFIFEFFYSKIINTVAGIRQSYELWTANQESVPVLKSLMDNIIALHRTLKVFDVEGLGKDPVFY |
| | | | | | EPFDRNFEGMDGAVKFYNEVRNFITKKPYSLEKIKLNFGNSTLLAGWDANKELDNSSVLLRKGD |
| | | | | | YYYLGIMDKKHNKIFRNAPLAEKGEESYRKMEYKLLPNSYMMLPKVFFSKGNMSKYEPSEEILK |
| | | | | | IYETGAFKSGDNFNIDDLHLLIDFYKESIAKNEEWVCYNFNFKPTEDYQKINEFYNDIDSQGYNVN |
| | | | | | FRDIKASYIDELVKEGNLYLFKIYNKDFSPYSKGTPNLHTLYFKMLFDERNLKNTIYKLNGGAEIF |
| | | | | | FRKKSLNYSEETLKKGHHAEELKDKFDYPIIKDRRFAFDKFQFNVPITLNPNALGFGNINDAARD |
| | | | | | FIRSNDIKVIGIHRAESHLVYLVVLDSKGKIIERQSLNEIEGYNGKSINYMEKLDERGKERDEARV |
| | | | | | NWQEIGNIKELKEGYLSNIISKIAALMVRHNAVCVMEDLNYNEMRERSAIEKQIYQKFEKMLIDK |
| | | | | | LNFYVDKKKNPEELGGLLKPLQLANKFISFEKMGKESGMIFYVSPY |
| MG29 | 6435 | MG29-112 effector | Protein | Unknown | MKKTLSDFTNIYSLSKTLRFELIPQGKTLENIEIKGLLKQDEDRAEKYKKVKIIIDEYHKDFIEKSL |
| effector | | | | | NGLILDGLHDYMSLYLMTIKEDKDKKAFDKEKEKLRKQIANAFKNNEKFKTLFAKELIKEDLM |
| | | | | | NFANEQDYEYIKAFKDFTTYFTGFHQNRENMYVVDEKATAIAYRLINENLPKFIDNLKIFEKIKN |
| | | | | | EAPGLINQLNKVLSEMEEIVQGKTLEEIFSLNYFNQTLTQTGIDLYNIVIGGRTPEENKIKIKGLNE |
| | | | | | YINTDFNQKQTDKKKKQPKFKQLYKQILSDRHSVSFMPESFENDNQLLESIEKFYTNELLHYSTE |
| | | | | | GKSINIFEAIKNAVGNLSSFNLSKIYLRSDTSLTDISQKVFGDWGMINKALQDYYEKIYPLKPKEK |
| | | | | | QEKYEERKNKWLKQDIDIQTLQTAIDHYENETVKEKNNSKIITDYFANFGINNESKIDLLQNVYQ |
| | | | | | NYNIIKDLLNTPFPESEKLGSNKELVSLIKTFLDSIMNVIHFVKPLSLKDSDKEKDESFYSLFAGLY |
| | | | | | DQLNHTISIYNQVRNYLTQKPYSTEKIKLNFENSTLMDGWDLNKEADNTTIILRKDNLFYIGIMD |
| | | | | | KKNNHVFQHIPERTDNEPHYDKMIYKYFPDASKMIPKCSTQLKTVVSHFESNITDKIIEGKSFDSA |
| | | | | | LKITKRIFELNNFVYDDISKTMVLSEDNEKRPKMFQKKYLEISKDIDGFKDALKDWINFCIDFLN |
| | | | | | KYESTKHYSFNFKNSELYNSLDEFYGDIDTQTYKITYKNIPVSFIESLVNEGKLYLFQIYNKDFSPF |
| | | | | | SKGKPNLHTLYWKMLFDDENLNDVVYKLNGQAEVFYRKSSIKESNKIIHKANEVLTNKNP |
| MG29 | 6436 | MG29-113 effector | Protein | Unknown | ELEEAADALKPLLSLEQLNKKRIPPEGDSEEGSEGFEQVRRIHECLDAHMSLQQVLRPLHLVLG |
| effector | | | | | RKPIDVASKDLGFYARFDEAIEDYNAMTIALYNKTRNHLTKKSFSTDKVKINFESPTLLAGWDLN |
| | | | | | KETANKSIILRQNGKYYLGIMHPRHPKIFSKPPEAKVGDEAYEKVNYKLLTGANKMLPKVFFSK |
| | | | | | KGLETHNPSEQILALYKNGEHKKGDTFNIESCHKLIDFFKSRIPLYKRDPSDPYGWEIFDFKFSPT |
| | | | | | KTYKDLSGFYREVEEQGYKLWFTHVTKAYIDEQIEQGHLFLFEIYNKDFSPFSKGKPNLHTLYW |
| | | | | | KGLFEQNNLDDVVLKLNGEAEIFYRKIISIAANEQIVIISANKAIVNKNENNPKPESTFEYDLVKDR |
| | | | | | RYTKDKFFFHVPITLNHKAQKPVRENDQVNRALQKADDVHVIGIDRGERHLLYYTVVNQKGEII |
| | | | | | EQDTLNTISTDQDYVVDYHHKLDQQERTRDKARKAWTNIDNIKELKAGYLSHVVHKLAELIVK |
| | | | | | HNAVVCLEDLNFGFKRGRFKVEKQVYQKFERALIEKLNYLVFKDTTEGQPGHYLKAYQLTAPF |
| | | | | | ESFKLLGKQSGILFYVGASYTSKIDPATGFINFLKPHYESLAKSKTFFESMDSICFNAKRGYFEFSF |
| | | | | | DYANFSVPQTLDDYQTAWTVCTHGETRYHNQRNDKGIWETKAVNVTEKLKVLLNEAGVSYQN |
| | | | | | GEELKDAIAAVKSSKFYRSLYFLLRLTLSLRHSVTGTEEDFILSPVADEGGNFYDSRNASDAEPKD |
| | | | | | ADANGAYHIALKGLWNLEKIDQWDGESRLNLAMKNVEWFQFASEKPFKE |
| MG29 | 6437 | MG29-114 effector | Protein | Unknown | MMSNLLADFTNQYQLSKTLRFELKPVGKTAEWIEKHDIIGVKNDELFGKDAEKAKHYKYAKRL |
| effector | | | | | LDAMHRLFIEDALALFRNPEFSQPLESKFKVLQTQDELKIDDDLENIFKSVFDHTAIRWIEEYQQ |
| | | | | | QMPDFWQEDLAELEQKLATANDTKKRKGFQSAVKAIQKKLKDPSKVIKKEDIKVMYSNEDAIH |
| | | | | | LLEWKIRTEKVKITFKELEQGDNNNFIPVQILCEYLREFNQFYTYFSGFNENRQNVYDLSGEKST |
| | | | | | SIINRTINENLVFHFANLKKWQKVKKSLLDATNILAQKGFDAKASLAKIEADLQFNADAFFTVRT |
| | | | | | FCSSMCQSGIDRYNEIIGGQPALEGREKVQGINEFINLCRQQAGAKRQKFPPMQILYKQILSKSD |
| | | | | | KTFIPEFSDDKDLFNEIEKFHRDFFVEKNEKGRNLFENFIQASSELANDLTEEYDNIFLPCDKVNR |
| | | | | | LSNLLTGSWKNLKDEILEIIGEKEYTKRKNFSFTEITKALEEGKKMEHFSIDAKYSGQSLIHFFVT |
| | | | | | RFQEMLDTANTAWEDLLKKDVLNQEKLDDDRSEPGKKGFEQIAAIKAFLDAAIALAGFVRDWQ |
| | | | | | ADKDILKKDEPNRIWYDHLDDFTAKLQIIGLYNMTRNYVTKKPGATEKLKITFENATLLNGWDR |
| | | | | | NKETDNYGILLEKDHQFYLAVMTAKSNRLFDYAESSDDTEKKAQEKCEKRQLILASSNENCFRK |
| | | | | | INYKLLPGANKMLPKVFFAAGNEKLFNPSAEIVKIKQDKLYTKEKIEIHGKKNLYDYIDFCIKSLC |
| | | | | | KHPDWSKAFHFTPDSFKKPSEYESIDQFYRDVELQGYSISFDKIKESYINKKIESGELYLFQIYNKD |
| | | | | | FSQNKKKKGTDNLHTIYWKGLFEPENIKDTVLKLNGQAEIFFRKASIKYTPDKLAEGHHAKELK |
| | | | | | GKFSYPIIKDKRFTENKFFFHCPITLNFGAPSIPKKFDIKIRKFLKNNPKVNIIGIDRGEKHLLYYSI |
| | | | | | VNQDGKIMEQGSLNTISNGFIPNGTTESRPIDYHEKLDAVEKKRDIARKSWSMIENIKELKAGYL |
| | | | | | SQVVHKLAELIIKYNAIVVLEDLNMGFKRGRFGVEKQVYQKFEKALIDKLNYLVFKSEKDRSNA |
| | | | | | GHYLNAYQLTNKFESFQKMSQQTGILFYTTASYTSTTDPKTGFLKNIYNQYKSVEKSVEFWKSF |
| | | | | | DSIIYNQPKDRFEFTYTLGKVASKNMYREKDEKETQLKKRTWTVCSCVTRSRYKKAQESQTEE |
| | | | | | QKQNTSSEQIGKRGKHEIFFVTDKIKETLQNNGIDFTKNKDIQALLITKNARSDASFQYSMLYCF |
| | | | | | NAIMSMRVTDDDKEKGSKENDFILSPVEPFFDSRTAPSSFPKNGDANGAYNIARKGICILQKINAA |
| | | | | | DDVSKVSPGISKQDWQNYAQSH |
| MG29 | 6438 | MG29-115 effector | Protein | Unknown | IAYRIVHENLPKFIDNISIYENIKSNNKDLDFSPILNEMEDIIQGKTLDEIFTLDFFNNILSQNGIDFIN |
| effector | | | | | HIIGGRSGEAGEKKSKGLNEHINLYNQQQKDKKKRAPKFKKLYKQILSDRGSISWLPEAFEKDE |
| | | | | | EVLDAINNFYREGLENSVIDEKNVNILNEIESSFKSLLNYDDFSKIYIRNDTAITDISQTLFSDYSILG |
| | | | | | RALNYYYETFVNPKWITDYSKATETKREKLEKERDKFTKSTYISIDILQKSLAEYIKTLDTDSEIK |
| | | | | | QKYTPTLIANYFTHHFYAKDENGNETEKTLTYQIVSEYNGLKGFLNTEHSEDYKLIQDKERVHQ |
| | | | | | LKTFLDSIMNLLHFAKPLYLDKNASEEKNELFYTEFTPIYDELAKIVPLYNMVRNYLTKKPYSTE |
| | | | | | KFKLNFENSTLLDGWDVNKEKDNTGVILLKDDNYYLAIMNKQNNTVFEEIPKAINPQNTFKKMN |
| | | | | | YKLLPGPNKMLPKVFFSKSRTKEFGVSEKMLENYENGTHKKGDNFNLSDCHQLIDFFKASIQKH |
| | | | | | EDWKQFDFNFSETKMYEDISGFYREVEHQGYKITFSDVSEEYINQLVNEGKLYLFKIHNKDFSEY |
| | | | | | SKGKPNLHTLYWKTLFAPENLADVIYKLNGEAEIFYRKKSINIDKAVTHNAKEKLENKNPNATK |
| | | | | | KISVFDYDIIKDRRFTFNKFQFHVPVTMNFKSTGNDFINPHVNEFLKNNPDVKIIGLDRGERHLIY |
| | | | | | LTLIDQQGNIIRQESLNTIKDEKHNIETPYHLLLDNKEEERDKARKSWDTIENIKELKEGYISQVV |
| | | | | | HKIATMMIEHNAIVVMEDLNFGFKQGRFKVEKQVYQKLEKMLIDKLNYLVFKDKPANEAGGIY |
| | | | | | KALQLTNKFTSFRDMGKQTGFLFYVPAWNTSKIDPTTGFVDFLKPKYESIEQVKTFLRKFKNIYF |
| | | | | | NSTKNHFEFSFDYKDFTTKADDTQTEWTICTHGDRIEKFLNSINKWDERTVTLNDEFVTLFDKY |
| | | | | | HIDYKDSKILKEKILQQTEKTFFERLIYLLRLTLQMRNSKTGTEIDYLISPVADKNGNFYDSRKVS |
| | | | | | QNLPKDADANGAYHIALKGLWVLQQINKTEDLKKVKLAISNKEWLQFVQK |
| MG29 | 6439 | MG29-116 effector | Protein | Unknown | VISLYNKVRNYITKKRTSIKKFKLNFRNSTLLDGWDLNKEKDNFSIIFRKSKNYYLGIMNKENNKI |
| effector | | | | | FDNIPKEYLISNNNSYEKMIYKLLTNPNRMLPKVFFSKKKIKYFNPSGEILDIINHSSHTKNGKVK |
| | | | | | EGYSKKDFNLNDLYKIIDFFKKSIEKHPDWKNFKFNFKPTKDYKDISEFYNDISSQGYKLSFINISN |
| | | | | | EYIENLVNNCKLYLFQIYNKDFSKYSKGKKNLHTIYWKELFSKENLEDVVYKLNGKAEIFFRKK |
| | | | | | AFDAHITHPKNIEIKNKEFRKEYFKLGLKPTSKFKYNIIKDKRYTYDKFLFHCPITINFKAPSNNFY |
| | | | | | LDYKINEIIRNKSNSVKILSIDRGERHLAYYTLLNSKGEIEKQESFNLVNDKFGRKLDYHNKLDKL |
| | | | | | EGNRDQARKNWNTIENIKELKEGYLSQIIHKIAKIVVEENAIIVFEDLNSGFKRGRFKIEKQIYQK |
| | | | | | FEKMLIDKLNYLIFKDNDKYSIGGTLKAYQLTKKFESFQKLGKRSGIIFYVNASYTSKICPVTGFT |
| | | | | | NHIYPKFENIKKAQELFKKFKFIRYNVKKNYFEFNYDIKNFNKKLKLNRMNWTLCSFGDRLVTF |
| | | | | | KDKNGFFNTKKINLSDKLKDLFDTYNINYINERNLIDDIISQKDKKFFKNLIFFLKTLLSLRNSYTE |
| | | | | | SEVKEIMHKNSENFKLNDYDYILSPVEKDGVFFDSRKANNLQPKDADANGAYNIGLKGLMIIDRI |
| | | | | | KNTQESSNVNLNIKKEDFLNFVIEKNK |
| MG29 | 6440 | MG29-117 effector | Protein | Unknown | GGKGFQQVQQIKAMLEAFNNILHSLKPLHLVKGRKPIAPNDVDTSFYTLFSDRFEKYSNQLIPLY |
| effector | | | | | NKTRNHLTKKSYQTEKFKLTFSNPTLLDGWDVNKESDNLGVLLRKDGLYYLAIMHSEHRKIFE |
| | | | | | QAQEAGVGEDCYEKVNYKLLPGPNKMLPKVFFSKKGIEQYAPPAEILRLYKNEEHKKGETFKL |
| | | | | | DSCHKLIDFFKANISHYKKDANDVGWAVFEFQFSPTKNYEDISAFYKEIERQGYKIWFTNIASKYI |
| | | | | | SDTVTAGKLFLFKIYNKDFSLHSKGAKNLHTLYWQGLFEQNNLKDVVLKLNGEAELFYRKRSIE |
| | | | | | TSNQIIHLANQPIKNKTKQAKQGSSKFKYDIIKDKRYTQDKFQFHVPITLNFKSANVKQFNHNINT |
| | | | | | AIQHDESVNIIGIDRGEHHLLYYSVIDQNGTIIEQDTLNTIDTGGKGYIVDYKDKLHSKEQERDNA |
| | | | | | RKSWGMIENIKELKAGYLSQVVHKLAKLIIERNAIVCLEDLNSGFKRGRFGIEKQVYQKFERALI |
| | | | | | EKLNYLVFKDTERSDEAGHYLNAYQLTAPFDSFKKLGKQSGILYYVPAAYTSKIDPATGFINFLN |
| | | | | | THYESVKKSQTFFKNMDKICYNAKENYFEFHFDYNKFEVNQDLTGYQTKWIACTHGGDNRYHY |
| | | | | | NVKQRTLDKINVTDKLESLLQQYKIQYKHGEDIKEVIGKIDKADFFKTLLWLLRLTLTLRHSDR |
| | | | | | NNDEDYILSPVKDKNGVFFDSREQEKLPREQQTLPIDSDANGAYHIALKGLWNLQQINDWDSTG |
| | | | | | KLNLAMSYNDWFKFVRQLKQ |
| MG29 | 6441 | MG29-118 effector | Protein | Unknown | MKLNKFTHQYPISKTLRFELKPVGETADYIEDFKSQYLKDIVIQDQQRAEDYESIKVIIDEYHRHY |
| effector | | | | | IEEKLSEPFDKKTGELFISGDEFENAFSYYQRFRENSKDEKARKEWIEVQNSLRKSLVKVFSDRK |
| | | | | | KRLFQKELITKELPSWLKEKGEWEDKKNVVENFNRFTTYFTGFNENRENMYSIIEEQSTAISFRL |
| | | | | | MNENLPKYFNNCIQYHKAIESYDGLSFTVNPDLLNEMGVSILSEIFQPSYYIQLFTQSGIDKFTELL |
| | | | | | GGFTKENGEKVQGLNETINLFRQQKAIKAKAFPNFISLYKQILSDRETSSFIPDQFENDNDLLKSL |
| | | | | | GKFIKEMVKEDGLFKKLEDSIKLITDADLHRTFIKNGVEITKISQSIFGNYSILKSAIYHHAESVLY |
| | | | | | PDPISGKISEALKEKRIKYVNKQVVFSIAELETILSNYASQMTDDNPDKEIIAQCENSEHPIRTYFL |
| | | | | | NAIENVKNDKDIEFGKAIENVLPLISLENLNKGKDGQAQTHKIQKMLDAFLAVTHAVKPLHLVK |
| | | | | | GRKPIDIPDMDMGFYAEFSKAFENFEQLVITLYNKTRNHLTKKTFSTDKIKINFENPTLLDGWDA |
| | | | | | NKEKDNSGVLFEKDGNYYLGIMHPKHKNIFNYIKGINDIESEKRSLSKDELFNKIVDGESEHYQKI |
| | | | | | VYKLLPGVNKMLPKVFFSGRRIDFFAPSTEVLKIRNSASHSKNGSPQKGFEKEDFNLKDCHTIIDF |
| | | | | | FKKSIEKHPEWKEFEFEFSPTSSYEDLSGFYREVEHQGYKMDFHPIKKSYIDQCIEEGKLFLFQIY |
| | | | | | NKDFSPYSKGKPNLHTLYWKALFDTENLKDVVAKLNGQAEIFYRKHSIKKDERTIHRANKSLQN |
| | | | | | KNENNPKKTSLFEYDIIKDRRYTVDKFQFHVPITLNFKMEKMTQFAHNEKVNQMIVKSENTHVI |
| | | | | | GIDRGERHLLYYSVINPKGHIVEQGTLNTISTDKGYEVDYQQKLDSKEKARDTARKSWTTVENI |
| | | | | | KELKAGYLSHVIHKIAFLIEKYNAIVCLEDLNFGFKRGRFKVEKQVYQKFEKALIDKLNYLVFKD |
| | | | | | AKPNEPGHVLNAFQLTAPFDSFKKLGKQTGLLYYVQASYTSKIDPVSGFINFLYPKYESLLKSKIF |
| | | | | | FESMDGIRYNADKDYFEFSFDYRKMTPNRNLEGYQTKWTACTFGEKRFKNIRNAHGNWESVEV |
| | | | | | NVTEALKKILKNEDVDFKSGHDLRFEISKVKSTKFYKKLFKLLQITLSLRHSKTGTDEDFILSPIV |
| | | | | | DENGKFFDSRNAPKAQPMDADGNGAYHIA |
| MG29 | 6442 | MG29-119 effector | Protein | Unknown | MLCSECVGGLKMTKFNEQFIGQYSLSKTLRFELKPIGKTAEMIKANGFLEHDTKRADNYVLVK |
| effector | | | | | RFLDDYYRYYIEETLKGKELDKDLVEKAYSAYIGNNADECEKINKELRERVSKIFVDKDKYGLE |
| | | | | | KYKELFSVKQNRKTNRTEGILLSWVRNNDKYSQADKEKYEELIVYFNKFTTYFKGFKQNRDNM |
| | | | | | FSAEAEVTAIANRIVNENMYRFFDNVKNFENIKEHYPDLYKEFVQVEQYFVPSAFGKILSQSAIDN |
| | | | | | YNQGVIGRFENDLDAEGVNQVINEYRQNCLKDGKEVKKLPTMITLYKQILSEDKSENILEKENID |
| | | | | | TDEKAINLVKESYKILTENVKEIKKLIDYSITEETLDTIYIKKIEISTVSNAIFGNREIIKDALNYKKE |
| | | | | | KYKEVVCVKTISDAIKEYKQVYDGEIFDWKDKNIDDLFVKYFSSFYTGYVTKSKNTKKQKDEIV |
| | | | | | NIIEYVDNIKKELDTIVSNDVRDYKNILDKMNAIVRFYKMFYLYDGMKKLDIRGKNEYFYNHFEL |
| | | | | | MYFDIREINKKYNEIRNYATKITQPNNGEKLKFTFDASTLLDGWDKNKEKDNLSILLVKNGKYY |
| | | | | | LGVMDNENKKCFDFENEDVAKKAGQVGETYQKMEYKQISFNYGGLGGFVRKCFNTAQQFRW |
| | | | | | TCPKDCLNEEGKIIITDEEARNNLVKIIDCYKDFLNKYEKNGFKYKDFSFQMLPSDQYSKLSEFTQ |
| | | | | | DIERQRYKLWFRNVSAKYIDELVEQGKLYLFQIYNKDFSDNKKQKGTDNLHTLYWKALFSPEN |
| | | | | | MNKTDGAIIKLNGEAEIFYRFKADGIPVIHKKGSILLNKISKYGETIPSKIYKRIFDCLNGRIEKQD |
| | | | | | LNEEERKWYDKAVWKEAKYDIVKDKRYYGDDGKYFFHCPITINFRCKEKVNGNTFNQEINQFV |
| | | | | | ANNPDIHIIGIDRGERHLLYYTVIDQQGNIIEQDSLNNISSDYVANNKLVPHKVNYHDLLDKREQE |
| | | | | | RADARLAWTAIENIKEIKSGYLSQVVHKLALLVEKYNAVIVLENLNVGFKRGRFKVEKQVYQNF |
| | | | | | EKALIQKFNYLVFKNRSYAENGSFANGYQLTAPFTSFKDIYRQTGILYYVDSSYTSHICPKTGFVN |
| | | | | | YINSYLKYTNVEIAKLTLAKFDGFKFNNAKGYFEFAIDYDKFINGKIPLGKWTICTVGQERYSYD |
| | | | | | AKNQTTIKYDVTKELQNLLVKYNVAYEDGKDLLGKIKDIDEKGFYSALLYWLRLTMQLRYTVK |
| | | | | | GTENEDDYILSPVADKNGNFFDSRKAQDNEPKNADANGAYHIALKGLQLIQNIDDGKLAKPEKN |
| | | | | | MENAKWFKFARERNS |
| MG29 | 6443 | MG29-120 effector | Protein | Unknown | MADNGRSLANFTNQYQLSKTLRFELKPVGQTAEWIKKHNIIDVDGDKLTGEDADRAVNYKYAK |
| effector | | | | | LLLDELHRQFIEDALKLAPEAEFTKKLKDKIIELYSASEIKDADLPGNIFKQILNNKADEWIKLYQ |
| | | | | | QEMPQYWQKEFDAKIANETSEKKIKYLRNSFDKLNKRCQEQPFKNSGVDVLYGSNEDPIKLLE |
| | | | | | WAVRKEKVRPTFGDIKHEGNPEAIMPKERIIEYIIRGFDNFCTYFAGFNENRANVYDVTGAKSTS |
| | | | | | LVHRIFMQNMQFHFNNIRKWEKIKASLEKYAKDLSEKNYNCHARLAECERELNFSANEIFSPEAF |
| | | | | | INFINQSGIDRYNEILGGLAQEGGKTKPRGINEFINLVRQQTGAKRNEFPPLQLFYKQILSKSDRT |
| | | | | | FISAFETDEEMFDRIKDFRQKCFIESEAGKLPVIQEFIKDITRLIAESLDEKTNIFISKDKLTRISQEL |
| | | | | | TGSYNTINLRMLSELGEKAFNQNGSFSIQQIDNALNAVVDGKKFSSQDQNIKAEYQSNSGNILFDF |
| | | | | | FSKRLDALFVSIEASWKILHESRVLTGKILDKNRENEGDKGFEQVAAIKGFLDNSIEILGFAKDW |
| | | | | | MLQEKKLSENINTVWYETLQLFCDQFPIIKLYNMVRNYVTQKAYSDKKLKLNFDNSTLLDGWD |
| | | | | | RNKESSNYGVLLEKDGLYFLGIMTPESNNIFDYEIADADSLNKKQEKQELANAIKSSGGEKLYRK |
| | | | | | VIYKQIADVSKDIFTLCWDENNNKAIRKTKGREAIWGENITRIKEAKSYQNNEADKKHYFGYLIK |
| | | | | | CANSYWKHFNIKLKPADEYEDFSSLIKDIDIQGYKINFDNIKKSYIDEKVAKGELYLFQIYSKDFSQ |
| | | | | | EKKGGGNDNLHTSYFKLLFDEENLKDTVLKLNGQAEIFFRKASVELTEEKKAKGHHYEELKDK |
| | | | | | FNYPIIKDRRFAEDKFFFHCPISLNFKAEKSIPQDKYKPSFNSNFNLQIKTFLQNNPEVNIIGIDRGE |
| | | | | | KHLLYYSVINRNGNVIEQGSLNTIAGFKGREIDYHANLDKKEANRDKARKSWSAIESIKELKAGY |
| | | | | | LSQVVHKLAQLIVEHNAIVVLEDLNYGFKRGRFKVEKQVYQKFEKALIDKLNYMVFKDKEHRL |
| | | | | | VSGHYLNAYQLSGSYHLDSLKSQKQSGILFYTAASYTSTTDPVTGFLKNVNVTYENVEESLKLWE |
| | | | | | SFDSIIYNPIKDRFEFIYTLGKIAGKSTDKEKDEEEISKKQWTVYSCVDRSRYIKPESTEEQKQASD |
| | | | | | RNSIGKLGKHEIFCVTNEMKKLFENANINYKEDKDIKKVLLEQNNASLHRSCLYFFNAIMAMRV |
| | | | | | TDSSKKSGTDENDFILSPVEPFFDSRKKYTKLPENGDANGAYNIARKGICMLNKIDAAENLPKINL |
| | | | | | LITKRDWQEYAQSDAVVKAQTAKLNK |
| MG29 | 6444 | MG29-121 effector | Protein | Unknown | MLQNFTNQYQLSKTLRFELRPVGKTKEHIEAKGLIIQDEQRAEEYKEMKKIIDRYHKAFIEDALN |
| effector | | | | | GIAIEGLETYEKLYFAIKDEKGKKEFEKLQDTLRKRIVELFKKHPKWSTLFKKELIRNELLTFLD |
| | | | | | SEEIPEEQKINEKEIVLKFVDFTTYFTGFHENRANMYIDEALHTAVAYRIVHENLPVFLGNKKTFE |
| | | | | | QIATKYPELIADSKDAIESHLFGAVFEDMFTLAYFSHTLAQNHIDLYNTMIGGKVSNDGSKIQGEN |
| | | | | | EKINLYRQKHGLSKRDLPNLKPLYKQILSDRESLSWLPEAFEDKNELAEAIKTFYQNNIIAFECCD |
| | | | | | GKVNLLEKFPEIFKENQYYDLSKIFIKNDKSLTDIAQAIFGKYGVIKEALWEKHLRDNPKAAKSK |
| | | | | | DISADEERFFNKKDTYFSINDIHIALKAGEDRVQTGLDFSINDIHIALKEAQSPSDILTYFSNEIKPL |
| | | | | | TKAVQVAYKTWLDDQEKTERIKEVMDALLAWQRFLKPLSVKSDVDRDIAFYATFESYFESLSAV |
| | | | | | VKLYDKVRNFMTKKPYSLEKFKLNFENSTLLDGWDVNKETDNTAILLEKNGLFYLGIMDKKHN |
| | | | | | RVFKNTPESQDDSSYRKINYKLLPGANKMLPKVFFSNSRIDEFAPSSDIISNYKKGTHKKGEIFDL |
| | | | | | EHCHKLIDFFKSSIQKHEDWKNFEFKFSDTASYKDLSGFYREVEQQGYKITYKNISQSYIDTLVSE |
| | | | | | GKLYLFQIYNKDFSPYSKGTPNMHTLYWRALFDEKNLADVVYKLNGQAEVFYRKKSIIYSDEVM |
| | | | | | QKGHHAKELVGKFDYPIIKDRRFAFDKFQFHVPITLNFKAQGYTNLNAIVNEMIASGKEDIKIIGI |
| | | | | | DRGERHLLYLSLIDAQGKIVEQYTLNQIINSYNGKDHVINYHEKLAKKEDERAKARVNWGTVEN |
| | | | | | IKELKEGYMSHVIHRIATLMVEHRAIVVLEDLNFGFKRGRFKVEKQVYQKFEKMLIDKLNYLVD |
| | | | | | KKKSPNELGGVLNALQLTNKFESFEKMGKQNGFLFYVPAWNTSKIDPVTGFVNLFDTRYASVEK |
| | | | | | SKEFFGKFKSIRYNSEKDYYEFEIDNYTQFNPKAEGTRQNWTICTYGDRVLTYRNSEKLNQWDN |
| | | | | | KTVQLTDGFKTLLNGQADNLKEYIVAQNDKAFFEKLLGLFRLTLQMRNSITGTDIDYLVSPVVD |
| | | | | | ENGVFYDSRVCDDTLPKDADANGAYNIARKGLMVVKKIKEAQDIKKPDLKITNKEWLQFAQR |
| MG29 | 6445 | MG29-122 effector | Protein | Unknown | GLKEYFIKNYNLSNKKIESRLNQKYFSISEIQEGVKLLNLDRINYNDFSDHFISDYFKNLINEKIIDE |
| effector | | | | | ITNHKLDFDKINYNNLNSFSDNEKQLIKILLDSILGFYNSIKPLYVNIKSSQEEKTQEAYELDSDFY |
| | | | | | NDFQIIIDSFKKIIPIYNKTRNYLTKKPYTTKKFKLNFDNSTLLDGWDINKEKDNYSLLFKKDNQY |
| | | | | | YLGICSKGNSTDISKYIQKKVFNSGDYFEKIDYKLLPGPYKMLPKVFFSKTNIEYFSPSEEIISIRNY |
| | | | | | ASYSKNGTPQKDFDKEEFNITDCHKLINFYKFSLNKHHEWKNFNFNFKPTDQYKDINEFYQDVE |
| | | | | | DQGYNLSFKNIDSKYILDLVDSGKLFLFKIYNKDFSKFSKRTPNLHTIYWNELFSEENLSKLIYKL |
| | | | | | NGKAEIFFREKSNIKNNTIHGKNQLIQNKNPINNKTESIFEYDIIKDKRYTQDKFLFHCPITINFKSR |
| | | | | | GNGKDIHKQINNYIKDFEGNINILSIDRGERHLLYYTLLNSDGKIISQNSFNNISDGFNRSFDYQDK |
| | | | | | LDQREKERDQSRKSWTAIENIKYLKEGYLSRVIHEIAKIAIENNAIIVLEDLNFGFKRGRFKIEKQI |
| | | | | | YQKFEKMLIDKFNFLIFKKRSKESIGGALNGYQLINKFESFSKLGKQSGILFYVPASYTSKIDPTT |
| | | | | | GFFDLIRPKYESVDKSIQLIKKFEYIKYNSDMDMFEFNYNYFNFNNELKLDRKNWCIYSNGSRLY |
| | | | | | NFRNKDKNNEWDTKEINLTKELKDLFESYSIDYNSTQNLIDRIILIDHKDFFEKLIYILKLMLQLR |
| | | | | | NSIPNSKEDYILSCV |
| MG29 | 6446 | MG29-123 effector | Protein | Unknown | MGSIFDDFTNKYPVNKTLRFALKPIGDTEENIKKKGILLKDETRAKDYKQAKKIIDEYHKDYINR |
| effector | | | | | KLKDFSFDEGKLEDFADTYRNIKRDTQDENLKRQLEKLRNHLRKEVANHLKNKKLFSNQFIKDI |
| | | | | | LPQWLERNSISTEGIEKPEEVIGKFQQWTTYFTGENDNRKNIYTDKDHGTSIGYRLIHENLPKFVD |
| | | | | | NIERYDKAKSLNVDFSDVERSLVDKLPTGKLENFFTLENFNRCLTQKGIDNYNLIVGGRSENDGT |
| | | | | | KKQGINEIINLHAQQLKTGEAKKVRSCQLEQLYKQILSDRNTSSFRFENIETDSQLCGEIIDVVNTI |
| | | | | | DNVKENFTRVFYTLENADPKHIYIKSNKGITDISQNIFRDWGLVTRCLEHYVEAKIYPVSDGKKE |
| | | | | | TKTLQTRREKWLKQPFFSIDDIHTALESYFAQYKNEDLQNGTSAEGEIEIAEQKAIAINKPLFDYF |
| | | | | | KKCTIRKNNENDNRFESKNLFEEVQRTRKEALKVLEEFQDIEDQKLKNDKEKVQHIKNYLDALL |
| | | | | | GLQYFLKPLHFQLRKSEEKNANAYEKDGSFYTKFDGLYEVVQQIQPLYNKARNYLTKKPYSEEK |
| | | | | | YKLNFENQTLADGWDKSRETSNSCVLLLKNGRYYLAVMDKEHKRLFEGDIPEHKDCYKKMVC |
| | | | | | KLLPGPNKMLPKVFFSDRRGELFDPPEEILHIRNVASHVKNGDPQPGYIKQEFNLDHMHKMIDF |
| | | | | | FKTSIEKYEKWRNFGFQFSSTKSYENISSFYKEVSDQGYKIAFQNVSKDYIDECVKKGHLYLFEIY |
| | | | | | SKDFSDKSKGKPNLQTLYWKALFDEKNLRNVVYKLDGKAELFHRKASIHYKDEIWEKGHHADD |
| | | | | | PKKKQPYPIIKDRRYARDTYHFHVPITCNFKAENSGNFNEEVTRHLKNNDEVRIIGIDRGERHLA |
| | | | | | YYTVIDQRGKIIEQCSLNNLNGKDYHDILDKRENARDKARKSWGTIEKIKDLKEGYLSQVVNNIA |
| | | | | | KLMIEHNAIVVFEDLNFGFKRGRFKIEKQVYQNLEKRLIDKLNYLVFKDKKPHKNGGTFKALQL |
| | | | | | TARFESFQKLGKQTGFIFYVPAYHTSKICPATGFVNLLYPKYETIKKAQELFGNFDKICYNKDED |
| | | | | | YFEFHLDYGKFTDKAEGGRRKWVICTHGTRLENFRDENNQWDTREVDLVEEMKKLFQNNTIDF |
| | | | | | KNGECLIQKIKTKDGADFFRSLIKLLRLTLQMRNSRIGKEEDWLISPVKDNGVFFDSRKADPSMP |
| | | | | | QDADANGAYHIALKGLLMLKQLKGAGSVTDFKPDLSNKAWYEFVQEKPRL |
| MG29 | 6447 | MG29-124 effector | Protein | Unknown | MENSKSIWNSFTNEYSLSKTLRFELKPVGRTLELIKENKLIEEDKEREKEFNRVKEIMDEYYKYFI |
| effector | | | | | DICLSDIEISGLKKHVEIYYKLKKANYKDEKLKSEYKESQHKITKEIYDQINKDDALNKRLGEEFI |
| | | | | | RQILPKWLETNGRIEDKKLVLKFQKWTTYFINFFSNRKNVFSKDEIPTSIIYRIVHDNLPKFLDDIA |
| | | | | | KFEELKNLKGFDYTKIEKDFSNELNDKSLEMFFSVNNFKNCINQSGIERFNLIIGGKSESNNIKIKG |
| | | | | | LNEYINEFSQKEKDNEKKIRQLKLVPLFKQILSDRNSPSFILEQINDKKEMLDKIEEFYTSFNNNLN |
| | | | | | KLKNSIKNLKKFDSEKIYLKNDESLNSISKNMFGYWGKIQEGLKLYFESKLKNKKDIEKAQNSEY |
| | | | | | FSISDIDEGIKILQLESEYPVIEYFLKFSEDYQSSNSSDKNLLSQISSKYDILKDKIKEIRENDTNKISE |
| | | | | | DDVVKIKDFLDSILSLCRFLKPLYLYSDKDKSEELELLDIDPDFYNEFNPVFQELERIVPLYNQIRN |
| | | | | | YITKKSFSTKKFKLNFDNSTLAVGWDLNKEKSNYAVLLRKKNTVTEQYDYYLGIMIKNFNKIFD |
| | | | | | NGKKSTNDQNSYEKMIYKLIPGPSKMIPKVVFSKANKDSLNPSKEILKIYNESSFTKNGSAQGGY |
| | | | | | KKKNFDIENLHKMIDFYKFCLKNYEGWSTFDFRFKSTNEYSDISEFYKDIESQGYKISWKYYDEA |
| | | | | | YINEIVDNGKLYLFQIWNKDFSEYSKGKPNLHTIYWKSLFSEENLRDIIYKLNGGAELFYREKSIP |
| | | | | | RSITHEKNKPIKNKNPFDGKEESTFEYDLIKDKRYTEDKFFFHCPITLNFVKNYQKRMISKSVNKF |
| | | | | | IHDEKDGINVLGIDRGERNLAYYSLINSNREIIEQGSFNVIFDDKKRKLDYRDKLDEIEGKRDEAR |
| | | | | | KNWKNIANIKEMKEGYLSQVIHRISKLAIEHNAIITLEDLNFGFKRGRFRFEKQVYQKFEKILIDK |
| | | | | | LNYLIFKDTTEKEAGSILKAYQLTDKFESFQKLGKQSGIIFYVNASYTSKICPKTGFVNMLNPKFE |
| | | | | | NVNKSKEFFAKFKYIKYNRAEDLFEFNFNYSDFTDKNEIKLKKDNWSVWSNGIRLKTRKDNNGN |
| | | | | | YWKTEEIDVTAELKKLFKDNKIDYNSEINLTGSISNYNNQRFHKDLIDLLKLILQLRNSYTSYEVE |
| | | | | | EFKKKYGDKFNMRDYDYILSCVKDNKGEFFDSRKSKNNEIKDADANGAYHIALKGLMVIKKIKE |
| | | | | | SDNTDKTDLRINKNDFINYIIDSYGGKHNNI |
| MG29 | 6448 | MG29-125 effector | Protein | Unknown | NYVTQKPYETSKVKLNFENAQLLNGWDKNKEADNTSILLRKDGLYYLAIMNKKNNKVFEKAPK |
| effector | | | | | SIIGDVSFEKVNYKLLPGANKMLPRVFFSNTNIDFFNPSEEILRIRNTATHSKNGEPQKGFEKADF |
| | | | | | NLKDCHTLIDFFKDSLTIHKDWKHFGFQFSVTSTYQDISGFYREVENQGYKITFDNIPTSYINEKV |
| | | | | | EHGELFLFQIYNKDFSPFSKGTPNMHTLYWKMLFDEQNLKDVVYKLNGQAEVFFRKSSIQPKNII |
| | | | | | THPKNQPIDAKNPLKPNKNTFAYDLIKDRRYTIDKFQFHVPITMNFKANGTDRVNEKVNTFLKN |
| | | | | | NPDVNIIGLDRGERHLIYLTLVNQKGEIIKQESLNNIKDEKHNITTPYHTLLDNKEKERAEARQE |
| | | | | | WGTIEGIKTLKEGYISQVVHKIATMMLEHNAIVVMEDLNFGFKRGRFHVEKQVYQKLEKMLID |
| | | | | | KLNYLVVKSADKNKPGGVMNALQLTSKFESFQKMGKQTGFMYYVPAWNTSKIDPATGFVDFL |
| | | | | | KPKYESVSKAQDFIANFNAICFNKNKEQFEFSFDYNNFHNKAEGTQTLWTLCANNHTRYWYNRT |
| | | | | | LNLNKGGQEAIKVCQVLELLFADNNITYGNGADIRDQIMAQSSTDFFKKLLKCMSVTLSLRHNN |
| | | | | | GLKGDAEQDFILSPVSNDKGEFFNSLTAPATEPQDADANGAYHIALKGLWVLQQLSQTVDLSKP |
| | | | | | KLAISNKEWLNFVQKREFIK |
| MG29 | 6449 | MG29-126 effector | Protein | Unknown | SRFEKIKEFNLDLKTLENDFKDVLDNRDLNEFFSINNENNFLNQSGIDKFNLVIGGKSLEDNKKIK |
| effector | | | | | GLNEYINEFSQKESDKAKRKNIRKLKFAVLFKQILSDSESSSFVIEKFKDKKEIFETIDMFYEKFNK |
| | | | | | YSSKIKESIKKLNDCDSKNVYIKNDTNLTQVSKGLFNDWNKIDIGLRHHFENELKIKKLTDKQRE |
| | | | | | KELDKFMKSKYFSLDEIEKGINSLELKDKKSIIDYFLNFSKSKNDSKVDLFENIKSKYSEFNKINRN |
| | | | | | KTIKLTEKSSENDVELIKTFLDAIMELYHFIKPLLLNFKKNEDKKGSNVLETDSDFYNYFNEIFDK |
| | | | | | LGEIPLYNKVRNYVTQKPFSTKKFKLNFENSTLAAGWDINKETANTTIILKKGTDFYLGIIDKNN |
| | | | | | TKIFLNQQNSNSSVVYEKLCYKLVSGANKMLPKVFLSEKGVKTFKPSKEILNLYKNEEHKKGNT |
| | | | | | FSIESCHKLIDYFKECIPRYKPNPNDKYGWDVFKFKFSDTKTYKDISDFYREVENQGYKIWFENID |
| | | | | | ESYLNKLVDEGKLYLFQIWNKDFSKYSKGKPNLHTMYWKELFSEENLKDVIYKLNGEAELFYR |
| | | | | | EASIKRQITHPKNISIDNKNPIKNKEKSTFNYDLIKNKRYSEDSFMFHCPITLNFKAKDQSKSIHKL |
| | | | | | VNKFIHDTDKKINIVGIDRGERNLAYYTLVNSDGNIIEQESFNIISDDLQRKFDYQEKLDQIEGDRD |
| | | | | | KARKNWKKIANIKEMKTGYLSQVIHKISKLVIEHDAIIVLEDLNYGFKRGRFKIEKQIYQKFEKM |
| | | | | | LVDKLNYLVFKGIDKNLPGGNLNAYQLTNKFESFQKLGKQSGIIYYVDAYKTSKICPRTGFVNLL |
| | | | | | YPKFENIIKSQEFIKKFKSIKYHKEEDLFEFNFNYSDFKKDQKEKLEQDNWSIWSNGTKLINLRD |
| | | | | | KENNNQWTTKEYDVTEKLKELFNKYKIEYNSEDYLLNEIVKIKDKSFYESFIYILKVILQLRNSYS |
| | | | | | DFEVKQFKKKLGDKFKESDYDYILSCVKDKKGNFFDSRHAKTDEVKDADANGAFHIALKGLMV |
| | | | | | IDKIKKLNDVDEKTKIDLKIPRNDFLNYVVKRNT |
| MG29 | 6450 | MG29-127 effector | Protein | Unknown | QTVQEALSQCSIEAVKEKNKQNAIVNYFADMGLNEEIKMNLFDKVIADYKNVKDLLNTSYPENK |
| effector | | | | | KLGNQKGKDSDIEKIKTFLDSVMNVIHFIKPLNLKDESKEKDETFYSLFLPLFDQLNKTILLYNQV |
| | | | | | RNYVTKKPYSTEKIKLNFENSTLLDGWDVNKEQDNTSVILRKDGLYYLAIMDKSNKKIFLNAPK |
| | | | | | ADDKKDSFKKMNYKLLPLVNQQLPRVFFAKSRIEYFNPSSKIVQNYKNNTHKKGDTFNINDCHA |
| | | | | | LIDFFKASLEKHEDWKHFNFKFSPTKTYQDLSGFYREVEQQGYKMTFENIPTDYINEMIEEGKLY |
| | | | | | LFQIYNKDFSPYSKGKPNMHTIYWKMLFDEQNLKDVVFKLNGQAEVFFREKSIKDNIIVHKSNNS |
| | | | | | IENKNPDNPKKQSKFNYDIIKDKRYTIDKFQFHVPITLNFKATGRDYINEDVNRFLKNNKEVNIIGI |
| | | | | | DRGERHLAYYMIINQKGEILEQTSFNIISSKHKENKYSTNYHALLEKKEMARDKARKSWDTIGTI |
| | | | | | KELKEGYISQVVHKIAQLMVKHNAIVVLEYLNPGFKDSRKKVEKQVYQKLEKMLIDKLNYLVF |
| | | | | | KDYEANTTGGVLKALQLANKFTSFDRLGKQSGFLFYVQAALTSKIDPATGFVNFLYPKYESIKK |
| | | | | | AKKFLDKFDKIIYNNSKNYFEFAFDYNNFTTKAEGTRTKWVVCTHGDTRYRYNPQTKTSEEVNI |
| | | | | | TQEIKYLLIKHNIQYENGNCFKNKLIQAEDKKFYSKLLHLLAITVSLRHAKSGTDIDFILSPVADK |
| | | | | | NGVFFDSRKANDTMPKDADANGAYHIALKGLLALNKISNTPDDKLNKVDLKITNKEWLAFAQK |
| | | | | | KN |
| MG29 | 6451 | MG29-128 effector | Protein | Unknown | MIDDLTNQYSLQKTLRFELKPIGKTLKYIEERGLIEEDYKRSQEYKRLKEIIDLYHKDFISEALDS |
| effector | | | | | VVFDDLEEYERLFFQNRDERDEKSFAKIQENIRKVIRKAFESHPNWKHLFKKELLNKVLPYWEH |
| | | | | | DNITDSDREIIKNFQKFTTYLNGFHKNRENIYSSEAKHTAVAYRVVHENLPVFLQNKRLFETIGQN |
| | | | | | YPEIIEAAKEELDTQERLMGATVEAVFNLDYYQYLMSQKHIDIYNTILGGFTLDDGTKIQGLNEK |
| | | | | | INKFRQDNKLSKRELPNMKPLYKQILSDREALSWLPDSFENIQDMSEAIASFYNKNILHFKCCDG |
| | | | | | EVNLLEKLDEVFEESNEYDLDKIYIRNDKSLTDISQAIFGDFGVIKDALWDYHLSKNPKLEKKKNI |
| | | | | | DDIQAKYFKKSYFSVKQIEEALKFYGKEESLIEYFKGFGAYKNSEKRDLREEIKSAYSNWSSDRE |
| | | | | | NKDKIKELLQALLNLQHFLKVLYVKDELEKDIAFYAYFDIYFEALSLVIPLFNKVRNYLTKKPYS |
| | | | | | TEKFKLNFQNSTLLYGWDVNKESANLGILFEKEGLYYLGIMDKKHNKIFQDIKESNSSNVYRKIE |
| | | | | | YKLLPGPNKMLPKVFFSKRRIDEFAPSEELIAKYKEGTIIKKGEKFNLEDCIINLIDFFKNSIKKIIP |
| | | | | | DWKEFNFNFSPTREYQDISEFYKEVELQGYKLTFKNIDTEIVEQFIEEGKLYLFQIYNKDFSPYSK |
| | | | | | GVPNLHTIYWRMVFDENNLKDITYKLNGDAEVFYRKHSIEYNEKIWKEGHHVKELAGKFDYPII |
| | | | | | KDRRFALDKFQFHVPITLNFKAPNITAKEHNNLIRQKIKENADSIKIIGIDRGERHLLYLSLIDSSG |
| | | | | | KILEQYSLNEIVNSYNGKEHRVDYHKKLDKIEQERKSARLNWEAVEGIKELK |
| MG29 | 6452 | MG29-129 effector | Protein | Unknown | MSAQSALSTLINKYSLSKTLRFELIPIGKTKESIDRKGLLSQDVKRAQSYKEVKKIIDEYHKEFIEK |
| effector | | | | | SLINAKLKGLEEFSKLYYKLQKEDKDKKNIKKMQDNLREQISDLFKNNKKDKWNILFKEDLIKK |
| | | | | | ELPLFAKDDKQKNLINEFNKFTTYFTGFHKNRKNMYAEEEKSTSIPYRIIHQNLPKFLDNIRIFEKI |
| | | | | | KKNKINTDVIEKELSLFLNGIKINDIFSINFFNDVLNQKGITFYNTILGGVSEKDRTKIKGINEYVNT |
| | | | | | EYNQKQLDKKSKIPKLKQLYKQILSDTETASFVLEQFENDNQLLEKIEQFYNTELINYETEGKTQ |
| | | | | | SVFLQFEQLFKNMQNYDASKIYISNLSIANISKIIFGDWSIICNALAEWYDKHNTKGKKINEYKKE |
| | | | | | NFLKQDFSIQQIEDAVLEYKNDTLNKEINFLLNYFASFLNEKSKKNIIQRIETEYSKVKDLLNTDYP |
| | | | | | EKKKLASDKDNVSKIKAFLDSLMDFLHFVKPFNIKKDTGLEKEENFYSIYVPLFEQIDKIIPLYNK |
| | | | | | VRNYLTKKPYSTEKIKLNFENSTLLDGWDLNKESDNTSVVLRKDDLYYLGIMDKKHNRIFKELP |
| | | | | | SQNGNESSYEKMIYKLLPGPNKMLPKVFFSKKGKKQFKPSKKLLKKYEDGTHLKGDNFNINDC |
| | | | | | HNLIDFFKESIAEHEDWKQFDFKFSSTSSYKDLSNFYKEVEKQGYKITFQNISENYINQLIDEGKL |
| | | | | | YLFQIYNIDVQNK |
| MG29 | 6453 | MG29-130 effector | Protein | Unknown | MKNFTNKYSLSKTLRFELIPQGKTSEHIENKGLINQDEKRAENYKRIKSIIDDYHKDFIRQAMSNV |
| effector | | | | | QLTKLEIFADLYNAYNEKKKEESFKKEFEKVQSDLRKEIVAGFSSDNVKEIFSEIFGEKLIKELLE |
| | | | | | DWMRKQDCYSDEHYELLKDFKTFTTYFTGFNDNRKNIYTSEAHSTAIAYRLIHENLPKFIDNIKA |
| | | | | | YKKVKESRININKLEENLDSLLPGVVLDQVFSLDYFKYVLTQTGIDNYNLVIGELNLVGNLFNQK |
| | | | | | QEIKNNRIPKLKPLYKQILSDRQSTSFSLEAFEDDSNSTASQQVLDTINTYYRNSLICFYPTENSEPE |
| | | | | | NVLEEIKKLLEDLKTYDLDKIYLRNDAKITAISKKIFGDYSVFGSALNYYYKTVENPKFEEEYKK |
| | | | | | AKSQKAKENLENKQEKFVDKPYIAISLLQKALDIYIESLDDNHKLKDKYKPNCVADYFHTYFISE |
| | | | | | QNSNGKKFDFVSNINAKHSCIQGLLNDAYPLDKKLHQEKDDIAKLKLFLDALMEMLHFVKPLAL |
| | | | | | AKDSNLPKNDSFYGQFTTWFEQLDLLIPLYNKVRNYATQKPYSVKKIKLNFENSYFLSGWATEY |
| | | | | | SSKGGLVIIKENDFYLAIVDKKLSDDDVAFLTENSNLNLAQRVVVDFQKPDNKNIPRLFIRSKGEN |
| | | | | | YSPAVEKYNLPIGEVIDIYDSGKFKTEYRKTNPQDFKQSLVKLIDYFKEGFTKHESYKHYQFLWK |
| | | | | | DSKEYLDISEFYKDVESSCYQLSFENINFDNLLNLVDQEKFYLFKIYNKDFSKHNKGKPNLHTIY |
| | | | | | WKALFDEQNLANVFYKLNGQAEIFYRRKSIKEPTIHKAGEAIANKNPNNQKKESIFDYDLIKDRR |
| | | | | | YTVDKFQFHTPITLNFKAKGGDYINYDVLSYIKNNPDIKIIGIDRGERHLIYISLIDQKGKILKQESF |
| | | | | | NIISNDGHETSYHNLLATKEKERADARENWGVIENIKELKEGYISQVVHKIAKMMVENNAIVVM |
| | | | | | EDLNFGFKRGRFKVEKQVYQKLEKKLIDKLNYLVFKDKQPNEIGGLYNALQLTNKFESFQKLG |
| | | | | | KQSGFLFYVPAWNTSKIDPTTGFVNLFYAKYESVEKAQEFFGKFEDIRFNPSHNYFEFEVKKYSD |
| | | | | | FNIKAEGTRQDWLICTYGDRISTFRNSQKNNSWDNKEVILTDEFISLFEKYAIDYKSENLKNLIISQ |
| | | | | | TDKSFFESLLRNFKLTLQMRNSITNSEVDYLISPVQNNKGEFYDSRKADETLPKNADANGAYNIA |
| | | | | | KKGLQCLEQINKFEGENWKKLELDKANNSWLRFAQNKN |
| MG29 | 6454 | MG29-131 effector | Protein | Unknown | MKNQIILFSGFTNQYAISKTLRFELKPVGRTLEIIIEKKGLITQDNQRAEDYKEVKILIDEYIIKNFI |
| effector | | | | | EKSLDGFALNGLQEYYDLFIKTNLEEIDKKALDKEKDNLRKQIANRFKKHDKFKSLFAKELIKED |
| | | | | | LIGFVSEENKELVNKFKNFTTYFTGFHENRKNMYVADDKATAIAYRLIHENLPKFIGNIIIFEKIK |
| | | | | | KDAPDLVSQLNNVLSEMEEIIQGKTLEEIFSLDYFNETLIQTGIDLYNIVLGGRSEDGKDKIKGLN |
| | | | | | EYINLYNQKQTEKKNRQPKLKQLYKQILSDRDSVSFIAEEFKEDTEVLEAIEKFYQGELCNYESD |
| | | | | | GQAINVFNVSKKNLIGNLSSFDLSKVYLRNDRAITYISQQMFSDRSIVGNALQEYYRAQNPQKGK |
| | | | | | EKTENFEKRIDKWVKKSDYFDIQTVQEALSQCSIEAVKEKNKQNAIVNYFADMGLNEEIKMNLF |
| | | | | | DKVIADYKNVKDLLNTSYPENKKLGNQKGKDSDIEKIKTFLDSVMNIIHFIKPLNLKDESKEKDE |
| | | | | | TFYSLFLPLFDQLNKTILLYNQVRNYVTKKPYSTEKIKLNFENSTLLDGWDVNKEQDNTSVILRK |
| | | | | | DGLYYLAIMDKSNKKIFLNAPKADDKKDSFKKMNYKLLPLVNQQLPRVFFAKSRIEYFNPSSKIV |
| | | | | | QNYKNNTHKKGDTFNINDCHALIDFFKASLEKHEDWKHFNFKFSPTKTYQDLSGFYREVEQQG |
| | | | | | YKMTFENIPTDYINEMIEEGKLYLFQIYNKDFSPYSKGKPNMHTIYWKMLFDEQNLKDVVFKLN |
| | | | | | GQAEVFFSEKSIKDNIIVHKSNNSIENKNPDNPKKQSKFNYDIIKDKRYTIDKFQFHVPITLNFKAT |
| | | | | | GRDYINEDVNRFLKNNKEVNIIGIDRGERHLAYYMIINQKGEILEQTSFNIISSKHKENKYSTNYH |
| | | | | | ALLEKKEMARDKARKSWDTIGTIKELKEGYISQVVHKIAQLMVKHNAIVVLEYLNPGFKDSRK |
| | | | | | KVEKQVYQKLEKMLIDKLNYLVFKDYEANTTGGVLKALQLANKFTSFDRLGKQS |
| MG29 | 6455 | MG29-132 effector | Protein | Unknown | NCIAYQKITQKYSDEGFTAELVKCEQFFTPENYGICLTQGGIDVYNQLIGKKSDDTYGKGINQQT |
| effector | | | | | NEFRQKNSLKRNDVPLMTVLFKQLMSESERTFAIETIESDEELFSVVKDAYNTCINLVDGLSSLCL |
| | | | | | SNLTDDNYSSILIRSDGLSNLSQKIFGRWDIIDSALNLHKESIGQKNFDAKYSKVISLFDLQTICDTY |
| | | | | | TSTLDDSVITRNITFLDYYKSFDSSLINNAYLETESVLNSGGLDKDKTMPEKDTDFGGKGYQQLQ |
| | | | | | KIKQLLDAVNDAVHFYRPFLLEKEGKAIEADENNKEFYNEFLLYYRDLSCFPKVYDKVRNYATK |
| | | | | | KPYSKDKFLLNFDKPTLLDGWDVNKEESNLAVMLFKGGKYYLGIMINNRLFSDYSTIGTVSKNE |
| | | | | | QAYEKLVYKQVSGACKMFPKVFFANSNRELYKPSSAIEKIRNEKSHLKGGSENSKNKWIQFCIDC |
| | | | | | IDKQPEWKTYFKFNFKKPEEYPDVNSFYKDADAQMYSISFAKIPCEYVDKAVTNGELFLFELYNK |
| | | | | | DFSEHSKGRPNLHTLYWKMLFDESNLNNIMNNPDKGIFKLNGEAEIFYRKASLPDKPTHPANKPI |
| | | | | | TNKNPLNRKMQSTFEYDIKKDRRYMSDKFMFHCPLTINFRKEKVGQGQFNTKVNTAIEQNLED |
| | | | | | VNIIGIDRGERHLLYYTMINSKGNIIKQGSLNSMTADCGVTTDYRSKLNDKEKSRTAGRENWGQI |
| | | | | | ETIKELKQGYLSQVVHTLSQMMIENNAVIVLEDLNTGFKNGRKKVEKQVYQNFEKALIDKLNYL |
| | | | | | VFKEKAVGEKGSCLEGYQLTAPFESFTNLGKQSGFLYYVIPAYTSKICPKTGFVDFLKPKYESVE |
| | | | | | KSVELFEQFDKICFNAEADYFEFSFDFKKTGVDKGGKTKWTVCTFGKERYVYQGTDKEPKCIDV |
| | | | | | TEELKNLFSFYNIALADKKDLLPQILTVKEKNFWSSLIYTLRATLQMRYTKPGTEDANDYILSPV |
| | | | | | MDENGVFFDSRNAVENEPKNADANGAYHIAVKGQKLIASITAGRTTDSGKLNEWLEYVQKRG |
| MG29 | 6456 | MG29-133 effector | Protein | Unknown | METNFFKSFTKQYSLSKTLRFELKPIGKTIANIETKGLLAQDNQRAESYKKVKKTIDEYHKYFIE |
| effector | | | | | LALKAVKLTKLDEYYELYSKNKEDRDDAAFKKVKEDLRKEIVAVFTKGGFKEMFIRLFSKELIK |
| | | | | | EDIAAWISEHPKFAEDLKFVKEFDNFTTYFTGFNENRKNIYSAEDKSTAIAFRIVHENLPKFIENIK |
| | | | | | LFKTIKEKHANLDFSPILKEMEEVIQGVTLDEIFTLDYFNHVLSQNGIEFINFIIGGKTLKNGDKIK |
| | | | | | GLNEYINLYNQQQKDKNKRAPKFKQLYKQILSDRTSISMRFEEFENDSDLLETVEVFYQSELCEY |
| | | | | | ETEGKTIINIFEEIKTLCESIGTYNLEKIYLRNDSNLTNISQRLFGSFSVFRDSISFYYDTVVDTNFQT |
| | | | | | KYANAKTENQIKHLNDTKNKWNSDFISLGLLQKTLAKYIETLDADSEIRKIYTPTIITDYFKRHIIK |
| | | | | | KEVEEAKNNETIKKTTDVELFYSITGQYLGVKGLLNIEKTDNKTLAQEKEKVHQLKSFLDSILEL |
| | | | | | NHFVKPLFLTDDSISDKDDAFYSQFAPLYEQLNKLIPLYNMVRNYLTQKLYCTDKIKLNFENSTL |
| | | | | | LDGWDVNKEPDNTSVILRKDGLYYLVIMDKAGKKVFMDVPKIAYSGTFYEKMNYKLLPLVNQQ |
| | | | | | LPRVFFAKSRIEFFKPSEAIQENYKKETHKKGDTFNIKDCHALIDFFKASLAKHEDWKHFNFKFS |
| | | | | | PTKSYQDLSGFYREVEHQGYKMSFENIPTDYIDKMIEEGKIYLFQIYNKDFSAFSKGLPNMHTLY |
| | | | | | WKALFDENNLADVVYKLNGQAEVFFRKSSIEEKNKVIHKAHELLKSKNPNTPNNNNTFDYDLIK |
| | | | | | DRRYTVDKFQFHVPININFKASGSEIINAQTNDFLKNNRDVKIIGLDRGERNLIYLTLIDQKGNIIIQ |
| | | | | | ESLNTISNKERKIETPYHTLLNIKEKERDAARKSWNTIENIKELKEGYISQVVHKIAEMMVKHHA |
| | | | | | IVVMEDLNFGFKRGRFKVEKQVYQKLEKMLIDKLNYLVFKDAQPTQPGGLLNALQLTNKFESF |
| | | | | | KKMGKQSGFLYYVPAWNTSKIDPATGFVDFLKPKYENVEKAKAFFSKFDSIKYNTVKDYFEFAF |
| | | | | | DYKNFTTKAEGSKTDWIVCTHGDLRFRYNAQTKESEAVNVSQEIKKALKKHEITFEQGKDFKNL |
| | | | | | LIAKGGKEIFSALLHLLALTLSLRQTKSGSEIDFILSPVTNRKGVFFDTRNADEKMPIDADANGAY |
| | | | | | HIALKGLWCLQQISQSDDMKKVKLAISNKEWLEFVQNLCWH |
| MG29 | 6457 | MG29-134 effector | Protein | Unknown | MNFNNFTHQYSLSKTLRFELKPIGETADYIEDFKSQYLKDIVTQDQQRAEDYKVLKEIIDDYHRH |
| effector | | | | | YIEEKLSEPFDKKTGELFISEEDFENAFSYYQRFKEDPKDEKSKKDWLDTQSSLRKSVVKIFSDRK |
| | | | | | KRLFQKELITKELPAWLKEKGEWEEKKNVVENFNRFTTYFTGFNENRENMYSDEEKSTAISFRL |
| | | | | | MNENLPKFLNNCLQFGVIIEKHIDLDLKIESKLLQKMGVSNLNEVFQPSYFIQLFTQTGIDNYSEL |
| | | | | | LGGWTKENGEKIQGLNELINLHRQKYSIKAKGLPNFIGLYKQILSDRESSSFIPDQFENDKALLES |
| | | | | | LKIFVKEMAKTDGIFVNLKKAVTLLKEADLDKTFIKGGVEISKISQAIFGQYSIIRSAIYNYAETV |
| | | | | | MYPTPKTGKVSDVLEEKRKKYANNEDIFSIAELESMLTSYREQLEDEHPDKEITHCENSEHPIRT |
| | | | | | YFLNIIDNVKNDKDIELGKSIENVLPLLSLENLNKGKAGQTQTHLIQKMLDAFLAVTHAVKPLHL |
| | | | | | VKGRKPIEVPDIDMGFYADFSSAFEIYQQMIIGLYNKTRNHLTKKPFSTDKIKINFENPTLLDGWD |
| | | | | | ANKENDNSGILFKKDGNYFLGIMHPKHKNIFNYIKGINDIESEKRSLSKDELFDKIVDGNSDHYQK |
| | | | | | IVYKLLPGVNKMLPKVFFSGRRIDYFAPSTEVLKIRNTASHSKNGKPQKGFEKADFNLKDCHTII |
| | | | | | DFFKQSLEKHPEWKEFEFDFSPTSSYEDLSGFYREVEHQGYKMDFHPIKKSYIDQCIEDGKLFLF |
| | | | | | QIYNKDFSPYSKGKPNLHTLYWKALFDPENLKNVVAKLNGQAEIFYRKHSIIKDDRTIHRSNKSL |
| | | | | | QNKNENNPKKTSLFEYDIIKDKRYTVDKFQFHVPITLNFKAEGVTRENDKINRELSKSDDTHIIGI |
| | | | | | DRGERHLLYYSVINHKGEIVEQETLNTISTDQGFAVDYQQKLDKKEKARDKARKSWSTVENIKE |
| | | | | | LKAGYLSHVVHKLALLIVKYDALICLEDLNFGFKRGRFKVEKQVYQKFEKALIDKLNYLVFKDA |
| | | | | | KPNEPGHVLNALQLTAPFDSFKKLGKQTGILYYVQAAYTSKIDPVTGFINFLYPKYESLIKSKTFF |
| | | | | | ESMEGIRYNPNKDYFEFSFDYRKMTPNRDLKGYQTKWTACTFGEKRFKNIRNANGNWESVEVN |
| | | | | | VTEALKEILKNEDVDFNSNQDLRLAISKVKSTKFYKKLFKLLQITLSLRHSKMGTDEDFILSPVAD |
| | | | | | ENEEFFDSRDATENQPKDADANGAYHIALKGLWNFEQIRNWDGESRLNLAMKNVEWFAYAFQ |
| | | | | | KPFIK |
| MG29 | 6458 | MG29-135 effector | Protein | Unknown | MKNFTNIYPQSKTLKFELRPQGATLDNIHKSGLIDQDETLKADYQAVKKMIDEYHKVVIDESLT |
| effector | | | | | NFKLTGLPAYEELYYKDRTEAEDKTFEKIQSNLRKQVIIKAFGENKRYKSIFKKELIQKDLPDFV |
| | | | | | NKEEEREQISRFYHFTTYFTGFHENRKNIYTAEAKATSVCNRLIHENLPKFLDNRKTYLNYISNFG |
| | | | | | DLDMSQAEEDLQEVLGGIKVGELFSLDFFNHTLTQQDIDIYNIALGGRSVEGGKKIQGINECINLY |
| | | | | | RQNNQLKARQLPNIKPLYKQILSESESGSFLLDKFEKDEDLFDGLRNFYQGLNSFNYKGEQDKST |
| | | | | | FIELMNLFGRFSESDMTRVYLRNDASLSRLSKKLFGDWSLIVSALRYYYDAEVNPLMGKKATNK |
| | | | | | YIKEKENWLNKSRDFSIDIINKSLLRYGTINETVNSQFTDDIIFEHFSSFMIEEKNLLNTVAENFML |
| | | | | | VSEVLSRGSLDKDQNKKKKEIKTIKTFLDNVLDLLHFIKPLSVQHVGAEKDEGFYSDFDVLYDQL |
| | | | | | SQVIPLYSKTRYYLTKKPYSVAKFKMNFKNNTLLDGWDVNKETANKGVLLQKEGLFYLAIMNK |
| | | | | | DHSKSFYNIMDTGDTTGYQKMDYKLLPGPNKMLPKVFFSVKNLGFFNPSEKVLRIRNTSSHSKN |
| | | | | | GNPQEGFDKADFSLNDCHSLIDFFKASLDKHADWKKFAFDFSPTQSYNDISEFYREVENQGYKIT |
| | | | | | YTNISDEYIHELVNEGKIYLFQIYNKDFSPFSKGKPNLHTLYWRALFDEKNLEDVVYKLNGQAEV |
| | | | | | FYRKKSIEYSEEKWIQGHHYDQLKDRFAYPIIKDKRFAFDKFQFHVPITMNFKASGSPVINMKVR |
| | | | | | EYLKTNPDVKIIGLDRGERHLLYLTLIDQNGNIEEQYSLNEIVNSYNGKVHKKDYQQLLHEKEG |
| | | | | | DRKKARENWETIETIKELKEGYLSHVVHKIVNMMVEHNAIVVMEDLNFGFKRGRFHVEKQIYQ |
| | | | | | KFEKMLIDKLNYLVLKDTQDPKAPTGLLNALQLSTKFESFQKLGKQSGFVFYLPAYLTSKIDPAT |
| | | | | | GFVNQLRIKYDSVVKSQAYYRQFDRIVYNTTTDWFEFGFRYVNFGNTTPSVRQEPWTICTTHHP |
| | | | | | RYAWNKNSNMGKGGTEEYNITEELKKLFDHHNIAYEEGTDLIESIASNTGTDFFKRLNKLLNVT |
| | | | | | ASLRHNNGKKGKEERDFILSPVANSEGAFFNSLEADETQPENADANGAYHIALKGLWALQSIRK |
| | | | | | TDTDRMAKLNLVVSNEEWLNFAQAKQYRSQSSS |
| MG29 | 6459 | MG29-136 effector | Protein | Unknown | MFQAFTNQYPVLKTLRFELKPINETTGYLEDFKSAYLKKVVGQDEKRASDYQAIKKIIDNYHRH |
| effector | | | | | YIDQCLVAPCDEKTGELFITPEQMEDAFSYFQAYREKPDEKGGKEGWMKTQKTLRANLVKAFK |
| | | | | | DNGSLFKEDLIKRLLPEWLQQQGTWEECREAVESFSKFTTYFTGFHENRKNIYSSEDHSSAISNR |
| | | | | | LMNENLPRFFNNCIQYTQLREKYPELGLNAPANILQALNASTLDKVFQPGFYLNLFTQRQISHYQ |
| | | | | | ELLGGKTTDTGEKQQGLNEQINLFRQKTGLRPRELPGFTPLYKQILSDVESHSFVPEAFASDRQL |
| | | | | | LDALAAFIMQMDEKMPALMEQLDGLEQADQTKTHIKAQSLGTVSQALFHSWGIIGVALARHAE |
| | | | | | SLFPANAKGVVTKAIEEQREKYGKQETYPLAEVDQVLTGYISTLEQDDPLHQQLKALSTPDKPL |
| | | | | | LAYFRQAAIQTQVSISPLKKQLAELLILPELSKDRQLPKDDQETGGQGFQQVQRIKALLDAYKAL |
| | | | | | VDVFKPLHLVKGRKAMEIPDLDNGFYSMFEETYATCEQPVVALYNKTRNYLSQKPFSADKIKLN |
| | | | | | FEDLTTTLLNGWDVNKETANGNILLEKDGLYYLGILHPKHKRLFDYVKDIDDFGNAKMEQKKD |
| | | | | | VLRTSLEAESGELGYRKIVYKLLPGANKMLPKVFFSASRIGFFQPSSDIQRIRDTASHSKNGTPQP |
| | | | | | GHKKADFSLSDCHAMIDFFKASIEKHPEWREFGFQFSPTHTYVDMSGFYREVEQQGYRIDFHRI |
| | | | | | KASYIDECVKDGKLFLFQIYNKDFSPHSKGAPNLHTLYWKGLFDPENLKDVVIKLNGEAEIFYRK |
| | | | | | HSIRQHDRIIHRAGQPVANKSGGNPKRHSLFEYDLIKDRRYTQDKFQFHVPITLNFKAAGVNAFN |
| | | | | | DRINTTLAGQQGTHVIGIDRGERHLLYYTVINPRGEIVEQGTLNTVEVNVPTTAERAGYQYGVD |
| | | | | | YQKMLDAKESERDKARTSWAGIENIKELKEGYLSHIVHKLAKLITRYNAIVCLENLNAGFKRGR |
| | | | | | FKVEKQVYQKFEKALIEKLNYLVFKDAKPGEAGHFLRAYQLTAPFEGENKLYQQTGILYYVRA |
| | | | | | DYTSKIDPATGFIDFLRPNYESVEKSAAFFRQFDAIRYNVAKDYFEFSFDYKKFQTRQRLESYPTR |
| | | | | | WTACTHGDTRYHNKRDKNGQWHTETINVTEQIKALLQQENIGFEQGQDIREAIAGSKDSPFFKS |
| | | | | | LLFLLRLTLSLRHSRTGTDDDFILSPVANELEEFFDSRKAGQNLPKDADANGAYHIALKGLWNLQ |
| | | | | | QIRQHDWSVAKPQPLKLNLSNEEWFGFVQGKPYLKG |
| MG29 | 6460 | MG29-137 effector | Protein | Unknown | RLFGSFSVFRDSISFYYDTVVDTNFQTKYANAKTENQIKHLNDTKNKWNSDFISLGLLQKTLAKY |
| effector | | | | | IETLDADSEIRKIYTPTIITDYFKRHIIKKEVEEAKNNETIKKTTDVELFYSITGQYLGVKGLLNIEK |
| | | | | | TDNKTLAQEKEKVHQLKSFLDSILELNHFVKPLFLTDDSILDKDDAFYSQFAPLYEQLNKLIPLYN |
| | | | | | MVRNYLTQKLYCTDKIKLNFENSTLLDGWDVNKEPDNTSVILRKDGLYYLVIMDKAGKKVFMD |
| | | | | | VPKIAYSGTFYEKMNYKLLPLVNQQLPRVFFAKSRIEFFKPSEAIQENYKKETHKKGDTFNIKDC |
| | | | | | HALIDFFKASLAKHEDWKHFNFKFSPTKSYQDLSGFYREVEHQGYKMSFENIPTDYIDKMIEEG |
| | | | | | KIYLFQIYNKDFSAFSKGLPNMHTLYWKALFDENNLADVVYKLNGQAEVFFRKSSIEEKNKVIH |
| | | | | | KAHELLKSKNPNTPNNNNTFDYDLIKDRRYTVDKFQFHVPININFKASGSEIINAQTNDFLKNNRD |
| | | | | | VKIIGLDRGERNLIYLTLIDQKGNIIIQESLNTISNKERKIETPYHTLLNIKEKERDAARKSWNTIEN |
| | | | | | IKELKEGYISQVVHKIAEMMVKHHAIVVMEDLNFGFKRGRFKVEKQVYQKLEKMLIDKLNYLV |
| | | | | | FKDAQPTQPGGLLNALQLTNKFESFKKMGKQSGFLYYVPAWNTSKIDPATGFVDFLKPKYENV |
| | | | | | EKAKAFFSKFDSIKYNTVKDYFEFAFDYKNFTTKAEGSKTDWIVCTHGDLRFRYNAQTKESEAV |
| | | | | | NVSQEIKKALKKHEITFEQGKDFKNLLIAKGGKEIFSALLHLLALTLSLRQTKSGSEIDFILSPVTN |
| | | | | | RKGVFFDTRNADEKMPIDADANGAYHIALKGLWCLKQISQSDDMKKVKLAISNKEWLEFVQNL |
| | | | | | C |
| MG29 | 6461 | MG29-138 effector | Protein | Unknown | AETIEIARGLFSEVINLTAIHALADNSENIYINSSALANLSHRFCDDWNLIYRACEAKMIKLSGKQK |
| effector | | | | | KGLENKLKMAIPMSELQNIIEEYIATLDEELKLSYNNIPVLCDYFQNPPLDDFESATLKFEQIVKT |
| | | | | | TMSRTDLIQAIKEVLDKAMEVVRFFKPLYLFKGRSPLEVPDRNEDFYNEFERLYAELNLISKIYD |
| | | | | | RVRNYATKKQFSQDKIKLNFNNPTLLDGWDLNKEQDNLCVILIRDGNYYLALMNRDYRRLFDL |
| | | | | | KNDEVRNKALGKAGDHCYSKLEYKQVTGASKMLPKVLFAATNSDLFKPSQEILDIRKAGSHKK |
| | | | | | EAGNIEALHKWIDFCKQSIATHPEWNDHFDFKERSTSEYSELTEFYNDFDRQAYKIKFVDIKVEYI |
| | | | | | DQLVKEGKLYLFQIYNKDFSPYSKGRPNLHTTYWRMLFGNENLANITMDPDRPIFKLNGEAEIFF |
| | | | | | RKASLEKQITHAKGQPITNKSKKDNGKESESIFEYDLIKDKRYTEDKLFFHCPITINFRAPGTTVG |
| | | | | | SFNRKVNYFVERNPEVKIIGIDRGERHLLYYTVIDQKGNILEQGSLNQIHNSYTSAGRVVEHNINY |
| | | | | | RDLLHEKEKGREEARKNWETIENIKELKAGYLSQIVNLLSNLMIKYNAVLVLEDLNAGFKRSRI |
| | | | | | KVEKQVYQKFEKAMIDKLNYLVFKELPPGSSGHYLNGYQLTAPFTSFRDLGRQSGFLYYVYPSY |
| | | | | | TSHICPKTGFVNLLNTRYESIEKAISFFEKFNSIKYNPGSDYFEFDFDYASFGKDVARSQWCVCTA |
| | | | | | GEKRYYYANHDKTSRECNATQQIKELLDKYNIEYIRGKDLLPELIKMNDKGFLNGLMFLLGVVL |
| | | | | | QMRYTVSGTSNDDDFILSPVMDEQGQFFDSRSAATSEPQNADANGAYHIALKGLKMISSISDGKL |
| | | | | | KTVNKNERQDWFAYVQNKMYR |
| MG29 | 6462 | MG29-139 effector | Protein | Unknown | MQTIFNDFQGLYSLSKTLRFELKPVGKTKELLEDFYNHCQDNPIAVDEQRIGHYPKMKDLIDDY |
| effector | | | | | YRFFIDKILSPTIYSAEEMQNAYELYCAAKSDNKNNQKDYLAAKKILRKKLAKCFTDQKTIYGLN |
| | | | | | EYSKLFGQEQMPLNLWLKCRLDNHQITEAEYQENMATIKAFERFTTYFTGFKENRENLFVEDD |
| | | | | | KASAIANRVIEENMEKHFFNCRTLTAMVEKQPQLAKELAEFLPLFTPEHYCKCINQQGIDSYNQ |
| | | | | | AIGRKIDCEGEKGVNQILNEYKQNSNLRAKDLPMLTTLFKQLLSKKSDCLFNETITTDQEMLQL |
| | | | | | TQYCYNKAKKQLNELQKIMADYLTDENLQHIYLKKASLNALSHRFLGEWDTVRNAYLNHYQQ |
| | | | | | LTKKEQNAFDKQTKEVIGLDLLQTIISNYLPNLESAPSVSQLAIYLGSIDLEPLNKAYAEAASVLAL |
| | | | | | EKLDDDKRLPENINDEGGLGYQQIMLVKCLLDKIIDAKDFYKPFLLEQGHKPLKVDNNNELFYA |
| | | | | | QFVSAFYELDSLCQKYNFIRNYATKKATSTDKFKLNFSKPTLLNGWDLNKEEANSNVLLRKNDK |
| | | | | | YFVGILINKKLFADPAKYICEDEAEHYQKMLYKQVSGVNKMFPKVFFAAKNQNIYKPSAQILQIK |
| | | | | | EAKSHLKEANNPSAKNAWIDFCKDSIKKSEWPQYFNFKFKPANEYPDVNSFYQEADAQMYSLAF |
| | | | | | QNVAADYVTQAVENDELYLFEIYNKDFSACSKGKPNLHTMYWQMLFDEQNLQNIADSAEKPVF |
| | | | | | KLNGEAEIFYRKASLVDTVTHPAGVPIANKNPLSSKMTSTFTYDIKKDRRYMQNKLYFHCPITIN |
| | | | | | FRKNTMPQTVFNYKVNTFLQDNPNVNIIGIDRGERHLLYYSLINQKGQILKQGSENTITAAGNTT |
| | | | | | DYHNLLDKKEHQRTQARQDWATIERIKDLKSGYLSHVIHELATLMIDNNAVVVLESLNKGFKTG |
| | | | | | RQKIEKQVYQKFEKALIDKLNYLVFKDSAPNQAGHCLSGYQLTAPFESFDKLYNQSGFLYYVVP |
| | | | | | AYTSKICPKTGFVNLFNSSYTNYQSVNASVEFLKKFETIKYNTQADYFEFRLDYKNFFEAKGKTT |
| | | | | | WTICTHGQERYHYNPKDKKYKCIDVTQQLKELFTNYGIDYQSENDLRQEICAQTEKSFFSGLLF |
| | | | | | YLKLTLQLRHTNGGTDDINDFILSPVADSNGCFFDSRQAQLTEPKNADANGAYHIALKGLKLLK |
| | | | | | GLDEGRTPSTKNEKAQWLEFTQQHQYLEA |
| MG29 | 6463 | MG29-140 effector | Protein | Unknown | MLFKKFTNQYPLSKTLRFELKPVGETADYIEDFKSQYLKDIVAQDEQRAEDYETIKETIDNYHQH |
| effector | | | | | YIEEKLSEPIDKKTGELFISGEDFENAFSYYQCFKENPKDEKSKKNWGDTQTSLRKNLVKSFYDR |
| | | | | | KKQLFQKELITKELPAWLKEKGEWEEKKHVVENFNRFTTYFTGFNENRKNMYSAEEQSTAISF |
| | | | | | RLMNENLPKFFNNCIQFGVIIEKHIDLDLKIESKLLQKMGVSNLDEVFQPSYFIKLLTQTGIDNYS |
| | | | | | ELLGGWTKENGEKIQGLNEIINLYRQKNAIKAKYLPNFISLYKQILSDRETSSFIPDQFESDKDLL |
| | | | | | QSLSVFINEMAKEDGLFKKLEESITLLNECDLHKTFIKNGIEITNISQSIFRNYSILKSAIFHHAETTI |
| | | | | | YPTPSNGKISEALKEKRKKYVNKQNVFSIAELEVMLSVYYNQLDDDNPIRETFKNGITSNNLLQS |
| | | | | | YFLGAINAVKNAKDTCLTEKMEKVLPLLSLDRLSKGEKGEEQIRHIQAMLDAFLAVSHVVKPLH |
| | | | | | LVKGRKPIDVPDVDMGFYTDFSTSFEAYDQTVIMLYNKTRNHLTQKPFSKDKIKINFENPTLLDG |
| | | | | | WDTNKEKDNSGVLFEKDGNYYLGIMHPRHKKIFDYNKGINDLESVKRSQTKDKLFDKIVDCSQN |
| | | | | | HYNKIVYKLLPGASKMLPKVFFSKGRIEFFSPSNDVIRIRNTASHTKNGKPQEGFKKAVFNLNDC |
| | | | | | HTIIDFFKTSIEKHPEWKEFGFDFSPTSSYEDLSGLYREVEHQGYKMDFHPIKESYINQCIEDGKL |
| | | | | | FLFQIYNKDFSQYSKGKPNLHTLYWKALFDPENLKDVVAKLNGQAEIFYRKHSIKKDERTIHFA |
| | | | | | NESLKNKNENNPKKTSSFEYDIIKDKRYTVDKFQFHVPITLNFKAEGVSRENDKINHELAKSNQT |
| | | | | | HVIGIDRGERHLLYYSVINPKGQIVEQGTLNTISTDQGYEVDYQQKLDEKEKARDKARKSWTTV |
| | | | | | ENIKELKAGYLSHVVHKLALLIVKYNAIVCLEDLNFGFKRGRFKVEKQVYQKFEKALIDKLNYL |
| | | | | | VFKDAKPNEAGHVINALQLTAPFDSFKKLGKQTGILYYVQASYTSKIDPVTGFVNFLNPKYESLL |
| | | | | | KSKIFFESMDGIRYNTDKDYFEFLFDYRKMTPNRELKGYQTQWTICTHGNKRFKNIRNEYGKW |
| | | | | | ESVEVNVTEELITLLTNEGIEFQSGKDLKNAITTAKRTKFYKSLFKLLQLTLSLRHSKTGTDEDFI |
| | | | | | LSPVANEAGQFFDSRNATEIQPKDADGNGAYHIALKGLWNLQQIKAWDGESKLKLAMKNVDW |
| | | | | | FTFAQKKPYLKN |
| MG29 | 6464 | MG29-141 effector | Protein | Unknown | MKLNKFTIIQYPISKTLRFELKPVGETADYIEDFKSQYLKDIVIQDQQRAEDYESIKVIIDEYIIRIIY |
| effector | | | | | JEEKLSEPFDKKTGELFISGDEFENAFSYYQRFRENSKDEKARKEWIEVQNSLRKSLVKVFSDRK |
| | | | | | KRLFQKELITKELPSWLKEKGEWEDKKNVVENFNRFTTYFTGFNENRENMYSHEEQSTAISFRL |
| | | | | | MNENLPKYFNNCIQYHKAIESYDGLSFTVNPDLLNEMGVSILSEIFQPSYYIQLFTQSGIDKFTELL |
| | | | | | GGFTKENGEKVQGLNETINLFRQQKAIKAKAFPNFISLYKQILSDRETSSFIPDQFENDNDLLKSL |
| | | | | | GKFIKEMVKEDGLFKKLEDSIKLITDADLHRTFIKNGVEITKISQSIFGNYSILKSAIYHHAESVLY |
| | | | | | PDPISGKISEALKEKRIKYVNKQVVFSIAELETILSNYASQMTDDNPDKEIIAQCENSEHPIRTYFL |
| | | | | | NAIENVKNDKDIEFGKAIENVLPLISLENLNKGKDGQAQTHKIQKMLDAFLAVTHAVKPLHLVK |
| | | | | | GRKPIDIPDMDMGFYAEFSKAFENFEQLVITLYNKTRNHLTKKTFSTDKIKINFENPTLLDGWDA |
| | | | | | NKEKDNSGVLFEKDGNYYLGIMHPKHKNIFNYIKGINDIESEKRSLSKDELFNKIVDGESEHYQKI |
| | | | | | VYKLLPGVNKMLPKVFFSGRRIDFFAPSTEVLKIRNSASHSKNGSPQKGFEKEDFNLKDCHTIIDF |
| | | | | | FKKSIEKHPEWKEFEFEFSPTSSYEDLSGFYREVEHQGYKMDFHPIKKSYIDQCIEEGKLFLFQIY |
| | | | | | NKDFSPYSKGKPNLHTLYWKALFDTENLKDVVAKLNGQAEIFYRKHSIKKDERTIHRANKSLQN |
| | | | | | KNENNPKKTSLFEYDIIKDRRYTVDKFQFHVPITLNFKMEKMITQFAHNEKVNQMIVKSENTHVI |
| | | | | | GIDRGERHLLYYSVINPKGHIVEQGTLNTISTDKGYEVDYQQKLDSKEKARDTARKSWTTVENI |
| | | | | | KELKAGYLSHVIHKIAFLIEKYNAIVCLEDLNFGFKRGRFKVEKQVYQKFEKALIDKLNYLVFKD |
| | | | | | AKPNEPGHVLNAFQLTAPFDSFKKLGKQTGLLYYVQASYTSKIDPVSGFINFLYPKYESLLKSKIF |
| | | | | | FESMDGIRYNADKDYFEFSFDYRKMTPNRNLEGYQTKWTACTFGEKRFKNIRNAHGNWESVEV |
| | | | | | NVTEALKKILKNEDVDFKSGHDLRFEISKVKSTKFYKKLFKLLQITLSLRHSKTGTDEDFILSPIV |
| | | | | | DENGKFFDSRNATKAQPMDADGNGAYHIALKGLWNLEQIRNWDGESRLNLAMKNVDWFSFAY |
| | | | | | QKPFKK |
| MG29 | 6465 | MG29-142 effector | Protein | Unknown | MKLNKFTHQYPISKTLRFELKPVGETADYIEDFKSQYLKDIVIQDQQRAEDYESIKVIIDEYHRHY |
| effector | | | | | IEEKLSEPFDKKTGELFISGDEFENAFSYYQRFRENSKDEKARKEWIEVQNSLRKSLVKVFSDRK |
| | | | | | KRLFQKELITKELPSWLKEKGEWEDKKNVVENFNRFTTYFTGFNENRENMYSHEEQSTAISFRL |
| | | | | | MNENLPKYFNNCIQYHKAIESYDGLSFTVNPDLLNEMGVSILSEIFQPSYYIQLFTQSGIDKFTELL |
| | | | | | GGFTKENGEKVQGLNETINLFRQQKAIKAKAFPNFISLYKQILSDRETSSFIPDQFENDNELLKSL |
| | | | | | GKFIKEMVKEDGLFKKLEDSIKLITDADLHRTFIKNGVEITKISQSIFGNYSILKSAIYHHAESVLY |
| | | | | | PDPISGKISEALKEKRIKYVNKQVVFSIAELETILSNYASQMTDDNPDKENIAQCENSEHPIRTYFL |
| | | | | | NAIENVKNDKDIEFGKAIENVLPLISLENLNKGKDGQAQTHKIQKMLDAFLAVTHAVKPLHLVK |
| | | | | | GRKPIDIPDMDMGFYAEFSKAFENFEQLVITLYNKTRNHLTKKTFSTDKIKINFENPTLLDGWDA |
| | | | | | NKEKDNSGVLFEKDGNYYLGIMHPKHKNIFNYIKGINDIESEKRSLSKDELFNKIVDGESEHYQKI |
| | | | | | VYKLLPGVNKMLPKVFFSGRRIDFFAPSTEVLKIRNSASHSKNGSPQKGFEKEDFNLKDCHTIIDF |
| | | | | | FKKSIEKHPEWKEFEFEFSPTSSYEDLSGFYREVEHQGYKMDFHPIKKSYIDQCIEEGKLFLFQIY |
| | | | | | NKDFSPYSKGKPNLHTLYWKALFDTENLKDVVAKLNGQAEIFYRKHSIKKDERTIHRANKSLQN |
| | | | | | KNENNPKKTSLFEYDIIKDRRYTVDKFQFHVPITLNFKMEKMTQFAHNEKVNQMIVKSENTHVI |
| | | | | | GIDRGERHLLYYSVINPKGHIVEQGTLNTISTDKGYEVDYQQKLDSKEKARDTARKSWTTVENI |
| | | | | | KELKAGYLSHVIHKIAFLIEKYNAIVCLEDLNFGFKRGRFKVEKQVYQKFEKALIDKLNYLVFKD |
| | | | | | AKPNEPGHVLNAFQLTAPFDSFKKLGKQTGLLYYVQASYTSKIDPVSGFINFLYPKYESLLKSKIF |
| | | | | | FESMDGIRYNADKDYFEFSFDYRKMTPNRNLEGYQTKWTACTFGEKRFKNIRNAHGNWESVEV |
| | | | | | NVTEALKKILKNEDVDFKSGHDLRFEISKVKSTKFYKKLFKLLQITLSLRHSKTGTDEDFILSPIV |
| | | | | | DENGKFFDSRNATKDQPMDADGNGAYHIALKGLWNLEQIRNWDGESRLNLAMKNVDWFSFAY |
| | | | | | QKPFKK |
| MG29 | 6466 | MG29-143 effector | Protein | Unknown | MIYNVKLKKLTNSSDVFSLFSRKYSLSKTLKFELKPTAETKQHLQDFIVSDTKRAKEYKELKKIID |
| effector | | | | | EFHKDYIELTLSHKNILDKDKLTDFCKLWSDNNLLDEIKEKHNLKEKTKEEVIKKMEQQFRKDI |
| | | | | | VEQFKTLNPLLERFFKTADEEQLLGFLKKLDNKLWTKFKEKKEKALLDEYLQEPIKQKNIEKSI |
| | | | | | LFSSELIKYLLPVWLKNSQLTDKEDKQKIIKNFGRFTTYLTGFNENRKNMYSVEEQGTAIAHRIIN |
| | | | | | ENLMKFLGNLQAYEKIKSSHPELQQSFKNMKSDFKEEFDYFSLENIEDLFKPEFFNSCLSQKEIDF |
| | | | | | YNTLLGGKTVEDGKKLQGINEYINLYRQKKKSEDIDIKIKYSNKNLPTMELLYKQILSDRESHSFI |
| | | | | | LAEFENKKELLEALKSFWSVLFEEKTYQDYFHTKKKTSLWNNLHSLLTGRSYYDLEGAYFKSSE |
| | | | | | LNKLSHNLFKDYRIITEALNENYDKIKVTLESYKKVLKKEDKKEFEKNIKSLKGFQTEWKKILSF |
| | | | | | EKNKEELKFSDEILASYFEFPIDKKTKKKNQKDFYSLQEIKDHIELYSKESDELKEDLDNLKKKL |
| | | | | | KDYKKDNIISSWFKYQFESKQNLDFFLQRNHEKENEDKREQNKNSLFSHIENHYQKIQNLSLDEK |
| | | | | | EFKKEEVEDIKFFLDLILHVLHLMKPFYLEGKASNLLDKGINNEIEVLYKKLKPIEKLYNQTRNYI |
| | | | | | AKKKSRYNKVKINFEDSTLLDGWDLNKEKDNLAVLLRKKDAVIGWKYYLGVMNKTTKDLFDY |
| | | | | | HIKLDDSEKVKQKKEELQDLILHRENDGNFYEKMNYKLLPDPSKMLPKVFFSKKNLDSFKPSEEI |
| | | | | | VRIRDNKTYAKNGGQDFSKADCHKFIDFYKESLKKHKEWNDFFKFNFSPTSQYNDISDFFQEVK |
| | | | | | NQGYNLQFDKIKSSYIEEKVKTGELFLFEIYSKDFSTKSKNRKNSKDNLHTIYFKGLFEKENLKDT |
| | | | | | VLKLNGKAEIFYRKATKKFNITHKKNTELENKNKNNPNKHSIFNYDLIKDKRFTEDKFFFHFPISL |
| | | | | | NFNSKGMKSYLFNQEVLKCLKGNKEVNIIGIDRGERHLAYYTIINQKREVLSQGSFNKMESSYKD |
| | | | | | NSGKEVKIEKDYHELLESKEKERDKSRKEWNKIENIKELKSGYLSYLVHKISKLMIEHKAIVIFED |
| | | | | | LNLGFKRGRFKFEKQVYQKLEKALIDKLNYLVFKDKKSSELGGYLNAYQLTAPFESFQRMGKQ |
| | | | | | TGYLFYVPAYYTSKVCPLTGFINLIYPKYKNVKESQQFFEKFDRIYFDKNKNYFVFEYQDKKVNP |
| | | | | | SKKTESIETLWKVCTHGEERYKWDVKDRKMIEVNVTENLKKLFEEHKIEYRQIADLKSTITKQE |
| | | | | | KKDFFSKLIDGLKITLQLRHINPDSKDEKEKDFILSPVADESGRFFDSRKAKEGEPKNADANGAY |
| | | | | | HIALKGLRTLENITSDKKDKLKLQAITNKDWFSFLKENSNKKIPKVG |
| MG29 | 6467 | MG29-144 effector | Protein | Unknown | MGMIGDQFIGQYSLQKTLRFELRPIGETQKLLQDFKEEVQGNLLEYDAERARAYPMVKKVLDD |
| effector | | | | | YYRYFIDQVLSGFAFDSQTINEVYEMYKKAKKDAEAAKEYAVHTKKLREQLSAAFKAPITYYML |
| | | | | | DKYEHLFNRNRESRLFEWLDIRFENDHLTENEYDEIKDVLDKFDKFTTYFTGYKENRANLFVAD |
| | | | | | EKATALAYRVVNENMPRFFENCIRMENIKKRHLDLYKLLDSFEGYFVPQAYANIICQPAITDYNKI |
| | | | | | IGRPTQNPDEKGVNSIINEYRQKNQIKNRELPMMAQLYKQLLSDRITVFLDPVINNDEEMQSIVA |
| | | | | | ETIEIARGLFSEVINLTAIHALADNSENIYINSSALANLSHRFCDDWNLIYRACEAKMIKLSGKQKK |
| | | | | | GLENKLKMAIPMSELQNIIEEYIATLDEELKLSYNNIPVLCDYFQNPPLDDFESATLKFEQIVKTT |
| | | | | | MSRTDLIQAIKEVLDKAMEVVRFFKPLYLFKGRSPLEVPDRNEDFYNEFERLYAELNLISKIYDR |
| | | | | | VRNYATKKQFSQDKIKLNFNNPTLLDGWDLNKEQDNLCVILIRDGNYYLALMNRDYRRLFDLK |
| | | | | | NDEVRNKALGKAGDHCYSKLEYKQVTGANKMLPKVLFAATNSDLFKPSQEILDIRKTGSHKKE |
| | | | | | AGNIEALHKWIDFCKQSIATHPEWNDHFDFKERSTSEYSELTEFYNDFDRQAYKIKFVDIKVEYID |
| | | | | | QLVKEGKLYLFQIYNKDFSPYSKGRPNLHTTYWRMLFGNENLANITMDTDRPIFKLNGEAEIFF |
| | | | | | RKASLEKQITHAKGQPITNKSKKDNGKESESIFEYDLIKDKRYTEDKLFFHCPITINFRAPGTTVG |
| | | | | | SFNRKVNYFVERNPEVKIIGIDRGERHLLYYTVIDQKGNILEQGSLNQIHNSYTSAGRVVEHNINY |
| | | | | | RDLLHEKEKGREEARKNWETIENIKELKAGYLSQIVNLLSNLMIKYNAVLVLEDLNAGFKRSRI |
| | | | | | KVEKQVYQKFEKAMIDKLNYLVFKELPPGSSGHYLNGYQLTAPFTSFRDLGRQSGFLYYVYPSY |
| | | | | | TSHICPKTGFVNLLNTRYESIEKAISFFEKFNSIKYNPGSDYFEFDFDYASFGKDVARSQWCVCTA |
| | | | | | GEKRYYYANHDKTSRECNATQQIKELLDKYNIEYIRGKDLLPEIIKKNDKGFFNGLMFLLGVVL |
| | | | | | QMRYTVSGTSNDDDFILSPVMDEQGQFFDS |
| MG29 | 6468 | MG29-145 effector | Protein | Unknown | MKEFTNKYPSQKTLRFELQPQGKTRDYIDKNGILLRDKERNESYQEMKKTIDRFHKYFIDLALS |
| effector | | | | | DVKLSHLSQFKDLYLSVEMSEQQKKTIDEVKTKLRKEVAAAFRTGDAKSIFSLLDKKELITKLLK |
| | | | | | EWAEKERINNFYFDENFEKFTTYFKGFHQNRQNMYSDEAKATSIAYRSIHENLPRFIDNILIFQKL |
| | | | | | LQKEEIASHLHDICIGLEGYLNVNSIPEMFEINYYNTVLTQRQIEVYNAVIGGKTFEDGVQIQGVN |
| | | | | | QYINLYNQRCDHKDRVPPLKQLYKQILSDRESLSFLPDAFEEASQVFKSINQFFENNLIQFKVNDL |
| | | | | | EPVNILENVSKLMTELAFYDLKHIYVNNTFLSDISQKIFRNYAVIKEALNYQYESKIDPFFSEKYAK |
| | | | | | AKAENSREKLEKAKKNYTEKSYISLYEIQIALNNYMLTLEEDCIEKKSFTQTCLIDYYRSVFTHNT |
| | | | | | TEGEIDIITSIYRSYEELKEISSIDYPKNTPLSQDKSSIAKIKSLLDNVMELFHCIKPFAVPEEEISDK |
| | | | | | DGHFYNNFLVYYKSIKEIIPLRHKVQSYVTQKPYSLKKFKVNFDNSYFLTTWPFSYENKGGVIIR |
| | | | | | KEDLFYLAIINCSVKDLANYKLNDCSIANSAERIIIDTQKPDNKNIPRLFIRSKGDSFAPAVTEYDLP |
| | | | | | INDIIDIYDNGKFKTEHKKLDPEEFKSSLTALIDYFKLGLSRHNSYKHYKYQWKPSDCYNDISEFY |
| | | | | | NDTVNSCYQIKTEKINFDKILELVSEGKVYLFKIYNKDFSPNSKGQPNLHTMYWRALFDENNLKN |
| | | | | | VIYKLNGGAEIFFREKSISKENEIVHYANQPIKNKNPHAIKREVILPYDVIKDKRFCIDKFQLHIPIT |
| | | | | | LNFKATGKGQLNFDVLQYLKDTPQNQVKVIGIDRGERHLLYLTMIDHEGHIIMQESLNTVKSDN |
| | | | | | YPIETQYHDLLAQKEEDRNKARSNWDSIENIKELKEGYLSQVVHKLAKLIVENNAVLVMEDLNI |
| | | | | | GFKRGRFKVEKQVYQKFEKALIDKLNYLVFKDKKVEEEGGLFKALQLTEPYTDFLKYKKKQC |
| | | | | | GFLFYVQAWNTSKIDPTTGFIDMLKPKYKNIPEAQEFFRKFISIKYNSDKDYFEFHFDYRNFPRSI |
| | | | | | DSHKNDWTVCTYGKERYTWNRSLNQGKGDYEIWNVTEKIKELFNIEGIEYRSGHNLTEAIANSE |
| | | | | | SKSLLSMLMKSLSVVLAMRYSSSKDNRDFILSPVANDKGVFYYSEEADQYLPKDADANGAYNIAR |
| | | | | | KGLLLLDRIRSSADLKSLKLDISNKEWLMHAQK |
| MG29 | 6469 | MG29-146 effector | Protein | Unknown | AISQQLTGSWHTINDWIADVSDNKQLSQIKKQSVFSILELEQYFGIKIEGLNFYETHAKEEHKSDQ |
| effector | | | | | SLLKFFLKQFNEKFVEIDKTWHELSQSHVLELEQLDKKRYKAEQKGFQQVALIKAFLDSCNNLN |
| | | | | | YFIKDWTLKTSKDKYEDCYNFINSILDEFSIYHLYNKVRNYIAKKPFSTEKVKVTFEKSTLLDGW |
| | | | | | DRNKETQNLGILFTRNNQYYLGIMTSESNNLFNYDKLESDSIKKAELKSKTYNSCIASSSEDSYQK |
| | | | | | INYKLLPGPNKMLPKVFFAKSNIEFYNPSDEIITIKEKKLYSKAEIEKHGIANLHKYIQFCIDSLAK |
| | | | | | HPEWSVAYGFRKDSFKPVNTYQSIDEFYKDVEDLGYKITFDNIKKSYIDEKVENGELYLFKIHNK |
| | | | | | DFSKYSKGNKNLHTLYWQGLFEKDNLKDVVIKLNGEAEIFYRPSSIKLSETTIHKKGYEIKNKNV |
| | | | | | IKDKKISKFDYDIIKDKRYTQDKFFFHCPITLNAKANSNPGKFNDKINKFLKNNKEVNIIGIDRGE |
| | | | | | KHLLYYSVVDQQGNVISQDSFNTVNGVDYLAKLKQKEISRDEARKSWTIIENVKELKSGYLSHVI |
| | | | | | HKLAELIIEHNAIVVLEDLNIGFKRGRFKVERQIYQKFEKALIDKLNYLVFKDKTNRLQAGHYLN |
| | | | | | ALQLTNKFTSFQKLGKQSGILFYTTAAYTSITDPITGFVKNLYKNYASVKDSIAFWNSFESIHFNT |
| | | | | | QKDRFEFTYDTKKINSKNLNKDTKEDKEIQTKWMVCSCVIRSRYDKKSKTHELFDVNKKLKQL |
| | | | | | CEKFNIDYKNYNLKHEFSKIDKKDFHKSCLYYFNSILNLRVTDSSQASGTPENDFILSPVEPFFDSR |
| | | | | | KKYRKLPENGDANGAYNIARKGICMLNKIKQWDEQKRLDLLITKKDWQEYCQNNEIIKQQMN |
| | | | | | KMKHKA |
| MG29 | 6470 | MG29-147 effector | Protein | Unknown | MNENNSIWGNFINKYNLSKTIRFELKPVGKTIDFIKENGLIEEDKQREKDFNEVKKIMDEYYVEFI |
| effector | | | | | ENSLKNIKLDLSDLQEYYTIYFELKKDKYNSDLKKQFKNIQKKIANNMYQQIKDVDNFNNIFDEK |
| | | | | | FVNVVLPKWLKEKGREQDEMLLSKFKKWTTYFDGFFNNRQNVLSNDLIPTSIFYRIVVDNLPIFL |
| | | | | | DNIAKYDKLKKINGFPLESIEKNFAKYLNNVSLDYFFSLENFNNLLNQEGIDLFNLILGGYVENNS |
| | | | | | KICGLNESINLYSQKPENKETSKQLKQLIMMPLYKQILTEKKSFSEKFGIIQDNQELVNLIDDIYT |
| | | | | | NNYVLNFDNLQKLIKNLNEYDLNQIYVNTLSLQKISKSIFKDLFVIRNGLKEFIKNKEHIKSDKKS |
| | | | | | EKKLEEILNQKYFSIFEIQEGVKLLKLSKEGNSFSDNFMIDYFLENINDKLFENIKNNYNQFKSINV |
| | | | | | NHLTKITSEDIQTIKTLLDSLKELFDYIKPLYVNLNIGTNTKIQEAYNLDSLFYIEFNKIYNAFSVIIP |
| | | | | | TYNKVRNYVTKKQKNVKKFKLNFNCPVLLKGWDVTKEPENHSVLFRKDGDYYLGIMPKGHTH |
| | | | | | MFSNIENIDNDGEYYEKMVYKQISDASKDIQNLFVKDNKTQRIVGRKEKEGDNKGKNVELENAR |
| | | | | | KKYLPEDIQEIKKKKSYLRSSPSFNEADKNRFIDYYKERVIDYENYNMFNFKFKESEEYLDENDFI |
| | | | | | KDVDNQGYKIEFIKINEQFIMD |
| MG29 | 6471 | MG29-148 effector | Protein | Unknown | MPRTESIWDGFTNQYSLSKTLRFELKPIGKTQEYIKERGLITEDKEREKNFDVVKNMMDDYYRH |
| effector | | | | | FIEESLVNVAINTNHLKRYQEIYNSLKKDRTNQKLQKEFSQAQGYLRKQILKGINENPNFQHLFK |
| | | | | | QEFLTKILPTWLGDKDRTEDAKRVLEFNKWSTYFTGFFDNRKNVFSEKEIPTSVIYRIVNDNLPK |
| | | | | | FLDDISRFEELKKLNGFDYSEVESNLKQELEGKCLNDVFSLDNFNNCLNQSGIDLENLIIGGKSDE |
| | | | | | GGTHFKGLNNIINEFSQQQDNKAIRRLKLIPLFKQILSDRESFSFISEKFDNDKELMEELLDFYEKI |
| | | | | | RSIQIIDKLKDITLKLPEYDLERVYLKNDANLTQISQEIFDNWAYITSALQEYAVSVLGLKESKAK |
| | | | | | AWVQKQSYFSIYELEEAIRQKSKDAAKNPICTYLSRFDKGERNLFEKMENNSKPLFDITVSDDRK |
| | | | | | LLTRSREADMETIKAFLDSILGILHFVKPLHLEPKKKSEEGLQDAFETDPDFYLEFNAAYDALNKI |
| | | | | | SPLYDKVRNYITQKPFSTKKFKLNFQNSTLLAGWDKNKERDNWSVIFRKDGLYYLGIMSSEDNK |
| | | | | | IFSKTMPNLKDCSDYFEKMNYKLLPGPNKMLPKVIFSKKNIAFFNPSKEILSIRDHASYTKGGTPQ |
| | | | | | TDFDKKEFDLDDCHQMIDFYKTCLEKHPEWCEYGFRFKATDDYADISEFYNDIANQGYRIFFEKI |
| | | | | | DSDYITKLVDDGKLYLFKIWNKDFSKFSKGKKNLHTIYWEELFSEKNLSDVVYKLNGEAELFYR |
| | | | | | EASLEGCITHPKNEPIQNKDPIKGKKTSTFPYNLIKDKRYSKDKFLFHCPMTLNFKAGDKNWET |
| | | | | | NKKVNEHVAKNCDDICILGIDRGERNLASYVLIDSKGKIISQSSLNVTSDDFERTRDYQNKLDTLE |
| | | | | | GSRNEARKNWKKIANIKELKEGYLSQVVHQISNIAIDNNAIIALEDLNFGFKRGRFKIEKQVYEKF |
| | | | | | EKKLIDKLNYLVFKDRLEDEIGGALHAYQLTKKFESFKVLGKQSGILYYVPASYTSKIDPATGFV |
| | | | | | NLLYPRFENIEKAKAFFKKFDSIKFNSSKDYFEFSFRYSNFIEDMEKDAIIKDDWTVCSVGNRLVN |
| | | | | | KRLEKSRGYETIEKDLTEELKSLFSKNQIEFEEGNDLIEAISSQDNAEFFKNLIYLLKCTLQLRNSR |
| | | | | | TGTNEDYILSCVKDKNGRFFDSREANDNEPKDADANGAYNIALKGLMLVERLKNSDLESKKLDL |
| | | | | | RIDRNEFLNFVMKRAL |
| MG29 | 6472 | MG29-149 effector | Protein | Unknown | MDNSSTIWDDFTNMYSLSKTLRFELRPVGQTLEHIKEKGLIEEDKEREKEFNEVKKIIDEYYKYFI |
| effector | | | | | EESLREVNIERNDLEEYQGSYNKLKKPEGKYDENLKKKYSEMQTKLRKKIFSKIKEHENYKHLF |
| | | | | | GKELILSVLPEWLEKNNNLEKIDKVKRFSRWATYFKGFFDNRENVFSEKDISTSIIFRIVNDNLPK |
| | | | | | FLDDISRFQKLKEFEGFSYKEVEEGFSKELEGVDLESFFSLNNENNCLNQSGIERFNLLIGGRSNE |
| | | | | | NGMRTRGLNELINEFSPQRNENGKQIRRLKLMPLFKQILSDREKSSFIPEKFMNDKEVIDSMKEF |
| | | | | | YNDLDENIFNQIRNVVTQMHDKELKQIYFRNDRNLTDISNKMFDDWETIKNGLNEFAKLELGYT |
| | | | | | EKKAEEWIKKQKYFSVYEIEEGIKKLNIESVSSEHTLCDYFSKMNVDDKDIIEEIKTKYSVVNELSI |
| | | | | | PADKSLANESDEKNIEKIKDFLDSALILLHFLKPLYVESGRKEEEKLEQALELDTDFYHDFNQIYE |
| | | | | | KAKAVIPLHNKVRNYITQKSFSTNKFKLNFQNSTLIDGWDENKIKDNFTVILRKYSNPKKSYDYF |
| | | | | | LSIMTPEDKKIFDNTARSSSVFYERMIYRQIADASKDIQNLMVINNKTVCKKGRKDDDGINRRLE |
| | | | | | EIKNEHLPEEINEIRKKKSYLKSSENFSIEDKNKFIGYYIERAKSYWGFDFDFEDPSQYADENGFTS |
| | | | | | HLDSMGYNISFEMVDNNHINKLVNEGRLYLFQIWNKDFSEYSKGRPNLHTIYWRMLFDENNLK |
| | | | | | NVVFKLNGKAELFYREKSISRNVTHPKNKPIKNKDPLDDKKESKFEYDLIKDRRYTEDKFLFHCP |
| | | | | | ITINFKSSDKSWEINNQI |
| MG29 | 6473 | MG29-150 effector | Protein | Unknown | METSESIWDNFINKYSLEKTLRFELKPIGNTLQTIKEKGFIKEDKKREENFNKVKEIMDDYYKDFI |
| effector | | | | | EKCLSGIEIENLKDHEEIYKKLKQNYKDKYLKKEYSESEKRIRKSIYEQITKKDNFDKIFKEEFLK |
| | | | | | QILPDWLEKKGKEQEKELVLSFSKWVTYFTKFFSNRKNVFSEDEIPTSIIYRIVNDNLPKFLYDKS |
| | | | | | KFEELKDMGFDYSEIEKNFKNELNGKNLEEFFSLDNFKNCINQSGIDRFNLIIGGRSEADNVKIKG |
| | | | | | LNEIINEFAQKNKNSESDIRKLKLVPLFKQILSDSESPSFILERINNKKEMFEKIQNFYSSFNDISDK |
| | | | | | LISTIKNLNKFDVNQIYLKNDSYLNEISKNIFGDYDIIKEGLKLYFDDKSKNKKESEKAQKSEFIPIS |
| | | | | | YINEGIKKLELELNDNSSIVDYFSNLSEQPSNSDNNLIEAVKNKYKCLEPLKENIDNINQISEEGIVK |
| | | | | | IKNFLDSAMSLYHFLKPLYLNSNKNRSNELELLDIDLDFYNEFNKEFEELEKIVPLYNQVRNYITR |
| | | | | | KFITKKFKLNFDKSTLANGWDLNKEKDNLAVILRKRNPVTKKYDYYLGIMIKESTKIFKGIPEGR |
| | | | | | SVNKENSYEKMIYKFIPSPNKNLPRVFLSSKKGKDKFKPSNEIVKIYEEKSYIKDSEEKDKDKKKF |
| | | | | | NTKDLHKMIDFYKDCLKNYKKWSKYFNFNFKDTNEYHDISEFYTDVEQQGYKISWKYYDEEYV |
| | | | | | NNLIQEGKLLMFQIWNKDFSGYSKGKQNLHTIYWNLLFSEENINGLIKTYKLNGNAELFYREKSI |
| | | | | | EREITHSKNNPIKNKNPINEKKESVFKYDLIKDKRYTEDKFFFHCPITLNYGTKHNEPISKTVNKII |
| | | | | | QDSQSNINILGIDRGERNLLYYSLIDLNGKIIKQGSLNTISDDKKRELDYHSKLDQIEGRRDEARK |
| | | | | | NWKDIDNIKNMKEGYLSQVIHQIAKLAVEYNAIITLEDLNFGFKTSRFKIEKQVYQKFEKMLIDK |
| | | | | | FNYLAFKDRNEKEPGGMLKAYQLTDEFKSFKNLGKQSGIIYYVNAGYTSKICPKTGFVDMLRPK |
| | | | | | FENVKKSKEFFSKFKYIKYKKDEDLFEFNFEYSKFIVDKNKNPKLKRDNWSIWSNGIKLDTKRDN |
| | | | | | NGYWRTEKINVTEELKKLFNANEIDYTSENNLIEKIKESNDKNFHFSLIYLLRLILRLRNSYIDYEV |
| | | | | | EEIRKKNENKFNIRDYDYILSCVKDNNGEFFDSRKSSGNEVLDADANGAYHIALKGLML |
| MG29 | 6474 | MG29-151 effector | Protein | Unknown | YFTGFFDNRRNVFSKDEIHTSFIYRIVHDNLPKYIDNLERYDKLKKYSDFNCKQLVNDFSSELQGE |
| effector | | | | | DLSKFFTLEKFNECLSQPGIERFNLIIGGKSLEGNRKIPGLNEVINLYSQNLTNEENKRAVRKLFM |
| | | | | | LPLFKQILSDRTSASFILSAIEDDAEVISIVNELYSRISKDFELFQSTFKGLTKENTSQIYINKALLNE |
| | | | | | VSNQIYDDWSILENSLKCFAKEKLKLNTEKKIDEWLKKSVYFSLDEIKQGIEFLKSENVTWEKFI |
| | | | | | EHYNLLTYDNKPLIDAINENYNAVKGLDLKKNEKKLLTEQKEADVTKIKQFLDSVMNLYHFLKP |
| | | | | | FNMNQDFEKETIHVEVDTEFYKDENDIYSGFAEVIPVYNKVRNYVTQKTFSTNKFKLNFKNSTLL |
| | | | | | QGWDKNKESDNWSALFQKDGNYFLGIMSEGSGNNKLFKKKVYVANNVPTYRKIVYKLLQGPN |
| | | | | | KMLPKVFFSKKNIGKYNPSENILRIRNHSTYTKNGTPQDGYTKKEFSLADCHKMIDFYKDCIKK |
| | | | | | HKEWNEEFDFKFRKTSEYTDISEFYKDVADQGYKITYEEIPDKIINEYVDTGKLYLFQIWSKDFSP |
| | | | | | FSKGRKNLHTLYWQELFSPENLRDVRFKLNGEAEVFFRRKSIDPKITHPKNKPILNRNPIREKKE |
| | | | | | SNFSYDLIKNRRYTEDKFFFHCPVTLNFKSKGSDNSKSINSKINEIVKKNPDVNILSIDRGERHLLY |
| | | | | | CTLLNLKGEILKQKSFNMVFDDVQREHSYHDKLDTLEKERQAARKAWKTIHNIKELKSGYLSQ |
| | | | | | VVHQISKIAIEDNAVILEDLNEGEKKGRFKIEKQVY |
| MG29 | 6475 | MG29-152 effector | Protein | Unknown | MKTCQSLQIISTFIKKIKDEGIDLTEIETNFNNVDLKSIFSIEYFSKTLTQSGIDFYNELLGGKTESE |
| effector | | | | | GKKIKGINELVNLYNQKQNDRSKKIPFLKPLYKLPLFERTSVSFRYEPVKDDQDLLNRIHSFYYN |
| | | | | | DLRQFYDEDDGQTKDVLDELKKLLENIHNYREGLYVNGGLTLTQISQKIFGRWNYINEALSDYY |
| | | | | | DTVINPPKPDKNGRSIVRTKKEEKEKERWLKQKQFLIITIEEALSQFKQKETNEELKNKITETTLC |
| | | | | | DFFKRCGANEEGKDNLFERIEQNLKMKNEHGESVKDLLHTNSKKSLLEDKSSTLLIKNFLDVLQ |
| | | | | | GDKEDITSGLLHFIKALIPREEVGLKNEDFYSQFEKYYRQLSEITPLYNKARNYLTQKPYSIEKVK |
| | | | | | LNFENSTLLDGWDRNKEKDNTCVLLRKKMNDQYFYFLGILNKKHKKIFENYPTADKEPYYEKM |
| | | | | | VYKLVANPTKDLPNLVVIDGKTSMVKGRKNHEGENKVREQKLNKYLPPVINRIRKSKTYSSNNL |
| | | | | | VKDDLTKFIQYYQERVREYFTDLNFHFKEASEYNSWADFLDEVKQQGYSINFKTISEDYINNLVN |
| | | | | | EGKLYLFKIHNKDFSENKKSKGKDNLHTLYWKMLFDERNLKDVVLQLNGKAEVFYRPKSVNYS |
| | | | | | EDIWQKGYHYDELKEKFNYPIIKDKRYAEHKFFFHVPITLNFKSVGKNNINEKVNQWLMNNPNI |
| | | | | | HIIGIDRGERHLLYVSVINQKGEIVEQCSLNEISEYKGHSFSKNYHQLLDKREGEREKARKDWQ |
| | | | | | TIENIKELKEGYLSHVIHKITQLILKYNAIVVMEDLNVGFKRGRQKVEKQVYQNFEKMLIEKLNF |
| | | | | | LAIKDKKPEEPGGVLKAFQLSNKFESFKKLGKQSGIIFYVPAGYTSSIDPLTGYVHYLTPLKLADS |
| | | | | | IEKARNFYKKFKSIRFNTVNEWFEFSFDYNDFERVRYEGKSDWVICTSNSERYVWNKALNNGKG |
| | | | | | GAEQVKVTERLEVLFGEYEIDYGSGKCIIDQIVNVNDLDKERTAKKFYSTLNFLLNTTLKLRHNN |
| | | | | | GMKGKEEQDYILSPVSPFFDSRKENAKSASEQKLPTDADANGAYHIALKGLLLMKRLKEIGVEA |
| | | | | | FEKSKNSKDGKSQWLPNDEWLVFVQNKNSVSEPV |
| MG29 | 6476 | MG29-153 effector | Protein | Unknown | MNSIFDRFTQQYPLSKTLRFELKPVGKTAKLISEFNDDFPESTIAKDEEKSKAYPFAKKILDDYYR |
| effector | | | | | HFISEVLSKSELDATKIKQAFICYKECQSKNATADADAKKSEYKIQKSILRKVIADFFSSEGLELSA |
| | | | | | MFKGAKKNCAIYEYGELFKEASPLFVWLQNRLVNEVITQEEFDTQTGIINKFNGFSTYFTKYKV |
| | | | | | NRENLFANEEKASSIAYRVVDENMEKFFDNCITYQKIMQKYPNEEFAAELKKCEQFFTPENFGIC |
| | | | | | LTQSGIDVYNQIIGKKSDDTYGKGINQQINEFRQKNALRRNDAPLMTVLFKQLMSESERVFVIETI |
| | | | | | DSDEELFSVVKDAYNTCIALVEGLSILCDSSLTDENLSDIFIRPDGLSNLSQKVFGKWDIIDSALNM |
| | | | | | KKESIGQKKFDAKYSKVISLLDLQTMCDAYISVIDDSEIRRNCTFSDYFKTFESSLIKSAYLEAEEV |
| | | | | | LNSIGLDKDKSMPTNDTDLGGKGFRQLQKIKQLLDSINEAVHFYKPFLLEKEGKAIEAEENNKEF |
| | | | | | YNEFLLNYRDLSVFPKIYDKVRNYATKKPYSKDKFLLNFDKPTLLDGWDVNKEESNLALLFIKD |
| | | | | | GKYYLGIMKNPRLFSNLPVKGIANENEPAYEKVIYKQVSGACKMFPKVFFADLNRELYKPGSEI |
| | | | | | QRIREEKSHLKGGSEDSKNKWIQFCIDCIDKQPEWKTYFKFNFKEPQEYPDVNSFYKDADAQM |
| MG29 | 6477 | MG29-154 effector | Protein | Unknown | MSLAAFTNQYQLSKTLRFELIPQGRTLQHIQQKGLLSRDQQRADSYQQMKKTIDAFHKHFIDLA |
| effector | | | | | MQQVHLSKLAEYQDLYEASGERKKTDEYKKELEKIQAELRKEIVAGFKAEGVSEIFGKLDKKEL |
| | | | | | ITDLLEKWIREQNDKDIYFDAGFKNFTTYFGGFHENRKNMYTDKAQSTAIAYRLIHENLPKFLDN |
| | | | | | CRIFDSLKARPELAEKLPLLYTEIAEYLNVASIDEAFALDYFNEVLTQKQIDVYNLIIGGRTPEEGK |
| | | | | | KKVQGLNEYINLYNQQQKDKNNRIPKLKILYKQILSDRESTSFMADAFESDADVLDAINAYYHNE |
| | | | | | LISFFSADSEEAIHVLHEIRSLLKHIASYDTERIHVRNDTQLTHISQKLFGSYAVLGDALSYYHDVV |
| | | | | | LAPSHQEDYQKAKTESKRGKLEKEKEKFTKQPYISLALLQKALDYYVLSLDDTHEVRKRYSTNC |
| | | | | | ISDYFHIHFTAQKRADSDKEFDLIANIEAKYSCVKGVLEHYPSDRKLHQDKKTIDDIKLFLDSLME |
| | | | | | LLHFVKPLVLPPDSTLEKDNVFYGQLEPLYTQLELIIPLYNKVRNYATQKPYSTAKFKLNFENAQ |
| | | | | | LLNGWDENKESDYLTSIMRKDGNYYLAIMDKQHNKVLKKAPKAEYGRGAYEKMVYKLLPGVN |
| | | | | | KMLPKVFFSKKNIDYFAPSTQLLENYKKETHKKGENFSLHDCHTLIDFFKASIEKHEDWRNFGF |
| | | | | | QFSETATYDDLSDFYREVSHQGYKVTFQPIAENYIHELVDEGKLYLFQIYNKDFSTYSKGRPNLH |
| | | | | | TLYWKALFDPDNLQDVVYKLNGQAELFYRTASIRAEDRVIHTRGQAIDNKNPLTIKQQSTFEYD |
| | | | | | LIKDKRYTVDKFQFHVPITMNFKAGGRDNINQEVLAFLKNNPHVNIIGIDRGERHLIYLTLIDQQ |
| | | | | | GNILKQETLNTIVSERYPNETPYHTLLATKEKERDAARKNWGTIENIKELKEGYLSQVVHKIAK |
| | | | | | MMVEHNAIVVMEDLNFGFKRGRFKVEKQVYQKLEKMLIDKLNYLVFKDKDAHEPGGLYKALQ |
| | | | | | LTSKFISFKDLGKQSGFLFYVPAWNTSKIDPTTGFVNLFDTRYESIGKAQDFFGKFDTIHFNGAKG |
| | | | | | YFEFVFDYDAFTTRAEGTRTKWTVCTYGSRIMTFRNPDANNQWDNKEIDVTQEMEDLFGTYGI |
| | | | | | TYGDGSDIRGELLRQTDKGFYERLLHLFKLTLQMRNSKTGTDIDYLISPVMNARGEFYDSRRAD |
| | | | | | STQPKDADANGAYHIAKKGLWLLEQINQADDLKKVKLAVSNKEWLRFVQK |
| MG29 | 6478 | MG29-155 effector | Protein | Unknown | MKTFIDKFTGLYPVSKTLRFEARPVPATKEWLESDDCHVLENDITRDEYYPVLKQLLDDYYRYYI |
| effector | | | | | EEALAGFRLDEDLVHSAFIFYTEKDFEKLESGLEKLRKNLVKVFDSRKDYLLGSGQLKDLIRLNF |
| | | | | | KKKKEVLDSHLVSWIKDNPQYTAKQREDFLAAIGSFEGFVTYLGDYKQTRDSLFTDEKIASSIAY |
| | | | | | RVIHENMLLYFSNIRIYERIKETYPDLYKQINKFEEFFIPESFSGILSQSQIDRYNYNCIGRPVDDID |
| | | | | | YKGVNILINEYRQKMDISSNELPCMAVLYKQILSDRESFMPESIKNEAEAIEIARKGYDVAFDNLC |
| | | | | | NLEELFKQNIKNNNHDNIYIKCSAINDFSKIVLGDWKILGETLKNAKYKGDVISLGQLLELNSFPI |
| | | | | | LEFFNDTLESVIGSLSVEKVNELKSDLDKMLSEIQKYKPFFLFKGTKPLDVPDNGISFANEFKTIY |
| | | | | | EQLTEFIGVYNRIRNFATKKPYSMDKIKLNFDNPSLLAGWDLNRESTNGSYLFLKDGKYYLGIAN |
| | | | | | NESRDLFTDIRKKNVASHDTNDVYNKVEYKQISGAAKMLSKVFFADKNVELYGHLLTDRIIDIKA |
| | | | | | NKLYTTAANDKAALAEWIDFLKAAIAIHPEWNNYFNFKFRDSSEYANINEFYSDVDNQAYTLTTI |
| | | | | | PVSAEYIDELVDSHKMFLFQLYNKDFSEHSKGKENLHTMYWKGIFSKENLEAINDGTMPFIKLN |
| | | | | | GEAEMFMREASIPRKITHPREVPIATKNPVYKPMDSVYHYDIIKDKRFTERKFFFHCPITLNYRAA |
| | | | | | IKGNFNVKINEFVTGNPDINIIGIDRGERNLLYYTVINQKGNILAQGSLNRIGHKYTAKNKDFTAIT |
| | | | | | DYRLLLDIKEQERNNARQAWGVIKNIKDLKAGYLSQAVHEICQLMLQYNAVVILENLDIGFKRS |
| | | | | | RAKVEKQIYQKFEKAMIDKLNYLVFKDRGYHENGSFGKGLQLSAPFESFSRIGKQTGCIYYVSPS |
| | | | | | YTSQIDPKTGFVNLLGSKLKYESIAKAQDILKRFDSISYNASNEYFEFAFDYKNFGVEMEKTNWV |
| | | | | | VCTCGSRRPEYSPEEKKIKNYHVTTELKALFDSQGIEYADGKDILSAIVSVKDKSFLEGVLFHLRL |
| | | | | | ALKMRYIGEAPEDDFFLSPVEFAPGNFFDTREASQNEPQTADANDAYHIALKGLMTIQSIKDGKL |
| | | | | | AKYKVGGEKAAWFKYMQSQEFRKA |
| MG29 | 6479 | MG29-156 effector | Protein | Unknown | MSAQSALSTLINKYSLSKTLRFELIPIGKTKESIDRKGLLSQDVKRAQSYKEVKKIIDEYHKEFIEK |
| effector | | | | | SLINAKLKGLEEFSKLYYKLQKEDKDKKNIKKMQDNLREQISDLFKNNKKDKWNILFKEDLIKK |
| | | | | | ELPLFAKDDKQKNLINEFNKFTTYFTGFHKNRKNMYAEEEKSTSIPYRIIHQNLPKFLDNIRIFEKI |
| | | | | | KKNKINTDVIEKELSLFLNGIKINDIFSINFFNDVLNQKGITFYNTILGGVSEKDRTKIKGINEYVNT |
| | | | | | EYNQKQLDKKSKIPKLKQLYKQILSDTETASFVLEQFENDNQLLEKIEQFYNTELINYETEGKTQ |
| | | | | | SVFLQFEQLFKNMQNYDASKIYISNLSIANISKIIFGDWSIICNALAEWYDKHNTKGKKINEYKKE |
| | | | | | NFLKQDFSIQQIEDAVLEYKNDTLNKEINFLLNYFASFLNEKSKKNIIQRIETEYSKVKDLLNTDYP |
| | | | | | EKKKLASDKDNVSKIKAFLDSLMDFLHFVKPFNIKKDTGLEKEENFYSIYVPLFEQIDKIIPLYNK |
| | | | | | VRNYLTKKPYSTEKIKLNFENSTLLDGWDLNKESDNTSVVLRKDDLYYLGIMDKKHNRIFKELP |
| | | | | | SQNGNESSYEKMIYKLLPGPNKMLPKVFFSKKGKKQFKPSKKLLKKYEDGTHLKGDNFNINDC |
| | | | | | HNLIDFFKESIAEHEDWKQFDFKFSSTSSYKDLSNFYKEVEKQGYKITFQNISENYINQLIDEGKL |
| | | | | | YLFQIYNKDFSKYSKGTPNLHTLYWKMLFDNDNLKNIVYKLNGKAEVFYRKSSLILGDNIVHKA |
| | | | | | GEAIINKNPDNEKKHSTFDYDLIKDKRFTLDKFQFHVPITLNFKSEGRQNLNEDVRKFLKNNPDI |
| | | | | | NIIGIDRGERHLLYLTLINQKGKILFQKSLNEITNEYNNKNGKSQIKSTNYHSLLDKKEKKRDEAR |
| | | | | | KNWGIIENIKELKEGYMSQIVHYISKLMIEKNAILSLEDLNFGFKRGRQKVEKQVYQKFEKMMI |
| | | | | | DKLNYLVFKDKKANETGGLLNALQLTNKFESFAKLYNQSGFIFYVPAWNTSKIDPITGFVNLLKP |
| | | | | | YYENLNKSQEFFKKFNNIKYNPKQEYFEFNFDYKNFTNKAEGSKNVWEICTTNNERFMWDKTL |
| | | | | | NSGKGAQKAVDVTQELKKLFDSSKINYLNGNDIKEDIINQNSADFFRKLMKLLSVVLSLRHNNGL |
| | | | | | KGKDEKDFILSPVEPFFNSLNAKMEEPKDADANGAYNIALKGLLILKQINESEDLRKIKENLSNKE |
| | | | | | WLKFAQSKSF |
| MG29 | 6480 | MG29-157 effector | Protein | Unknown | MLSNFTNQYQLSKTLRFELKPIGNTLEHIEQKGLLSQDEQRAENYTVIKEVIDTYHKAFIEESLAS |
| effector | | | | | VVFDNLERFEELYLKSNKDEKEQKEFEKLQENLRKEIVKNFKVHPKWNNLFKKELIKEDLLAFE |
| | | | | | QITDEQKEVVKEFTNFTTYFTGFHENRANMYTDKEQHSSIAYRIVHDNLPTFVNNKKAFESILQK |
| | | | | | YPQLISDAKSSIEEELLGAVFEDMFLLQYFNHLPSQTHIDLYNTMLGGVKRDDLKIQGFNEKINL |
| | | | | | YRQANGLNKKELPNLKPLYKQILSDKDTLSWLPEAFETQEELVGAVESFYQEKILAFECCDGRV |
| | | | | | NLLEKFKEIFSQTQLYDTSKIFIKSDKPLTDISQALFKNYGLLKEALWQKHLDDNPKLQKSKKIE |
| | | | | | ESEEKFFKQKYFTLSSLQEAIEFAKLSANVWNYFQENLDTYIKQIEENHTIWETDKTNTATTKSF |
| | | | | | LDSLINLQRFLKPLNVQTDSDKDIAFYSTFDSYFEALTQIVKLYDKVRNFKTKKPYSLEKFKLNFE |
| | | | | | NSTLLDGWDVNKEPDNTSILLRKNNLYYLAIMDKKYNKLFCNLEKSTQSDVYEKIEYKLLPGAN |
| | | | | | KMLPKVFFSNKNIDYYNPSKKLLENYKDGIHKKGDNFDIDFCHELIDFFKVSIQKHEDWKHFKF |
| | | | | | NFSPTKSYEDLSGFYREVEQQGYKISYKNIDTKLVESWVNDGKLYLFQIYNKDFSPYSKGTPNMH |
| | | | | | TLYWKALFDEQNLANVVYKLNGQAEIFYRKKSIEYTEDKLKKGHHHEELKDKFAYPIIKDRRFA |
| | | | | | FDKFQFHVPITLNFKAEGNENLNQKTIEYIKINDIKIIGIDRGERHLLYLSLIDLNGRIVEQYSLNQ |
| | | | | | IINSYNGKEHTIDYHEKLAKKEDERALAREEWGVIENIKELKEGYMSHVIHRITTLIVEHNAIVVL |
| | | | | | EDLNFGFKQGRFKVEKQVYQKFEKALIDKLNYLVDKKKTPSDLGGVLNALQLTNKFVSFEKMG |
| | | | | | KQNGFLFYVPAWNTSKIDPVTGFVNLFDTRYSSVEKAKEFFGKFKSIRYNSVKEYFEFEFDYNDF |
| | | | | | HNKALDTQTQWTICTYGERIKTFRNKDKNSQWDNETIHLTTAFKNHFGNYQGELKEYILAQDK |
| | | | | | KEFFEQLLDLFKLTLQMRNSITNSEVDYLISPVADKNGNFYDSRKADSSLPKDADANGAYNIARK |
| | | | | | GLMLVERIKESTDVKKVDFKLTNKEWLQFAQRG |
| MG29 | 6481 | MG29-158 effector | Protein | Unknown | METNFFKSFTKQYSLSKTLRFELKPIGKTIANIETKGLLAQDNQRAESYKKVKKTIDEYHKYFIE |
| effector | | | | | LALKAVKLTKLDEYYELYSKNKEDRDDAAFKKVKEDLRKEIVAVFTKGGFKEMFIRLFSKELIK |
| | | | | | EDIAAWISEHPKFAEDLKFVKEFDNFTTYFTGFNENRKNIYSAEDKSTAIAFRIVHENLPKFIENIK |
| | | | | | LFKTIKEKHANLDFSPILKEMEEVIQGVTLDEIFTLDYFNHVLSQNGIEFINFIIGGKTLKNGDKIK |
| | | | | | GLNEYINLYNQQQKDKNKRAPKFKQLYKQILSDRTSISMRFEEFENDSDLLETVEVFYQSELCEY |
| | | | | | ETEGKTHNIFEEIKTLCESIGTYNLEKIYLRNDSNLTNISQRLFGSFSVFRDSISFYYDTVVDTNFQT |
| | | | | | KYANAKTENQIKHLNDTKNKWNSDFISLGLLQKTLAKYIETLDADSEIRKIYTPTIITDYFKRHIIK |
| | | | | | KEVEEAKNNETIKKTTDVELFYSITGQYLGVKGLLNIEKTDNKTLAQEKEKVHQLKSFLDSILEL |
| | | | | | NHFVKPLFLTDDSISDKDDAFYSQFAPLYEQLNKLIPLYNMVRNYLTQKLYCTDKIKLNFENSTL |
| | | | | | LDGWDVNKEPDNTSVILRKDGLYYLVIMDKAGKKVFMDVPKIAYSGTFYEKMNYKLLPLVNQQ |
| | | | | | LPRVFFAKSRIEFFKPSEAIQENYKKETHKKGDTFNIKDCHALIDFFKASLAKHEDWKHFNFKFS |
| | | | | | PTKSYQDLSGFYREVEHQGYKMSFENIPTDYIDKMIEEGKIYLFQIYNKDFSVFSKGLPNMHTLY |
| | | | | | WKALFDENNLADVVYKLNGQAEVFFRKSSIEEKNKVIHKAHELLKSKNPNTPNNNNTFDYDLIK |
| | | | | | DRRYTVDKFQFHVPININFKASGSEIINAQTNDFLKNNRDVKIIGLDRGERNLIYLTLIDQKGNIIQ |
| | | | | | ESLNTISNKERKIETPYHTLLNIKEKERDAARKSWNTIENIKELKEGYISQVVHKIAEMMVKHHA |
| | | | | | IVVMEDLNFGFKRGRFKVEKQVYQKLEKMLIDKLNYLVFKDAQPTQPGGLLNALQLTNKFESF |
| | | | | | KKMGKQSGFLYYVPAWNTSKIDPATGFVDFLKPKYENVEKAKAFFSKFDSIKYNTVKDYFEFAF |
| | | | | | DYK |
| MG29 | 6482 | MG29-159 effector | Protein | Unknown | MSIMVENIYKNFNNIYSVSKTLRFELKPQGNTLENIRKINLIEEDEQRFKDFQEVKKIIDKYFKYFI |
| effector | | | | | EKNLDGAKLEDHQIKQFVDSYDKLKKNKNDDKLKKEFISYQDELRKSLHEQIKGKGFYKYFFK |
| | | | | | KDFIKEVLVKYLQNKGENENVYLVNKFNDRTTYFTGFNKNRENIFSTKEIPTSIYYRIVNDNLPKY |
| | | | | | IENIKNYEKLKEYFKDGLDLSQLEKDFEKELNGMSLDLFFSYYNFNSFLNQKGIDKFNEIVGGKT |
| | | | | | LENGKKIQGLNEYINLYSQEKKEKSIRKLKFVPLFKQILSDRETSSFILDTFENEQDILESVDNFYN |
| | | | | | KILNEKVEKEINDLFSNLEKYDRTQLFIKKDKTITNLSQKIFGDWSIIENALKKYALNKINVKEKD |
| | | | | | LDKWYKKNKYFSIYEIEEGIELLNIVNDMDKSVYDIFVRKVNDKPKYSICGFYSLFKPEENSLFEE |
| | | | | | IKINYGEFEKLLNNGFNKEIEENTIIIKKFLDSIMNLYHFINPLYLNQKKDSEDNEPVAFEFDSEFYS |
| | | | | | DYNKIIETLSEHIPLYNKTRNFITKKNFSTSKFKLNFQNSTLLDGWDINKERDNWAVLFRKKGNYY |
| | | | | | LGIMSKGNNKVFTNVTESDSNEFFEKIEYKQISDASKDIQNLMIIDGKTVSKKGRKEKGGYNDGK |
| | | | | | NLILEELKNKYLPPEINEIRIKKSYLKSNSNFSEDDKNKFIDYYIQRLDYWNFDFNLKKSSEYVDFN |
| | | | | | EFTSHISNQGYQIKFKKISDDYINKLVDEGKLFLFQIYNKDFSKFHKGRKNMHTLYWEELFSEDN |
| | | | | | LNDVVYKLNGQAEIFFRKASLKDPVIHPKNQDIKNKDPLNNKKTSNFKYDLIKDRRYTVDKFLFH |
| | | | | | CPITMNFKAKGSSYNLNYMINEKIKENRYNFKILSIDRGERHLAYYTLINSKGEIEKQGTYNLVVD |
| | | | | | DENRERNYHQKLDKLEGERDQARKSWKQITNIKELKEGYLSQIVHQITKLAIEENALIVFEDLNT |
| | | | | | GFKRGRFKIEKQVYQKFEKMLIEKLNYLVFKDKNNNELGGLLKAYQLTPKFESFQKMGKQTGI |
| | | | | | IYYVNADYTSKIDFSTGFVNLLHPKYENIIKSKEFLNKFQLIKYNSKEDLFEFNFNYSDFGYPNFKK |
| | | | | | DNWSIWSNGNKIINFRNPEKNNQFDTKKFNPTDELKNLFDEFSIKYDGGENIISEILKIDDIKLFKT |
| | | | | | LTYILKIILQLRNSSNKTGDDYILSCVKDKDGKFFDSNNKNPIEPKDADANGAYHIGVKGLILMDR |
| | | | | | IKDAQDLKKVDKAIRRDDFINYHIERRWKTI |
| MG29 | 6483 | MG29-160 effector | Protein | Unknown | MEKNIFEDFTNLYSLSKTLRFELIPQGKTLEHIERNGLLFQDEERAKEYQNAKKIIDKYHQHFIEE |
| effector | | | | | VLKSVEIEKSLLEEYETLYFLMKKGEEEKILKELENIKSKIQKNISKQIEKHPRKKNLFSKELIDG |
| | | | | | GKKEEADIIEWLFSCKENNLTLFEDTEIGNVENAIEIIKQFKGWTTYFGGFHTNRENVYSDKDIPT |
| | | | | | SIIFRIVHDNLPKFLEDRDKFKQIQMNYPNLLQQKEIEENFMAELIFENKDCSTKLFSIVEVFQLEN |
| | | | | | FNLFLNQSGIDKYNTLIGGKFIEGEVQKRKGINEYINLYSQQQNEKQVIKSIKKLKMVPLFKQILS |
| | | | | | DRSSNSFVLDKFSNDGQVVSAIDYYFQTLEEELEKHSFSEIIELLFSSDHFMDYDFSKLYIKNGQGL |
| | | | | | SALSQVVFGNYSVIGAALREFALNSVNPKDRVRLSKSEESKLEKLMKTSYFSLKSIQVALMMYVE |
| | | | | | GEYKFSKIVEYFCEMPKKYTQLMGQYMENRKLFENYFLSVEKKLLKTESQDVESIKALLDSCQQ |
| | | | | | FLSSIDVLSLAKGNMVMEKDEHFYYFFEPFFLRIKEIIPLYNKVRNYITQKPYSVEKYKLNFENSL |
| | | | | | LAKGWDRNKEESNTALLFKKENNFYLGIMKKSSNKIFNDTEMIKNQGEGYQKVTYKLLPGANK |
| | | | | | MLPKVFFSEKSIGYYSPSEEILNIRNHSSHTKNGTPQVGYEKNEFSLTDCKKIIDFFKGSIEKHPDW |
| | | | | | KEFNFRFSETEKYQSIDEFYREVENQGYKITFNNISENYIHQLVEEGKLFLFQLYNKDFSKFSKGK |
| | | | | | PNLHTLYWKALFDDENLKDVVYKLNGEAELFYRKASLDKIITHPKNLPIINKNTKTVKKESLFEY |
| | | | | | DLIKNRRFTENKFFFHCPITMNFKSNGKNKFNDFTNEILKKNIDDIHILSIDRGERHLAYYTLLDG |
| | | | | | KGNIVKQNTFNIISNEKTTVDYHEKLEGLEVERDKARKEWKKIENIKEMKEGYLSQVIHEIAKM |
| | | | | | VVEYNAIVVFEDLNAGFKRGRFKVEKQVYQKLEKMLIEKLNYLVLKDKQPSELGGVFNAYQFT |
| | | | | | DKFTTFKDMRNQTGIIYYVRADFTSKICPVTGFVNLLYPKYETVEKSQEFFGLFDEIRYNKEKKY |
| | | | | | FEFKFSYKEFGKECPGDWILCTHGTRLENFRNSEKNSSWDTREINITQLFENILKSYGIEYENGTC |
| | | | | | LKNSIIVQKEKKFFVDLVRVLNLTLQMRNSKTGTQIDYLISPIADSCGNFFDSRNSDCRLPENADA |
| | | | | | NGAYHIGIKGLMIMERIKQLSEEKKLTLGIKNSEYFEFVQRRLSE |
| MG29 | 6484 | MG29-161 effector | Protein | Unknown | RKFEDDAEMIQANRQYFEEVLGNNTLFETGETPTEAMNQLFLSIENYDLSKIFIESPLLVTSISQKI |
| effector | | | | | YGSYAVIPQALEYYHDNHVNPSYAAKFNKAKSDKSRETMEKAKAAWVKGIHAVSVIHQAVIAYN |
| | | | | | DVLPDDAKLTDTQPVISYYKDIQYSEKTGESQQIFDALMRRYHQAKGMLNTDYPKGSKQILNNK |
| | | | | | SSFAIVKNLLDVSKAYVNAARDLTIKKPEGLDLDPLFYERLAKTYTYLQDLHALYDTTRNYVTQ |
| | | | | | KPFSTDKIKLNFDCAQLLAGWDFNVIDAKRGVFLVKNGRYYLVIIDNKHKKAMNNLPAPITNNC |
| | | | | | YDKYNMRLSKDAHMALPKKLFTKDNLKIPAIAEMERRCRDKNGGHHLRKSPDFDKDFMHQMI |
| | | | | | DTFKDIIKKDKDFDVFGFQFKPTHQYEDINEFYADFNEQALVTWYDKVDSDVIDSLVAEGKIYLF |
| | | | | | EVYSKDFSDKSTGTPNQQSLILQYLFSQDNLAKHHFKLNGEAEVFYRKASIDKDKAVVHKKGSL |
| | | | | | LENKNPARPNSKIAKFDIVKDRHYTEDKLFLHIPITLNNNAADMKSYAMNSKVLNTLKTNGGVN |
| | | | | | VIGIDRGERNLLNITVIDSAGEILHQESLNKIASGQDMVTDYHELLDKKEQSRAESRLNWQEVESI |
| | | | | | KEIKQGYLSQVVYRLSQLMLQYEAIVVLEDLNIGFKRGRFKIEKQVYQNFEKALINKLNYLVLK |
| | | | | | QLEATEVGGTAHGYQLTAPFESFQKLGKQSGWLFYVPAWNTSHIDPTTGFVNLHHFKYESVAQ |
| | | | | | ATDIIDKLSNIRYNPEKDYFEFAIDYNEFTFKGGDSQKYWVVCSTPYKRYVFDKKANMGRGGTK |
| | | | | | AIDINAELKALFAAHGVDYASGEDLRPQIKAKANKELLSQLLFLLKTLTAMRYTNASSYEDYILS |
| | | | | | PVANKAGEFFDSRKGDAALPLDADSNGSYHIALKGLCLLQRVYDWRGEEFKWLDLFISNNDWL |
| | | | | | KFA |
| MG29 | 6485 | MG29-162 effector | Protein | Unknown | MEPLDYNNFTNLYSLSKTLRFELKPIGETADYIEDFKSQNLKDFVTEDQQRAEDYKAIKELIDDY |
| effector | | | | | HRAYIEDKLSSPVDPKTGEMWINPQDLEYAYSHYENLKQDQKDPKNRKLWEYTQTALRKKLVK |
| | | | | | SFAGNSDLFKKELINRDLPNWLEQKGKWEEHKATIESFKKFTTYFSGFHENRKNMYSNEEQPTA |
| | | | | | IAYRLINENLPRFFNNYIQYKKMVDEYKDLKLTATPALLEKMRVESLDEIFKPRYFINLFTQTGID |
| | | | | | NYQQLLGGKTEETGEKEQGLNEQVNLFKQQIQKQAKEHAKKSGEKATKIYDLSGFTGLYKQIL |
| | | | | | SDRETTSFIPEAFDDDKRLLITLAEHIENVTKNNGLLNKLEEAIAQLASTDLQRVYIKSVGLTAISQ |
| | | | | | NLFHRYQIINLALKYYAKKELSAKDCEIYLGQKAFSIAELDEKLISYIQSLEDNDPLHEQLKKLTM |
| | | | | | PQHPLQGYLLEAVKLAQTKQDNRPELNDAISEVKQLLSLDELSKNRKTPVKEGENGGVGFRQV |
| | | | | | QKIKGMLDGFMAVSDAVKPLHLVDGRNHIDMPDMDAGFYGGFSEAYNNYTEATITLYNKTRNH |
| | | | | | LTKKPFSTDKIKVNFGTPTLLNGWDVNKETDNSSILFEKDGLYYLGIMHPKHKHLFNYTKGIDD |
| | | | | | AGNDKKLKTKDTLNKKVTETDIGGYRKIVYKLLPGANKMLPKVFFSNKRIDYFSPSSEVRKIRNT |
| | | | | | ASHSINGTPRPGFNKEDFSLEDCHTMIDFFKVSIKKHPEWTEFNFQFSDTNSYEDLSGFYREVESQ |
| | | | | | GYRMDFHKIKESYINECIEAGKLFLFQIYNKDFSPYSKGNPNLHTLYWKGLFEAENLKDVVLKL |
| | | | | | NGEAEIFYRKHSIKRKDIITHTANEAIANKNSENPKKESTFAYDIVKDKRYTKDKFQLHVPITLNF |
| | | | | | KAQSVSRFNDHVNKALQGNSGTHIIGIDRGERHLLYYTVINDKGEHIEQNTLNSISTDQGYAVDYQ |
| | | | | | QKLHTKEKQRDVARKSWGSVEDIKELKEGYLSHVVHKLAELIIKYNAIICLEDLNFGFKRGRFH |
| | | | | | VEKQVYQKFEKALIVKLNYLVFKQNEATKPGGYLNAYQLTAPFISFDKLGKQSGILFYVQAAYT |
| | | | | | SKIDPATGFINFLYTQYQSLAKSKQFFEAFESINFNSNKNYFEFSFDYNNFNVRQNLKDYQTKWIA |
| | | | | | CTHGDVRYSNKRNQQGQWETISINVTEQLKALFNEASISYQNGQDLKQALASAKNTRFYKSLYW |
| | | | | | LIKLTLSLRHSVTGTDEDFILSPIADKNGVFFDSRNATKQQPKDADANGAYNIALKGLWNLQQIK |
| | | | | | QWDGEENLKLAMKNEDWFKFINDWHNK |
| MG29 | 6486 | MG29-163 effector | Protein | Unknown | TAEAERGEAADPLKPLLVLDQLNKKRIPPEGDGEEGSEGFEQVRRIHECLDAHMSLQQVLRPLH |
| effector | | | | | LVLGRKPIDVASKDLGFYARFDEAIEDYNAMTIALYNKTRNHLTKKSFSTDKVKINFESPTLLAG |
| | | | | | WDLNKETANKSIILRQNGKYYLGIMHPRHPKIFSKPPEAKVGDEAYEKVNYKLLTGANKMLPK |
| | | | | | VFFSKKGLETHNPSEQILALYKNGEHKKGDTFNIESCHKLIDFFKSRIPLYKRDPSDPYGWEIFDF |
| | | | | | KFSPTKTYKDLSGFYREVEEQGYKLWFTHVTKAYIDEQIEQGHLFLFEIYNKDFSPFSKGKPNLH |
| | | | | | TLYWKGLFEQNNLDDVVLKLNGEAEIFYRKHSIAANEQIVHSANKAIVNKNENNPKPESTFEYDL |
| | | | | | VKDRRYTKDKFFFHVPITLNHKAQKPVRFNDQVNRALQKADDVHVIGIDRGERHLLYYTVVNQ |
| | | | | | KGEITEQDTLNTISTDQDYVVDYHHKLDQQERTRDKARKAWTNIDNIKELKAGYLSHVVHKLAE |
| | | | | | LIVKHNAVVCLEDLNFGFKRGRFKVEKQVYQKFERALIEKLNYLVFKDTTEGQPGHYLKAYQL |
| | | | | | TAPFESFKLLGKQSGILFYVGASYTSKIDPATGFINFLKPHYESLAKSKTFFESMDSICFNAKRGYF |
| | | | | | EFSFDYANFSVPQTLDDYQTAWTVCTHGETRYHNQRNDKGIWETKAVNVTEKLKVLLNEAGVS |
| | | | | | YQNGEELKDAIAAVKSSKFYRSLYFLLRLTLSLRHSVTGTEEDFILSPVADEGGNFYDSRNASDAE |
| | | | | | PKDADANGAYHIALKGLWNLEKIDQWDGESRLNLAMKNVEWFQFASEKPFKE |
| MG29 | 6487 | MG29-164 effector | Protein | Unknown | MVAYFKKHDTFKILDKKELIQKELDKWIKKYHPDLYFDKDFYNFTTYFTGYNENRMNMYSEEE |
| effector | | | | | KATAVSHRLIDENLPKFIDNIRAFQLVKDSPVAENFAVICADMEPWVNVTALEDLFTLQSYNHTL |
| | | | | | TQAQIEAYNVIIGGRSEESGKVKGLNEYINLYNQKNPDRKLPKFKMLYKQILSDRSSASWLPENF |
| | | | | | DKADEMLDAVNRFYADYTDHMIGVLQQALRTLPECDLERIYIRNDGAITDISNRLFGYYGVLKD |
| | | | | | ALGIDPEDKKKQEYYSIVQVQTALDAYIAESDAESNPQLFAAYSTDCIAGYFADGICRESSDICAKI |
| | | | | | EDSYQKAKDLLNTAHSGEYQLAQAEKDSLKAFLDSLMSLLHFVKPLYLKPGVELPKDDVFYGTF |
| | | | | | TPVFEQMQPLTKLYDKVRNFVTKKPYSTEKVKLNFDCSTLLNGWDVNKETQNLGVLLLKDGK |
| | | | | | YYLGIMDKANNKAFSEAESSEETDCYQKVMYKLLPGPNKMLPKVFFSRSRIDEFAPSEEVLRIRE |
| | | | | | KETFKKGPSFSLADCHTLIDFYKASIEKHPDWSQFNFHFSPTEQYEDISEFYREISEQGYKLTFKPI |
| | | | | | STSYIDSLVNDGKLYLFQIYNKDFSPYAKGKPNLHTLYWKALFDEKNLSDVVYKLNGEAEMFYR |
| | | | | | KASIAEKSKIVHQANLPIEKKNPNLKGQYSTFAYDITKDHRYTVDKFQFHVPITMNFKAGASPRI |
| | | | | | NESVCAYLKNNPD |
| MG29 | 6488 | MG29-165 effector | Protein | Unknown | MFDIFTKQYQLSKTLRFELKPIGKTKDYIEQKGLLSQDEERAEDYKRVKKIIDDYHKDFIHKSLS |
| effector | | | | | GVKLEALEEFEKLYFLPSKDDKTQKEFKKLQESLRKQIASAFRVHPTFKNLFAKELIKDELTSFV |
| | | | | | TDESDRALIEKFKNFTTYFTGFHKNRANIYTHEPKHSAVVYRIVHENLPIFLSNKKAFESVRRDYP |
| | | | | | QLLEQTQSSLLEHLEGGIVEYMFSLEYFSFTLAQKYIDLYNTMLGGKTLEDGTKIQGFNEKINLY |
| | | | | | RQANGIDKRKLPNFKALNKQILSDRESLSWLPEAFKTKEERTEAVRVFYAEHIAKFQCCDGVVD |
| | | | | | LLERIPELFTAKNMYEPSKIFVKNDLSLTAISQSLFSDYRTIREALWQKHLSQNPKAQKSKDLAG |
| | | | | | DEERFFNRKNSFFSVAEIEAALSEYASEKSMFDYFYKGAEQAASEIKAAYASWVNNPNDTKTTKK |
| | | | | | LLDAILSMQRHLKPLYVKTDTDKDIAFYAMFDTYFESLNGISKLYDKVRNFETKKPYSLEKFKLN |
| | | | | | FENSTLLDGWDVNKEPDNTAILFLKDGLYYLGIMDKKHNRVLKNIQPTTKEGGYKKVEYKLLP |
| | | | | | GANKMLPKVFFSNSRIGEFAPSAQLLENYKNDTHKKGDKFSLADCHALIDFFKASIQKHEDWKH |
| | | | | | FGFNFSPTSSYEDLSGFYREVEQQGYKIAYKNIEAEYIDTLVDEGKLYLFQIYNKDFSPYSKGTPN |
| | | | | | MHTLYWRALFDEQNLADVVYKLNGQAEIFYRKKSLDYSEEKLKVGHHPELKTFAYPIIKDRRFA |
| | | | | | FDKFQFHVPITLNFKATGGDNINALVNGFVAKNSESIKIIGIDRGERHLLYVSLIDAKGCMVEQYS |
| | | | | | LNQIINSYNGKEHIIDYHDKLTKREDERAKARVEWGNVENIKELKEGYVAKNSESIKIIGIDRGER |
| | | | | | HLLYVSLIDA |
| MG29 | 6489 | MG29-166 effector | Protein | Unknown | MQNDLVWDDLVNKYSLSKTLRFELKPVGKTLDFIKESKLIEEDKQREADFNDVKKIMDDYYKD |
| effector | | | | | FIERVLNSVIIEPSDLEYFRLVYENLKKDKYNVDLQKKYFNIQKKLREQIYDQIKTNPDFTNLFKK |
| | | | | | ELISELLPSWLKENEKLDQLENVLKFSGWTTYFTGFFENRKNVFSEKDIPTSITYRVINDNLPKYID |
| | | | | | NLSKIDKILALNDFDYSEIETKYSVELSNKKLIDFFSLNNFNCFLNQKGIDIYNLIIGGKSVENKKIQ |
| | | | | | GLNELIYLHSQKAENKEIQKSIKHLKLIPLFKQILSDRVSFSDKYEQLNNNKEVIENIGVFYNLLIK |
| | | | | | EEIFNKLKNIINSIDQSDFSQIYIKNDSNLTTISQGLFKDYSKIKLGLREYAITEKNLKTDKKIDLFL |
| | | | | | KQKYFSIAEIEQGLKLIGLNKSISEYFKSFKLDDKEIFSEITDAYDKFKSIEYDPNGDRFDIGEETEK |
| | | | | | GDLIKQFLDSIMDLLHFIKPLYVSLKNKTIDDEDEKKSEAYELDASFYSEFNEIYEKLSELIKIYNQ |
| | | | | | TRNYITKKPFVTKKFKLNFNCSSFLTGWGTGFTTNSAIIFRKSDNDKFFYYLGIVPQNLSFEDKEK |
| | | | | | LFLVSNCENVIKWVYYDFQKPDNKNIPRLFIRSKGDSFAPAVEKYNLPIEDILEIYDNGYFKTEYK |
| | | | | | KTNFVKFKNSLIKLIDYFKLGFENHESYKHFNFKWKESKEYNDISEFYLDVIGTCYNLKFIDVNFN |
| | | | | | NLIELVENKKIYLFQIYNKDYSKYSKGKKNLHTIYWEELFSKENLKNVVYKLNGEAELFYREKSL |
| | | | | | PVKITHPKNQNIDNKDPINNKKTSCFDYDLIKDKRYTEDKFLFHCPITLNFKKKDIKTINNEVNKII |
| | | | | | KSSEVNILSIDRGERNLLYYTLLDSNGNILLQNSFNSVFDDLNRKSDYKDKLDSIEGERKAARKN |
| | | | | | WHKIINIKELKEGYLSQVIYKISKIAVENNAVIVLEDLNYGFKKGRFKIEKQVYQKFEKMLIDKL |
| | | | | | NYLVFKEKDPEEIGGSLKAYQLTSKFDSFKKLGKQSGIIFYVPASYTSKICPKTGFINFIYPKFENI |
| | | | | | KQAQDLLSKFKYIKFHLNEDVFEFNFNYSDFKSKNDKTKLIKDNWSIWSNGVKLVQFRNSEKNN |
| | | | | | MWDTKEVNVTEELKKLFDNQRINYKDINNLKDQIVNVDSKEFLEKLIANLKLILQLRNSRSNSDE |
| | | | | | DYILSCVKGKDGKFFDSRSAKDNEPKDADANGAYHIGLKGLMIIDKIKEQESDKKIDLKIQNNDFI |
| | | | | | NERIKRCN |
| MG29 | 6490 | MG29-167 effector | Protein | Unknown | MEKFSIKYQLSKTLRFELIPQGKTLEHIQNKGLLTQDEQRAESYKKMKKTIDGFHKHFIELAMQ |
| effector | | | | | NVCLTKLEAFRDLYFAPTEKKKNDAFKKDLEKVQETLRKEIAKGFQTGAAKDIFSKIDKKELITE |
| | | | | | LLENWIQTQQKEDIYFDENFKNFTTYFGGFHENRKNMYSDKEQSTAIAYRLIHENLPKFLDNIRT |
| | | | | | FERIKAIPDLHEKCSVLYKEIEEYLNGITIDEVFELNYFNEVLTQKQIDVYNLVIGGRSPKEGIKKI |
| | | | | | QGLNEYINRYNQQQQDKNQRIPKLKILYKQILSDRESTSFVAEKFENSQEVLEAINGFYHHKLISF |
| | | | | | QPEGKEDTENVLTELQEILASLKEYDLSKIYIRNDKSLTDISQALFGDWSILKNALEFAYLQTIEIG |
| | | | | | KKGLSKKQETEKEKYLKQSYFSIAEIEKALFAYRNEVELLNNLKENDLPITNYFKTHFKTKKEND |
| | | | | | TDKEFDFISNITAKHSCIKGILENYPEDKALHQDKTAIDNIKLFLDTMMELLHFVKPLILPKDSTL |
| | | | | | EKDDVFYGQLNVWYEQLNELISLYNKVRNYATQKPYSTKKIKLNFENATLLDGWDVNKEEANT |
| | | | | | AVLFKKGNLFYLGIMDKNHNKIFREFPKNKSRNNYSKINYKLLPGASKMLPKVFFSEKNIAYYAP |
| | | | | | SEEILNIRNRSSHTKGGKPQEGFGKADFNILDCRKMIDFFKSSIDKHQDWKNFGFQFSDTQSYNSI |
| | | | | | DEFYREVEAQGYTISYTNISEDYINQLVDEGKLYLFQIYNKDFSPFSKGTPNMHTMYWKALFDEE |
| | | | | | NLKDVVYKLNGQAEIFFRKKSIKDDKKIIHPKQIKIAKKIFKNSDKTTERVPDETIKRLNEFYQGK |
| | | | | | IQAKDLKNEYKKYLDNFSLFNKDKNRQDIDLIKDKRFTVDKFQFHVPITLNFKATGGDFINQDVL |
| | | | | | AYLKNNPDVNIIGIDRGERHLIYFTLINQKGEILLQESLNTIKEDQHKIETPYHTLLDRKEKDRDK |
| | | | | | ARKNWGTIENIKELKEGYLSQVVHKIAKMMVEHNAIVVMEDLNFGFKRGRFKVEKQVYQKLE |
| | | | | | KMLIEKLNYLVFKDKVPNETGGLYKALQLTSKFNSFKDLGKQSGFLFYVPAWNTSKIDPTTGFV |
| | | | | | NLFNTKYENIEKARKFFDSFKSIRFNTEKNYFEFVFDYNDFTTRAEGTKTYWTVCTYGERILTFR |
| | | | | | NPKTNNQWDNEAINLTEQLEDLFGKYNIVYGKGNCIKEQIVAQTDKVFFEKLLQLFKLTLQMRN |
| | | | | | SITNSEVDYLISPIMNEKGEFYDSREEAKKGNSNLPKDADANGAYHIAKKGLWVLEQINNFKGDN |
| | | | | | WKQLKLAISNKEW |
| MG29 | 6491 | MG29-168 effector | Protein | Unknown | KLNFKTSTLADGWDLNKEKDNYAVILRKLNPITEQRDYYLGIMTSADKKIFEIKNNPSLGQNNYE |
| effector | | | | | KIIYKLLPGPSKMLPKVFFSDKNIAFFNPSEEILAIRNRGSIITKNGKTQKGFEKEEFNLEDCIIKIID |
| | | | | | FYKLSLAKHEEWSNFNFIFKQTNKYTDVSEFYAEVANQGYKISFLNFDEKYIKQLVIEGKLYLFQI |
| | | | | | WNKDFSVNKSEKNKNSRKNLHTEYWLNLFSEENLKDVVYKLNGEAELFYRKKSILKHITHLKN |
| | | | | | NAISNKNPIRDKETGELKEKSTFKYDLIKNRRYTEDKFFFHCPITLNFKAGNKSKVIHKSVNEFIR |
| | | | | | EARGQINVLGIDRGERNLAYYTLIDPERNIIEQNSFNIISDDLQRKLDYQEKLDIIEGDRDAARKN |
| | | | | | WRKINNIKEMKTGYLSQVIHKVSKLAVEHNAIIVLEDLNFGFKRGRFKIEKQIYQKFEKMLIDKL |
| | | | | | NYLVFKDRDNNQTGGVFKAYQLTNEFESFKKLGKQSGIIYYVDAYKTSKICPKTGFVDLLYPKF |
| | | | | | ENIKKSQEFIRQFEYVRYHKDENLFEFNFNYSKFASDNNKIKLARDNWSIWSNGIKLIQSKINNY |
| | | | | | WRTKEIDVTAELKELFGKNNIDYGSGNNLIEQVIKIEEKYFYESLMKALKVIIQLRNSYTDYEIKD |
| | | | | | LKKKLGDNFKGHECDYILSCVKDTQGKFFDSRNAKDVEIQDADGNGAYHIALKGLMLLDKIKK |
| | | | | | ADDAKIDLKIDRADFLNYTIERNR |
| MG29 | 6492 | MG29-169 effector | Protein | Unknown | MLNNFNHLYSLSKTLRFELKPVGETADYIEDFKSEYLKTVVAQDEQRAEDYLAVKALIDDYHRA |
| effector | | | | | YIEQSLSNVDSETGELLIAPEDFEDAYSYFQAFKAPGADRKARDEWLAELDKLRKALVRLFTGQ |
| | | | | | KELFGKGLITDELPEWLEQQGRWEENKELVGRFNKFTTYFTGFHENRKNMYTAEAIPTAIAHR |
| | | | | | LMNENLPRFFANCDNYKSLVAKYTDLELSLDEALLSKFGVSSAGDIFQPRFFINLFTQSSIEDFEEV |
| | | | | | LGGRVDEDRGKIQGLNELLNLYRQKNNLKAREAPGFTHLYKQILSDTESRSFVLEAFETDREML |
| | | | | | DAVGSYLELKSEPLSKLSSVMSALPEVDAEKVYVKGNDLTRVSQGAFGTFALIPAALTHYAETVV |
| | | | | | FPLEPDKKATKKLLENRESYGKQELYSLKELEEALSAFNESLDDQDGFSEKLKKAENHPLISYFA |
| | | | | | TATKTAEAELEEAADALKPLLSLEQLNKKRIPPEGDSEEGSEGFEQVRRIHECLDAHMSLQQVL |
| | | | | | RPLHLVLGRKPIDVASKDLGFYARFDEAIEDYNAMTIALYNKTRNHLTKKSFSTDKVKINFESPT |
| | | | | | LLAGWDLNKETANKSIILRQNGKYYLGIMHPRHPKIFSKPPEAKVGDEAYEKVNYKLLTGANK |
| | | | | | MLPKVFFSKKGLETHNPSEQILALYKNGEHKKGDTFNIESCHKLIDFFKSRIPLYKRDPSDPYGW |
| | | | | | EIFDFKFSPTKTYKDISGFYREFEEQGYKLWFTHVTKAYIDEQIEQGHLFLFEIYNKDFSPFSKGK |
| | | | | | PNLHTLYWKGLFEQNNLDDVVLKLNGEAEIFYRKHSIAANEQIVHSANKAIVNKNENNPKPESTF |
| | | | | | EYDLVKDRRYTKDKFFFHVPITLNHKAQKPVRFNDQVNRALQKADDIHVIGIDRGERHLLYYTV |
| | | | | | VNQKGEIIEQDTLNTISTDQDYVVDYHHKLDQQERTRDKARKAWTNIDNIKELKAGYLSHVVHK |
| | | | | | LAELIVKHNAVVCLEDLNFGFKRGRFKVEKQVYQKFERALIEKLNYLVFKDTTEGQPGHYLKA |
| | | | | | YQLTAPFESFKLLGKQSGILFYVGASYTSKIDPATGFINFLKPHYESLAKSKTFFESMDSICFNAKR |
| | | | | | GYFEFSFDYANFSVPQTLDDYQTAWTVCTHGETRYHNQRNDKGIWETKAVNVTEKLKVLLNEA |
| | | | | | GVSYQNGEELKDAIAAVKSSKFYRSLYFLLRLTLSLRHSVTGTEEDFILSPVADEGGNFYDSRNAS |
| | | | | | DAEPKDADANGAYHIALKGLWNLEKIDQWDGESRLNLAMKNVEWFQFASEKPFKE |
| MG29 | 6493 | MG29-170 effector | Protein | Unknown | MQTVFDQFTGLYSLSKTLRFELKPIGQTKELLEDFYKHCEGNPIVVDEQRICQYPKMKALLDDY |
| effector | | | | | YRLFIDKTLSRPIFSAEEITKAYELYCAAKQSHNSKQKESKYQKEYTAAKKSLRKKLAACFAEQK |
| | | | | | EEFGLDKYSHLFGSEQLPLNCWLQSRLQGGQITAAEYEEGLAALKAFERFTTYFTGFKENRDNL |
| | | | | | FAEVDKASAIANRVIEENMEKHFFNCRALADSTQKYPQLAEELGSFLSFFMPAYYGSCLSQQGID |
| | | | | | CYNQAIGKELNGDSTKGVNQIINEYRQKYSLKTKDLPTLITLHKQLLSKKPDCPVSETLTTDQEM |
| | | | | | LQLAKYCYTTAISRLNELQKIMSDYLNDENLQFIYLKTKDLNALSKKMFGEWDTIRNAYFYHCQ |
| | | | | | QLTDKEQKRFAANTKEVISLGLLQRLLNSYLPGSENPPPLVDPALYFKSFDLTPLRQAYEAAAPV |
| | | | | | LALTQLDQDKAPPNEGNPKGGLGYRQTILVKNLLDTILRAKDFYKPFLLEQDGKPIAVADSNELF |
| | | | | | YTQFTAAFAKLNCLYKKYNLIRSYASQKPFSTDKFKLNENNSTLLSGWDLNKEEENTNILLRKDG |
| | | | | | QYYLGILKNTKLFADCSKYLCQDSVEHYEKMVYKQVSGVNKMFPKVFFAAKNLELYKPSAQIL |
| | | | | | QIKAQKSHLKEANNPDAKNAWIDFCKDSIAKSEWPQYFKFKFKPAEQYPDVNSFYREADAQMYS |
| | | | | | LTFQNVAGAFVKQAVENGELYLFEIYNKDFSAYSKGKPNLHTLYWQMLFDEHNLCNIADNAEQ |
| | | | | | PVFKLNGEAEIFYRKASLDDKVTHPAKKPIDNKNPLNGKKTSTFAYDLKKDRRYMQNKLYFHCP |
| | | | | | ITINFRRGTLPQAVFNYQVNSFLQNNPQINLLGIDRGEKNLLYYTLINQRGQILKQGSFN |
| MG29 | 6494 | MG29-171 effector | Protein | Unknown | MGMIGDQFIGQYSLQKTLRFELRPIGETQKLLQDFKEEVQGNLLEYDAERARAYPMVKKVLDD |
| effector | | | | | YYRYFIDQVLSGFAFDSQTINEVYEMYKKAKKDAEAAKEYAVHTKKLREQLSAAFKAPITYYML |
| | | | | | DKYEHLFNRNRESRLFEWLDIRFENDHLTENEYDEIKDVLDKFDKFTTYFTGYKENRANLFVAD |
| | | | | | EKATALAYRVVNENMPRFFENCIRMENIKKRHSDLYKLLVSFEGYFVPQAYANIICQPAITDYNKI |
| | | | | | IGRPTQNPDEKGVNSIINEYRQKNQIKNRELPMMAQLYKQLLSDRITVFLDPVINNDEEMQSIVA |
| | | | | | ETIEIARGLFSEVINLTAIHALADNSENIYINSSALANLSHRVYDDWNLIYRACEAKMIKLEGKQK |
| | | | | | KGLENKLKMAIPMSELQNIIEEYIATLDEELKLSYYKIPILCNYFQNPPLDDFESATLKFEQIVKTT |
| | | | | | TPRTDLIHAIKEVLDKAMEVVRFFKPLYLFKGRSPLEVPDRNEDFYNEFERLYAELNLISKIYDRV |
| | | | | | RNYATKKQFSQDKIKLNFNNPTLLDGWDLNKEQDNLCVILIRDGNYYLALMNRDYRRLFDLKN |
| | | | | | DEVRNKALGKAGDHCYSKLEYKQVTGANKMLPKVLFAATNSDLFKPSQEILDIRKTGSHKKEA |
| | | | | | GNIEALHKWIDFCKQSIATHPEWNDHFDFKFRSTSEYSELTEFYNDFDRQAYKIKFVDIKVEYIDQ |
| | | | | | LVKEGKLYLFQIYNKDFSPYSKGRPNLHTTYWRMLFGNENLANITMDTDRPIFKLNGEAEIFFR |
| | | | | | KASLEKQITHAKGQPITNKSKKDNGKESESIFEYDLIKDKRYTEDKLFFHCPITINFRAPGTTVGS |
| | | | | | FNRKVNYFVERNPEVKIIGIDRGERHLLYYTVIDQKGNILEQGSLNQIHNSYTSAGRVVEHNINYR |
| | | | | | DLLHEKEKGREEARKNWETIENIKELKAGYLSQIVNLLSNLMIKYNAVLVLEDLNAGFKRSRIK |
| | | | | | VEKQVYQKFEKAMIDKLNYLVFKELPPGSSGHYLNGYQLTAPFTSFRDLGRQSGFLYYVYPSYT |
| | | | | | SHICPKTGFVNLLNTRYESIEKAISFFEKFNSIKYNPGSDYFEFDFDYASFGKDVARSQWCVCTAG |
| | | | | | EKRYYYANHDKTSRECNATQQIKELLDKYNIEYIRGKDLLPEIIKKNDKGFFNGLMFLLGVVLQ |
| | | | | | MRYTVSGTSNDDDFILSPVMDEQGQFFDS |
| MG29 | 6495 | MG29-172 effector | Protein | Unknown | VKDLLNTSLQPNEKLVQQKDKTLLIKNYLDSIVNLLHFIKSLKPREELSQKDEAFYGRFDELYEA |
| effector | | | | | LNVITPLYNKVRNHLTKKPYSTEKYKLNFENSTLADGWDLNKEADNTTILLRKEGNYYVAVMD |
| | | | | | KKHNKIFRDIPASAKGEAVYEKMVYKLLPGANKMLPKVFFSKSRIEEFNPSTELLENYKNETHK |
| | | | | | KGESFNIQHCYNLINFFKSSICQHEDWKHFNFNFSETGTYEDLSGFYREVEHQGYKITFVNISESYI |
| | | | | | HKLVEEGKLYLFQLYNKDFSKYSKGKPNLHTLYWKMLFDETNLKDVVYKLNGEAEVFYRKKSI |
| | | | | | EDKNKIIHKANQPISNKNPENVKKQSSFQYDITKDHRFTKDKFQFHVPITMNFKAKGILNVNNEA |
| | | | | | NKYLRNNPDTHIIGIDRGERHLLYLTLINQQGEIIKQESLNIVANEKQKTDYHKLLEAKEGKRDE |
| | | | | | ARRDWGTIENIKELKEGYLSQVVHKIAEMIVDYNAIVVMEDLNFGFKRGRQKVEKQVYQKFEK |
| | | | | | MLIDKLNYLVFKTPKPNQPGLLNALQLANKFESFKKLGKQSGFIFYVPAWNTSKMDPVTGFVDF |
| | | | | | LKPKYESVDKAIAFIKQFDAIQYNKAKQYFEFVFDYSNFTEKAEGSKTKWTVCTTNTERYVWNK |
| | | | | | TLNNGKGGQEHNNVTEKLEVLFGNAGITYGNGENIISKITEQTGAEFYKALLKLLSITVSLRHNN |
| | | | | | GEEGEKEQDYILSPVAPFFDSRKATDTLPKNADANGAYHIAKKGLWVLEQINKCEDFKKLKLAI |
| | | | | | SNKEWLEFVQKSSIKTNYPQPFA |
| MG29 | 6496 | MG29-173 effector | Protein | Unknown | MQVQKCIWDDFTNKYSLSKTLRFELRPVGKTLEYIKERGLIEVDKQREEEFNKIKKIMDEYYKE |
| effector | | | | | FIEIVLSNIEINLSDLKEYQTIYNKLIKDKSNLMLKKQYKHIQDKIRKQIYELIKKTDNYNKLFGKE |
| | | | | | LINDILPNWLGSKDRLADKELVMKFSKWATYFSGFFKNRENVFSEKPIPTSIIYRIVNDNLPKYLD |
| | | | | | NLIKFEAIKQLNNFSYSYMETELSTKLNNSSIDSFFILNNFNKHLTQKGVDLENLVIGGYSENGIKK |
| | | | | | QGLNELIYLYSQKPENKEYSKMIRKLKMMPLFKQILSDKESFSDKFDTFINNEEVIKEITDYYTKI |
| | | | | | YSQWLPELKKLITDINNFDLTQIYINSSSISSISKKLCGDWETINKGLIEYAVNKLNLKTKAKKEAF |
| | | | | | LKNKYFSLYEIDESIKLLNLENPISICNYFSKFGESKTEQADLFKTVVNNYDSFKKIVLIDKHKFSE |
| | | | | | MDIEIIKSFLDSILGVIHFIKPIYINLNIKEEDNSQDAYETDADFYVRFNEIYMNNFNRIISIYNKTRN |
| | | | | | YTTKKPYSTKKFKLNFENSQLLNGWDANKEKDYYSLLFRKDDYYYLGIMAKGHNKIFENINNN |
| | | | | | QDIDSFEKIKCKLLPDPNKMLPKVFFSNSNIDYYKPSQEIKNIINYSTHTKGGIPKDGFEKKDFNLS |
| | | | | | DCHKLIDFYKSSLYKHPEWNCFNFKFKDTNLYHDISEFYDDISEQGYKLEFSKIRENYISDLVDSG |
| | | | | | KLYLFKIYNKDFSKNKAKKNKNSNPNLHTIYWREIFSKENLDNVRYQLNGGGEVFFREKSITSNK |
| | | | | | TIHPKKTTIDAKNPIKGKFKCTFDYDLIKDKRYTEDKFLFYCPITINFKAKGSGKDIHKQINEFISN |
| | | | | | TDKPVNVIGIDRGERHLVYYTLLDPNGDIIKSGSFNLVSDDLDRKFDYQDRLDTREKERDAARKS |
| | | | | | WQSIEPIKNLKEGYLSKVVHNISKLAIENNAIIVLEDLNFGFKKGRFKIEKQIYQKFEKMLIDKLN |
| | | | | | YLVFKDIPSTKIGGSLNGYQLTNKFESFSRLRKQSGILFYVNASYTSKIDPCSGFFNMILPNYESVE |
| | | | | | KSKELLKKFEYVRYNKNEDLFEFNFNFANFNKDIKLKKDNWSIYSNGTKLVNFRNKNKNNEWN |
| | | | | | TEEVNINEQLKVLFKIYNLDYMNSKNLMNSFNRIDSKDFFEQLIGLLKLILQLRNSRINTFNDYILS |
| | | | | | CVKDKNGHFFDSRTSGNNLPKNGDENGAYNIGLKGLIILDKIKKKEELKISKEEFVNYLIDKNM |
| MG29 | 6497 | MG29-174 effector | Protein | Unknown | MLEGFSNKYPVSKTLRFELKPVGKTLEYIEKEGFIEEDESLAQSYKKMKKTIDAYHKDFISRALS |
| effector | | | | | TIALKGLSDFQDAYDQSKAFSDEATKKRLIKAQDDMRKQITSVFTNADFKDEFGNLFKKELLTTT |
| | | | | | LEKFVIEYNTNNKEKLFFVDDFKSFTGYFLGFHENRKNIYSSDAKHSTLAFRLVHENLPKFIENIN |
| | | | | | SLQAIKNNHPQLFDTLAKQVNHSLDFIFSSGFSIDDMLNIEFYDNMLSQQGIDRYNQVLGGVVLES |
| | | | | | ASKKLQGLNELINLYNQKLPKGGGVRKAPKLRPMYKQILSDRSSLSFLPEKFADDGELYDAVNE |
| | | | | | YYIGHLLAQPDNTKQATLLESLKDMVTRLNNYDLTKIYLKNDKALTHISNTLFSDYSVLPTALSY |
| | | | | | YYETQVNPSYSESLEGTKTQRKKESLIKEKDAFLKGFHSVSTIERAYREYVVSIDEDSDLRAFGIS |
| | | | | | TPVQHYFSQHFVSKPVDAEKPAVDLIQDIANKYTTIKGKLNSEVEPGTRELMQKGAEVANIKHL |
| | | | | | LDAIMSFVHFIKPLSVGGGEAGEGLDIDPSFYSEFLPLYEELGLFFPLYNKVRDYISQKPFSEEKFK |
| | | | | | LNFKNTNLLTGWDANKEKDRLSLIFRKGGHYYLGVMNKAHKKSFEDLPQATECSDDCYQKMH |
| | | | | | YKLLPGPNKMLPKVFFAASNIDYYNPSEALLENYKKGTHKKGADFNLKHCHELIDFFKQSIAKH |
| | | | | | EDWKQFGFKFSDTSSYEDLSGFYNEISNQGYKVSFIDVDSSYIDDLVESGRLYLFEIYNKDFSAKST |
| | | | | | GRPNLHTIYFKSLFSDENLADTVYKLNGDGEMFYRRSSIKPENTITHKKGERVHSKNPNTPDASR |
| | | | | | VLDYETIKDKRYTQDKFQLHLSMTMNFKASGIGPGQFNNLVKATIRDNKTKDMHVIGIDRGERH |
| | | | | | LLYLTVIDKNGKLVHQESLNNIVSGENSITPYHKLLDEREKDRGNARKNWGAVEGIKDLKKGYL |
| | | | | | SQVVHKLATLICEYNAVVALEDLNFGFKRGRFKVEKQVYQNFEKALIDKLNYLVFKDREPDDIG |
| | | | | | GARKALQLTSPFSSFKELGKQTGFLFYVPAWNTSKIDPVTGFVDLLKPKYENLDKAKDFIDRFDA |
| | | | | | IRYNKDKDYFEFVFDYDNFNNKATGTRTHWTVCSYGNKRFVYDKKANNNRGGQKTVDVNAEL |
| | | | | | KALFDGYDIDYEKLAGSDLRPFIRNKADKALYSTLMHLLKVLLAMRYSKANTSGGADEDFILSP |
| | | | | | VADENGVFFDTRDYLPANKGEEKGAYGAMPQDSDANGAYHIALKGLWVMRQIQNHEGEDFKG |
| | | | | | LDLKITNKDWLNFAQTKPY |
| MG29 | 6498 | MG29-175 effector | Protein | Unknown | MAENKAIFDGFANKYSLQKTLRFGLIPDSESKKWIEKNLVIEKDEKLAEEYKKAKKIIDKVHKAF |
| effector | | | | | IESALEKLKLNEKALTAFEKETAKTKKERDKKTIEKIQASLRNEVADSFNKDKEEFKAMFSEKMI |
| | | | | | KENAPRFCNTAEEKATMKLFDNFTTYFKEFHKNRKNIYSNEAKATSIAFRIVHENLVTFVDNLRI |
| | | | | | FAKIREGGLDLDKAEYELKSILGKEKIEKLFSIEYFNKVLSQGGIDFYNRIIGGEFEEGSRKKIRGL |
| | | | | | NELINLHNQKERGKLPRFKQLKKQILSDRKKSLDFGFLDDSELLQAIEEFYLKELSDENGKRTPE |
| | | | | | MLRALFERAEEFDIEKIHLRNDSTLRELSNKLFGDWSAIENALSEHYEKENPSKDTKKYEKDKEK |
| | | | | | WLKQDQFPIATIETALSLYEHEKVDKGKCKGLFFRQFSSFKKEEDDKENLLERLEISYNRAKPIL |
| | | | | | ENKSPGNRLASDEQAKGKLKALLDALIDILHFVKSLRLKDAAISDKDYSFYGEFDPLFERLDGIV |
| | | | | | GIYNKTRNYLTKKPYSTEKIKLNFENSVLLGGWDRNIEDTKGGVIFRKDGQFYLGIINKNNKTIL |
| | | | | | KNPPKAKDGEVAFEKMFYKLIPNPARDLHHTILSKKRSAKYKPTKTLLEKYEQKKHIKGDNFDK |
| | | | | | KFCHELIDFFKESIKKNPDWETFNFKFSETSSYEDISGFYREVGRQGYKVVFERIPASYIETLVKE |
| | | | | | GKLYLFKIWSKDFSKDSKGTPNMHTLYWRALFDEKNLKEPIYKLNGEAEMFFRKRSVEPKITHP |
| | | | | | AGKPIPNKNPDNLKKESVFKYDLIKDRRYSLDKFQFHVPITTNFGSEGQEFIDYDVRDAIKKSPVR |
| | | | | | IIGIDRGERNLLYLSMIDENGKILLQESLNKITSLYGGGKKTTDYNSLLARSEAGRDEARRDWKK |
| | | | | | IENIKEIKEGYLSQAVHKIATLMVENEAIVVMEDLNSGFKRGRTKVEKQVYQKFERMLIEKLNY |
| | | | | | LVFKKRSPEEAGGLRNALQLTSKFKSFEKLGKQSGFLFYIPAAMTSKIDPVTGFANELNPKYESV |
| | | | | | GKSKEFFSKFERISYNSKKNWFEFSFDYSNFKTKDGLEGKWVVCSTPHERFYRNGGAKGGAKG |
| | | | | | ETLPMNANEELKKLFGEFGIEYSTGDCLKKEIVSKDSKEFFKKLTRVLASILSLRQNNGKTGQDE |
| | | | | | QDYILSPVEPFFCSLDGKDGLPKDADANGAYNIARKGLLAVRQIRSAEDPKKARLAIRNKEWLEF |
| | | | | | AQAMK |
| MG29 | 6499 | MG29-176 effector | Protein | Unknown | MLNNFNHLYSLSKTLRFELKPVGETADYIEDFKSEYLKTVVAQDEQRAEDYLAVKALIDDYHRA |
| effector | | | | | YIEQSLSNVDSETGELLIAPEDFEDAYSYFQAFKAPGADRKARDEWLAELDKLRKALVRLFTGQ |
| | | | | | KELFGKGLITDELPEWLEQQGRWEENKELVGRFNKFTTYFTGFHENRKNMYTAEAIPTAIAHR |
| | | | | | LMNENLPRFFANCDNYKSLVAKYTDLELSLDEALLSKFGVSSAGDIFQPRFFINLFTQSSIEDFEEV |
| | | | | | LGGRVDEDRGKIQGLNELLNLYRQKNNLKAREAPGFTHLYKQILSDTESRSFVLEAFETDREML |
| | | | | | DAVGSYLELKSEPLSKLSSVMSALPEVDAEKVYVKGNDLTRVSQGAFGTFALIPAALTHYAETVV |
| | | | | | FPLEPDKKATKKLLENRESYGKQELYSLKELEEALSAFNESLDDQDGFSEKLKKAENHPLISYFA |
| | | | | | TATKTAEAELEEAADALKPLLVLDQLNKKRIPPEGDGEEGSEGFEQVRRIHECLDAHMSLQQVL |
| | | | | | RPLHLVLGRKPIDVASKDLGFYARFDEAIEDYNAMTIALYNKTRNHLTKKSFSTDKVKINFESPT |
| | | | | | LLAGWDLNKETANKSIILRQNGKYYLGIMHPRHPKIFSKPPEAKVGDEAYEKVNYKLLTGANK |
| | | | | | MLPKVFFSKKGLETHNPSEQILALYKNGEHKKGDTFNIESCHKLIDFFKSRIPLYKRDPSDPYGW |
| | | | | | EIFDFKFSPTKTYKDLSGFYREVEEQGYKLWFTHVTKAYIDEQIEQGHLFLFEIYNKDFSPFSKG |
| | | | | | KPNLHTLYWKGLFEQNNLDDVVLKLNGEAEIFYRKHSIAANEQIVHSANKAIVNKNENNPKPES |
| | | | | | TFEYDLVKDRRYTKDKFFFHVPITLNHKAQKPVRENDQVNRALQKADDVHVIGIDRGERHLLYY |
| | | | | | TVVNQKGEIIEQDTLNTISTDQDYVVDYHHKLDQQERTRDKARKAWTNIDNIKELKAGYLSHVV |
| | | | | | HKLAELIVKHNAVVCLEDLNFGFKRGRFKVEKQVYQKFERALIEKLNYLVFKDTTEGQPGHYL |
| | | | | | KAYQLTAPFESFKLLGKQSGILFYVGASYTSKIDPATGFINFLKPHYESLAKSKTFFESMDSICFNA |
| | | | | | KRGYFEFSFDYANFSVPQTLDDYQTAWTVCTHGETRYHNQRNDKGIWETKAVNVTEKLKVLLN |
| | | | | | EAGVSYQNGEELKDAIAAVKSSKFYRSLYFLLRLTLSLRHSVTGTEEDFILSPVADEGGNFYDSRN |
| | | | | | ASDAEPKDADANGAYHIALKGLWNLEKIDQWDGESRLNLAMKNVEWFQFASEKPFKE |
| MG29 | 6500 | MG29-177 effector | Protein | Unknown | EKTLTYQIVSEYNGLKGFLNTEHSEDYKLIQDKERVHQLKTFLDSIMNLLHFAKPLYLDKNASEE |
| effector | | | | | KNELFYTEFTPIYDELAKIVPLYNMVRNYLTKKQYSTEKFKLNFENSTLLDGWDVNKEKDNTGV |
| | | | | | ILLKDDNYYLAIMNKQNNTVFEEIPKAINPQNTFKKMNYKLLPGPNKMLPKVFFSKSRTKEFGVS |
| | | | | | EKMLENYENGTHKKGDNFNLSDCHQLIDFFKASIQKHEDWKQFDFNFSETKTYEDISGFYREVE |
| | | | | | HQGYKITFSDVSKEYINQLVDEGKLYLFKIYSKDFSEYSKGKPNIHTLYWKALFAPENLADVIYK |
| | | | | | LNGEAEIFYRKKSINIDKAVTHNAKEKLENKNPNATKKISVFDYDIIKDRRFTFNKFQFHVPVTM |
| | | | | | NFKSTGNDFINPHVNEFLKNNPDVKIIGLDRGERHLIYLTLIDQQGNIIRQESLNTIKDEKHNIETP |
| | | | | | YHLLLDNKEEERDKARKSWDTIENIKELKEGYISQVVHKIATMMIEHNAIVVMEDLNFGFKQGR |
| | | | | | FKVEKQVYQKLEKMLIDKLNYLVFKDKPANEAGGIYKALQLTNKFTSFRDMGKQTGFLFYVPA |
| | | | | | WNTSKIDPTTGFVDFLKPKYESIEQVKTFLRKFKNIYFNSTKNHFEFSFDYKDFTTKADDTQTEW |
| | | | | | TICTHGDRIEKFLNSINKWDERTVTLNDEFVTLFDKYHIDYKDSETLKEKILQQTEKAFFERLIYL |
| | | | | | LRLTLQMRNSKTGTEIDYLISPVADKNGNFYDSRKVSQNLPKDADANGAYHIALKGLWVLQQIN |
| | | | | | KTEDLKKVKLAISNKEWLQFVQK |
| MG29 | 6501 | MG29-178 effector | Protein | Unknown | MKSDFFKNFTSQYKLSKTLRFELKPIGKTLESIQSKGLLEKDEQRASSYKRVKKIIDEYHKYYIEL |
| effector | | | | | ALKNIQLSKLAEYYELFSQNKEVRNEDAFKNLKNELRKEIVKELTKGAYKEMFERLFSKELIKE |
| | | | | | DLKLWIKDRPEFQEELQFIKEFDNFTTYFTGFNENRRNMYTDQEQSTAIAYRIVHENLPKFIENIK |
| | | | | | MYESIKLKYPDLNFTPVLKDMEDLIQGKTLDEIFSLEYFNNVLSQHGIEFLNFIIGGRTREDGTKI |
| | | | | | KGLNEYINLYNQQQMEKNKRSPKFKQLYKQILSDRTSISLRFEAFENDSELLDAIEEFYQTELCE |
| | | | | | YESEGKTKNVFDEIKNLVTSIEAYDLEKIYLRNDTNLTNISQRIFGAFGVFKDAVSYYYDHVIDPQ |
| | | | | | FQTKIAKAKGEKALKKLNDLKAKWNKEYISIAVLQTALDKYMESVDDSLEIKKTYTLKVIADYF |
| | | | | | KNHFKVIDEEKKETDLVYNIKSQYLGVKGLLNIEKSENKILAQDKEKVHQLKSFLDSILELNHFV |
| | | | | | KPLNLIADALLEKDEVFYSQFAPLYEQLNKLTPLYNMVRNYLTQKPYSTDKIKLNFENSTLLGG |
| | | | | | WDVNKEIDNSSVILRKEGLYYLAIMDKDNKRIFLNVPGIENETGFYEKMNYKLLPGANKMLPKV |
| | | | | | FFAKSRIDFFNPTQEILENYKNETHKKGDTFNIDDCRALIDFFKSSLEKHEDWKQFNFKFSPTNTY |
| | | | | | QDLSGFYREVEHQGYKMSFENIAADYINKLVEEGKLYLFQIYNKDFSTFSKGKPNLHTMYWKAL |
| | | | | | FDEKNLANVVYKLNGEAEVFFRKSSIEEKNKVVHKANESIISKNPLTKGKLNTFEYDLIKDRRYT |
| | | | | | VDKFQFHVPITMNFKATGSEFINFQTNEFLKNNPEVKIIGLDRGERNLIYLTLIDQKGNITIQESLN |
| | | | | | TIKNKVRDIEINTPYQELLNRKEKERDEARKSWGTIENIKELKEGYISQVVNKIATMMVEHNAIVI |
| | | | | | MEDLNFGFKR |
| MG29 | 6502 | MG29-179 effector | Protein | Unknown | MPKKSLDQFTFQYSVNKTLRFALTDPQGDMEKFLANMREGELKRILVEDKQRAEDYKQVKKII |
| effector | | | | | DAYHREFIEEVLGQKGVLTEEDMNEYVTIYEEFKGLSRDSKNREKVIKKKRDIEKRLREAIVKKF |
| | | | | | KKNAKYKKLFNAKLITELLPQWLEERRNQKEIYDEAKYSEEKHLVEKFNRFATYFTDFHQNRA |
| | | | | | NMYVEKDQNTAIPYRIVNVNLPKFLDNYLNYEKLIQNHSGIDFSSIEKDLKGELRDLKLSEFMKP |
| | | | | | SNFLACLNQSGIDSYNTIVGGKTLEAGKKIQGINEILNQYRMKLDKSEAKKIPLMTSLYKQILSDR |
| | | | | | ESHSFLPEQFTSDQEMLKAIREFYESISETKEGEKKSLLNNIKEFLDSFPSENTDRIYIKATEITRIS |
| | | | | | HTLFAGDWALIHRALEYSKLDSQLKKEHIISIEEIETALQKYKEDIDEEDEAIKKKLGNPHPVIDF |
| | | | | | FKSAEKVEKVEETKNESNSNPTPYKKFNIFATINQHYQAAKEILKLEELHKDRLSPQKEGDKGG |
| | | | | | KGFQQVTKIKNLLDAIKDLLDLISPLYLEYKRQKIDVSDKDDRFYVELDILYDELFSIVPLYNKVR |
| | | | | | NHVTKKNRNEERFKINFDKTTLLDGWDVNKETANLGVILRKDNNYYLAIVHKKHSSVFNYVKK |
| | | | | | RGDSNNKLKIKDGLRRDIIAQNGEGCYEKMLYKLIKEPARDLPHAVFPEKKKNNFNPPSEEIQRI |
| | | | | | YNKYKKEKQFVNRAQMHQLIDFYKESIKRNIDWNGFNFEFSFTKEYNDIQEFYNEVKRQSYKID |
| | | | | | FDKIKSSYIEDKIKKGELFLFKIYNKDFSPHSKGSPNLHTSFWRLLFDEKNLKDTVAKLDGQAEIF |
| | | | | | FRPASIKKSERKIHKKDVPIENKNLNNAKKESKFKYDLIKDRRYTQDKFLFHVPITLNFSTQNKTA |
| | | | | | KQFNTEVNHFLQHNTNVNIIGIDRGERNLLYYTVIDQEGKILEQESLNIIANRIPNQNKVDSHLKC |
| | | | | | NTFY |
| MG29 | 6503 | MG29-180 effector | Protein | Unknown | MWKLGRNVRMARKKSIFDNFTNMYRLSKTLRFELKPIGKTLENIERKGLISQDEERAKSYERM |
| effector | | | | | KETIDGFHKSFIELAMSRVKLTHLSAFADLYNASPEKKKEDAFKKKFKKVQADLRTEIAKGFRT |
| | | | | | GEAKEIFSKIDKKELFTKLLEEWIKSQQEEYYFDEEFKKFTTYFTGFHTNRKNMYTEEEQSTAIA |
| | | | | | YRLIHENLPKFLDNIKTFQKIKSTPELYEKCMILFNEIAQYLDIKRIDEAFEFNYYNNVLTQKQIDA |
| | | | | | YNLILGGRTLEEGQKKIQGLNEYINLYNQKKDKKDKIPKDKIPKLKQLYKQILSDRERISFLPEVF |
| | | | | | EDGFNETASQKVLNAIEEYYKANLLAFQQDGKGETENVLEKIKSLVAQLKSYDLNKIYIRNDRGL |
| | | | | | TNISKALFDDWNMIKSALEFSILQTRKKASTKKLKKSHFSIAEIEKALFMYRNEHEALKNLKEKD |
| | | | | | HPVADYFQTYFKAAKKDGSDKEFELIANIEAKYSCIKGILNTEYPKDKRLHQDEETIDNIKAFLDS |
| | | | | | LKEFLHFVKPLSLPSDTPLEKDEMFYTHFQVYYDQLQLLIPLYNKVRNYATQKAYSTEKFKLNF |
| | | | | | QNSTLLDGWDVNKEPDNTSVLLRLNGLYYLGIMDKGNNNIFRNIPQASPGELVYQKMVYKLLP |
| | | | | | GANKMLPKVFFSKSRIHEFAPSEELQKKYQAGTHKKGEKFNLEDCHNLIDFFKESIAKHEDWKK |
| | | | | | FRFQFSDTSSYEDLSGFYREVEQQGYKITFQDVPKSYINQLVDEGKLFLFKIWNKDFSEYSKGKP |
| | | | | | NLHTMYWKALFDTENLKNVVYKLNGRAEIFYRKKSVPTDKKVVHKANEPIENKNPNNAKKQSV |
| | | | | | FEYDIVKDRRFTVDRFQFHVPITLNFKAIGNEYINSDVLEYLKNNTDVNIIGIDRGERHLIYVSLIN |
| | | | | | KKGEILEQFSLNDIITSYKNENNKDVEVKTPYRTLLDKREDERARARENWGTIETIKELKEGYIS |
| | | | | | QVIHKIVELMVKHNAIVVMEDLNSGFKRGRSKVEKQVYQKFEKKLINKLNYLVFKDKANNKSG |
| | | | | | GLYHALQLTNKFVSFQKLGKQSGFLFYVPAWNTSKIDPTTGFVNLENTRYENLEKAKWFFRNFD |
| | | | | | DIRYNTTKGYFEFEVKKYSKFNAKADGTRQAWIICTHGDRIKTFKNPEKNNQWDNKEIILSDEL |
| | | | | | KKLFDTHGIDYKNNLRDQIISQTEKKFFERLFELFKLTVQMRNSISKSTESGDDYLISPVKNKNNE |
| | | | | | FYDSRKAGDGLPVDADANGAFHIAKKGLWALQQIRSHEGEWKKLKLAISNKEWLQFVQVGAE |
| | | | | | WNRT |
| MG29 | 6504 | MG29-181 effector | Protein | Unknown | IDEYHKDFIEKALSGIRLTKLDDFYSQYILSKEQRDDNFFDKIKEELRKEIVAAFSKGELKIQFAN |
| effector | | | | | MFKKELIKEDLLNWIGDEKRNSVKEFENFTTYFTGFHENRKNMYSAEEKSTAIAYRIIHENLPKF |
| | | | | | IDNIRIYDTIKFKHKNLDFSPILNELKDIIQGKSLDEIFTLDYFNNLISQNGIDFLNSIIGGRSGKSSE |
| | | | | | KKIKGLNEYINQYNQKQNDKKDRIPKFKQLYKQILSDRSSISWMPQAFEKDTEVFDAINDFYHVE |
| | | | | | LGNAEIDGRSVNILNAVKTIVKSLSDYEELDKIYLRNDLSITTISQTIFSDYGVLGRALNHYYETFV |
| | | | | | SPQWLVDYAKAKETKRKKLEAEKEKFIKSTYISIAVLQTALAEYVKTLDDDSSIKQKYSATLIAD |
| | | | | | YFTKYFYAKDENGNEAKNTLTDQITIEYGDFKNVLDNKRSVDYKLIQDKKHVHQIKIFLDSIMNL |
| | | | | | LHFVKPLYVDKSASEEKNELFYGEFTPVYEELAKIVPLYNKTRNYLTQKPYSIEKFKLNFENSTLL |
| | | | | | DGWDANKERDNTAVILIKDDRYYLGIMDKRHNTIFEKIPETNNRNAVFKKINYKLLPGPNKMLP |
| | | | | | KVFFSEKRMPEFGVPEEIYEKYNAGTHKKGDNFNLSDCHQLIDFFKASIQKHEDWKQFDFNFSE |
| | | | | | TKMYEDISGFYREVEHQGYKITFSDVSEEYINQLVNEGKLYLFK |
| MG29 | 6505 | MG29-182 effector | Protein | Unknown | MKTLFENFTNQYSVSKTLRFELIAQGKTQEHIEKQNFLNDDEELAEKYKKAKKIIDEYHKNFISD |
| effector | | | | | KLFSFAFTPEDLRAYEHAYQAMKKDKKNIKLMNDFASRQDDLRKRIAKELQEDNYLYAKEGEK |
| | | | | | KKFIKQNLIKWLENNSISISGIPDPKTIINDFENWTNYFSGENDNRKNIYSEKRIGTSIGYRLVHDN |
| | | | | | LPKFLENIKRYNKAKTAGVNFSNVEKTYGVKLDEVFSLEHFNKCLTQKGIDEYNLIRGGQSKKG |
| | | | | | NNKEQGINETINLHVQQLHRRLERATDDDKKELADKIKYIKSCLLEELYKQILSDRSQLSFRLDSI |
| | | | | | KNDGDLCRQIEHIFHMDNAGNLWGKKENVDRDTGEKTESDFNISEAIKKVLQAFKEADPERLYI |
| | | | | | RNKSSNAITEISQYLFGNWSLITRSLDYYVKKIIFPNPEKKKETAKQKVDREKKCEGWLKDTTYF |
| | | | | | SFAEIHTALELFFQQYSDEELLDEKKENNDEEQGITKAMKEIALSKPLFSYFKELKISKKNEETNK |
| | | | | | FEKKELLKQIKESYPATQKVFEQYRDVEAELLKNKKDGEVQVVKNYLNALMDLHHYLKPLYV |
| | | | | | MLSPKDEKNQEEIFEKDNGFYDDFDPLFNVLKLIVPLYNQARNYLTKKPFSVEKYKLNFGHHNL |
| | | | | | LGGFVDSYTNSDNATQYGAYLFRKKHQRYDAYEYFLGISTDAKLFRCHLQNDISENDKSKYERL |
| | | | | | EYYQPKSTTFFSDEYSSKNKKKIMDCLLKKVEAKIEKTLKGNSDFDEFLEKLREADTPGKQIEIIK |
| | | | | | KQKEFINILDEKEVEEIFNEAIAEMKNFIIKYVERNPQLIKLQETRYSGHEGFTAIIKDLQKIAKEN |
| | | | | | KVFNYFHVSENEFNEACNRETKPLLFFKITNKDLNYYEKAAQGLRKQEIGTKNLHTLYFEQLLS |
| | | | | | GKQQVIDIGKGEVFYRRKTPFYKPIIHEENKSILCRTYKEDGKLKTLTDDIYKELSLFYKGNIPEE |
| | | | | | KLSEASRKLKDLVKVNKFKYKIMKDKRYTEDKYLFHLSINLNFDQPPKLEKFNDSVNDSLKRND |
| | | | | | NVKILGIDRGERHLVYYTLIDDKGNIVKDDNGNYLQGSLNNPTGKKDYHDLLDKREDERDKAR |
| | | | | | KAWNTIDRIKDIKEGYLSQIVHNIASLMIKYNAIIALEDLNFGFKKGRMKVEKQVYQKLEEKLID |
| | | | | | KLNYLVFKNECPEKPGGLLNAFQLTAPFKSFKAMGKQTGFIFYVPAYHTSKICPATGFADLLYP |
| | | | | | RYKTVDKSKKYFAKFEAIRFNRQENYFEFEIKNYNAFNPKAEDTKQDWTICTYGLRLDTYRNPK |
| | | | | | KNNNWDTQEVDLTKELQNLMQSQGIQFIDGKCIKEEICRQNDSQFFKRLMKLLRLTLQIRNSRV |
| | | | | | NSDEDWIISPVRVQGEIFDSREADESMSQNADANGAYHIALKGLWCLRQIREAKDLKKVNLAISN |
| | | | | | KEWLQFVQDRPFAK |
| MG29 | 6506 | MG29-183 effector | Protein | Unknown | MPEVFQTDKEVLEAINNFYCVGLENFEIDGKSINLLDTVETMIKSLSSYKDLAKIYLRNDTAITSIS |
| effector | | | | | QTLFADYSVLGQALNYYHETFINPKYKTDYAKASETKRKKLDKEKDNFTKSAYLSIVTLQTALA |
| | | | | | EYIKTLDDDSDIKQKYSSTLIADYFINHFYAKDENDNKTKKTLTRQIANEYSILKDFLNTEQSEDY |
| | | | | | KLIQDKEHIHQLKTFLDSIMNLLHFIKPLYVDKNASEEKNELFYAEFTPVYEELAKIVPLYNMVR |
| | | | | | NYLTKKPYSTEKFKLNFENSTLLNGWDVNKEKDNTAVILLKNNSYYLAVMNKQYNTVFEKIPKI |
| | | | | | ENTQTIFRKMNYKLLPGANKMLPKVFFSKSRMEEFGVSEKMLKNYKAETHTKGNNENLSDCHQ |
| | | | | | LIDFFKASIQKHDDWKQFDFNFSDTKTYEDISGFYREIEQQGYKITFSDVSEAYINQLVDDGKLYL |
| | | | | | FQIYNKDFSEYSKGKASLHTLYWKALFAPENLADVVYKLNGQAEIFFRKKSINAEKTIVHKAKEE |
| | | | | | LENKNPLASKKNSTFDYNITKNRRYTVDKFQFHVPITMNFKATGNDYINPQVNEFLRNNPNVKII |
| | | | | | GLDRGERHLIYLTLIDQQGNIIQQESLNTIKDEQHKIETPYHKLLEKKEDERDKARKSWNIIENIK |
| | | | | | ELKDGYISQVVHKIAKMMIEQNAIVVLEDLNFGFKQGRFKVEKQVYQKLEKMLIDKLNYLVIKD |
| | | | | | NKVNEAGGIYNALQLTSKFNSFKDMGKQTGFLFYVPAWNTSKIDPTTGFVDFLKPKYESIEQAK |
| | | | | | TFFDKFKNICFNSTKDYFEFSFDYKDFTTKADGTRTEWTVCTHDERIEIFRNPNKLNQWDTRNIV |
| | | | | | LSKEFTEFFDKYHINYRKGENLKEQILKQNEKVFFEKLIHLLRLTLQMRNSKIKSEVDYLISPVVD |
| | | | | | KSGNFYDSRKVAKNLPQDADANGAYHIALKGLWILQKGL |
| MG29 | 6507 | MG29-184 effector | Protein | Unknown | MSAQSALSTLINKYSLSKTLRFELIPIGKTKESIDRKGLLSQDVKRAQSYKEVKKIIDEYHKEFIEK |
| effector | | | | | SLINAKLKGLEEFSKLYYKLQKEDKDKKNIKKMQDNLREQISDLFKNNKKDKWNILFKEDLIKK |
| | | | | | ELPLFAKDDKQKNLINEFNKFTTYFTGFHKNRKNMYAEEEKSTSIPYRIIHQNLPKFLDNIRIFEKI |
| | | | | | KKNKINTDVIEKELSLFLNGIKINDIFSINFFNDVLNQKGITFYNTILGGVSEKDRTKIKGINEYVNT |
| | | | | | EYNQKQLDKRSKIPKLKQLYKQILSDTETASFVLEQFENDNQLLEKIEQFYNTELINYETEGKTQ |
| | | | | | SVFLQFEQLFKNMQNYDASKIYISNLSIANISKIIFGDWSIICNALAEWYDKHNTKGKKINEYKKE |
| | | | | | NFLKQDFSIQQIEDAVLEYKNDTLNKEINFLLNYFASFLNEKSKKNIIQRIETEYSKVKDLLNTDYP |
| | | | | | EKKKLASDKDNVSKIKAFLDSLMDFLHFVKPFNIKKDTGLEKEENFYSIYVPLFEQIDKIIPLYNK |
| | | | | | VRNYLTKKPYSTEKIKLNFENSTLLDGWDLNKESDNTSVVLRKDDLYYLGIMDKKHNRIFKELP |
| | | | | | SQNGNESSYEKMIYKLLPGPNKMLPKVFFSKKGKKQFKPSKKLLKKYEDGTHLKGDNFNINDC |
| | | | | | HNLIDFFKESIAEHEDWKQFDFKFSSTSSYKDLSNFYKEVEKQGYKITFQNISENYINQLIDEGKL |
| | | | | | YLFQIYNKDFSKYNKGTPNLHTLYWKMLFDNDNLKNIVYKLNGKAEVFYRKSSLILGDNIVHK |
| MG29 | 6508 | MG29-185 effector | Protein | Unknown | MEALHMNNFYSEFVNKYSLSKTLRFELIPQGKTLENIKTKGFLEEDEERAKRYEKVKKIIDEYHK |
| effector | | | | | DFIEEVLSAVNLSQEELKELAKAYEGAKNKDENSKKALVDLQNKARKKIAEFFTKQEKFKTLFA |
| | | | | | KELIKNDLDSWLDEKYAEKEASEKKEVLKDFKTFTTYFTGFHENRKNIYKDKEQSTSIAYRIIHD |
| | | | | | NFPKYLDNAKKIEILLKEFPDINLKQIERELNDILQDKNLKDFFALENFSAFLSQSGINKYNSIIGG |
| | | | | | KTLEDGTKLQGINEAVNLYRQSKDHLLKTVAETEAQNLKSEIKKLRSLKLVSLYKQILSDQDSLS |
| | | | | | FLPEKFEDDKTIIDAINNFYEENIINIKIEESKEPQNLFNELQIILDHLKDADLDKIYIKNDKAITDIS |
| | | | | | QYLFADFDLIKKALEYYVKNELIKAKKQDLSTKKEEESWDKWVNKTSYFSISTLNKALIYYKEN |
| | | | | | LEDGNEDKKKFSDFKTISQYFLNTIKEKINACIENHKKTVSVLNAEYGSNSHDLITDKKIGGRVEF |
| | | | | | IKNFLDSLQTLLHFLKPLYIAPIKNEDKKAADILEKDSSFYTDFDIYYEKLNDLVPLYNKVRNYLT |
| | | | | | RKPYSLEKYKLNFKNSLLADGWDQNMESAKTSILFIKNGIYYLGIMDKNHNKSFQNIPSCSDINK |
| | | | | | PYQKIVYKLLPGANKMLPKVFFSDKNIKDYQPSEELLNNYNNGTIIKKGEYFNKAIICIIALINFFK |
| | | | | | ESIKNHPDWKHFDFKFSDTDTYSDISQFYREVESQGYKISFENVAETYINTLVDEGKLYLFQIYNK |
| | | | | | DFSKYSKGKPNLHTLYWKALFDEHNLEDVVFQLNGGAELFYRKLSIKTENRTIHKANKILENKN |
| | | | | | NLNNKKTSSFPYPLIKDKRFTEDKFSFHVPIKINFKSVNTGRENDQINKYLKSNPNIRILGIDRGER |
| | | | | | HLAYYTLIDQKGNIKKQASFNIITDYYQSKEYKKDYQVKLTEAEIARDKARKSWGSIENIKNLKE |
| | | | | | GYLSQVVHQICTIVIENNAIVI |
| MG29 | 6509 | MG29-186 effector | Protein | Unknown | MAENSIWAEMTNQYSLSKTLRFELKPSDKTEEFIEKNGLINEDEQRNKDFLYSKELLNEYYSHFI |
| effector | | | | | EKRLGEIQIDVGVLKDYFETYKEFNKLKQKGKEVDSKELKKAEARLLASQNHLRKALHRVFFM |
| | | | | | NKNISDKRDEKDIIAAVKYHADNGVVNEKVDRLNRFLIDKCTTYFTGFFNNRDNVFTSEEIPTSVF |
| | | | | | YRTINENLPFFVKNIQKYEKLKDIIPEKELITRENDLKKELGEFSVKEVFSIKYFNSCLNQKGIDKY |
| | | | | | NQILGGVKKENIQIKGLNELINELSQNKDKSIRKLKMTPLYKQILSKSESKSFKIDTIKNGKELNY |
| | | | | | KINEFYELVSTSNKDQKEALISLLEKLFKNERELDFDGIYVNSKGLRELSNKVFGDWYVIESALK |
| | | | | | QQYKSKILSTGKKEKDDSKKDKETSEWFKKTKQFSINDINSSLEAAQNDLITNKNKNIWAYFKRL |
| | | | | | ENQKELNLITEINESFKDLESVQFGEDKELLNDSNEENVKKIKKALDSVQELLWFISPLMYDKPK |
| | | | | | EEVFDLNLDPEFYGQFNIIYEGVRQIVPLYNKTRNFIAQKPFNESKFKLNFENSTLLDGWDKNKE |
| | | | | | PDNWSILFRKDNNYYLGIIASGKGNNRIFEKIPEYKQGDCYEKMNYKLLPDPSKMLPKVFFADK |
| | | | | | NIEYYSPPKEILSIRNHSSFTKGGTPQEGFEKKEFNLKDCHKMIEFYKECISKHPEWNEFGFKFKK |
| | | | | | TSEYSDTSEFYKEVSDQGYKLTFQKVSTNYLDEMVNTGKLYLFNIWNKDFSKFSKGKPNLHTLY |
| | | | | | WKEIFSENNLKDVVYKLNGQAEIFYRKKSLSGKVTHLKNIPIKNKDSINGKETSVFKYDLIKDKR |
| | | | | | YYQNKYLFHCPITLNFKAKGSSFINNKINEFIIKNCNKINILGIDRGERNLLYCSLLNSNGKIILQKS |
| | | | | | FNVMQDKFGRNVDYYNKLDAKEKERDKSRKEWKNIENIKELKEGYLSQIIHELAKIIIEHNAIVV |
| | | | | | LEDLNFGFKRGRFKFEKQVYQKFELKLIEKLNYLVFKDKNSTLAGGLLHAYQLTNEFDSFKKLG |
| | | | | | KQSGVLYYVGANYTSKIDPKTGFANLLHPSYENVEQSKEFFGKFDSIKFNKTEGLFEFDFDYSNF |
| | | | | | NKDSKLKKNQWKVFTNGERIINERTKNNTYESKKINLTDELKKLFEEEKIPFTETNNLKGHIISSN |
| | | | | | SKNLHKGLTNLLKYTLQLRNSNNKTNEDYILSCVKYDEKNFFDSRNAKESEPKDADANGAYNIG |
| | | | | | LKGLMLIEKMKEQSKKQRGEKQKYDLKISNEDYFNWVTNRNQS |
| MG29 | 6510 | MG29-187 effector | Protein | Unknown | TKDLLDALLDLHRLFKGLKIDDAEKDLVFYSYFDTYVDALSAIQPLYNKVRNFKTKKPYSQEKF |
| effector | | | | | KFTIGKSNLLNGFVESKTDKSYNGTQYGGYLFRKKRNDGRYNYYLGISSKANLFSFYGEELSPED |
| | | | | | VCEFERLHYYQVKTNSIYGSSYDGDFSQDKETLPEYEVIEKLQNVLKIKYQHVKSLKEIANRSYPS |
| | | | | | LKSLQDDIEIAVEEKSFIYKPVSQSEMEQVLSEGSMLFFWIYNKDFSEKKKNKNSRDNLHTMYFK |
| | | | | | ALMRENSNNDVFDLGKGEIFFRRKSINYDDYIWENGHHHKDLKDNFEYPLIKDRRYAVDKFLLH |
| | | | | | LSIFINYKKPNNMNINSKVNDFISKQSDKIKIIGIDRGERHLLYLSLIDAKGKIIEQYSLNQIVNSYN |
| | | | | | GKEFHLDYHGKLTEKEKKRDEERKSWKSIENIKELKEGYLSQVIHKIATLILEHQAIVVLEDLNF |
| | | | | | GFKRGRFKVEKQVYQKFEKMLIDKLNCLVDKKREWSEPAGVLNALQLTNKFTSFEKLGKQSGI |
| | | | | | LFYVPAWNTSKMDPVTGFVNLFNTKYQSVEKSREFFSKFRSIRYNEEKGYYEFEFDYNDFHDRA |
| | | | | | QGTKSHWTVCSYGKRIVNFRNKEKNNQWDWKEVDPTQELKELFGSAKGDLKEFIESHDKKDFF |
| | | | | | EKFLKIFSRILQMRNSATGTDIDYMLSPVANEKGNFFDSRKSDGSLPLDADANGAYNIARKGLML |
| | | | | | VEKIKNADDKSKVKLTVTN |
| MG29 | 6511 | MG29-188 effector | Protein | Unknown | MNQLLKRFTNQYQLSKTLRFELIPQGKTLDFIKEKGLLSQDEQRAQSYKEMKGTIDEFHKYFID |
| effector | | | | | LALSKVKLSFLSDYDCLYNQSVESKKDPKFKDELKKVQDALRKEIVKSFSEGDAKGIFAILDKKE |
| | | | | | LITVELEQWFANQDKKEIYFDDKFKTFTTYFTGFHQNRKNMYSTEANSTAIAYRLIHENLPKFLE |
| | | | | | NAKSFAKINQVLELHPQISNVYKEFEKYLNVKSIDEMFELDYFNEVLSQKGITVYNNIIGGRTAEE |
| | | | | | GKSKVQGLNEIVNLYNQNKDKKDRLPKLKQLYKQILSDRISLSFLPDAFKDGKQVLQAVFDFYK |
| | | | | | VNLLSYTIEGQDTSQNLLQLIKQLLQNLSSFDIDKIYLKNDNNLTAISQQLFGDFSVFTSALNYRYE |
| | | | | | TLINPKFELEYLKANEKKRESLDKAKAIYTKQDYFSIAFLQEVVSDYMNSLDDNSDLSKKFTPNCI |
| | | | | | ADYFTNYFIAKNEEDSDKTFDLLANISAKYQCIQGILENASEYEDELKQDQILIDNLKFFLDSIMEL |
| | | | | | VHFIKPLQLKSESITEKDTAFYDVFDNYYETLNLLIPLYNMVRNYVTQKPYSTEKIKLNFENKNNF |
| | | | | | LGGWVDSKTENSDNATQGGGYLFRKKNKIGEYDFFLGISNDVKLFRSHLKSEITENDLSEFERM |
| | | | | | DYYQLKSASVFGNSYVGNYEDDKNNLFEVIYNFAKEKNKNILNEFDIYINKQNGDIKPTPSGLFKI |
| | | | | | VNEKFSFFVNELLNFEDFNNANNLIINNLKQTILSLHRVPKSQTYKDINFKIFTEPIKVIEDLTNEKS |
| | | | | | FSYFPISKIEFEDVTNRSNNPLFLFKISNKDLSFSDSLDNGLRKLQKRGKDNLHTLYFKALMQGNQ |
| | | | | | NIYDIGTAEIFYRKASISPKNIITHKVNRPINAKNPLTPEAKNTYEYDLIKDKRFTEDKFQFHLSIIQ |
| | | | | | NYKEPKKPNKDINQTVLEYLKNNPEVKIIGLDRGERHLVYLTLIDQKGNILKQESLNVIKVDKHE |
| | | | | | THYHTLLHNKELERDKARKNWGTIENIKDLKEGYISQVVHKIATMMVVENAIVVMEDLNFGFK |
| | | | | | RGRFKVEKQIYQKLEKMLIDKLNYLVLKNKQAQELGGLYSALQLTNKFESFQKMGKQSGFIFY |
| | | | | | VPAWNTSKIDPTTGFVNYFFTKYENVEKAKSFFEKFDSIRFNGTYFEFEVKNYSNFNPKAEGTQQ |
| | | | | | NWTICTHGERIITFRNTEKNSNWDSKTVLLTELFEDFMGKHQIIYGNGECIKTQLDSKNDKLFFE |
| | | | | | ELLNLFKLTLQMRNSVTGTDEDYLISPVKNAQGIFYDSRKADDNLPKDADANGAYHIAKKGLWI |
| | | | | | LEQVNKTQSAEELKKLNLAISNKEWLQYTQQ |
| MG29 | 6512 | MG29-189 effector | Protein | Unknown | VKNASLSDISSRVFKSHGLIKAALTHHAESVYVPTAPSAKVTSKLQKQRDDYLAQDVYSLAELDQ |
| effector | | | | | VVSSYLSGLEEEASWDGVDKQKPISMYFVSAIKKAIEEKDESGTTFNMHLEAAKPLFALDALSKQ |
| | | | | | RNMPKNESDFGGEGHQQIQKIHALLDAMMVILHVAKPLHLVNNKKPIEIFDIDSEFYGEFIEVYE |
| | | | | | KYSYELVDLYNQTRNYLTKKSFSTDKIKINFDAPTFMDGWDLNKEIDNKAFILKDGGNYYLAVV |
| | | | | | CKDGRDISFDFDEKFDGDFFEKLNYKLLSGANKMLPKLFFSKKGVDKFKPSTEIIEIYKSGSFKKS |
| | | | | | EASFDIRKCHKLIDFFKENLPSYKVNDSDKYGYEVFDFKFSKTSDYKDISEFYKEVERFGYKTWF |
| | | | | | SKVPKSYLDDCVRTGKIAMFQIYNKDFSEHSSGSPNLHTMYWRGIFCQENMDNPTIKLNGEAEM |
| | | | | | FYRKHSIQKNERTIHRSGENIANKNSNNHKKESLFEYDLIKDRRYTKDKFFFHVPVTLNFGASSPG |
| | | | | | WFNDKINKAIKPEKDIHIIGIDRGERHLLYYTVINQKGEIIKQGSLNEIETDQGYSVDYQLKLKAK |
| | | | | | EDQRDAARKSWSTVENIKELKEGYLSQVVHKLSKLIVEHNAIVCLEDLNFGFKRGRFAVERQVY |
| | | | | | QKFERALIQKLNYLVLKDRKHGEPGHYANAYQLTAPFESFEKLGKQTGILFYVPAAYTSKIDPM |
| | | | | | TGFVNLLDTRYESQEKSKDFFGRENSILYNKAKDYFEFCFDYKKFPARVDFTGCRTAWTACTYG |
| | | | | | DVRYANQKNNHGKWETKSVNVTEELKKLFDSASIKWDVGCNIKDDICKADDKNFYSTLSWLLK |
| | | | | | LTLSLRYSKTGTDDDFVLSPIAGADGNFF |
| MG29 | 6513 | MG29-190 effector | Protein | Unknown | IENNLQCSFEKIMTINSFVDFMSQEGIDKYNTFIGGSPALDGGEKVQGINEFINLTRQQSGAKRAQ |
| effector | | | | | FPPLQEFYKQILSKSDISFISDFTNDKDMFEAIKIFIIELYFNEKDESGISFFNRVIKDSRELEKELSF |
| | | | | | EKENLYLPKDKVTFVSKKITGHWNNINNELLEQLGEKEFNSRKYFSFSEIEKAVNDGGQAERFV |
| | | | | | VASNSSSLITLFNEELVKNLRDSNQAWVELIETGVLDCGKLDSNRSRESDKGFIQIAAIKRFLDSVL |
| | | | | | GLSGFVRDWQASKDILKIETRNKHWYDHINDFISQFQVIDLYNMVRNHATKKPASKEKLKINFE |
| | | | | | NSTLLAGWDRNKESDNYCALFQKKGLYYLGVMTPTSNKIFDYDKKEDLRNAVLAKKGEECYR |
| | | | | | KINYKLLPGPNKMLPKVFFAKSNKELFNPSDEIIKIKENKLYSKSATAVNGLDDLYKYIDFCKKSL |
| | | | | | VKHPDWSKSFGFKENSFTETYEYVSVDQFYNEVETKGYSITFDNIKEDYINKRVESGELYLFQIYS |
| | | | | | KDFSQAKKKKGTDNIHTIYWKGLFATENLEKPILKLNGQAEIFFRKASIKYDPDVMQKGHHHEK |
| | | | | | LRGRFDYPIIKNKRFTMNKFFFHCPITLNFGSPSSPYRFNDMIRSFVRNNSDVNIIGIDRGEKHLLY |
| | | | | | YSVVNQKGKIVEQGSLNKISNGFKPKGEDKERLIDYHSKLDKMESDRDKARKSWSTIENIKELK |
| | | | | | AGYLSQVVHKLSELIVKHNAIVVL |
| MG29 | 6514 | MG29-191 effector | Protein | Unknown | TSEYNGLKGFLNTEQTEDYKLIQDKERVHQLKTFLDSIMNLLHFVKPLYVDKNANEEKNELFYA |
| effector | | | | | EFTPVYEELAKIIPLYNKVRNYLTQKPYKIEKFKLNFENSTLLAGWDVNKERDNTAVILIKDNYY |
| | | | | | YLGIMDKQNNTVFEKIPAIKNTNTVFKKVNYKLLPGANKMLPKVFFSESRIAEFGVSEKMYENY |
| | | | | | KIGTHKKGDNFNLSECHQLIDFFKSSIQKHEDWKHFDFKFSPTKNYEDISGFYREVEQQGYKITF |
| | | | | | SDISEEYVNQLVDEGKLYLFQIYNKDFSPYSKGKPNLHTLYWKALFDPKNLADVIYKLNGEAEM |
| | | | | | FFRKKSINPQKSVVHKAKKNLQNKNPLATKKTSIFDYDIVKDRRYTVDKFQFHVPITMNFKATG |
| | | | | | NDYINPKVNAFLRNNPDVNIIGLDRGERHLIYLTLINQQGHILQQESLNTIKDEQHHIETPYHKLL |
| | | | | | DGKEIERDKARKSWDTIEPIKELKEGYISQVVHKIAAMMIKHNAIVVLEDLNFGFKRGRFKVEK |
| | | | | | QVYQKLEKMLIDKLNYLVIKDNKATEAGGLYKAFQLTNKFSSFKNIGKQTGFLFYVPAWNTSKI |
| | | | | | DPTTGFVDFLRPKYESIEQAKTFLSKFKNICFNSTENYFEFSFDYKDFTSKADDTQTEWTICTHGN |
| | | | | | RIEKFRNPINKWDAKTITLNDKFEELFNNYHIDYKKEGSFKETILKQTEKTFFKQLIDLLRLTLQ |
| | | | | | MRNSKTEKDETGKDIDYLISPVTNKSGNFYDSSKASKNLPQDADANGAYNIARKGLLILQQIKET |
| | | | | | KTDGDLKKLKLAISNKEWLQFAQNQILQIDS |
| MG29 | 6515 | MG29-192 effector | Protein | Unknown | MSIFKDFTKQFSLSKTLRFELKPVGKTEEWIKKHGVISVEEDKLEGKDAKRAEHYKYVKILLDN |
| effector | | | | | MHRLFIEEAFERVENDFLIQHLKSISQENDYSFTDDRTLKKIFQEILDKTAADWMKEYSIEMPEI |
| | | | | | WQKELAGLNEKINTESDKKRKKGFESAAKALKNKIENPLKDFKKTDSSILYSNVESIQLLEWKII |
| | | | | | KGEVTATKNEFNPENNDNSQIPADKLCEYTRSFRQFYTYFTGFNENRQNVYDISGKKSTSILNRIF |
| | | | | | NDNFFFHLDNITKWEKVKENLKNENISLVLKEMSYDWKKELSEIEKNLNCSFDEALSVESFVKF |
| | | | | | MNQSGIERYNILIGGNPALDGSRKIQGLNEFINITRQKAGAKRAQFPPMQELYKQILSKSDKTFIP |
| | | | | | EFSDDKDMFVSIKSFNENSFSGSSFIDEFIKINSELQNELQNERSNLYLSKEKITSISNKITGNWNNL |
| | | | | | NYELLEQLGENIFNSRKWFSFEEIEKAVTDGKIGERFILSNTYSNSLLSFFDNEFKTLAAKAQTFW |
| | | | | | TELEKTGLLNEEKIDSNRSNEGDKGFEQIATIKKFLDSLIELSGFVRDWQTSKEILNIETRNKDWY |
| | | | | | EHLDNFVNQFRIIPLYNMVRNHLTKKPVSKEKMKINFENSTLLAGWDKNKESDNYCILLEKDGL |
| | | | | | YFLGVMTPESNRIFDYEKNERTRKIVLAENSERCYRKINYKQIASVSKDIFTLCWDENSQSAIRKT |
| | | | | | KGREEVWGERITKIKDEKLYNESLEDKEYYFSYLIKCAKSYWKYFNLSLKKPSEYKNLSELFAEI |
| | | | | | ERQGYSITFDNIKEKYIHEKIENGELYFFQIYSKDFSQNKKQKGTDNIHTVYWKGLFSPENLKNP |
| | | | | | VLKLNGQAEIFFRKASLKYDPEKMEKGHHHEKLKGKFSYPVIKDKRFTQNKFFFHCPVTLNFGA |
| | | | | | PSSPYKFNDSVRSFLKNNPDINIIGIDRGEKHLLYYSVVNQRGKIIEQGSINSIDNGFVPKGEAEVR |
| | | | | | KIDYHSKLDKIESNRDKARKSWSTIENIKELKAGYLSQVVHKLSELIIEHNAVVVLEDLNYGFKR |
| | | | | | GRFGVEKQIYQKFEKALIDKLNHLVFKKESSEKPGGYLNAYQLTNKFESFQKMGKQSGILFYTT |
| | | | | | ASYTSTTDPVTGFLKNLYPSYQNVEKSIEFWKSFDSVKYNSAKDRFEFTYTIGKVPTKNMYKEKD |
| | | | | | EDKVDKKQWTVCSCVTRSRYVKALENQTDEQKQNTSSEQIGNKGRHETFFVTDEIKKVLDGSGI |
| | | | | | DYKSSSDLKAKFLEQDTKKFHSSMIYLFNAIMTMRVTDSGKEKGTKENDFIQSPVEPFFDSRYAK |
| | | | | | EDQPENGDANGAYNIARKGLCILQNINKADDVSKADIAISKQQWQNFVQKH |
| MG29 | 6516 | MG29-193 effector | Protein | Unknown | MESLTNLYPVSKTLRFSLIPQNETLHNIEKAGILTEDEKLAEDFKKVKKIADDWLKNFINESLTGA |
| effector | | | | | SLNLEDLLIFEEKYNLFPRNEKDEEEFINIKTKLRKEIVSYLTKNPKFKLLGTADLIRKELPEFVKT |
| | | | | | EEEKDIINKFKNFTTYFTNYNQTRKNIYSDEEKHASYAYRIIHENLPLFIINKKNFNTIKTSYPELIN |
| | | | | | DIKKTTEPLLDNTKIEDMFSIEWFSNTLTQPGIDLYNKMIGGESLENGKKIQGFNEKVNLFRQAN |
| | | | | | KLDGKSVPMIKQLRKQILGDKNTPEWITEGFKDKNSMNEAIVKFIKNTEHAKNNLINKLFIKNKP |
| | | | | | YDYNKIFIKNRFIANISHELFKDWNLLKNNMLEQYKSKNPKSKNPEKEFAKIPYFSIAEIQKSIPNQ |
| | | | | | NKHFPDFIIDHFHDKIMTLIPTEKKIHELWKDNKDSIPALKNLMDYYLELYRISKPFDVDCADKD |
| | | | | | PVFYELFDEIFNDFSKVVKLYNEVRNFITKKPYSLEKIKLNFGNSTLLSGWDVNKETDNTAVLLQ |
| | | | | | KNGNYYLAIMNKDHNKIFKNTPVTKNEKNSYKKMEYKLLPKSYMMLPKVFFTKGNKDKYEPSE |
| | | | | | EIIRIYEEKTFKTGNNFNINDLHKLIDFYKESIKKNPEWSCYNFNFKPTKEYQKINEFYEETDTQG |
| | | | | | YNITFKNIPAEYIDNLVKKGQLYLFKIYSKDFSSYSKGTPNLHTLYFKMLFDDRNLKNTVYKLNG |
| | | | | | GAEIFYRKKSVTYPKNIMEKGHHAEDLKGKFNYPIIKDRRFTFDKFQFNISITLNPNAQGHGNIND |
| | | | | | ICRNLIKSNNTNIIGIHRAENHLIYITVLNSSGDIIEQRSLNEIKSYGDKTVNYMEKLTERGKERND |
| | | | | | ARINWETIGNIKELKEGYLSNVISEIANMMIKYDAICVMEDLNYDFIRERSAIEKQIYQKFEKMLI |
| | | | | | DKLNFYVDKKKSPEETSGILKPLQLANKFTTFEKIGKESGMIFYVSPYKITDIDPVTGFVNLFDTR |
| | | | | | YFNIEKAIQFFDKFDDIYYNAKTDLFGFNFDYDNFINKEKIQNTKTKWTVYSYGERIERFNTNNIP |
| | | | | | KFKKIDLTKEFKNLFSEYSINYNSNLKKSIISLKDKNFFMKLLSLFRLTVQMRNGDFIISPVNDNLG |
| | | | | | NFFDSRNSDNKTLPENTAANGAYNIARKGLILLNRIKQTSDIRKTNLKISGDEWLQYTQNKNSYI |
| MG29 | 6517 | MG29-194 effector | Protein | Unknown | MKNFTNIYPQSKTLKFELRPYGATLDNIHKSGLIDQDETLKADYHAVKKMIDEYHKVVIDESLTN |
| effector | | | | | FKLTDLPAYEELYYKSRTEVEDKEFEIIQSNLRKQIHKAFSENKRFKSIFKKELIQKDLPAFVKKE |
| | | | | | EEREQISRFYHFTTYFTGFHENRKNIYTAEAKATSVCNRLIHENLPKFLDNRKTYLNYISNFIDLD |
| | | | | | LSQVEEDLQEVLGDITVDDLESLDSFNHTLTQRDIDIYNLALCGRSIEGEKKIQGINECINIYRQKN |
| | | | | | RLKARQLPNIKPLYKQILSESKSGSFLLDKFEKDEDLFDSLRNFYHCLNSFNYKGEQDKSTFIELM |
| | | | | | TLFGRFSESDMTRVYLRNDASLSRLSKKLFGDWSLIVSALKYYYDAEANPLMGKKATNKYIKEK |
| | | | | | ENWLNKSSNFSIDVINKSLLRYGTINETVNSQFTDDMIFEHFSSFMIEEKNLLNTVAENYMLVSEV |
| | | | | | LSRGSLDKNQNKKKKEIKTIKTFLDTVLDLLHFIKPLSVQYVGAEKDEGFYSDFDVLYDQLSQVI |
| | | | | | PVYNKTRYYLTKKPYSMEKFKMNFKNNTLLDGWDVNKETANKGILLQKEGLFYLAIMNKDHS |
| | | | | | KSFYNIMDTGDTTGYQKMNYKLLPGPNKMLPKVFFGVKNLNFFNPSDEVLRIRNTSSHSKNGNP |
| | | | | | QEGFEKADFSLSDCHSLIDFFKASLNKHKDWKKFAFDFSPTQSYNDISEFYREVENQGYKITYTNI |
| | | | | | SDAYIHELVKEGKIYFFQIYNKDFSPFSKGKPNLHTLYWRALFDEKNLADVVYKLNGQAEVFYR |
| | | | | | KKSIEYSEEKWIQGHHHEQLKDGFAYPIIKDKRFAFDKFQFHVPITMNFKALGAPVINMKVREY |
| | | | | | LKTNPDVKIIGLDRGERHLLYLTLIDQNGNIEEQYSLNEIVNSYNGKVYKKDYQQLLHVKEGDR |
| | | | | | KKAKKNWETIEAIKELKEGYLSHVVHKIVNMMVEHNAIVVMEDLNFGFKRGRFHIEKQIYQKF |
| | | | | | EKMLIDKLNYLVLKDTQDPKTPTGLLNALQLSNKFESFQKLGKQSGFIFYLPAYLTSKIDPTTGF |
| | | | | | VNQLRIKYDSIVKSQAYYRQFDTIVYNNTSDWFEFSFRYVNFANTTPSARKIPWTICTTHHPRYA |
| | | | | | WNINSNVGNGGTEEYNVTKELKKLFDQHKIAYEEGTDLIESIASNTAVDFFKRLNKLLYITASLR |
| | | | | | HNNGKKGKEEHDFILSPVANSEGGFFNSLEADETQPENADANGAYHIALKGLWALQSIRKTDTD |
| | | | | | RLSKLNLAVSNEEWLNFAQAKQYRSQNSS |
| MG29 | 6518 | MG29-195 effector | Protein | Unknown | MFTNDYFSFTLIQTYIDIYNTMLGGKTLADGTKIQGLNELINLYRQKHNIDKRELPNLKPLYKQI |
| effector | | | | | LSDRDGMSWIPEAFECREDLNLAIQTFYNKNIVAFECCDGVVDITEKFLEVLTQTSSYDREKIFIK |
| | | | | | NDLSLTAISHVLCEDYRVIKDALWQKHLQENPKAIKSKDIAGDEERFFGRKNSYFSISEIAKALDL |
| | | | | | IEKPSDLFGYFKTEVEKQSKQVKSSFKEWELDPNNKKLTKEFLDSTLDLQRTLKPLYVRSDIDKD |
| | | | | | IAFYALFDGYFDSLSAIVKLYDKVRNFESKKPYSTEKFKLNFENKGAFLGGWVDSYTDKSDNGT |
| | | | | | QSGGYLFRKKNAIGEYDYYLGISKDTKLFRSHLQNDIDENDISEYERLDYYQLKTASVFGNSYVD |
| | | | | | GSYSEDKIEIKNSIYNFVKSTDLGKELEDYISSKEAKEATPNGMINYIKEKNPTLFEELLEDEEFSK |
| | | | | | INKTVTKKLKETILSLHRVPKSQEYKEASFNLFTEPIEAIEKLSEEKTFVYFSISSREFENALANKD |
| | | | | | KPLLLFKITNKDLSYAETFLNGKRKSRGLDNLHTLYFKALMSGEQAVFDIGTGEVFYRKKSIEYS |
| | | | | | EEKMQKGHHYDKLKEKFSYPIIKDRRYTIDKFKFHLSIIQNYKQPDKYPMFNDTVNSFVKSHHK |
| | | | | | DIKIIGIDRGERHLLYLSLIDGKGAIVEQFSLNTILNTHSNKPIDYHDKLDKKEKARAQARENWGV |
| | | | | | VENIKELKEGYMSHVIHLIAKLIVEHNAIVVLEDLNFGFKRGRFKVEKQVYQKFEKMLIDKLNFL |
| | | | | | VDKQKSPHEIGGVLNALQLTNKFVSFEKLGKQSGFLYYV |
| MG29 | 6519 | MG29-196 effector | Protein | Unknown | MEEIFTEITNKNAFSLQKTLRFELKPMVLNEEENQLQPISESDSYLKNFNSGYLEKLKQIIKHDEE |
| effector | | | | | RAEDYQEIKVYIDELHKQFIDRVLPEIKSLEIDFKKAFEMYELTKKRYAKSSSDKEEEEQSKEKK |
| | | | | | NNLKAWQDFQKEARKKISNFLKKQPEYENLFEKELFSDLIPKSNYSKQLGEKSPNDLAKSFSGFT |
| | | | | | TYFQGFHENRKNIYADEGSTSLAHRIINENLPKFFTNILQYVILNKDHNLLVGQFKENYSDEELTE |
| | | | | | LFNPNSFVSFLNQSGVDRYNEIIEAKKGIETAKSKDGLKQLANKYKQAKQIKNLPNFTPLYDQIL |
| | | | | | GKRGLDQNDESILRAGVTDDKNLLNSLKDFNKNIQPSVFELINICSELNKANAEEIFIMGSSLESLS |
| | | | | | SSVFGDYSVLSRVMKHHYIESRISASRTTEKKLEKDSEAYLKQETYSLQEIQSAIDYYIEKGNELES |
| | | | | | KSLFDYFTACKYNSNHTLSEEIKIAWDNLQPILELEQIDKDRAIPKTQEEQGGKGFQQVEKIKLF |
| | | | | | LDSYMQLLHFAKPLHLVKKRNPVTISKKDEAFYAIFDKNYTNLEAELIPVYNQTRNYLTKKPYSL |
| | | | | | EKFKINFEKGTLLNGWDLNKEKDNLGVLFLKNNNYYLGIMSNNKIFDFQKQNIKKEALSLSGQQ |
| | | | | | DGYHKVIYKYLAGPNKMLPKVFFAKSNLEKFSASEEILRIRNTSSFTKNGEPQPSYKKAEFNLND |
| | | | | | CHAMIDFYKQSLASHEDWSQFGFQFLETSQYSDISQFYEDVAKGGYKISFVNISDNYINEKVKAA |
| | | | | | DLFLFQIYNKDFSEQKKGKDGKPNLHTMYWNAAFRPWLDRSESNVKLNGEAEIFFREHSIERKI |
| | | | | | THRSGESIDKKNPNNSGKSLFSYDLIKDKRFTSDKFFFHVPITINYKNKKERNNKQFNDVVNSVIK |
| | | | | | NNRDVNIIGIDRGERNLLYYTVIDQDGRILEQNSFNEISSQCSTSEKSSTFDYHKKLDEKEDERKQ |
| | | | | | ARKSWGTIENIKELKSGYLSHVIHKLAKLILKYNAVVCLEDLNAGFKRGRMKIEKQVYQKFELA |
| | | | | | LIHKLNCLVLKDREEGEFGSYTNPYQLSSKITSYQDIFSQTGIVFYVNPAYTSKICPKTGFVNFLDL |
| | | | | | RYENLEKAQSLMGSFNSIRFNNHENYFEFDLDYKKIPQTQNKECGEKTQWTVGTYGNERFSYNP |
| | | | | | KTKGYDTYNVTEKLAHLFKKHNIGYEDGSDLREKILASTQDAVSFFKELLFLLRLTMSLRHVNE |
| | | | | | NHDCILSPIKHPELGFFDSRDVKDSIEAEEPRDADANGAYHIAMKGLQIFAEKISSENPKLSIKKED |
| | | | | | WFRFIQNHHESKWKEKSLSPI |
| MG29 | 6520 | MG29-197 effector | Protein | Unknown | GFTFCLNQKGIDTYNLILGGKSLEDGTKIQGLNEFINLYRQQKNLERKSLPNVKVLFKQILSDRE |
| effector | | | | | KKSFVPEAFRSDQHLLNSILDYSNAGIFNWENDDKKKNIVKEIQKFLSNIKSNELDKIYITNDLSLT |
| | | | | | NISSHLLEDWNFIKRSLSYYYDENIGNKAKKEKSPTKYEEEREKWLKQKYFSIELLNNSISLYSTF |
| | | | | | LGEKKFNLTIESYFSKFTSKDEMKKEFNLLERLESTYQELKPLLENEYKKENLKANKGDVEKIK |
| | | | | | NYLDSIKSLQFFMKPLLPKNIQDEKDNDFYNQLEEYLEVINEITPLYNKVRNYLIGKVYSEEKFK |
| | | | | | LNFENSTLLDGWDENKESANLCVMFRDEDKFYLGIMNKEHNKIFSDIPKLKSGETYYEKMVYKL |
| | | | | | LPGPNKMLPKVFFSKSKIDFFKPSKTILKIKETESFIKGDNFKIQDCHALIDFYKDSISKHEDWSKF |
| | | | | | DFQFSKTSSYEDISGFYREVESQGYKITFNKIAKSYVDTLVAEGKLYLFQIYNKDFSKFSKGKPNL |
| | | | | | HTIYFKSLFDKENLKDVVMKLNGEAEIFYRKKSINYDEKTKKEGHHAKELKGKFNYPILKDKRY |
| | | | | | SEDKFQFHFPITLNFKAKEKFNFNQKVREFLKGNKDVNIIGIDRGERHLLYLVMINQEGKILKQV |
| | | | | | SLNSIQTEKKFPEVNYKDKLTEKEIERDKARKSWGTVENIKELKEGYLSQVVHQISKLMVENNAI |
| | | | | | VVLEDLNMGFKRGRQKVERQVYQKFEKMLIDKLNFLIFKENKSKEAGGVLNAYQLTDKFESFD |
| | | | | | SIGKQTGFLFYFPAWNTSKIDPKTGFVNFLHPVYESLDQAKKFISKI |
| MG29 | 6521 | MG29-198 effector | Protein | Unknown | MNENRKNMYSSEDQSTAISYRLMNENLPRFFKSCVSYDKMVAKCPNLNLHIEPTLLKELKELKI |
| effector | | | | | NRIDEVFQPRFFMNLLTQQGIADFNELRGGHTTKDRDKPQGFNEQINLYRQQNPEQAKGVPFFE |
| | | | | | KLYKQILSKEETSSFVLDAFIDDQQLLNALAEFIKLAMNEKGFIKDLQEALQRLGAAHFEKTYVL |
| | | | | | GSGLTNVSKVLFAGDWNLINRALEAQDRALEAQAEKEHPQKGKKISDTLTKKREKFCNQDVFS |
| | | | | | LAELDSLLANYLEQQEKINNEGTAQTQKEWQDTKKNWLVKESITPLSDYFKKSVINAETTATLT |
| | | | | | KQITATKALFKLEALDQNRSTPKTDQDTGGKGFQQVQQIKAMLEAFNNILHSLKPLHLVKGRNP |
| | | | | | IAPNDVDTSFYSVFEETFESYSNNLVPLYNKTRNHLTKKPYQTEKFKLTFSNPTLLDGWDVNKET |
| | | | | | DNLSVILRKDGLYYLAIMHSEHRKIFEQAQEAGVGEDCYEKVNYKLLPGPNKMLPKVFFSKKGI |
| | | | | | EQYAPPAEILRLYKNEEHKKGETFKLDSCHKLIDFFKANISHYKKDANDVGWAVFEFQFSPTKN |
| | | | | | YEDISAFYKEIERQGYKIWFTNIASKYISDAVTAGKLFLFKIYNKDFSLHSKGAKNLHTLYWQGL |
| | | | | | FEQNNLKDVVLKLNGEAELFYRKRSIETGNQIIHLANQPIKNKTKQAKQGSSKFKYDIIKDKRYT |
| | | | | | QDKFQFHVPITLNFKSTNVKQFNHNINTAIQHDESVNIIGIDRGEHHLLYYSVIDQNGTIIEQDTLN |
| | | | | | TIDTGGKGYIVDYKDKLHSKEQERDNARKSWGMIENIKELKAGYLSQVVHKLAKLIIERNAIVC |
| | | | | | LEDLNFGFKRGRFGIEKQVYQKFERALIEKLNYLVFKDTERSDEAGHYLNAYQLTAPFDSFKKL |
| | | | | | GKQSGILYYVPAAYTSKIDPATGFINFLNTRYETIQKAQDFFSKMDKICYNAKENYFEFHFDYNK |
| | | | | | FEVNQDLTAYQTKWIACTHGGDNRYHYNVKQRTLDKINVTDKLESLLQQYKIQYKHGEDIKEV |
| | | | | | IGKIDKADFFKTLLWLLRLTLTLRHSDRNNDEDYILSPVKDKNGVFFDSREQATLPSDKQTLPIDS |
| | | | | | DANGAYHIALKGLWNLQQINDWDSTGKLNLAMSYNDWFKFVRQLKQ |
| MG29 | 6522 | MG29-199 effector | Protein | Unknown | MLSNFTNQYQLSKTLRFELKPIGNTLEHIKQKGLLSQDEQRAENYTVIKEVIDTYHKAFIEESLAS |
| effector | | | | | VVFDNLERFEELYLKSNKDEKEQKEFEKLQENLRKEIVKNFKVHPKWNNLFKKELIKEDLLAFE |
| | | | | | QITDEQKEVVKEFTNFTTYFTGFHENRANMYTDKEQHSSIAYRIVHDNLPTFVNNKKAFESILQK |
| | | | | | YPQLISDAKSSIEEELLGAVFEDMFLLQYFNHLPSQTHIDLYNTMLGGVKRDDLKIQGFNEKINL |
| | | | | | YRQANGLNKKELPNLKPLYKQILSDKDTLSWLPEAFETQEELVGAVESFYQEKILAFECCDGRV |
| | | | | | NLLEKFKEIFSQTQLYDTSKIFIKSDKPLTDISQALFKNYGLLKEALWQKHLDDNPKLQKSKKIE |
| | | | | | ESEEKFFKQKYFTLSSLQEAIEFAKLSANVWNYFQENLDTYIKQIEENHTIWETDKTNTATTKSF |
| | | | | | LDSLINLQRFLKPLNVQTDSDKDIAFYSTFDSYFEALTQIVKLYDKVRNFKTKKPYSLEKFKLNFE |
| | | | | | NSTLLDGWDVNKEPDNTSILLRKNNLYYLAIMDKKYNKLFCNLEKSTQSDVYEKIEYKLLPGAN |
| | | | | | KMLPKVFFSNKNIDYYNPSKKLLENYKDGIHKKGDNFDIDFCHELIDFFKVSIQKHEDWKHFKF |
| | | | | | NFSPTKSYEDLSGFYREVEQQGYKISYKNIDTKLVESWVNDGKLYLFQIYNKDFSPYSKGTPNMH |
| | | | | | TLYWKALFDEQNLANVVYKLNGQAEIFYRKKSIEYTEDKLKKGHHHEELKDKFAYPIIKDRRFA |
| | | | | | FDKFQFHVPITLNFKAEGNENLNQKTIEYIKTNDIKIIGIDRGERHLLYLSLIDLNGRIVEQYSLNQ |
| | | | | | IINSYNGKEYPIDYHEKLAKKEDERALAREEWGVIENIKELKEGYMSHVIHRITTLMVEHNAIVV |
| | | | | | LEDLNFGFKQGRFKVEKQVYQKFEKALIDKLNYLVDKKKTPSDLGGVLNALQLTNKFVSFEKM |
| | | | | | GKQNGFLFYVPAWNTSKIDPVTGFVNLFDTRCSSVEKAKEFFGKFKSIRYNSVKEYFEFEFDYND |
| | | | | | FHNKALDTQTQWTICTYGERIKTFRNKDKNSQWDNETIHLTTAFKNHFGNYQGELKEYILAQD |
| | | | | | KKEFFEQLLDLFKLTLQMRNSITNSEVDYLISPVADKNGNFYDSRKADSSLPKDADANGAYNIAR |
| | | | | | KGLMLVERIKESTDVKKVDFKLTNKEWLQFAQRG |
| MG29 | 6523 | MG29-200 effector | Protein | Unknown | TSLNEIFSLGYFNKILNQTGIDLYNFVLGGKSEKDQKKIKGINEYINLYNQQQTDRKQRIPKLKPL |
| effector | | | | | YKQILSDRNSLSFLAEQFENDNELLEAIEQFRQTGLLHYKTDLKEINVLNEWKTLIENLNDFQRE |
| | | | | | GVYVNNGIVLTDISQQLFGSWEYLKKALVYYYENVLFTDEKEKKKKKYNEAKEKWLKQKQFSI |
| | | | | | AVLEDALAAFKKQETNPEILEKFTEHPVIDYFKKAGNDGNGDLPEKIDATYNTVKDLLNTSLQPN |
| | | | | | EKLVQQKDKTLLIKNYLDSIVNLLHFIKSLKPREELSQKDEAFYGRFDELYEALNVITPLYNKVR |
| | | | | | NHLTKKPYSTEKYKLNFENSTLADGWDLNKEADNTTILLRKEGNYYVAVMDKKHNKIFRDIPAS |
| | | | | | AKGEAVYEKMVYKLLPGANKMLPKVFFSKSRIEEFNPSTELLENYKNETHKKGESFNIQHCYNL |
| | | | | | INFFKSSICQHEDWKHFNFNFSETGTYEDLSGFYREVEHQGYKITFVNISESYIHKLVEEGKLYLF |
| | | | | | QLYNKDFSKYSKGKPNLHTLYWKMLFDETNLKDVVYKLNGEAEVFYRKKSIEDKNKIIHKANQ |
| | | | | | PISNKNPENVKKQSSFQYDITKDHRFTKDKFQFHVPITMNFKAKGILNVNNEANKYLRNNPDTHI |
| | | | | | IGIDRGERHLLYLTLINQQGEIIKQESLNIVANEKQKTDYHKLLEAKEGKRDEARRDWGTIENIK |
| | | | | | ELKEGYLSQVVHKIAEMIVDYNAIVVMEDLNFGFKRGRQKVEK |
| MG29 | 6524 | MG29-201 effector | Protein | Unknown | MHLQLTNQFSVQKTLRFELKPIGKTLEHIEAKGLIKEDEQRAQEYERLKKIIDFYHKDFISEALSS |
| effector | | | | | VRLKGLRCYERLFFDSARDEKVFEKIQTKMRKQMRKAFEEHPNWKYLFKKELLTKVLPNWEH |
| | | | | | PEVTSEDKNIIKNFQKFTTYLTGFHENRKNIYSNEAKHTAIAYRVVHENLPVFLQNKRLFELIKER |
| | | | | | YSKIIEDAKKELNTQDALKGATVEDVFSLDYYQYLMSQTHIDIYNAIIGGIVLDDGTKVQGLNEKI |
| | | | | | NLHRKNGLSKRDLPNMKPLYKQILSDREALSWLPESFEDTQEMSEAIAAYYDANILRFKCCDGE |
| | | | | | VNLLEKFDKLFQESNEYDLNTVYIKNDKSLTDISQAIFGNYSTIKDALWEIIIILRENPRIANASDID |
| | | | | | EKRRKFFDKKKSYFSIAQIEEALKEYGEEISLFDYFKEFGTYGNDEARDLRVEIESAYEAWNNDR |
| | | | | | ENKDKIKALLQSLLNLQHFLKPLYVKDELEKDIAFYAYFDIYYEALSLVIPLFNKVRNFLTKKPYS |
| | | | | | KEKFKLNFENSTLLDGWDVNKERDNLGVLFEKDGLFYLGIMDKKHNKIFQNIKEGGTHNVYRK |
| | | | | | IEYKLLPGPNKMLPKVFFSKRRIDEFAPSESLLAKYKEGTHKKGETFNLDDCHNLIDFFKASIKK |
| | | | | | HPDWREFEFDFTDTKKYQDISEFYKEVELQGYKIAFKNIDAQVIEQFVDEGKLYLFQIYNKDFSP |
| | | | | | YSKGTPNLHTIYWRMVFDDANLKDVVYKLNGEAEIFYRKRSIEYGEKTWKEGHHAKELKDKFN |
| | | | | | YPIIKDRRFALDKFQFHVPITLNFKASNLSNKEHNNLIRQKIKEHTDDIKIIGIDRGERALLYLALI |
| | | | | | DGKGRIVEQYSLNTIVNSYNGKKHKVDYHQKLDAKEKEREEARLNWESIERIKELKEGYMSHVI |
| | | | | | HKIATLIVEHNAIVVLEDLNFGFKRGRFKVEKQVYQKFEKMLIDKLNYLVDKKKEPTELGGALK |
| | | | | | ALQLTNKFISFEKMGKQNGILFYVPAWNTSKIDPTTGFVNLFDAKYYNKEKSREFFSKFKSINYN |
| | | | | | KQEDYFEFSFDYNDFHRKAEGTRTEWTLCSFGERIRTFRNPSKNNQWDDETIDLTKAFKELENG |
| | | | | | QTENLQAYILMQDSVEFFKKLHYLFKLMLQMRNSSSKTGDDYLLSPVKNSSGEFFDSRKSDNSLP |
| | | | | | KDADANGAYNIARKGLMLVQRFKEADDVAKADLTITNKEWLRFAQGIE |
| MG29 | 6525 | MG29-202 effector | Protein | Unknown | NMQRVINEDRKRAEDFSKVKKIMDDFCRYLIQKHLSNVNLDINNLKLFEDSFLELKRKKNAAKK |
| effector | | | | | NDIANARTNLNKIIKELSNELYKKSNLDKIKFKVKEKKDDTESIYFVTALKEWLKENNREDDLAL |
| | | | | | VKKFDKFNSYFYGFFENRKNIFNNTSSRNKSTSILYRAINENLPSFVNNCLKLEELIKLGVDFSEVE |
| | | | | | RNFSKELQGKKLIDFIKLENYGSFLTQEGIDLFNVIVGGKTTENGEKLKGINEIINLESQNRADKN |
| | | | | | IRKLKLDVLKKQILSDSESKSYVPEKLKDDLEFVQNIQNAYMIDDENRIKELYSNLDNYDLNEIYI |
| | | | | | KNDAIITKLSQELFGEFDLLQELIFDYVLKDENFKNKDQKYLKRKKEYFKKQDYFSIFDLESAIK |
| | | | | | YGFNNNDFFNNSEKKNKFLENINNDIDHPILGYFKRFYFENKNLFKEIDDSYKELNNILNSNNLVN |
| | | | | | KKDFLTQGKEEDVRKIKCFLDNCLNLLHFVKILNYKKGDPLDYETLIVDNSFYEKYFEIYDRLVE |
| | | | | | INKIYEKARNYATQKPYSKNKFKLNFDNSKLADGWDRNKETDYFTILLRKNNNFYLAILNRNNK |
| | | | | | KLFKKINYNENEDYYEKMEYKQIPFSKGGLGGFVRKCFNSAKKKGWVCPKDCLNSNGEIIINDN |
| | | | | | DVKNNLIQLIDCYKNFLNIYENSGFKYKDFNFEFKDSKDYSSLDEFFNDVEKKRYFIKFVKVSKKF |
| | | | | | IDDSVDAGKLYLFHIYNKDFSENKCDKNKNSIRNMHTLYWNATFSEENLKNPIFKLNGRAELFFR |
| | | | | | DKSTANNLIIHPKLKPIKNKDPINN |
| MG29 | 6526 | MG29-203 effector | Protein | Unknown | MKSTLDQFSHLYPMSKTLRFELIPQGATTANIESRGFLKKDEERAESYKKMKETIDRFHQDFIEK |
| effector | | | | | AMAHVRLSNLEDFENLYNAPNEEKKEDKYKKQLEKVQERLRKEIAKGFKSGEVKAIFLKIDKK |
| | | | | | DLVTKLLEKWIEENNLEDVHFDPEFKKFTTYFSGFHQNRKNMYTDKAQSTAIAYRLVHENLPKF |
| | | | | | IDNINIFKKVSEIPELKQNLEKLYKEIEEYLGIVSIEEAFELGYFNEVLSQKGIDVYNLILGGRSEKE |
| | | | | | NKKKIQGLNEHINLYNQKQDKKNKIPKLKVLYKQILSDRTSTSFLPDAFEDDDNSTASQKVLAAI |
| | | | | | HQFYHTQLLDYQPSDKAETINVLKSFQGLLADINNFDLDKVYLRNDKSISTIAQKMAGNYGVLR |
| | | | | | DALNYYYENKIDPEFQIKYDKATTDKKRENLDKEKSKFTRQSYISISTLQTALDTYVESFDETHDV |
| | | | | | KQVYSPTCIADYFKDHFKAEPKEGSDKEFDFVSNIEAKLSTIKGLLNTPYPENERLQQDKKKIDAI |
| | | | | | KLFLDSIMEYLHFIKPLALPEDFTLEKDEHFYTLFEEWYEQMQLLIPLYNKVRNYATQKPYSTEK |
| | | | | | FKLNFENSSFLSGWAPDYNTKGGLIIKKQDNFYLCIVEKKLKKEDVEFLKTSPEDHLAHRVIYDF |
| | | | | | QKPDNKNVPRIFIRSKGTSFAPAVQKYDLPVESIIIIIYDEGLYKTDFKKENPAVFKKSLVQLIDYF |
| | | | | | KLGFSRHDSYKHYDFEWKESEEYETIADFYQDVINSCYELRDEAINFDHLHQLIDQGKLYLFQIY |
| | | | | | NKDFSKHSKGKPNLHTMYWKALFEKQNLKDVVYKLNGEAEMFYRKKSIQDKNRVVHKKNIKV |
| | | | | | ARKFYKDDKKTERVPDETVLRLNKFYKGQIQESGLKKEDLKFKDNYSLFHEQGKDIDLIKDKRY |
| | | | | | TVDKFQ |
| MG29 | 6527 | MG29-204 effector | Protein | Unknown | ISDKDGHFYNNFLVYYKSIKEIIPLRHKVQSYVTQKPYSLKKFKVNFDNSYFLTTWPFSYENKGG |
| effector | | | | | VIIRKEDLFYLAIINCSVKDLANYKINDCSIANSAERIIIDTQKPDNKNIPRLFIRSKGDSFAPAVTE |
| | | | | | YDLPINDIIDIYDNGKFKTEHKKLDPEEFKSSLTALIEYFKLGLSRHNSYKHYKYQWKPSDCYNDI |
| | | | | | SEFYNDTVNSCYQIKTEKINFDKILELVSEGKVYLFKIYNKDFSPNSKGQPNLHTMYWRALFDEN |
| | | | | | NLKNVIYKLHGGAEIFFREKSISKENEIVHYANQPIKNKNPHAIKREVILPYDVIKDKRFCIDKFQL |
| | | | | | HIPITLNFKATGKGQLNSDVLQYLKDTPQNQVKVIGIDRGERHLLYLTMIDHEGHIIMQESLNTV |
| | | | | | KSDNYPIETQYHDLLAQKEEDRNKARSNWDSIENIKELKEGYLSQVVHKLAKLIVENNAVLVME |
| | | | | | DLNIGFKRGRFKVEKQVYQKFEKALIDKLNYLVFKDKKVEEEGGLFKALQLTEPYTDFLKYKK |
| | | | | | KQCGFLFYVQAWNTSKIDPTTGFIDMLKPKYKNIPEAQEFFRKFISIKYNSDKDYFEFYFDYRNFP |
| | | | | | RSIDSHKNDWTVCTYGKERYAWNRSLNQGKGDYEIWNVTEKIKELFNIEGIEYRSGRNLTEAIA |
| | | | | | NSESKSLLSMLMKSLSVVLAMRYSSSKDNRDFILSPVANDKGVFYYSEEADQYLPKDADANGAY |
| | | | | | NIARKGLLLLDRIRSSADLKS |
| MG29 | 6528 | MG29-205 effector | Protein | Unknown | DRETSSFIPDQFENDKELLESLGKFINEMAKKGGILENLQNSVRSLKDADMRKTFVKGGVEITRIS |
| effector | | | | | EKIFGNYSILKSAIYHHAETVVYPTPKSGKVSETLEDKRKKYVNKQDVFSITELESMLSIYANHLD |
| | | | | | DDSPDKETIIKYTNVKNIISNHFLSTIDDLINDEAIGFRTAVEEVLSLLSLDRLNKGKQGQEQTHKI |
| | | | | | QKMLDAFLAMSHSVKPLHLVSRRKPIDVPDMDMGFYNNFSKTFEAFDQMVIALYNKTRNHLTK |
| | | | | | KPYSKDKIKVNFENPTLLDGWDINKAKANNSTILRKDGLYYLAIMHSNYNSIFDEIPDVKNHERV |
| | | | | | YEKVNYKLISGINKMLPKVFFSKKGIETFNPPRSILDLYKNSEHKNGDTFNLDSCHRLIDFFKENV |
| | | | | | GKYKVNPTDEFGWDVFNFKFSPTKSYQDISYFYREIEMQAYKIWFADISETYINQCIEEGKLFLFQ |
| | | | | | IYNKDFSPYSTGTPNLHTLYWKALFESENLKDVVAKLNGQAEIFYRKHSIKKDERTIHNANQVIQ |
| | | | | | NKNENNPKKTSSFEYDIIKDKRYTVDKFHFHVPITLNFKAPGVTRENNKINDTLAKSDDTYIIGID |
| | | | | | RGERHLLYYTVLSSKCEIVEQGTLNTVSTNHGYKVDYQKKLDKKEKERDKARKAWTSIENIKEL |
| | | | | | KAGDLSHVIHKLSQLFIKYNAIVCLEDLNFGFKRGRFKVEKQVYQKFEKALIDKLNYLVFKDVK |
| | | | | | FGKPGHYLNAYQLTAPFDSFKKLGKQTGILYYVQASYTSKIDPVTGFINFLYPRYESFLKSKMFF |
| | | | | | ENMNGIRYNAEKDYFEFMIDYSIMTPSRDLSGYKNKWTICTFGDKRFKNFRNANENWESVVVNV |
| | | | | | TAELKQLLEQAGITFQLGQDLRESITQIKDTKFYRKLFKLLQVTLSLRHSKTGTDEDFILSPVADE |
| | | | | | NGKFFDSRKATEKQPKDADANGAFHIALKGLWNIQKIKEWDGTSNLNLAMKNVEWFSFAYNKP |
| | | | | | FLD |
| MG29 | 6529 | MG29-206 effector | Protein | Unknown | MFSYGLYKEEGKKKIQGLNEYINLYNQKQEKKNRIPKLKPLYKQILSDRENISFLPELFEESQDV |
| effector | | | | | LDAIESYYKANLVDYKPDDKDDTENILKELYSLLKGVNSFDTNKIYIRNDKSLTDISKAIFGDWAIT |
| | | | | | DAALEFEYIQDITIPKSGLTKKQEKEKERYLKQPYFTIQEIEQALKAYRNENEVLADFTEGMVGN |
| | | | | | YFYSHFKTKTDSDKEFDFVSNIEAKYSCIKGVLNTKYPKNQKLNQDKVTVNNIKVFLDSLMELLH |
| | | | | | FIKPLALPNDVPFDKDETFYGIIFETYYEQLQLLIPLYNKVRNYATQKAYSKEKFKLNFENSTLLD |
| | | | | | GWDVNKEEANSCVLFQKEGLYYLGIMDKNHNKVFRNLPSTSSKNTYNKINYKLLPGASKMLPK |
| | | | | | VFFSSKNIAYYNPDKEILRIRNHSTHTKGGSPQKGYEKQDFNVKDCRKMIDFFKTSIHKHPDWK |
| | | | | | KFGFEFSETAHYNSIDTFYREVESQGYTITHTAIDNDYIDKLVNEGKLYLFQIYNKYFSPYSKGKP |
| | | | | | NMHTLYWKALFEPDNLNDVVYKLNGQAEVFYRKKSIKEKHKVIHKAQEPIINKNPLAQKKTSVF |
| | | | | | DYDIIKDKRYTVDKFQFHVPITLNFKAVGNEYLNTNVLDYLRDNSDVKIIGLDRGERHLIYLSVID |
| | | | | | QEGNILEQESLNTIINKEHNIHTPYHKLLDKREKERDSSRKEWGTIATIKELKEGYISQVVHRITQ |
| | | | | | LMVKHNAIVVMEDLNFGFKRGRFKVEKQVYQKLEKMLIEKLNYLVFKDKLPNEAGGLYNALQ |
| | | | | | LTNKFKSFKEMGKQNGFLFYVPAWNTSKIDPTTGFVNLFYTRYESVEKAQQFFSSFDSIKYNTKK |
| | | | | | GYFEFAFDYNNFTTRGEGTKTKWTVCTYGDRIITFRNPNANNQWDNKEVNLTQQFEDFLGKHQ |
| | | | | | IVYGDGQCIKDQIVGQVDKTFFKDLLYLIKLTVQMRNSITNSDVDYLISPVTNHSGTFYDSRKASN |
| | | | | | SLPKDADANGAYHIAKKGLQWVQQVQQFEGDDWKNLNLDKTNKGWLRFVQNQ |
| MG29 | 6530 | MG29-207 effector | Protein | Unknown | METKKSIFDEFTNLYSLRKTLRFELIPQGRTLEYINKKGLISKDEQLAQSYQRMKKTIDGFHKYFI |
| effector | | | | | DLALSKTKLTRLKEFEELYSADAEKKKEESFKKEFGKVKEILRKEIVSSFESGEAGKTFSKLTKA |
| | | | | | DLLKGKNKNSDETEDGDGSDENTGNKHTELKGLIEEWMEKQPNKDEIYFDKEFKKFTTYFSGF |
| | | | | | HTNRKNMYSDEDNSTAIAYRLIHENLPKFIDNIRTFGIIKNKIGLYEDCNKLHNELSKYLNIENIDE |
| | | | | | VFKLDHYNTVLTQKQIDGYNLIISGISVKEGKKIQGLNEYINLYNQKQTDKKNKVPKIKLLYKQI |
| | | | | | LSDKESVSFLPDNFEDDSNRTASQKVLDAINEYYHSNIITFQQIGASHPENVLIKLKELLQELKEYD |
| | | | | | LNKIYIKNDSNLTLISNKLFGNRNVFDLALNYYYEFVERPNFNNEYQKAKESKREKLNKDKEKFV |
| | | | | | KASNVSFLLLQSALNEYVQRLDSSHEIKKKYSDSCITNWFIDYFKTESKDCVEKELIKNVEEKYNA |
| | | | | | IKGILNIKYPSDKKLYQEKDNISVIKTFLDSLMEFLHFVKPIVLDKDSSLEKDNSFYAQFDLYYEEL |
| | | | | | NKIIPLYNKVRNYATQKSYNVGKIKLNFENGTLAAGWDKNKETDNTTVIFRKDSLYYLGILDVN |
| | | | | | NKQVFKKQFLKSNGESVFEKMEYKLLPGANKMLPKVFFSKKNLKKFNPTKDLLIKYKNGIHKK |
| | | | | | GDNFNLDFCHELIDFFKKSISIHNDWKHFNHKFSPTFEYKDISDFYREVEQQGYKITFQNIPEAYIS |
| | | | | | SLVSEGKLYLFQIYNKDFSQNKKAKGTDNLHTLYWKALFDEGNLKNVVYKLNGEAELFYRKRS |
| | | | | | LNYSEEIMKKGHHSEMLKNKFNYPIISNKRFASDKFQFHVPITLNFKSSGFKNINLSVLNFLKNNP |
| | | | | | KINIIGIDRGERHLIYITIIDQEGNIKLQKSFNELFYNVKGESQSRKVDYREKLDKREDERKEARE |
| | | | | | KWGVIESIKELKQGYLSIVVHEIVKLMVKYNAILVMEDLNFGFKRGRFKIEKQVYQKLEKALID |
| | | | | | KLNYLVFKDNDAFEFGGIYKALQLTSRFESFKKLGKQSGFLFYVPAWNTSKIDPNTGFVNLFKTT |
| | | | | | YESIEKAKEFFNSFDAIRFNKTNRYFEFVVEDYTKFNIKAEGTRNNWIICTKGDRIHIFKNKDKKD |
| | | | | | NWDSKIVNLTDRFKSIFKEQNIPFMDEENLIEEIISKDDISFFKNLLDLFRQTLQMRNSIPHKEMDY |
| | | | | | LVSPIADRNGKFYDSREATDEEPKNADANGAYNIARKGIILLNKIKDLENLKKPNLTISEKEWLKF |
| | | | | | AQKIGVK |
| MG29 | 6531 | MG29-208 effector | Protein | Unknown | MNQNKSIWNQFTNMYSISKTLRFELIPQGRTLENVKNKGLIQEDKEREKEFNKVKKVMDRYYK |
| effector | | | | | YFIEKALAQVSIDTEDLRKFQEYYEDLKKDRNNESLKKSYAEVQKKIRKSIYEKIKNMNEFDHIF |
| | | | | | KREFIQKILPKWLKENNEHDDACLVANFNKWATYFTGFFKNRKNVFSADEIATSIIFRIVNDNLP |
| | | | | | KYIDNLSRFNKLKSYNGASFEKLENDFKEELDERNLEDFFALKNFNHCLNQKGIDHYNLIVGGKT |
| | | | | | LEDGTKIKGLNEYINELSQKAENGREVRKLKMMPLFKQILSDRESASFLPEKFENDREVINSINEY |
| | | | | | YEHVLAQFPRLKKLLSEMPKKDINQIYMRNDRSLSEISQEIFKDYQIIKSGIREYGLKTLGIKDTKI |
| | | | | | DEWLKKQSYFSIAEIERGLTLLELENFSQENPILSYLIGLHKEGKDLIKEISEAAEAFKKIEGSEKK |
| | | | | | LLLKKDKEVEVIKGFLDSLKNLVHFMKPLYYDSRHNIDEKGKQALELDMDFYFHFNQIYEDLSK |
| | | | | | IIPLYNKVRNYVTQKPFSTKKFKLNFQCSSLLTGWFSDFRTNAGLILKKNNAYYLAIVPKKLDKV |
| | | | | | DRESLSILDNSESIKVLKYDFQKPDYKNIPRLFVRSKGSNFATAVKKYSLPINEIIEIYDNGYYKTE |
| | | | | | YREKDPQKFRESLKKLIDYFKEGFQKHESYKHYTFIWRDSEEYNSINEFYEDVINSCYSLSFYKVN |
| | | | | | YGYLNELVNQGKLYLFRI |
| MG29 | 6532 | MG29-209 effector | Protein | Unknown | MKNQHLFSGFTNQYAVSKTLKFALKPTDKTKEHINNKNDKGKNLLDVDKELAEKYKQAKKIID |
| effector | | | | | EYHKSFIHEKLSNFSFGKKELQDFNNAYEDLKKDKKNDSLKKDLILKQDELRKQVAQELQKNN |
| | | | | | YLYKKKGGKAKFVKQRLPEWAVENANQIKKNHENIDNPEAIIKDFKNWTNYFGGFNDNRKNIY |
| | | | | | TEKSHSTSIGYRLIHENLPKFLENIKRYKEAKKLDIDFSEVEQKFDVNPDNIFTLNYFNQCLTQEDI |
| | | | | | EQYNLIRGGQSKVDNKKERGINEIINLYSHELQSKLTDAQDEDKKELKAQIKQVRSCKLEELYK |
| | | | | | QILSNRSQISFPLENIKNDSELCQQIEHLFYLNNRGSLIGKQEETGEIAEVIFDISEAIKKAIQAISDA |
| | | | | | DPEQLYIKNKSSRAITDISQHLFGDWNLITKSLNYYAEQTIFSAPKDKKETAKQQEVREKKLENW |
| | | | | | MKNIPYFSFAEIHAALEYYFKQYSNKELQNEKTVKNEQSEQGITKEMKETALKKPLFTYFKELII |
| | | | | | TKKNEKDNTFEKIFLSEQIKTTYPIAKKVFEQYKDVKKELLKSKKDEVHNIKAYLDSLMDLLHFL |
| | | | | | KPLYVQFSKKEEKKQVEIFEKDNSFYGDFDVLFKVLNQIIPLYNQTRNYLTKKPFSIEKYKLNFE |
| | | | | | NSQLADGWSKNKETNNTCVLLMKNEQYYLGVMNKKHNKLFSDELPNKGSCYQKIIYKQVSDA |
| | | | | | AKDIHTLVNIEGKVSRFTKGLNEKRSKYCQEIQNIKSQESYKGKGLIKSDLYKFIDYYKKCAKSY |
| | | | | | WNWCDFEFEKTEKYQNIKEFTDDINRQGYKITFCDISESYINQCVNEGKLYLFHIYSKDFSIHSKG |
| | | | | | RKNLQTLYWKALFDENNLKDVVYKLNGEAELFFRKASIQYSDDIWQKGHHYEELKGKFQKEG |
| | | | | | KHLPIIKDRRYAKDTYLFHVPITCNFKAEGVTKFNDYVNKEFLQKNSNVNILGIDRGERHLAYYT |
| | | | | | LINQNNEILKDKDGKYLQGSFNNPTGRKDYHELLNKREQERDKARKSWGTIEKIKDIKEGYLSQ |
| | | | | | VVHKIATLMIEHNAIVVFEDLNFGFKKGRFKVEKQVYQKFEKMLIDKLNYLVFKDKSHDEPGGL |
| | | | | | LNAFQLTAPFESFQKLGKQTGFIFYVPAYHTSKICPATGFVNLLYPRYETVKKSQEFFDKFNKICF |
| | | | | | NKEENYFEFHFNYAKFTDKAKGSEQNWIVCSYGKRLENFKNPQQNNQWDTREIDLTQDLQKLF |
| | | | | | QKHNIQFDVDVCIINSICQQNDRQFFKDLIRLLRLTLQMRNSRINSDEDWMISPVKKNQDKFFDS |
| | | | | | RKVDDSMPQNADANGAYHIALKGLWCLQQINETDNTKNLKLAISNKEWLAFAQNK |
| MG29 | 6533 | MG29-210 effector | Protein | Unknown | SIIRAAIYNYAETVMYPTPKTGKVSDVLEEKRKKYANNEDIFSIAELESMLTSYREQLEDEHPDKE |
| effector | | | | | IITHCENSEHPIRTYFLNIIDNVKNDKDIELGKSIENVLPLLSLENLNKGKAGQTQTHLIQKMLDA |
| | | | | | FLAVTHAVKPLHLVKGRKPIEVPDIDMGFYADFSSAFEIYQQMIIGLYNKTRNHLTKKPFSTDKI |
| | | | | | KINFENPTLLDGWDANKENDNSGILFKKDGNYFLGIMHPKHKNIFNYIKGINDIESEKRSLSKDEL |
| | | | | | FDKIVDGNSDHYQKIVYKLLPGVNKMLPKVFFSGRRIDYFAPSTEVLKIRNTASHSKNGKPQKGF |
| | | | | | EKADFNLKDCHTIIDFFKQSLEKHPEWKEFEFDFSPTSSYEDLSGFYREVEHQGYKMDFHPIKKS |
| | | | | | YIDQCIEDGKLFLFQIYNKDFSPYSKGKPNLHTLYWKALFDPENLKNVVAKLNGQAEIFYRKHSI |
| | | | | | IKDDRTIHRSNKSLQNKNENNPKKTSLFEYDIIKDKRYTVDKFQFHVPITLNFKAEGVTRENDKIN |
| | | | | | RELSKSDDTHIIGIDRGERHLLYYSVINHKGEIVEQETLNTISTDQGFAVDYQQKLDKKEKARDK |
| | | | | | ARKSWSTVENIKELKAGYLSHVVHKLALLIVKYDAIICLEDLNFGFKRGRFKVEKQVYQKFEKA |
| | | | | | LIDKLNYLVFKDAKPNEPGHVLNALQLTAPFDSFKKLGKQTGILYYVQAAYTSKIDPVTGFINFL |
| | | | | | YPKYESLIKSKTFFESMEGIRYNPNKDYFEFSFDYRKMTP |
| MG29 | 6534 | MG29-211 effector | Protein | Unknown | MIKKTLPEWLEEKNPEIEGVEDPQAIIKTFEKWTIYFRGFNENRQNFYTDQAKSTSISYRLIHENL |
| effector | | | | | PRFIDNIKRYKDAKALNVDFSEVEKSFAAKLDEVFSLEYYNHCLTQKGIDVYNQITGGRSEKGNV |
| | | | | | KKQGVNEKINLHAQKLKSKISNASDEGKKELEEKSKKVRSCKLEKLHKQILSDSSERSFRLDEID |
| | | | | | SDSSLCEAIVSTFEIDDDENLIGKTKDGDFNITKNVEESLRSLKNSNPEKVYVNNRSITVISQNLFKS |
| | | | | | WNTINNCLEYYAENKRYPVPEGKKETKTLLDQREKWLKQSYFSFADIHKALETYFEQYAEDEF |
| | | | | | KNEQKHEEINDRLNIKEQKEIAKSKPLFGYFEGLIIRKKDEKNKIFEAKHLLEEIQRTFKEVPTIL |
| | | | | | EEYRNVDEEKLKNEKGKVQKVKLYLDALMDLQNFLKPLFIQLNKKEEEKAIELYEKDTGFYEG |
| | | | | | FDSLFEVVKQIVPLYNRTRNYLTKKPYSVEKYKLNFENSTLADGWDKNKEKDNTCVLLMKDGQ |
| | | | | | YFLGIMDMDKKHKKIFEGDLPDEGQCYKKIIYKQISDASKDIQNLICINGKFQRKTKKLDELKEK |
| | | | | | HIPDIAKIRSCQSYKTTNKNFNKEDLITFINYYKKAATKYWDWCDFSFRESDKYDSFKDFTDHVN |
| | | | | | SQGYKIDFQNISETYIDDCVKKGKLYLFQIYSKDFSPKSRGKPNLQTLYWKALFDEKNRRDIIYK |
| | | | | | LNGKAELFHRKKSIEYSQLIWDKGHHAGKIRQKYPIIKDRRYAQDTYLFHVSIQCNFKAGAKKP |
| | | | | | DDFNREVRDSLKDNSEVNIIGIDRGERHLAYYTIINQKGEILKNANGEYLQSSLNKPLGEKDYQAL |
| | | | | | LHKREKERDDARKSWGTIERIKDLKEGYLSQVVHKIAKLMVEHKAVVVFEDLNFGFKRERFKV |
| | | | | | EKQVYQKLEKMLIDKLNYLVFKDKEPDETGGLLNALQLTAPVGSFRELGKQTGFVFYVPAYHT |
| | | | | | SKVCPATGFVNLLYPKYETVKKAREFFKKENKICFNKNCFEFHFDYEKFTNKAEGSRQDWVLCS |
| | | | | | YGVRLENFKNKQNNQWDTREINLNDEIEKLFKDNSIDCNNGQCLIEKIVQQDKSEFFKSLLRLLR |
| | | | | | LTLQMRNSKIGTDEDWLISPVKGSKGNFFDSRKADVSMPQNADANGAYHIALKGLLMLEQLRE |
| | | | | | REDVETFKPNLSNEKWYEFLAKRYENKSGN |
| MG29 | 6535 | MG29-212 effector | Protein | Unknown | KNFYNLYEKIKEIKRGKKERESELKKLNKEFSKKQKAFRKDLYDQIKRQENFQDLFKKELLTKV |
| effector | | | | | LIKWLNEKYADDPKEKENLYLVKKFTNWTTYFTGFNENRKNIYSDKEIHTSIIHRIVHVNLLKFL |
| | | | | | DNLSKFRFLKKQYLTDNKKLESVFGNIEDDLKEEFDGKKLDEIFSLSYFNFCLSQKGIDKYNTIIG |
| | | | | | GKKLENEIRKRQGVNESINLFSQNPEKYIRGEVQDRNTVKKGIKRLKMESLFKQILSDRESSSFVL |
| | | | | | DKFEDDKDVINSLNRFYKGICGGNAKEETNVFEQIREILSKLDEYYLENIYVKNKNSIRHLSKYLY |
| | | | | | GFYDSLTDALKCYAEKKLFPFKKKEIPTKKELKQIEDWIKKTPCFSIKQLQESIELYSKFFDKRAE |
| | | | | | GTVLSYFSDFKKHSGEQKKDILEEVQKKYEEVKNILDEDQIDGKKILIEKEDYIERIKAFLDSIFDV |
| | | | | | FNFIKPFQVSAEDKDGNFYSEFETIFERLEKIIPLYNKVRNYITQKPYSTEKFKLNFENSTLAKGW |
| | | | | | DLNKEKKNTTVLFKKHDLFYVGVMDKDHRKILENPPFSKENDSYYEKIVYKLLPGANKMLPKV |
| | | | | | FFSKKHLDYYSPSEEIIRIRNHSTYTKNGDPQEGYEKKDFILNDCHKMIDFFKKQIEKHPEWRNY |
| | | | | | NFKFSKTTSYGYIDEFYREVEIQGYKIDFKRIDEEYIEELINEGKLYLFKIWNKDFSKYSKGKKNL |
| | | | | | HTLYWNAVFDEKNLNDVVYKLN |
| MG29 | 6536 | MG29-213 effector | Protein | Unknown | MVPWKQYVVYGLKESGKRGIRKIGGKMAKMKSTWDEFTNMYSLSKTLRFELKPVGKTLEHIK |
| effector | | | | | EKRLISQDKERAENYKKMKKTIDEFHKDFIEIAMSQVKLTKLKEFANLYNASPERKKEDSFKKA |
| | | | | | FEKVRAELRKDIAKGFKTGEAKEIFSKIDKKDLITKLLEDWMKKRQENLYFDENFKTFTTYFGG |
| | | | | | FHENRKNMYTDKDQSTAIAYRLIHENLPKFLNNINTFKKLRDKPELHEECKILFKEIKDYLDISSI |
| | | | | | DDVFKLDYYNKVLTQKQIGVYNLIIGGRTAEEGKKKIQGMNEYINLYNQKQDKKDRIPKLKPLY |
| | | | | | KQILSDRESVSFLPEKFEDDPDSTASQKVLDAIREYYETNLIDFKPDGKDETENVLKKVKELLADI |
| | | | | | KAYDLSRIYVRNGKAISDISKALFGDWSIIKSALEFTYTRTIKVGKKGLSKKQEKDRERYLKQSH |
| | | | | | FSIDEIEKALFKYKNENEALKDLRENTTPIAVYFHTNFKAEKKEESDKEFDLIANIEAKYSCVKGI |
| | | | | | LNTDYPKDKRLHQEKKTIDDIKAFLDSLMEFLHFVKPLSLPSDNPLEKDEIFYSQFQLWYDQLRL |
| | | | | | LIPLYNKVRNYATQKPYSIEKFKLNFENSTLLAGWDLNKEADNTSVLFRKNGLYYLGIMDKKHN |
| | | | | | RVFKNIPDANPGESAYEKMVYKLLPGANKMLPKVFFSNIRNEMFAPPEELKKKYEAETHKKSGK |
| | | | | | FNIEDCHTLIDFFKESIAKHEDWKHFGFQFSDTSSYEDLSGFYREVEHQGYKITFQNVPESYINRL |
| | | | | | VDEGKLFLFKIWNKDFSTYNKGKPNLHTMYWKALFDPKNLKDVIYKLNGRAEMFYRRKSISKD |
| | | | | | RKFVHKANKSIENKNPNNTKKESVFEYEIIKDKRYTMDKFQFHVPITLNFKAKRNEHINASVLEY |
| MG29 | 6537 | MG29-214 effector | Protein | Unknown | MVKNLYSEFINIYNISKTLRFELIPQGKTEDNIQKKGLIDNDLERDNEFLEIKKVMDKYFKYFIEV |
| effector | | | | | SLDKIEINKLDLMEYNRIYCELKKDKTNENLKEEYSKIQNKLRKYIYSEVKNKPNYNELFKKDFV |
| | | | | | QKILPAWLSGISEDLDNKIKDELIKVKKFSDWITYFQGFFENRKNIFTDAEIPTSMIYRIVNDNLPK |
| | | | | | FLDNLSKYEELKKYENKGFDFNYINNHFKSELNHLDINNFFTLSNFNVCLNQKGINNFNTIIGGKS |
| | | | | | LENGEKIKGLNELINLYSQQNNEEKSIKKLKLIPLFKQILSDRESFSFILEKFKDDKDVINTINTFYV |
| | | | | | ELNNQNVLLNLKNEILSLGDKDLNLIYIKNDKNLPLISQRLFGDWEKIHQGLRLYAKYNLPNLKG |
| | | | | | DKKIESYINNTSYFSIYELEKAIELLNITNEITNENLKVYLEKINGNIKNPICGYLSLFKNKDENLFE |
| | | | | | NINNNYLKFQKVLNKNFKENQKKLLTLDFESDSEIIKIFLDSILSVFHFMSSLNIRLNKKDEDKGQ |
| | | | | | EAFEIDTEFYLKENENYEKLKEIINIYNKTRNYITQKPFSTKKFKLNFENSTLLAGWDKNKEPDNF |
| | | | | | SVIFRKENNYYLGIMAKGNNKIFSKIENLNINSNYFEKMEYKLLPGPEKMLPKVFFSSKSIKFFNP |
| | | | | | SSEILAIRNYSTHTKGGNSQKDFDKKDFNLNDCHKMIDFFKESLNKHEEWRNYNFKFEETNTYK |
| | | | | | DISEFYTDISNQAYSINFIKIPQKTIYDLVEDGKLYLFQIYNKDFSSFSKGKKNLHTIYWEELFSKD |
| | | | | | NLNDIVYKLNGQAEIFFRKKSIDAKITHPKNQEILNKDPIKNKNKSNFSYDIIKDKKYSSDKYLFH |
| | | | | | CPITLNFKCKDKNKELNKKINAVISKNSNEINVLSIDRGERHLAYYTLLNSNGEILKQDSFNIITDE |
| | | | | | FSRNVNYHTKLDKLESSRSDARKNWKNIENIKELKEGYLSQVIHNIAKIAIEHNAIIIFEDLNFGFK |
| | | | | | RGRFKIEKQVYQKFEKMLIEKFNYLMFKDIDKNQVGGSLKAYQLTPKFESFKKMGKQTGIIYYV |
| | | | | | DANFTSKICPKTGFINLLYPKFENIEKTKDFISKFKYIKYNKSENLFEFNFNYSNFKLAKEESKVIQ |
| | | | | | DNWSIYSNGKKLVSFKNSDKNNNWDIKEVEVNLELKKLFEEFNIDFKSGENLISKITKQTEQKFF |
| | | | | | KSLIYYLRLILQLRNSKINSDEDYILSCVKDKEGIFFDSRNASKNEPKNADANGAYNIGIKGLMLV |
| | | | | | EKIKKLKPNEKLDPRIIRDDFINFVIKKNK |
| MG29 | 6538 | MG29-215 effector | Protein | Unknown | MALIADEFLGQYSLSKTLKFELVPQGKTKDLINNLDDSILAIDAKRAAEYKNVKKILDDYYRFFIE |
| effector | | | | | QVLEKNILDEKDVKEAHVAFQQRAKDSKAFEKTQDNMRKKIAKALKDGRSGSQLDAYEKLFKN |
| | | | | | DDKSGLYKWLNYRKDRKELTEELYESYKKSLQQFDKFTTYFTGYKDNRENLFSAEEKSSAISYRI |
| | | | | | VNENMVRFFENCQRFEDIQKKHEGLYEQLKDNQAIFQFNKFTELLGQSKIDEYNRMIGFSIENSD |
| | | | | | TKGINSLINEYRQKNHIKNRELPMMVQLYKQLLSDREKSFVIDEITSDEEMEEKATECCLEVREI |
| | | | | | EKKIALLVKEYVTGDNTGRIYLRGSKLTDLSQNIFGQWDIINKALQMKLETLATKKHKEEFDKR |
| | | | | | SKKAININELNDILQEYFIGLDSGEYKIMQEKPALSELIIENIPVVEYSPVLNGLGFGTKEERINKIK |
| | | | | | GVFDQIISMLHYYKIFYLYEGNKQLEVAEKDAFFYSEFDGLYNDLSLATKVYDHVRNYVTKKPY |
| | | | | | SENKIKVNFNAPTLLNGWDINKEESNLSVLLEKNGLYYLAIMDINHRRCFDLKDIEVAKAALCDV |
| | | | | | DKPCFNKIEYKQVTGANKMLPKVFFAESNVDYYAPSSEIMTIREKGLYKKDANNIKAMWQWIDF |
| | | | | | CKQSTEKHPEWNKYFKFNFKPTKNYMDVNGFYRDFDNQAYAIKKVRISEKYISDLVAEGCLYLF |
| | | | | | QIYNKDFSQYSKGKQNLHTMYWRMLFDSQNLKNIELNANAKIFKLNGEAEIFFRRQSLEKNITH |
| | | | | | AKDMPIENKNPHNPKKQSTFEYDLIKDKRYTENKLFFHCPITINFRAASLPVQFNKKVNKFVANN |
| | | | | | PDINIIGIDRGERHLLYFTIINQKGEILKQGSLNHIKDNYISNGKEVPVDTDYHELLDRKEKERDA |
| | | | | | ARRNWTTIENIKELKSGYLSQVVHQLAELMIEYNAIVVLENLNAGFKNGRVKVEKQVYQNFEKA |
| | | | | | LINKLNYLVFKDCSLNQPGGVLKGYQLTAPFDSFRSLGSQSGFLYYVYPSYTSHICPKTGFVDLL |
| | | | | | HPKYQSVAEAQRFFERFEFIRFNQDEGYFEFGLDYDRFGKKMNKSKWIVCTYGEERYGFDGKD |
| | | | | | MTAKKYNVTDEISALLDKVKIVYGGGRDIKNDISTQDDKAFFKSLLYFLCLTMQMRNTNGGTND |
| | | | | | DNDYILSPVQDKKGNFFDSREANDTEPKNADANGAYHIALKGLKLISSIDEEGKIVLKKTETQDW |
| | | | | | FNFAQEKSYLK |
| MG29 | 6539 | MG29-216 effector | Protein | Unknown | IMEDFVRKYALSKTLRFELKPVGETAEKINDFKNQAIAAVVAQDKQRAEDYKAIKKIIDDYHRFF |
| effector | | | | | TEQVLGQKILTDDDILKAFKAYDVFRGSKDDTKKKQYQTVQKKLRDKIAKAFKSRFSEYNLFDS |
| | | | | | GLLNEKGSGKNKTKGKLWQWLKKRYDNREITEKQFEEAEKLIKNFDRFSTYFTGFNQNRQNIY |
| | | | | | SAEEHQTAISYRIVSENMTKHFNNCLNFQAIQRRRELSGLKQQLKSCKNVFTPAYFKKCLSQSGI |
| | | | | | NSYNEKIGYKSDDINAKGVNQLINEYRQKNKIDNRQLPFMTVLYKQILSDTEERFKIDVFEDDKQ |
| | | | | | MLKTIDQFYLKIENDLDNLKTCLKKYLTKENLCNIYIKNDVSLTGISQNLENDWALMKKALEEY |
| | | | | | AATFGLNKAKKEKWLKQDCLSMEDIQNALDNYSGSLEEKKNHRTLAEYFTDFKNGEQDLIEKV |
| | | | | | QQAYENAGAVLTLEKLDKDRHEPKNGREGGRGFLQIEKIKNLLDSIMEIVHFVKPLHLVKGGSII |
| | | | | | EVGDKYTDFYDTFDGLYKNISGVIAIYNKTRNYVTKKPYSTKQFKINFENSTLLSGWDVNKETAN |
| | | | | | LSVLLFKDNKYYLAIMKKDAGEIFNYRSAPNDSEKKRKAKERLRKQIIVDRGEHYKKMVYKQIG |
| | | | | | QIHTQLPRIVFAKRNKNIFNPSSKIVKLYQSDSFKKGDGFSINDLHLLVDFYKSCLKKYPGWQIFN |
| | | | | | FDLSPTKSYENISQFYKEVAEQGYNISFNKIKANYIDEKIKDGELYLFEIYSKDFSPYSKGRPNLHT |
| | | | | | SYWKLLFSPENLNDLVLKLNGQAEIFCRPASLKKNETTVHRANQPIDNKNPLNPKKQSKFGYDII |
| | | | | | KDRRFTRDKFFFHCPVTLNFKSPVTGRFNDDVNMYLKNNSDINIIGIDRGERNLLYYSIINQKGQI |
| | | | | | LEQGDFNIVSNSYKNGGKIETDYRGLLDEREKQRDAARKSWSAIENIKELKSGYLSHIVHKIALL |
| | | | | | MIKHNAIVVLEDLSIGFKRTRFFREKQVYQKFEKTLIDKLNYLVFKNAEAGGAGHYLKAYQLTS |
| | | | | | PFVSFQKLGKQSGFLFYVPSFYTSKTDPVTGFVNLLNTRYASVEKSKRFFEKFYSISYNKSNDYFE |
| | | | | | FSFNYA |
| MG29 | 6540 | MG29-217 effector | Protein | Unknown | MKNILKPFTNKYSLSKTLRFELKPVGATLTNIEKKGLVSEDENLAVSYKKLKKVIDEYHKDFIGL |
| effector | | | | | ALKDLKLNILDDYSDLYYKTIKDEIDKKRFIELQLNLRKQIVDSFSKNASDEIKNKFDRLFKKELI |
| | | | | | QIDLIEWLKSKNDFETIELVEKFKTFTTYFNGFNENRKNMYSVDEHSTAIAYRLIHENLPKFLDNL |
| | | | | | KAYRFIKKSYLDFDFNKIEKELELISVSFDSIFDVNGFNQTLTQNGIDFYNTMLGGLTEGHGKKKI |
| | | | | | KGLNEFINLYKQEKIILKSKEIPSLKVLFKQILSDRESVSFLQDEFIDDSDVLNSIEVFYREEIKEKVI |
| | | | | | DGNTINILETIDSVLKEIESFDTSKIYLRNDTSLTDISQRLYGSWSVVKNALSHYFEEIVKPLNGKK |
| | | | | | RTEKYDKELEQWLGKQNQQFSIKFLQDVCTSYFSSQDEKPLNVNGKEWLEYFKNTGSISNDVNS |
| | | | | | ISFIKRIETAYSAIESFLNVELNSSNRKLVQEQVKVDLLKLFLDEIVTFLHFIKPITLKDSSIEKDDVF |
| | | | | | YSVLEGLYNQLDFVTPLYNKTRNYLTKKAYSLEKVKLNFQNAQLLNGWDVNKETDNTSILFRK |
| | | | | | EGLYYLCVMDKKHINKVFKSPNDFPKNEEEYYEKVNYKLLPGANKMLPKVFFSNKSIEYYAPSFE |
| | | | | | LLEKYKNETHKKGETFNLNDCHDLIDFFKESINKHPDWKNFNYQFSETSSYEDLSGFYREVEHQ |
| | | | | | GYKITFQNIATSYIDDLINEGKIYLFQIYNKDFSPFSKGKPNMHTLYWRALFDENNLKDVIYKLNG |
| | | | | | EAEIFYRKKSLEYSDDIWLKGHHANDLKGKFDYPIVKDKRFALDSFHFHVPITMNFKANEGNNF |
| | | | | | NGQVNEFLKNNKDINIIGIDRGERHLLYLTLINQRGEIIIQKSLNTITNKVKDELVSVDYHKRLDD |
| | | | | | REKNRNNARKTWGTIETIKELKEGYLSLVIHEVAKMMVENNAVVVLEDLNFGFKRGRQKVEKQ |
| | | | | | VYQKFEKMLIDKLNYLIFKDRKDDEIGGVFNALQLTSKFESFQKLGKQSGFLFYIPAALTSKIDPA |
| | | | | | TGFVNFMDTKYYSVEKSKEFFGKFSNIQYNIDKDYFEFEFDYNSFTTKAEGTKTKWKVCTSGDE |
| | | | | | RWRYNPTTKNSERVNVTAELKTLFEKNQIIFKNGNDLKSYIIEKDEKGIYSTLLHLLGLTLSLRHS |
| | | | | | ESGTENDFILSPVFNDSEVFFDSRKATEKSPKDSDANGAYHIALKGLWALRQIDSCDDWKKLKLA |
| | | | | | ISNKEWLDFVQKRPFEK |
| MG29 | 6541 | MG29-218 effector | Protein | Unknown | MKLNNFTNQFPLSKTLRFELIPQGNTLEFINKKGLLEKDNNRADSYKKLKKITDEYHKLFISESIN |
| effector | | | | | GFRLFDLDTYAELYQKKEKDDKDKLTFEKVKGVLRKQISDTFKVQNKYQNLFAKELIKEDLLAF |
| | | | | | VGIEDKPLVNEFKDFTTYFTGFHENRKNMYVADEKATSIAFRLINENLPKFIDNLNISSQILGRIN |
| | | | | | GLAEEFKLALLEMEELVQDTKLHEIFNIDYFNETLTQRGIELYNTVIGGKVSEDGNKKIKGFNEY |
| | | | | | INLYNQLQQDKKNRLPKFKQLYKQILSDRNSTSFVIDNFESDSQLLESIEQFYQSGICHFESDGNSI |
| | | | | | NILIAIQALLSSLANFDLSKIFISNGSSLTEISQKLFGDWSAIGAALGEYYDKEYPSKPKERPDKFQE |
| | | | | | RKEHWLSKTSYFDIATIQLSLDCYQNENVKEKNKPNVLIDFLGTMGTDSATKLNLINIVEQNYAII |
| | | | | | KDLLNNNYPEEEKLGSSKEQVAQLKIFLDGLMNVLHFIKPLNIKSEGLEKDETFYSVFIQLYEQLS |
| | | | | | HVIPLYNKVRNYLTQKPYSITKVKLNFENSTLLNGWDVNKESDNSCVILRKNGLYYLGVMDKLN |
| | | | | | NKIFERNVPKCLVESSAFEKMNYKLLPGANKMLPKVFLSKKGLETYSPSFEIVENYESESHKKGE |
| | | | | | TFNIDHMRGLIDYFKNSISRHPDWKEFKHKFSPTESYIDLSGFYREVEQQGYKITYTNIDESYINH |
| | | | | | LIDDGKLYLFQVYNKDFSPFSKGTPNMHTLYWKMLFDKNNLTDTVYKLNGEAEVFFRKSSISQK |
| | | | | | NRVVHKANESIKSKNDLNLKRQSNFNYDIVKDKRFTLDKFQFHVPITMNFKATGNDNINQNVNQ |
| | | | | | FLKNNQDVNIIGLDRGERHLIYLTLINQKGQILKQESLNVISNEKQEVNYKEILQKKEGDRTQAR |
| | | | | | KDWNTIENIKEIKEGYLSQVVHKIALMMVEQNAIVVMEDLNQGFIRGRQKVERQVYQKLEKML |
| | | | | | IDKLNYLVFKNKSPGESGGLLKALQLTSKFESFKSMGKQSGFLFYVPAWNTSKIDPTTGFVDFLK |
| | | | | | PKYENIDKAKAFFKKFDTISFNNEKNYFEFKFDYKDFTTKAEGTQTNWTVCSHGKERYTWNRN |
| | | | | | LNLGKGGIEIVDITQELQLLFGNVNISYAHGCNLIDDLIIQTNVDFFKKLLRLLSITLSLRHSNGLS |
| | | | | | GVEEKDYILSPIKGKDGVFFDSMKADCTLPKDADANGAYHIALKGLWVLDKINDADDLKKVKM |
| | | | | | AITNKEWLQFVQTKPYRN |
| MG29 | 6542 | MG29-219 effector | Protein | Unknown | MKNQHLFSGFTNQYAISKTLRFELKPVGRTLEHIEKKGLITQDNQRAEDYKEVKILIDEYHKNFI |
| effector | | | | | EKSLDGFALNGLQEYYDLFIKTNLEEIDKKALDKEKDNLRKQIANRFKKIIDKFKSLFAKELIKED |
| | | | | | LIGFVSEENKELVNKFKNFTTYFTGFHENRKNMYVADDKATALAYRLIHENLPKFIGNILIFEKIK |
| | | | | | KDAPDLVSQLNNVLSEMEEIIQGKTLEEIFSLDYFNETLIQTGIDLYNIVLGGRSEDGKDKIKGLN |
| | | | | | EYINLYNQKQTEKKNRQPKLKQLYKQILSDRDSVSFIAEEFKEDTEVLEAIEKFYQGELCNYESD |
| | | | | | GQAINVFNVSKKNLIGNLSSFDLSKVYLRNDRAITYISQQMFSDRSIVGNALQEYYRAQNPQKGK |
| | | | | | EKTENFEKRIDKWVKKSDYFDIQTVQEALSQCSIEAVKEKNKQNAIVNYFADMGLNEEIKMNLF |
| | | | | | DKVIADYKNVKDLLNTSYPENKKLGNQKGKDSDIEKIKTFLDSVMNIIHFIKPLNLKDESKEKDE |
| | | | | | TFYSLFLPLFDQLNKTILLYNQVRNYVTKKPYSTEKIKLNFENSTLLDGWDVNKEQDNTSVILRK |
| | | | | | DGLYYLAIMDKSNKKIFLNAPKADDKKDSFKKMNYKLLPLVNQQLPRVFFAKSRIEYFNPSSKIV |
| | | | | | QNYKNNTHKKGDTFNINDCHALIDFFKASLEKHEDWKHFNFKFSPTKTYQDLSGFYREVEQQG |
| | | | | | YKMTFENIPTDYINEMIEEGKLYLFQIYNKDFSPYSKGKPNMHTIYWKMLFDEQNLKDVVFKLN |
| | | | | | GQAEVFFREKSIKDNIIVHKSNNSIENKNPDNPKKQSKFNYDIIKDKRYTIDKFQFHVPITLNFKAT |
| | | | | | GRDYINEDVNRFLKNNKEVNIIGIDRGERHLAYYMIINQKGEILEQTSFNIISSKHKENKYSTNYH |
| | | | | | ALLEKKEMARDKARKSWDTIGTIKELKEGYISQVVHKIAQLMVKHNAIVVLEYLNPGFKDSRK |
| | | | | | KVEKQVYQKLEKMLIDKLNYLVFKDYEANTTGGVLKALQLANKFTSFDRLGKQSGFLFYVQAA |
| | | | | | LTSKIDPATGFVNFLYPKYESIKKAKKFLDKFDKIIYNNSKNYFEFAFDYNNFTTKAEGTRTKWV |
| | | | | | VCTHGDTRYRYNPQTKTSEEVNITQEIKYLLIKHNIQYENGNCFKNKLIQAEDKKFYSKLLHLLA |
| | | | | | ITVSLRHAKSGTDIDFILSPVADKNGVFFDSRKANDTMPKDADANGAYHIALKGLLALNKISNTP |
| | | | | | DDKLNKVDLKITNKEWLAFAQKKN |
| MG29 | 6543 | MG29-220 effector | Protein | Unknown | MFNHFTHQYSLSKTLRFELKPVGETADYLEDFKSQHLKDFIEKDQQRAEDYKIIKELIDDYHRQY |
| effector | | | | | IEEKLSAPVDPKTGELWLNPEDFEEAYSYYQKLKADQSDPKNRKQWEDIQTELRKKLVKAFTN |
| | | | | | KAGLFKKELITRDLPEFLKRKGQWEENKKVVENFSRFTTYFSGFHENRKNMYTHEDHSTAIAYR |
| | | | | | LMNENLPRFFNNCLAYKHIKDKYNDLPLKINSELQSQLGVTNINDFFQPRYFINLFSQTGIDNYEL |
| | | | | | LIGGKTEENGTKIQGLNEQINLYRQQLQHKMKDEAKADDKKSKRIYDLSGFTHLYKQILSDREK |
| | | | | | ISFIPEAFEDDKQLLASLEEYIATVTDEKEGAIKKLEQSLQKLANADLSKVYIKGAGLTDLSRNMF |
| | | | | | GAYGMITASLSYYADEKLSTKKKPEDYLKQKVYSLDELNHHLIAYIDSKEKDDVLHEQLAKLPN |
| | | | | | PKQPISSYLVSIIKQTQQDVELQTTIDAVKPLLKLESLSKARKAPELDNENDEGAVGFQQVQKIQ |
| | | | | | KMLDGFKSILHAVKLLHLVDGRKPIDMPDKDDGFYNDFAEVYEAYTNLTVTLYNKARNHLTKK |
| | | | | | LYSNDKIKINFDKANLLNGFVESQTDKSYNGTQYGGYLFRKRRDDGGFNYYLGISSKNNLFRFD |
| | | | | | QEISDELSKYERLNYYQAKTNSIYGSSYIGNYGDDKSRLINSVISFLEKNNMEEADNIINGENELVD |
| | | | | | QQKTPTRLFLMILESSQVLLDQVRADKEVNLFERTLMTNLKETLRNFKDKAPALFALRKRDFQS |
| | | | | | IKEFQLAIEEAVTNKSFVYKNISKSEMDEVLINNTMQLFWIYSKDFSEKRIKRRKRIDNLHTLYF |
| | | | | | KALMSGTNDRYDLGKGDVFFRKHSIEKHATHPKGEAIKNKTSNAKNKTSKFNYNLYKDKRYAV |
| | | | | | DKFLFHLSIEINYQKSKSPSSKIFNDQINKTLAQQKETCVIGIDRGERHLLYYTVVNSKGEI |
| MG29 | 6544 | MG29-221 effector | Protein | Unknown | MYFAIRISPWFKALLKLLQIIKYGNYTLLIYFSFIFIGIFIKILTMKNLIDFTGLYSLSKTLRFELIPQ |
| effector | | | | | GKTLENIEKKGLLKQDEARAEKYKKVKKIIDEYHKDFIEKSLNTIKLEGLEYYYDLYLKTNKED |
| | | | | | KEIKEFSKQKERLRKQIANAFKANEKFKTLFLKELIKEDLLSFVSNEEDKADIKEFKDFTTYFIGF |
| | | | | | IIQNRENMYVAEEKATAIAYRLINENLPKFIDNIKIFEKIKNEAPELINQLNQVLSEMEEIVQGKTL |
| | | | | | EEIFSLNYFNQTLTQTGIDLYNIVIGGRTPEENKTKIKGLNEYINTDFNQKQTDKKKRQPKFKQL |
| | | | | | YKQILSDRHSVSFMPESFENDNQLLESIENFYTNELLHYSTEGKSISILEAIKNAVGNLSSFNLSKIY |
| | | | | | LRNDTSLTDISQKVFGDWGVISKALQDYYEKTNPLKPKEKQEKYEERKDKWLKQDIDIQTLQTA |
| | | | | | IDHYENETVKEKNNGNVINDYFAKFGMNNESKIDLLQNVYQNYNIIKDLLNTPFPESEKLGSNKE |
| | | | | | LVNLIKAFLDSIMNVIHFVKPLSLKDSDKEKDESFYSLYTGLYDQLNHTISIYNQVRNYLTQKPYS |
| | | | | | TEKFKLNFENSTLMDGWDLNKEADNTTIILRKDNLFYIGIMDKKNNHIFKHIPEMIDYEPHYEKII |
| | | | | | YKYFPDASKMIPKCSTQLKTVVSHFESNITDKIIEGKSFDSALKITKRIFELNNFVYDDISKTMVLS |
| | | | | | EDNEKRPKMFQKKYLEISKDIDGFKDALKDWINFCIDFLNKYESTKHYSFNFKNSELYNSLDEFY |
| | | | | | GDIDTQTYKITYNNIPVSFIESLVNEGKLYLFQIYNKDFSPFSKGKPNLHTLYWKMLFDEENLNDV |
| | | | | | VYKLNGQAEVFYRKSSIKESNKVIHNANETLTNKNPDNEKATSKFDYDIIKDKRYTLDKFQFHVP |
| | | | | | ITMNFKADGILNINPKVNEFLKNNHDVNIIGIDRGERHLLYYTLINQQGEILEQDTLNIIENEKQK |
| | | | | | VDYHNLLDKKEGTRAEARKDWGTIETIKELKEGYLSQVIHKLTTLMVKHNAIIVMEDLNMGFM |
| | | | | | RGRQKVEKQVYQKFEKMLIDKLNYLVDKSKKANESGGVLRALQLANKFESFKSMGKQNGFIFY |
| | | | | | VPAWNTSKMDPVTGFVNLFDTRYENLEKAKAFFNKFNSICYNQTKDYFEFEFNYANYTAKAEGT |
| | | | | | KTNWILCTYQNRIETFRNTAKNSQWDNREIILTNEFVKLFEQHGIDYKNNNELKSAIVMQTEKAF |
| | | | | | FERLLYLLKLTLQMRNSITGTETDYLISPVANDEGEFYNSRNANNKLPQNADANGAYNIARKGL |
| | | | | | WCLQQINKTDDLKKIKLAISNKEWLQFVQNNN |
| MG29 | 6545 | MG29-222 effector | Protein | Unknown | MEDNNKCIWNEFTNKYKLSKTLRFELKPIGKTLENIKEKGLIEEDKKREKDENKIKKILDNYYK |
| effector | | | | | DFIEISFSKIELNIKDLEEYSEIYNKLKKEKINIELQKKYKKIQDKIRKDTYNKIKTIEPYNKLFKGE |
| | | | | | ILKNILPKWLEKNNYSEDDINLVKSFEKKWKTYFTGFFENRKNVFSEKPIPTSIIYRAINDNLPKFL |
| | | | | | DNLDKFKKIQELDDFSYNSVEEQLSEKLNNTKLNNFFTLDNYNNLLNQKGIDLENLIIGGKSENE |
| | | | | | QKIQGLNELINLYSQKITDKNESRKIKKLKMLPLFKQILSDKESFSDKLEPFKNNKEVIDSINEYYT |
| | | | | | NIYLKNYNKLIELINNINKYDIKQIYIKNDSSLKTISKQILGDWEKIHIGLKEFARKELNINNNTKIN |
| | | | | | SFLKQKYFSVYEIEESIKLLKIDNKQSIYDYLSNFYKKINKPEDNKKNKLITDIEEKYNLFKNIEYN |
| | | | | | NLNRFSNQNIEIIKDFLDSIMDLIHFIKPLYIKNNVKEDDKHQEAYEVDSDFYNQFNDIYKEQLSQI |
| | | | | | IPLYNKTRNFISKKLSSTKKFKLNFDNSNFLKGWSSKFETNSALILRKKNNYYLAIVPKKLNEEEI |
| | | | | | DKLKDFNSLNKIEVLNYDFQKADNKNMARTFIRSKGDNFAPSVEKYNLPVEKILDIYDNGYFRTN |
| | | | | | YREKNIVKFKESLIKLIDYFKEGLKKHESYKHFDFKWKESGEYKDISEFYHDVEVSCYNPSFYEV |
| | | | | | DYNYIENLMEEKKIYLFQIYNKDFSKYSKGKPNLHTIYWRELFSKENFNNIVYKLNGEAEIFFRE |
| | | | | | KAIDKNKTTIHNKNELINNKNPINNKKQSIFEYDLIKDKRYTENKFLFHCPITINFKAKETGTNLH |
| | | | | | KQVN |
| MG29 | 6546 | MG29-223 effector | Protein | Unknown | VEKIRLFLESLLELFHFIKPLKIEEPRKGDKELQGAYEIDSDFYNEFDEIFEKVKGIIPLYNRVRNYI |
| effector | | | | | TQKPFSTKKFKLNFENSTLLNGWDENKIKDNFSVIFRKRNERGQYEYYLGIITPKDKTVENNLEP |
| | | | | | CDSGDCFEMVKYKLLPGPNKMLPKVFFSAKNIEFFNPSEEILSIRNHASHTKNGNPQEGYSKNDF |
| | | | | | NLEDCHKFIDFLKDSLNKHEEWKLYNFRFKETVKYNDVSEFYKDVADQGYKIEFINVDKSYIAK |
| | | | | | LISEGKLYFFKIWNKDFSEYSHGKKNLHTIYWEQLFSDENLKDVVYKLNGEAEIFYRRKSIPLQIT |
| | | | | | IIPKNNPIINKNPINDKETSEFNYDIIKDRRYAVDKFLFIICPITLNFKAEGNGRDMIIRRINMIIIQES |
| | | | | | NEDINILSIDRGERNLAYYTLLNSRGEILVQESFNIISDELRRRFNYLELLSKREGEREEARKQWK |
| | | | | | NMSNIKELKEGYLSHIVHKIAKIAIENNAIIVLEDLNYGFKRERSKIEKQIYQKFEKALIDKFNYL |
| | | | | | MFKERNANETGGALRAYQLTNKFESFKKLGKQSGILFYVPAANTSKICPRTGFVNLLWPKFENI |
| | | | | | KKSQDFFSRFKHIKYIADEDLFEFKFSYSDFNMRSYTGKVKLDEKADSWIVYSNGTRLVNYRNKD |
| | | | | | KNSNWDTKEVYLTKEFKELFEKEGINYEGREDIKAEIANKDSAEFFKRAIELLRYTVQLRNSRIG |
| | | | | | SDEDYILSCVKDKNGEFFDSRNAKEGEPKDADANGAYHIGLKGLMLLERIKKASNPGRINLKIER |
| | | | | | NEFINYVVNKRS |
| MG29 | 6547 | MG29-224 effector | Protein | Unknown | MSKIYQQFTRLYKIQKTLRFGLKPVGETANAIDDFKSQYLQDVVQEDGQRAEDYKVVKDLIDDY |
| effector | | | | | HRVYIEEKLSQPVDRATGEMWVTPEHLEAAYYDYQNLKNNDPKDNKIKKAWAETQKSLRKKL |
| | | | | | VKSFSDNSDLFRKKLITRDLPAFLKVQGKWEENEKAVKSFNKFTTYFKGFHENRKNMYSDEDQS |
| | | | | | TAIAYRVMNENLPKFFNNYLSYQKIKDKLKFSVEKELFTKMGISGIGDVFQPRYFIKLFTQSGLD |
| | | | | | NHQELLGGKTNEDGRKIQGLNEQINLYNQQQSDRQNKLPRFTSLYKQILSDREAHSFIPEVFKDD |
| | | | | | QELLKTLQGYIEKATKKEGLLDNLEKSIALLSTADNEKVYVKTVGLTDISSALFGSYDIIGAALSH |
| | | | | | HAENTAHQNHTKKPASKTLIKKRESFCKQDVFSTAKLDEMITAYIAQLEKTDPLHQQLKKLKTP |
| | | | | | KRPIQIYFLEAFQQAKKEYGFDACIKNITPLLSLESLSKKRQAPTSEGEQGDKGYQQLHSIQKML |
| | | | | | DAFMAISYKLKPLHLVKGRKAIDMPDMDMRFYTKFSESYEDYSDTIINLYNKVRNHLTKKPFSK |
| | | | | | DKIKLNFGNPTLLDGWDANKETDNSSLIFEKDGFYYLGIMHPKHKDLLNYITGIDDIGNDKKTK |
| | | | | | KKELLKKNIEANKNEQHYRKIVYKLLPGANKMLPKVFFSGKRQDYFSPSSEILRIRNSASHSKNG |
| | | | | | NPQEGHAKAEFNIDDCRKIIDFFKVSISKHPEWRAFDFQFSPTQNYQDLSDFYREVEQQAYRVDF |
| | | | | | DLIKQSYIDECIIKGKLFLFQIYNKDFSPYSKGKPNLHTLYWKGLFDPENLKDVVLKLNGEAEVF |
| | | | | | YRPSSINVADRTIHRANEAIDNKNKEFHRKSTSTFAYDIIKDRRYTQDKFQFHVPITLNFKAQGKP |
| | | | | | HFNDTVNLELRNKKDTHVIGIDRGERHLLYYTVVNSKGEHIEQDTLNNISTDQGYAIDYQNKLHK |
| | | | | | REKERDAARKSWSHRKYQRT |
| MG29 | 6548 | MG29-225 effector | Protein | Unknown | MKEDIKTKIDIWDDMTNQYSLSKTLRFELKPIGRTLENIQYIIEEDKQRDKDFQEVKKIMDKYYS |
| effector | | | | | HFISRVLNNKIKISRDSLDEYKEIYFNLKKKIHDNDLKKQLELVQKKITKNISLMIKSDEDFKNIFG |
| | | | | | KEFVKEILKKYLEEKGNQSELELVSKFNDWTTYFTGFYDNRKNVFSDKDIPTSIIYRIVQDNLPKY |
| | | | | | LDNLYNLEQLDKYDIDFSYLNENFGGSIGNKDLKEYFGIENFNEFLSQDGIDKYNYLIGGYSKDM |
| | | | | | KDKVKGINNIIQEYSQQNKEDSDIKKLKFTSLYKQILSDKDEKISFRFFNFNSVDEMLKCIDIFYNK |
| | | | | | LNDENIFENLNFLFDDLNSEIYDKNKVFIKKNKLTFLSNELFGNYSVINYLLKEYVMKNYKDYNT |
| | | | | | EAKFEKWFKGKELFPLSLIEISIARVFDFFDSNSSEIKRFQNIVGVNFINPISFYLTQFKTEGENLFE |
| | | | | | EIKSNYEAYRNLLSSNILDKQNLSQEEKEIKSKQVEILKSFLDSILKLNSFVDIFSTYNVKKDIVEKD |
| | | | | | NDFYNNYEELLLCISEVISIYNQVRNYITKKKTDIKKFKLNFEKSTLLDGWDVNKESANLSVVLRR |
| | | | | | NGKYFLGIMNKKDNKIFDKILPEFITSNNESFEKMEYKLLPGPNKMLPKVFFSEKNIKYFNPSQEI |
| | | | | | IDIRNYSSHSKNGEPQKGYSKKDFNLDDCHKMIDFYKESIEKHDEWKSFKFNFKPTQEYIDLSEF |
| | | | | | YSDVSSQGYKLDFLGISNKYVEKLVEDGKLYLFQIYNKDFSNYSKGKKNLH |
| MG29 | 6549 | MG29-226 effector | Protein | Unknown | MLQNFTNQYQLSKTLRFELRPVGKTKEHIEAKGLIIQDEQRAEEYKEMKKIIDRYHKAFIEDALN |
| effector | | | | | GIAIEGLETYEKLYFAIKDEKGKKEFEKLQDTLRKRIVELFKKIIPKWSTLFKKELIRNELLTFLD |
| | | | | | SEEIPEEQKINEKEIVLKFVDFTTYFTGFHENRANMYIDEALHTAVAYRIVHENLPVFLGNKKTFE |
| | | | | | QIATKYPELIADSKDAIESHLFGAVFEDMFTLAYFSHTLAQNHIDLYNTMIGGKVSNDGSKIQGFN |
| | | | | | EKINLYRQKHGLSKRDLPNLKPLYKQILSDRESLSWLPEAFEDKNELAEAIKTFYQNNIIAFECCD |
| | | | | | GKVNLLEKFPEIFKENQYYDLSKIFIKNDKSLTDIAQAIFGKYGVIKEALWEKHLRDNPKAAKSK |
| | | | | | DISADEERFFNKKDTYFSINDIHIALKEAQSPSDILTYFSNEIKPLTKAVQVAYKTWLDDQEKTERI |
| | | | | | KEVMDALLAWQRFLKPLSVKSDVDRDIAFYATFESYFESLSAVVKLYDKVRNFMTKKPYSLEKF |
| | | | | | KLNFENSTLLDGWDVNKETDNTAILLEKNGLFYLGIMDKKHNRVFKNTPESQDDSSYRKINYKL |
| | | | | | LPGANKMLPKVFFSNSRIDEFAPSSDIISNYKKGTHKKGEIFDLEHCHKLIDFFKSSIQKHEDWKN |
| | | | | | FEFKFSDTASYKDLSGFYREVEQQGYKITYKNISQSYIDTLVSEGKLYLFQIYNKDFSPYSKGTPN |
| | | | | | MHTLYWRALFDEKNLADVVYKLNGQAEVFYRKKSIIYSDEVMQKGHHAKELVGKFDYPIIKDR |
| | | | | | RFAFDKFQFHVPITLNFKAQGYTNLNAIVNEMIASGKEDIKIIGIDRGERHLLYLSLIDAQGKIVE |
| | | | | | QYTLNQIINSYNGKDHVINYHEKLAKKEDERAKARVNWGTVENIKELKEGYMSHVIHRIATLMV |
| | | | | | EHRAIVVLEDLNFGFKRGRFKVEKQVYQKFEKMLIDKLNYLVDKKKSPNELGGVLNALQLINK |
| | | | | | FESFEKMGKQNGFLFYVPAWNTSKIDPVTGFVNLFDTRYASVEKSKEFFGKFKSIRYNSEKDYYE |
| | | | | | FEIDNYTQFNPKAEGTRQNWTICTYGDRVLTYRNSEKLNQWDNKTVQLTDGFKTLLNGQADNL |
| | | | | | KEYIVAQNDKAFFEKLLGLFRLTLQMRNSITGTDIDYLVSPVVDENGVFYDSRVCDDTLPKDADA |
| | | | | | NGAYNIARKGLMVVKKIKEAQDIKKPDLKITNKEWLQFAQR |
| MG29 | 6550 | MG29-227 effector | Protein | Unknown | MGVNTVWNEMTGIYPVSKTIRFELKPIGRTLEYINSKRLLEEDEQRAKDFLEVKKIMNDYFRELI |
| effector | | | | | KTYLANVELDKNLLEQFKEAFIRLKGNKSDSKLKKEYKEFANKLCKELHDNAKLGELEKIKEK |
| | | | | | NFFKPLKEWLKKNNRDEDLKLVISFDGFLIYFRGFFENRKNIFKVPKKDNEDAISTSIVYRTINEN |
| | | | | | LVLFLDDLLKFEELSKLGIDFSEVEENFKEELGGKKLTEFIALVNYSSFLTQEGIDKENLIIGGKTT |
| | | | | | ENGIKLKGINEIINLYSQQKGDKSIRKKKLKQLYKQILSKSNKPSFIPEKLKDDREFIDVIRSADKR |
| | | | | | SDFREIRELFNNLNNYDLNEIYIKRDDLTKLSKDLFSNEEYLNKLIIEYRFAEKTDKQKETEFKKQ |
| | | | | | DYFSIKEIEDAINNEKGLFDLDEDKENFKDKISNNSEHPIVGYFQRFYFKGEDLLKNIEDSYKAVE |
| | | | | | EILERDYSNGTKEFLQQNKEREVEKIKLFLDNSLNILHFIKLLNYKKGKVGSYATLDVDSDFYEG |
| | | | | | YKVDEKEIKGFFWFYNSIKEIVNIYDKARNYVTQKPFSKNKFKLNENNSTLAAGWDKNKEVDNW |
| | | | | | TALFRKDGRYFLGIMDKDSNRLFKEISKNENDDFYEKVEYKLLPSPSKMLPKVFFSDKWKQEHK |
| | | | | | ISEEILKIYENRTFMKGDNFRLEDCHKLVGFYKESIKQHHEWDLYFNFKFKDANKYSDIGEFYRD |
| | | | | | VQNQGYSISFANIDSEVINNYVDKGKLYLFQIYNKDFSENRSEKNKNSKKNLHTLYWNALFSEEN |
| | | | | | LKDVVFKLNGEAELFFRESSIKKEDKVVHKKNEFIKNKDPINGKIESKFSYDLIKNKRYTEDKFFF |
| | | | | | YCPITINFKANGNEKTLNKKVSETIKKNFDGIKVLGIDRGERNLAYFSLINQNGEIEKQDSFNIVLD |
| | | | | | KFNRKNNYLEKLDKKEGQRNEARKNWTKIENIKELKEGYLSQVVHQVVKMAIENNAIIVFEDLN |
| | | | | | SVFKRGRFKIEKQIYQKFEKMLIEKLNYLMFKDIENNKSGGLMKAYQLTPKFYSFKKLGKQTGI |
| | | | | | LFYVNANYTSKIDPKTGFVNLLYPNYENEKQAKEFFKKFDSIKYNKEKDYFEFKFDYKNFKVEE |
| | | | | | KNLPKKSKWVVCSYGERLHQEKDPKSKAWNTVKINLTERLKELFNNSKLDYYEGEDIKEEILKQ |
| | | | | | NNAKFFKELVFLLNKILQIRNSYTSGELRKKIEKRELNFESEGDYILSCVHDKNGEFFDSRAAKEG |
| | | | | | EPKDADANGALNIARKGLIILERIKESREKPDLKIENKKFFDFVNERFN |
| MG29 | 6551 | MG29-228 effector | Protein | Unknown | IKSALEFYYENEIDPEFEEKLKNAKSINKSKKISKEKDSWMKDYVTIATVQKALDVYIESLDTKHD |
| effector | | | | | LRDVYSESLITKYFTNYFKTRLTSGEEVDYIYNIGQKYKAISGILKTKDEDVLKKESVVDQLKDFL |
| | | | | | DSMIDLNRFVQPLNLPSEDLESLSCKDEIFYSDFAPLMEQLNKIIRLYNMARNFITKKKSDEKNIKI |
| | | | | | NFENATLMFGFDINKQYDNSAFILRKNGLYYMGIISKTCKKFIFDDMPRIKDESNAYEKMNYKLI |
| | | | | | NNAYMSLPHVFFSKSRAQEFKPSEEIERIHLTKTFKKGDNFNIKDCHKMIDFFKESIKKNHDWNV |
| | | | | | FNFKFSPTESYNDISEFYREVDIQAYKVWFDEKISDSYINTLVEEGDVYLFKIYGKDFSEHSKGMP |
| | | | | | NLHTMYFKSLFTEENLKDVVYKLCGNGEIFYRKVLIKKEDTITHPANEEIKNKNPLSENKVAIFN |
| | | | | | YEMKKDKRFTVEKYFLNIPIELNFKADGHENINNKINNIIRNNEYANKLSMDRGERNLIHIIVRNQ |
| | | | | | KGETLESIRLNIINNADYKRLLKERENERKTARKGWKTIENIRNIKKGYLSQAVNVVVSLVRKHN |
| | | | | | AVIFMEDLSFGFKNGRKHIETQIYQGFEKALIDKLSYLVFKDKGMDSKEPGGTLNALQLCNKFK |
| | | | | | TFKEMGKQNGIIFFVPAGYTSKICPATGFVNLLKTKYESNKKAKFFFSNFDYIKYNKDKDYFEFS |
| | | | | | FDYNNFIKSNDENSLRNTKGAITKWVACTYGDLRYKYNRNTKASDEINVTQNIKSILDKFNIPYK |
| | | | | | NGKCFKSSLIEKDEKDLFCEILQMLSLTLSLRYSKTGTDIDFILSPVANKNGVFFDSRNATNAMPK |
| | | | | | DGDENGTYHINLKGDWVFEQINKTEDSKKPNLYLRNNEWFAYAQSKCNEIDNAPNWNYRIKKE |
| | | | | | VSKKKTSKKNKKEVVVKK |

mN: 2′-O-methyl modified base N; fN: 2′-Fluoro modified base N; *: phosphorothioate linkage; N: standard ribonucleotide base; AltR1 and AltR2 refer to IDT technologies′ proprietary 5′ and 3′ AltR modifications

[0320] While preferred embodiments of the present invention have been shown and described herein, it will be obvious to those skilled in the art that such embodiments are provided by way of example only. It is not intended that the invention be limited by the specific examples provided within the specification. While the invention has been described with reference to the aforementioned specification, the descriptions and illustrations of the embodiments herein are not meant to be construed in a limiting sense. Numerous variations, changes, and substitutions will now occur to those skilled in the art without departing from the invention. Furthermore, it shall be understood that all aspects of the invention are not limited to the specific depictions, configurations or relative proportions set forth herein which depend upon a variety of conditions and variables. It should be understood that various alternatives to the embodiments of the invention described herein may be employed in practicing the invention. It is therefore contemplated that the invention shall also cover any such alternatives, modifications, variations or equivalents. It is intended that the following claims define the scope of the invention and that methods and structures within the scope of these claims and their equivalents be covered thereby.

The application's sequence listing, which the Patent Office published only in electronic form, follows.

SEQUENCE LISTING (6965 sequences)

SEQ ID NO: 1 - protein, 1235 aa, unidentified
  REGION 1..1235: note = Category: MG11 effectors
  REGION 1..1235: note = Description: MG11-1 effector
  source 1..1235: note = uncultivated organism sequence
MLDKFASLYPVTKTLRFRLLPQGRTEENMQAAKVLENDLERSEAAAVVKGLIKKYHLQFISDTLSGSTLSWQALTETLDKFKADHTATAELDSALAAYRCKLAELFTKSPKYKVMATPVSIIKEILKTETDPENIAALNKLNGYTYIIFDYVSTRMLTYSADAKATSLAYRLVDENYLRFYQDISAAAEISAVLEEAGLDNAEVEAFIRTDYNTCLTSEGIASFNAAAGSINQFVNQLLQQNPVLQSEPALRRHLQPLYKMLLDEAESKIIKFEDYGQLRDAVENFRRNFQYLPQSLIDIFAGRYDYSKIYVGYKYLNEASSQIAGGYNWKLLENALEDFYSKPYLVNGKMPVKYKTVVNKKMNQLAYSFTELQEALDAGESGSSITDLFGKYAELHAAYAAADGNVFYKEYDRKSIASLKNYLDAVNAIARFIKIFAVPEVYVKDEGFYGIVDGAADKLRDFDLLYNMVRNYITKKPYKKSKVALTFNSSSFGRGWDENKIYDELTTIFTYNGKYYLGVINKNDKPDLAAAVSKDEGGYKRMVYKTFDIVKQLPRLSFTKAVKAHFEESDEDYIFDGPKFAKPLRVPKEIYLQSFTDNGDKLVDSAKKYTKAYLDMSGDYKGYYEAIVKRIDYTKEFLSAYKSTSIYDLAFLKPADQYEQWSNFTDDVQTALYKIRWDNIPAAAVDEMVESGKLYLFEIYSADLYKNPAEGRKIDTQAQIFKEIFSENGQKVIKLLGNCEVYFRPASLPAVVTHPKGSILVNKQLVNGKTLPDEVYREIYRYLNKKSENLSPLAKQLLDKELVKYRVAQEDIIKDKRFTENQYSFHLPVTLNYKVKQQFYINMEVMNMLRSRKDINILGINRGTRNLLYVTVINQQGEILYSRSLNEFNGVDYRDKLLVKERGIKDAAMNWQAADSIKNIKEGYLSRALGEIVRLMVKFNAICVVENLSSNFRNAGGGIFAYGNFYKGFETNLIKKLNCLIIKNAEKDKAGSVLRSLQMTRSFESFEKAGRQSGWLFMLDPAYISAVDPLTGFVNLFSFRNLKTIRQKAEFLQKFKSINYVPETKAFDFVFDYKDFGVAVCGPVSCWVATSDVERIVKTTENGKVKFESVLPSMQLAKLFTDKDIDFTDGHNLISEITADSRLVTETLSIFMNIMRLYNYDIDRNNDYVSSPVMGRFDTRYDKKLHNPDELAAYNMARKGLMIIKRAQASEKDSKVDLFIKNADWFSFLQTGNI

SEQ ID NO: 2 - protein, 1223 aa, unidentified
  REGION 1..1223: note = Category: MG11 effectors
  REGION 1..1223: note = Description: MG11-2 effector
  source 1..1223: note = uncultivated organism sequence
MSINSFISNTKVFTGQPVSKTITAKLVPVGKTRENIDKMNILEMDKQREEAFVQVKKYIDRIHKDFIEDCLTSQDMGLGIAIHSYEFNKLYELRVNLKNLTGKERKDVQKQIKLEENRLRVLISKYFEFNPKYKKLFNIELFKELLPAYCSEEEMKDVNLFDGYTSYFKRFNDTREMLYSSEEIHNAVAYRIINENYPVFVDNKLSLEYISTYFHELFDFSENGQKLFHEFADFCDSSYGMSSKYIAKYNSFISGTFDEEGKQITRGLNQLINEYIQKNKDAHVSYFKPLYKNIMSDKKPLFSVSCFESTAEIKDAVISYNESICKPHERFISYITKSFPADFWCVDKKNLNRLSHIICSNPFTLDNLVSASNKFSKKKPDIYCASDFKELLSENILEETEFHFDFLKYKDYLVQFNPNDFYSKIPFDKINDLQYDKKQSLELKEYLQAALDYYNMLRILHIDTEDERIISKEISYDEQYYAELSLILDAMEPIVKLYNKVRNFVTKSVKQEKKIKLNFNCSQFLGGWSESQEKVKNGLIFHDEEEDKYYLGIYNQNMKKPDINYTSDSSFKKMVLNTIPEPYKMLPKVFFSKKGLETYKPCEEIIEGYKNELHKKSNSNFDINFCHKLIDYYKVCIKQRKEWDCFTFDFKPTEEYQDTSGFFDDVSKGGYSLVMKGIDKENLMNAVEEGSIFLFEIYNKYLAKKGHGKDTYTQLLRTALCGKESNIQFCAGAQVYYRPALLEKEVTHEKGSVIVNKITREGFTINSEVYENIYSYFNYQTPLSSEAKTLLDSGSVIYKTADRDLIKDRRYTEESFSFHCPVIINWKGKEINPFTFNKKVLEVIRNDESLNILSVNRGENNLVYVVLMNRNGKVLLDKSFNLIQTGKQNINYKNKLIEKSKERANSRTNWQEINGIKDLKSGYLSFIVAEITRLMIDNNAVLVLESLSSDFKSGRQFIESNIYQQFEEALLTKLACVILKEREAGTPGSLEHPYQLVPKFESFEKIYLQFGFVFFVNPSYISKIDPANGVFNFFNFNVLTNNEKRTEFFKKFESITEENGKLVFEYCPGNFNKDFKEIDRTFRVVASGSRNVWNPKTKTFESIDLELEGHAVYENLYQVNYRNIAELFKDKCNASCLPHPAATERLLRVFIAAVSFRTFVLDDWKYVSPLGIDNEFTGKSMDYIAAYNLANKFRTILELSSDSEYLINIKTAEYVNKINSANP

SEQ ID NO: 3 - protein, 1264 aa, unidentified
  REGION 1..1264: note = Category: MG11 effectors
  REGION 1..1264: note = Description: MG11-3 effector
  source 1..1264: note = uncultivated organism sequence
MEQFTNLYQLQKTLRFDIIPTEETLEILKEKGVKKSDKKLLEADKKRDSDFHDAQKVIDRYHRYFINSTLDAIKNDSEIIDKLRNCSNERGKDELRKIISDYFQKDSQFNRLFGKELFAKKNEKKDVEDSPLFTYAKTKNEKNALESFVNFTVFFKRYNENRKNMYVDKKQTTAIAYRIANVNLPKFEENNNCFLEIKKTKLMEILNKNRQLKKLLKGKKCEEVFRLDYYINVWKQTEIDEYNEIVGIINTNIKQYNDTLSGKKKSELPLMKKLHKQILGFKEEDKNKWEYRGFDSDKEMLTAVREFYSTYELKIKEKLRQLLETINDFDLSGIHVHQKSLRTISSFMFDDGYAIARFLIPQKSDETYEDYKDRIKKGNKSFTIKGINKKANTDLCQYFSKHSFIKVNEDDEKREEKEIFETINIAYENAKEIIDNANNYTEKNLAGSGDEQKLRTLLDNLKALQHFVQPLLGKGDEKKRDCSFYNKFMELWEDLLPLNILYDKVRSHMTKKPFSKEKIKVIFDVKKDFLNGWTDNMTKSDNGTQYGGFLFRKKNSIGEYDYFLGICKKAWILRKREGVSGDYERLDYYQINSRTFYKYYYYGENGFEEDKNSLMKAIKAYLEITAQDEDDRDLLEDVKAKDTPIAMITIIQERSQSKLSELLNDKCFADINKTVIENLRKSILSLSRIPEAQDYKDKEYYLFSDIQQDIEELCRTKRIFDYFYVCNEEIRDAQNNKESPLLLFKISNKDLSYADTSSEGKRKSRGTENLHTMYFKALMEGKQNVFDLGSGQIFFRESSLKRKVTHPAGIPIDNKNELVCKQRPTRILNYDLIKDKRYTIDKYLFHLSVKINYPQKELPKPENKKSVNDFIADFNKKTIEYLRQNKQDINIIGIDRGERNLIYVSLINAKGEHVTSDFPRSYNLINNFDYQKKLKQVAKNRDEERKNWTIPEKITDIKKGYLSQVVHEIASLAVRHHAIIVMENLSRGFKHGRFPIEHQVYQLFENMLIEKLSYFAFKKDWPSKEYGNIKNGVQLAVPMNKEDWVNQNGWLFYVPAGFTSKIDPATGFVNLFNMSKPLDNLKEFFGAFDEIAFRNGLFYFKFNYSKETFHKIRKDFTNEWTLTSHGERIEKKRPEDLTSKFKSFFAKTDVNIPLENVSVESVCSLSEDNLKELWGLFKLMLKMRNSSDDQDFIISPVASETPFVTGPENYMQIANADANGAYNIALKGLYWLYYNFPTDEKGYLKYIKDEDWFRFIQTKPYCNK

SEQ ID NO: 4 - protein, 1275 aa, unidentified
  REGION 1..1275: note = Category: MG11 effectors
  REGION 1..1275: note = Description: MG11-4 effector
  source 1..1275: note = uncultivated organism sequence
MKDLKQFIGRYGVEKTLRFELEPVGKTEEWMNLANDKERADKYAFVKELIDRYHKVCIRESLAECDFDWRPLAECLETCRKSRNKDNLDALNNAQKELRSKIAQKFHLFKDFAQLTASTPDKLLKNILPNCVRSKSQPEFSDIESIDNAIKSMSMFDGFASYFEGYQNSRKNLYAANIISSSVAHRVVHENFPKFLSNIKVFENIRVVCPEVIERCAAELGQYLNGLQLDEVFSVDYYNKVLTQGGIDLYNTIIGGVSEKEGESKHQGINELVNLFLQSHEMGGSQKNALTMVPLFKQILSDKKSYSYITEEIKEENELISVIQGYHSHISSFYFNGKAINILEELQHLLDNLCSYNLEGIYVENKKLNTISNKLYGNWSELRFRLTDHLTSQGMKKATIEKFFKKETFSLAELNLSSRDILKLFADLKQCTKGINRFWKDFEERNKKSMPKKYKESNKGIEIVRMLLESYKKFISICSLLDVENEGDSDTNFYGIFTPLITEMQDIDTLYNKARNFLSQKPSDKSKYLLKFDNCICANGWDAPQTKSVLIFRRQGMFLLGVVDNNHRSCLNGISHHQPVSVDDQIEYLVYRQGGHMDQNLQTLMVRDGKTVMVKGKRDENGENQELERQLKELLPPDIYRIRKSQSYINNSDNFCKEDLTLFIDYYKQRAKEYYAQFEFEFKESCDYASFKEFAEEINSKAYRIAFLPTSYKSLASLVNAGELYLFTIKNKDYEPGAHGKKNLHTLYWEQLFNQENLHNLVIKLNAKSTLFCRPQVIKAPTSHKKGSMLLNRKDKDGMPIPEPIYQQLYKYVNGKIREDGLSDDAKAYLDKIIAKEAQYTIIKDKRYTKQKYFIHISTTLNANATNATGINEDVWDYLRDNPDVNIIGIDRGERNLLYLTLINQKGEILLQKSLNVINGFDYHAKLEQREKERDEARKSWQTVGNITDLKEGYLSAAIHEITTMMIENNAIIVLEDLNRKGFMPKRFKFEKQVYQLFEKKLIEKLNYLCSKDIAPTESGGVLRGYQLTEKFVSFEKMTKQNGFLFYVRPDYTSAIDPVTGFVSHFGFKDIRNTKSRKDFFEKMESIIFTNGHVEFVFDYSAFKPKEKDYQNRWTISSVGRRIVWDKQSKLYSDYYPTNIIVGAFADRGIALEEGTDIKALLAGIDDSAHNAEFYNILFEAFKRTVQLRNSNSETGEDYILSPALHDGKQYSSLEERKKWDEGAEMSQLPIDADANGAYHIALKGLYLIMNPQEKKVDNEKWFRFVVEKPFMDKF

SEQ ID NO: 5 - protein, 1284 aa, unidentified
  REGION 1..1284: note = Category: MG11 effectors
  REGION 1..1284: note = Description: MG11-5 effector
  source 1..1284: note = uncultivated organism sequence
MKDLNKFIGKYKVEKTLRFRLEPIGKTEAWMESKGVIANDKRRADNYAIVKNLIDRYHKVCIRESLTGCNLNWTKLSEAVETYRRCQDTESRKALQKCQDEYRKKIAENFLSFRGFAELTAPSPSVLIKDTLPYNITSKVHPEFSDIGDVDSAKQALLLFEGFAMYFESYQKNRSNLYTAKNIASSVAHRIVHDNFSKFLANIKVFENLRVIYPEILEQCSTELKQHLKGKQLEEVFCVEFFNNVLTQEGIDFYNTVIGGVSGQEGERKCQGINELVNLSLQKENQGRGKRTALTMVPLFKQILSDRNSYSYIPERINDEEELISAIRAFHAHIESFYLNGREVNVMEELLKIVENINCFDPNGIFIDAEKLNGVSKKLYNDLFELRARMTSHLEEQNLTKKNIEKFFQKDAFSITDLCLDKKHSLAKYFSGLKGVNKAIDQKWKQFETRNNKDGQKKYKDSHAGIELVRILLDGYKEFFAVCSILDVDSDNNLDNNFYGVYTPLFTELRGIIPLYNQVRNFLSQKPSDDKKYLLKFDNSKCSNGWDSPQTKSLLIFRRQDRFLLGVVDSENRSCLNDLTTYTPVSPDDRIDFLDYSQGGHMGQNLLTLVVRDGKTVMVKGHKENGENPELERQLKDLLPPDIYRIRKSQSYKNESPNFSKEDLLLFVGYYKQRAKEYYSHFNFTFKDSCDYASFTELVEDIDEKAYQIKFVPTSYKTLQRLINEGKLYLFDIKSKDYEPGAHGKKNLHTLYWEQLFSQENIENLAIKLNAKSTLFCRPQVVTNPMTHKKGSMLLNRKDKNGQPIPEPIYQQLYKYVNGKMAESKLSDEAKGYLGKIVAKEAQYAITKDNRYTKQKYFIHFSTTLNANAPKTADINEDVLNYINDNPDVNIIGIDRGERNLLYVTLINQKGEILDQKSLNVINGFDYHTKLEQREKERDDARKSWQTVGNITDLKEGYLSAAIHEITTMMIENNAIIVLEDLNRKGFMPKRFKFEKQVYQSFEKKLIEKLNYLCSKDIKPTANGGVLRGYQLTEKFVSFEKMTKQNGFLFYVRPDYTSAIDPVTGFVSHFNFKDITNTQGRKDFFEKMESIIVRNGHIEFSFDYRKYKPKDKDFKNIWTVCSSGKRILWNRDSKEYADYNPTAAIIEAFASKGVTLEEGTDIKSLLSEIDGSTANAEFYRIMIEAFKRTVQLRNSNSVTGEDYILSPVIHDGKQYSSLDVLKEWKNAGGHSIPSLPKDADANGAYHIALKGLYLMMNPQTKQIGNEKWFKFVVEKPFKEEKSIG

SEQ ID NO: 6 - protein, 1282 aa, unidentified
  REGION 1..1282: note = Category: MG11 effectors
  REGION 1..1282: note = Description: MG11-6 effector
  source 1..1282: note = uncultivated organism sequence
MKDLNQFIGKYKVEKTLRFELAPIGKTEAWMESKGVIANDKRRADNYTIVKSLIDRYHKVCIRESLTGCDLNWTRLSEAVETYRRCQDTESRKALLKCQDEYRTEIAKRFLSFEDFAELTAPSPSVLIKEILPYHVTNKVHSEFSGIDDVDNAKQALSLFEGFAMYFESYQKNRSNLYTAKNIASSVAHRIVHDNFSKFLANIKVFENLRVIYPEIIEQCTNELRQLLKGEQLEEVFRVESFNNVLTEEGIDFYNTIIGGVSVQEGEKKFQGINELVNITLHKENQGRGKRTALTMVPLFKQILSDRNTYSYIPERINDEEELISVLRAFHSHLASFYLNGKEVNVMEELLKIVENINHFDPNGIFVDAKKLNGISQKLYDDLFELRAKLTSRLEEQKQTKKNIEKFFQKDAFSITELSLDKKHSLVKYFTGLKDVLKAIDQKWKQFETRNNKDGQKKYKDCHTGIELVRILLDGYKEFFAVCSVLDVDGENDLDNNFYGIFTPLLTELRGIIPIYNQVRNFLSQKPSDEKKYLLKFDNSKCSDGWDAPQTKSVRIFRGQGKFLLGVVDSENRSCLNDLSSYTPISSDDQIDFLDYSQGGHMGQNILTLVVRDGKTVMVKGRKENGKNSGLERQLKELLPPDIYRIRKSQSYKNESPNFSKEDLLLFVDYYKQRAKEYYSHFSFTFKDSCDYASFTELVEDIDEKAYQIKFVPTSYKNLLRLVNEGKLYLFDIKNKDYEPGAHGKKNLHTLYWEQLFCQENLENLTIKLNAKSTLFCRPQVVANPKTHKKGSMLLNRKDKNGQPIPESIYQQLYKYVNGKIAEAKMSDEAKGYLDKIAVKEAQYAITKDKRYTKQKYFIHFSATLNANAPKTADINKDVLDYIKDNPDVNIIGIDRGERNLLYVTLINQKGEILDQKSLNIINGFDYHAKLEQREKERDEAQRSWQTIGNITDLKEGYLSAAIHEITTMMIENNAIIVLEDLNRGFKRGRFKFEKQVYQMFEKKLIEKLNYLCSKDYSPTADGGVLRGYQLTEKFVSFEKMTKQNGILFYVRPDYTSAIDPVTGFVSHFNFRDITNTKGRKDFFEKMESITYKNGYFEFTFDYRKYKPKVKDFKNIWTVCSSGKRVLWSKETKEYTDYYPTTAISGAFASRGITLDEGADVKALLSGIDDSISNADFYRILFEAFKRIVQLRNTNSNTGEDYIHSPAIQDGKQYCSLDELKKWKDNGESSIPSLPIDADANGAYHIALKGLYLMLNPQAKQIENEKWFRFVVEKPFKEEKVM

SEQ ID NO: 7 - protein, 1320 aa, unidentified
  REGION 1..1320: note = Category: MG11 effectors
  REGION 1..1320: note = Description: MG11-7 effector
  source 1..1320: note = uncultivated organism sequence
MKNLKQFTEIYPVDRTLRFELKPELLEGQTIDDFWSNYLDENKKDSFYNKDKKRNDDYPIVKLILDQFHKNFISLALSSFLPESAPKCPTWNDLFDAYCKDRKSKDFANLQDKMRESISNHFKKHEWWQYISSYSKLIGSLLKQLVENDDDFVESIQERDSSLTREKMLEALETFNRFSVYFGNYADNRSNMYKKEAQGTSIANRIVNENLPKFFDNISVYRKLKATCPIDLESIQDNLKDTLKGMSLDEIFTPCYFNECLTQDGIEKYNWILGGNPNEDVLGINSVGNEYLQHHPESKLKLKDLVMTQLYKQILSDRVQPSFLPQQYKSEEDLMDSVFSFLSAVEKQGLLESVKRIMETLYDNDTDLSKVYVLGSNLTKLSHLLYGDWNLLGEKLREKLVTSNTKKAQQERDKEIEKWLDNKCFSLLQIKEIEDELLEQTQHPLSTEELFTTLNIWKKENETSLWQKVSLIEQCKTAYIVQFATLRKSFKDGKSISTDESKQILKEVLDKYMELYHIVELLRLGNKSAYLEKDSFYVDYERLFESSDEDTLSLSYIIPLYNKVRSFLTRKLSNEGKMLLKFDSPTLADGWDANKEDANNATILKHSDKYYLMLINPLNKPRLEDGICENGSYRKIVYHQIADASKDLPNLMMIDGKTVRKTGRKSQDGFNHILEDLKNKYLPDEINRIRKCGSYLKTSDSFNKEDSQAYLKYYMQRLLDYKKDEMVFHFKEPNEYESYADFLNDVAMQKYSISFVSFSKDKIDEWRKENKVMLFQVSNKDFKEGACGTENIHTLYWKELFSSRNMDNTIFKLNGGAELFYRSKLSSKPFMHKKGSILVNKTLSDGTPISDEMYKHFVDHFNGKGIVLTDEEVRLLPQVRTNRAKLDIIKDKRYYEHKFFMHVPITINFKAPKITQQQFNERTLELLRQNKKQLNIIGIDRGERNLIYVSVINQRGENIIPPKHFNLIETKTYDEVTRKYNYLEKLKQTEQNRDEARKNWTTIERIKDLKSGYLSQVVHEIAKMVVKYNAIVVLEDLNFGFKRGRFNVERQVYQNFEKMLIQKLNYLAFKKDAPSPDYGNVWNGLQLTAPFTSFKDLGKQSGWLFYVPAGYTSKIDPATGFVNLFNMNKPAKDFKTFFGSFTQICYKDDMFYFTFDYSNEKFNTVRTDYTNVWTLSTHGERIVREKDELREIQLIQKFKKFFSDDGVNIPLSEVSVERIKLLEEVKLKELFGLFKLLLKMRNTNGQEDYIISPVAGENPFKTGSNNYMGLTDADANGAYNIALKGLYWVHNGFPVEDKYLKYIKDTDWFEFIQTKPYLND

SEQ ID NO: 8 - protein, 1169 aa, unidentified
  REGION 1..1169: note = Category: MG11 effectors
  REGION 1..1169: note = Description: MG11-8 effector
  source 1..1169: note = uncultivated organism sequence
MKVTEKYAGKELSYPVSKTLTFQLVPVGKTRQFIEEKNILESDLDKLEKSKKVKGYLDRIHRSFIQDILAKNILDVTELERLFTELQKETDAAKKAGIRKLIRTEEDKKRNEISSWFHKEKDFKELFGAAVFKNKIKDFTTENELKDVEVFNRFTQYFVSYNEGREHIYSKDDTHDTIAFRIVNENFRIYFENLHKLNDAVPGTDALRSFPLTDAQIADYNQVISGNPAEGRKGYNQTANELEEKIPLLKKLYKNILSESTPLFSVEKFASTNDVIESIKDFVVSVKETFVEFELLARYKKNPDGIYVSRKRLANFSLLTTGKPLLLSQVVKTELKEVPEYVSVGKLKEMFFKQLEENPKFEGEEFNPEKYFAMTALVEKTRETLSALDFGKITDLQHDKAQVLPLKVFLDSALELYHHVLTVHVDEEEFTDKKDEGFYNILGSIEEYLSPVTIIYNKTRNFVTKKLSKEEKIPLNFDSPTLLSGWDINKESTSNSMLFHDESEDKYYLAVMDVKDRPKIIEKSDSSFKKMYYKLLPQPNKMLPHVFFSKSGIETYCPSEEILNGYKEGKHIKGENFDIGFCHKLIDFFKDCIARYDGWKVFDFRFSPTSSYEDISGFYREVSEQGYKIQLRGVDKDDVFRMAESGRIYLFLITNRHLSGKSKSFCTMTESLKKALSENSKIQLNGGANIYYRPKLIEAKVTHPKGSWLVNKITKSGFAVPKELYKNIYAHLNFQEKLSPESELLFKSGEVVYKKADFDLIKDRRYSKEDFKFHVTVKHNYKSRDCMLKAFNMSVLEDFRNNEDMNILSVTRGEKNLLYCVLINKKGEVLFEKNFNIMHSANAEINFKHKLEEIEKIRMRERKEWQEIDKIRDAKDGFLGLALHEICDLMIKYNAVLVTENLDSVFKDSRMKIESNVYKVFESNLAKKLSCLILKNNVEAGSVDCPYQLVPSLDLLKKSGTQFGWMFFVNPYCISKISPDNGCVTSFNFSEITNFEGRKKFLSKFSCISFTDETLVLEYECSDFSKNFSGKKRMFITGKRTLWNKVEKKYSEYDLDSVVKAAFAMLGIDGSFSGDIRKNIGELKFSLANNNALELLIECIRAASEMKTLSGDSYVFINPSDPHDRYNGKDIDFISCLNLAKKALLMIESGEEGIRQVKADEYVASLSKV

SEQ ID NO: 9 - protein, 1235 aa, unidentified
  REGION 1..1235: note = Category: MG11 effectors
  REGION 1..1235: note = Description: MG11-9 effector
  source 1..1235: note = uncultivated organism sequence
MLDKFASLYPVTKTLRFRLLPQGRTEENMQAAKVLENDLERSEAAAVVKGLIKKYHLQFISDTLSGSTLSWQALTETLDKFKADHTATAELDGALAAYRCKLAELFTKSPKYKVMATPVSIIKEILKTETDPENIAALNKLNGYTYIIFDYVSTRMLTYSANAKATSLAYRLVDENYLRFYQDISAAAEISAVLEEAGFDNAEVEAFIRTDYNTCLTSEGIASFNAAAGSINQFVNVLLQQNPVLQSEPALRRHLQPLYKMLLDEAESKIIKFEDYGQLRDAVENFRRNFQDLPQSLIDIFAGRYDYSKIYVGYKYLNEASSQIAGGYNWKLLENALEDFYSKPYLVNGKMPVKYKTVVNKKMNQLAYSFTELQEALDAGESGSSITDLFGKYAELHAAYAAADSNIFYKEYDRKSIASLKNYLDAVNAIARFIKIFAVPEVYVKDEGFYGIVDGAADKLRDFDLLYNMVRNYITKKPYKKSKVALTFNSSSFGRGWDENKIYDELTTIFTYNGKYYLGVINKNDKPDLAAAVSKDEGGYKRMVYKTFDIVKQLPRLSFTKAVKAHFEESDEDYIFDGPKFAKPLRVPKEIYLQSFTDNGDKLADSAKKYTKAYLDMSGDYKGYYEAIVKRIDYTKEFLSAYKSTSIYDLAFLKPADQYEQWSNFTDDVQTALYKIRWDNIPAAAIDEMVESGKLYLFEIYSADLYKNPAEGRKIDTQAQIFKEIFSENGQKVIKLLGNCEVYFRPASLPAVVTHPKGSILVNKQLVNGKTLPDEVYREIYRYLNKKSENLSPLAKQLLDKELVKYRVAQEDIIKDKRFTENQYSFHLPVTLNYKVKQQFYINMEVMNMLRSRKDINILGINRGTRNLLYVTVINQQGEILYSRSLNEFNGVDYRDKLLVKERGIKDAAMNWQAADSIKNIKEGYLSRALGEIVRLMVKFNAICVVENLSSNFRNAGGGIFAYGNFYKGFETNLIKKLNCLIIKDAEKDKAGSVLRSLQMTRSFESFEKAGRQSGWLFMLDPAYISAVDPLTGFVNLFSFRNLKTIRQKAEFLQKFKSINYVPETKAFDFVFDYKDFGLTACGPVSCWVVTSDVERIVKTTENGKVKFESVLPSMQLAKLFTDKDIDFTDGHNLISEITADSRLVTETLSIFMNIMRLYNYDIDRNNDYVSSPVMGRFDTRYDKKLHNPDELAAYNMARKGLMIIKRAQASEKDSKVDLFIKNADWFSFLQTGSI

SEQ ID NO: 10 - protein, 1235 aa, unidentified
  REGION 1..1235: note = Category: MG11 effectors
  REGION 1..1235: note = Description: MG11-10 effector
  source 1..1235: note = uncultivated organism sequence
MLDKFASLYPVTKTLRFRLLPQGRTEENMQAAKVLENDLERSEAAAVVKGLIKKYHLQFISDTLSGSTLSWQALTETLDKFKADHTATAELDSALAAYRCKLAELFTKSPKYKVMATPVSIIKEILKTETDPENIAALNKLNGYTYIIFDYVSTRMLTYSADAKATSLAYRLVDENYLRFYQDISAAAEISAVLEEAGFDNAEVEAFIRTDYNTCLTSEGIASFNAAAGSINQFVNVLLQQNPVLQSEPALRRHLQPLYKMLLDEAESKIIKFEDYGQLRDAVENFRRNFQDLPQSLIDIFAGRYDYSKIYVGYKYLNEASSQIAGGYNWKLLENALEDFYSKPYLVNGKLPVKYKTVVNKKMNQLAYSFTELQEALDAGDSGSSITDLFGKYAELHAAYAAADGNVFYKEYDRKSIASLKNYLDAVNAIARFIKIFAVPEVYVKDEGFYGIVDGAADKLRDFDLLYNMVRNYITKKPYKKSKVALTFNSSSFGRGWDENKIYDELTTIFTYNGKYYLGVINKNDKPDLAAAVSKDEGGYKRMVYKTFDIVKQLPRLSFTKAVKAHFAESDEDFIFDGPKFAKPLRVPKEIYLQSFTDNGDKLPDSAKKYTKAYLDMSGDYKGYYEAIVKRIDYTKEFLSAYKSTSIYDLAFLKPADQYEQWSNFTDDVQTALYKIRWDNIPAAAVDEMVESGKLYLFEIYSADLYKNPAEGRKIDTQAQIFKEIFSENGQKVIKLLGNCEVYFRPASLPAVVTHPKGSILVNKQLVNGKTLPDEVYREIYRYLNKKSENLSPLAKQLLDKELVKYRVAQEDIIKDKRFTENQYSFHLPVTLNYKVKQQFYINMEVMNMLRSRKDINILGINRGTRNLLYVTVINQQGEILYSRSLNEFNGVDYRDKLLVKERGIKDAAMNWQAADSIKNIKEGYLSRALGEIVRLMVKFNAICVVENLSSNFRNAGGGIFAYGNFYKGFETNLIKKLNCLIIKDAEKDKAGSVLRSLQMTRSFESFEKAGRQSGWLFMLDPAYISAVDPLTGFVNLFSFRNLKTIRQKAEFLQKFKSINYVPETKAFDFVFDYKDFGVTACGPVSCWVATSDVERIVKTTENGKVKFESVLPSMQLAKLFTDKDIDFTDGHNLISEITADSRLVTETLSIFMNIMRLYNYDIDRNNDYVSSPVMGRFDTRYDKKLHNPDELAAYNMARKGLMIIKRAQASEKDSKVDLFIKNADWFSFLQTGSI

SEQ ID NO: 11 - protein, 1235 aa, unidentified
  REGION 1..1235: note = Category: MG11 effectors
  REGION 1..1235: note = Description: MG11-11 effector
  source 1..1235: note = uncultivated organism sequence
MLDKFASLYPVTKTLRFRLLPQGRTEENMQAAKVLENDLERSEAAAVVKGLIKKYHLQFISDTLSGSTLSWQALTETLDKFKADHTATAELDSALAAYRCKLAELFTKSPKYKVMATPVSIIKEILKTETDPENIAALNKLNGYTYIIFDYVSTRMLTYSADAKATSLAYRLVDENYLRFYQDISAAAEISAVLEEAGFDNAEVEAFIRTDYNTCLTSEGIASFNAAAGSINQFVNVLLQQNPVLQSEPALRRHLQPLYKMLLDEAESKIIKFEDYGQLRDAVENFRRNFQDLPQSLIDIFAGRYDYSKIYVGYKYLNEASSQIAGGYNWKLLENALEDFYSKPYLVNGKLPVKYKTVVNKKMNQLAYSFTELQEALDAGDSGSSITDLFGKYAELHAAYAVADSNVFYKEYDRKSIASLKNYLDAVNAIARFIKIFAVPEVYVKDEGFYGIVDGAADKLRDFDLLYNMVRNYITKKPYKKSKVALTFNSSSFGRGWDENKIYDELTTIFTYNGKYYLGVINKNDKPDLAAAVSKDEGGYKRMVYKTFDIVKQLPRLSFTKAVKAHFAESDEDFIFDGPKFAKPLRVPKEIYLQSFTDNGDKLPDSAKKYTKAYLDMSGDYKGYYEAIVKRIDYTKEFLSAYKSTSIYDLAFLKPADQYEQWSNFTDDVQTALYKIRWDTIPVAAIDEMVESGKLYLFEIYSADLYKNPAEGRKIDTQAQIFKEIFSENGQKVIKLLGNCEVYFRPASLPAVVTHPKGSILVNKQLVNGKTLPDEVYREIYRYLNKKSENLSPLAKQLLDKELVKYRVAQEDIIKDKRFTENQYSFHLPVTLNYKVKQQFYINMEVMNMLRSRKDINILGINRGTRNLLYVTVINQQGEILYSRSLNEFNGVDYRDKLLVKERGIKDAAMNWQAADSIKNIKEGYLSRALGEIVRLMVKFNAICVVENLSSNFRNAGGGIFAYGNFYKGFETNLIKKLNCLIIKDAEKDKAGSVLRSLQMTRSFESFEKAGRQSGWLFMLDPAYISAVDPLTGFVNLFSFRNLKTIRQKAEFLQKFKSINYVPETKAFDFVFDYKDFGVAVCGPVSCWVATSDVERIVKTTENGKVKFESVLPSMQLAKLFSDKDIDFTDGHNLISEITADSRLVTETLSIFMNIMRLYNYDIDRNNDYVSSPVMGRFDTRYDKKLHNPDELAAYNMARKGLMIIKRAQASEKDSKVDLFIKNADWFSFLQTGSI

SEQ ID NO: 12 - protein, 1235 aa, unidentified
  REGION 1..1235: note = Category: MG11 effectors
  REGION 1..1235: note = Description: MG11-12 effector
  source 1..1235: note = uncultivated organism sequence
MLDKFASLYPVTKTLRFRLLPQGRTEENMQAAKVLENDLERSEAAAVVKGLIKKYHLQFISDTLSGSTLSWQALTETLDKFKADHTATAELDSTLAAYRCKLAELFTKSPKYKVMATPVSIIKEILKTETDPENIAALNKLNGYTYIIFDYVSTRMLTYSADAKATSLAYRLVDENYLRFYQDISAAAEISAVLEEAGLDNAEVEAFIRTDYNTCLTSEGIASFNAAAGSINQFVNVLLQQNPVLQSEPALRRHLQPLYKMLLDEAESKIIKFEDYGQLRDAVENFRRNFQDLPQSLIDIFAGRYDYSKIYVGYKYLNEASSQIAGGYNWKLLENALEDFYSKPYLVNGKMPVKYKTVVNKKMNQLAYSFTELQEALDAGESGSSITDLFGKYAELHAAYAAADGNVFYKEYDRKSIASLKNYLDAVNAIARFIKIFAVPEVYAKDEGFYGIVDGAADKLRDFDLLYNMVRNYITKKPYKKTKVALTFNSSSFGRGWDENKIYDELTTIFTYNGKYYLGVINKNDKPDLAAAVSKDEGGYKRMVYKTFDIVKQLPRLSFTKAVKAHFAESDEDFIFDGPKFAKPLRVPKEIYLQSFTDNGDKLPDSAKKYTKAYLDMSGDYKGYYEAIVKRIDYTKEFLSAYKSTSIYDLAFLKPADQYEQWSNFTDDVQTALYKIRWDNIPAAAIDEMVESGKLYLFEIYSADLYKNPAEGRKIDTQAQIFKEIFSENGQKVIKLLGNCEVYFRPASLPAVVTHPKGSILVNKQLVNGKTLPDEVYREIYRYLNKKSENLSPLAKQLLDKELVKYRVAQEDIIKDKRFTENQYSFHLPVTLNYKVKQQFYINMEVMNMLRSRKDINILGINRGTRNLLYVTVINQQGEILYSRSLNEFNGVDYRDKLLVKERGIKDAAMNWQAADSIKNIKEGYLSRALGEIVRLMVKFNAICVVENLSSNFRNAGGGIFAYGNFYKGFETNLIKKLNCLIIKDAEKDKAGSVLRSLQMTRSFESFEKAGRQSGWLFMLDPAYISAVDPLTGFVNLFSFRNLKTIRQKAEFLQKFKSINYVPETKAFDFVFDYKDFGVTACGPVSCWVATSDVERIVKTTENGKVKFESVLPSMQLAKLFTDKDIDFTDGHNLISEITADSRLVTETLSIFMNIMRLYNYDIDRNNDYVSSPVMGRFDTRYDKKLHNPDELAAYNMARKGLMIIKRAQASEKDSKVDLFIKNADWFSFLQTGSI

SEQ ID NO: 13 - protein, 1309 aa, unidentified
  REGION 1..1309: note = Category: MG11 effectors
  REGION 1..1309: note = Description: MG11-13 effector
  source 1..1309: note = uncultivated organism sequence
MNNLKQFTGIFPVSKTLRFELNPVLLEGQTLNDFWQVYLDGPEGNDLHKLYKNDKERNVNYPIMKAILDQFHKKFIASALEQFVVGDTGVTWESLALAYQEDKKSKAYQKLQGEMRGKMRKAFMGHNWWPYISSYSQLISTLMKKMVEEDDDFVESIQESNPKMNLDRNKMLEAIKAFNNFSVYFGNYQDNRDNMYSEKDQTTSVANRIVNENYPKFLDNIVVYHRLKETCPDELKAIEENLAAVLNGLMLDDIFTPRYYNKCLTQDGIEKYNWLLGGNPNEGVLGINSVGNEYLHQHPDSQLKLRSLEMAQLHKQILSDRVRISFLPEQFNSDEELMQSVSAFFEGFDSFNLFEHIQETMNILKDSTTDLNRVYVQGKNLSRLSTLLYGKWDVLGEKLRSVMVTGNAKKAQKEKDKEIEAWLENKCFSLAQIQSVENELMELSAHPLSLIELLTDLTMWKYDSENKIWSKKSLLKLCMDARITEFSVLMNKYKQGMSIKTDTAKEILKSVLDQYMELLHVLELLRLGTKAQYIEKDDFYNSYELLFESTDDAVSVSHIVPLYMKVQSYLTRKLADKGKMLLKFDSPTLADGWDANKESANNATILLRDGKFFLMIVNPYNKPNISEGICEKGSYLKIVYHQIADASTDIPNLMVENGVTVRKTGRKDPDGINRRLEAEKDRLLPLDINMIRKKGSYLKSSSTFNTADSQTYLAYYMQRIIEYKGREIDFHFKRPDEYECYQDFIDDVSKQKYSLSLVPFSEYMLETWRQQGKAFLFEITNKDFREKSSGMANLHTLYWKELFSAQNLKDSVFKLNGEAELFFREKADSVSFIHKKGSVLVNKTFSNGTPIDTVFYKKLLRHFNGLDVDLTPEEVSLLPLVKTKNAQFDLVKDKRYHEHKFFLHVPITINYKVSGTTQKQFNERTLDIFRNNKKELNIIGIDRGERNLIYVAVINQKGENLIPPRHYNLIGNYDYLAKLKQTEKNRDEARKNWTTQERIKDLKSGYLSQVVHEIAKLVVRYNAVIVLEDLSFGFKRGRFNVERQVYQNFEKMLIQKLNYLAFKRDAPSLEFGTIRTGLQLTAPFTSFKELGKQSGWLFYVPAGYTSKIDPSTGFVNLFNMTKPASSLREFFGAFNEISYRNGLFYFTFDYSKEKFNTVKTDYTNRWTLASHGLRIVGKEKELKNLTSEFANFFEKAKLALGEVSVKTVSALDEGMLKELWGLFKILLKMRNSNDDKDFIISPVASDTPFLTGPDNSMQIADADANGAYNIALKGLFWLYYNFPTDEKGYLKYIKDEEWFRFIQTKPYRD

SEQ ID NO: 14 - protein, 1309 aa, unidentified
  REGION 1..1309: note = Category: MG11 effectors
  REGION 1..1309: note = Description: MG11-14 effector
  source 1..1309: note = uncultivated organism sequence
MNNLKQFTGIFPVSKTLRFELNPVLLEGQTLNDFWQVYLDGPEGNDLHKLYKNDKERNVNYPIMKAILDQFHKKFIASALEQFVVGDTGVTWESLALAYQEDKKSKAYQKLQGEMRGKMRKAFMGHNWWPYISSYSQLISTLMKKMVEEDDDFVESIQESNPKMNLDRNKMLEAIKAFNNFSVYFGNYQDNRDNMYSEKDQTTSVANRIVNENYPKFLDNIVVYHRLKETCPDELKAIEENLAAVLNGLMLDDIFTPRYYNKCLTQDGIEKYNWLLGGNPNEGVLGINSVGNEYLHQHPDSQLKLRSLEMAQLHKQILSDRVRISFLPEQFNSDEELMQSVSAFFEGFDSFNLFEHIQETMNILKDSTTDLNRVYVQGKNLSRLSTLLYGKWDVLGEKLRSVMVTGNAKKAQKEKDKEIEAWLENKCFSLAQIQSVENELMELSAHPLSLIELLTDLTMWKYDSENKIWSKKSLLKLCMDARITEFSVLMNKYKQGMSIKTDTAKEILKSVLDQYMELLHVLELLRLGTKAQYIEKDDFYNSYELLFESTDDAVSVSHIVPLYMKVQSYLTRKLADKGKMLLKFDSPTLADGWDANKESANNATILLRDGKFFLMIVNPYNKPNISEGICEKGSYLKIVYHQIADASTDIPNLMVENGVTVRKTGRKDPDGINRRLEAEKDRLLPLDINMIRKKGSYLKSSSTFNTADSQTYLAYYMQRIIEYKGREIDFHFKRPDEYECYQDFIDDVSKQKYSLSLVPFSEYMLETWRQQGKAFLFEITNKDFREKSSGMANLHTLYWKELFSAQNLKDSVFKLNGEAELFFREKADSVSFIHKKGSVLVNKTFSNGTPIDTVFYKKLLRHFNGLDVDLTPEEVSLLPLVKTKKAQFDLVKDKRYHEHKFFLHVPITINYKASGTTQKQFNERTLDIFRNNKKELNIIGIDRGERNLIYVAVINQKGENLIPPRHYNLIGNYDYLAKLKQTEKNRDEARKNWTTQERIKDLKSGYLSQVVHEIAKLVVRYNAVIVLEDLSFGFKRGRFNVERQVYQNFEKMLIQKLNYLAFKRDAPSLEFGTIRTGLQLTAPFTSFKELGKQSGWLFYVPAGYTSKIDPSTGFVNLFNMTKPASSLREFFGAFNEISYRNGLFYFTFDYSKEKFNTVKTDYTNRWTLASHGLRIVGKEKELKNLTSEFANFFEKAKLALGEVSVKTVSALDEGMLKELWGLFKILLKMRNSNDDKDFIISPVASDTPFLTGPDNSMQIADADANGAYNIALKGLFWLYYNFPTDEKGYLKYIKDEEWFRFIQTKPYRD

SEQ ID NO: 15 - protein, 1314 aa, unidentified
  REGION 1..1314: note = Category: MG11 effectors
  REGION 1..1314: note = Description: MG11-15 effector
  source 1..1314: note = uncultivated organism sequence
MNNLKQFTGIYPVSKTLRFELKPVLLEGQTINDFWNIYLNGSNDNVLHKLYLHDKKRNDNYPIMKVILDQFHKKFIASALEQFEVGDKGVTWESLALSYQEDKKSKTFQKLQEEMRGKIHKAFTEHKWWPYISSYSKLIGTLMRQMVEDDDDFVESIQESNPKMSLDRNKMLQAIETFNKFSVYFGNYQDNRDNMYSEKDQATSVANRIVNENYPKFLDNIVVYNRLKDTCNNELKAIEGNLNAVLNGLSLDDVFTPKYYNRCLTQNGIETYNWMLGGSPNEGVLGINSVGNEYLHHHPDSQLKLRSLKMTQLHKQILSDRVRISFLPEQFNSDEELMQNVSAFFEEFESSNLFVRIQETLSILKDSDTDLNKIYVLGKNLSRLSTLLYGKWDVLGEKLRSVMVTGNTKKAQKDKDQEIEAWLENKCFSLAQIKAVENELMELSSRPLSLMELLTDLTLWKYDSENRTWSKNSLLKLCKDARITEFNALTDEYRQGKLTIKTDAAKEVLKSVLDLYMELFHVIELLRLGKKSPFLEKDDFYISYEQLFESTDNTVLVSHIVPLYMKVQSYLTRKLADQGKMLLKFDSPTRANGWNDCSIAIKDGKYYLLLYLESLTNEEIAALYSGDSADLVIYQQQKTDYRNAPRLFINSKGDNQAPAVSKYHLPIEMVESLYKERKALKTQSAKREFDERHPDYLEKLINYYKIGFLRHEDFQPFQRTFENMWKDSLEYNSVQEFFEHTQELCYLLTFKPIDFDSLLNLQKSKKLLLFSITNKDYKEKAKGTPNMHTLYWEELFSKDNLSNVVYKLSGQGIEIFHREAISPELSFVHKKGSILVNKTFSDGTPIDAELYKKLLRHFNGLDVDLKPEEVNLLPLVRTKKAQFDLMKDKRYYEHKFFLHVPITINFKASAISQKQFNERTLNILRNNKESLNIIGIDRGERNLIYVSVINQRGENLIAPRHFNLIETKTFDGKERKFDYLTKLKQTEKNRDEARKNWTTQERIKDLKSGYLSQVVHEIAKLVVQYNAVIVLEDLNFGFKRGRFNVERQVYQNFEKMLIQKLNYLAFKKDAPSEEYGTIQSGLQLTAPFTSFKELGKQSGWLFYVPAGYTSKIDPSTGFINLFNMNKPANSLREFFEAFDDITYRDGLFYFTFDYSKDVFNKVKRDYTNHWTLASHGSRIVGKGKELKDLTAEFVKFFEKEAKIPLEKVSVKSISVLDESKLQTLWGLFKLLLKMRNSNDDIDYVISPVAGDSPFITGEGNSMQIVDADANGAYNIALKGLYWLYNDFPMEQGYLKYIKDEDWFRFIQTKPYRQD

SEQ ID NO: 16 - protein, 1314 aa, unidentified
  REGION 1..1314: note = Category: MG11 effectors
  REGION 1..1314: note = Description: MG11-16 effector
  source 1..1314: note = uncultivated organism sequence
MNNLKQFTGMYPVSKTLRFELKPVLLEGQTVNDFWNIYLNGSIDNDLHKLYLHDKERNDYYPIMKAILDQFHKKFIALSLEQFEVGDKGVTWESLALAYQEDKKSKTFQKLQGEMRGKIRKAFTEHGWWLYIASYSQLIGSFTKKMVEDDDDFVKSIQESNPKMGLDRDMMIQAIETFKNFSVYFGNYKANRDNMYSEKDQTTSVANRIVNENYPKFLDNIVVYNRLKDTCYSELNAIEDNLSAILNGLSLDDVFTPKYYNKCLTQDGIEKYNWVLGGNPNEGVLGINSVGNEYLHQHPESRLNLRSLKMTQLHKQILSDRVRISFLPEQFDSDEELMQSVSAFIEGFESSNLFAHIKDTLNILKDSDTDLDKVYVQGKNLSRLSTLLYGKWDVLGEKLRSVMVTGNTKKAQKDKEKEIEAWLENKCFSLAQIKAVENELMELSAHPLSLMELLTDLTVWKYDSENKTWSKKSLQKLCKDASITEFNVLMDKYKQGEFSIKTDAAKEVLKSVLESYMELFHVIELLRLGKKSPYLEKDNFYIPYELLFESTDDDVLVPHIVPLYMKVQSYLTRKLANQGKMLLKFDSPTRANGWKDCSIAIKDGKYYLLLYLENLTNEEITALYSRDSADLVIYQQQKTDFRNAPRLFINSKGDNQAPAVSKYHLPIEMVESLYKERKSLKTQSAKREFDERHPDYIERLIDYYKIGFLRHEDFRPFQYTFESMWKDSSEYSSVQEFFDHTKEMCYMLTFRPIDFDFLYNLQKGKKLVLFSITNKDYKKEAKGTPNMHTLYWEELFSQDNLANIVYKLSGQGIELFHREAISPKLAFVHKKGSILVNKTFSDGTPIDAEFYKKLIRHFNGVKVELTPEEVNLLPLVRTKKAQFDLMKDKRYHEHKFFLHVPITINFKASGTSQKQFNERTLNILRDNKEGLNIIGIDRGERNLIYVSVINQKGENLIAPRHFNLIETETYNGIVRKFDYLTKLKQTEKNRDEARKNWTTQEKIKDLKSGYLSQVVHEIAKLVVRYNAIIVLEDLNFGFKRGRFNVERQVYQNFEKMLIQKLNYLVFKKDAPSKEYGTIQSGLQLTAPFTSFKELGKQSGWLFYVPAGYTSKIDPVTGFVNLFNMNKPANSLREFFGAFDDITYRDGLFYFTFNYSKDVFNKVKADYTNHWTLASHGLRIVGKDKEPKDLTKEFELFFKEAYLPLDEVSVQTISSLDESKLQKLWGVFKLLLKMRNSNDEQDYIISPVASNKPFITGPDNPMQIADADANGAYNIALKGLYWLYYDFPTDENGYLKYIKDENWFRFIQTKPYLND

SEQ ID NO: 17 - protein, 1226 aa, unidentified
  REGION 1..1226: note = Category: MG11 effectors
  REGION 1..1226: note = Description: MG11-17 effector
  source 1..1226: note = uncultivated organism sequence
MRAIDNFISNTKEFAGLPVSKTITAKLVPVGKTRDNIDKMNILESDKQREEAFVRVKKYIDRVHKYFIEECLKQQDSGKGVYVPENEFNKLYTLRVNLKNLTGKERKNAQKEIQAEENKLRKLISEIFKAHPNYKNLSGVNLFTELLPSYCNEEEMKDVNLFKGFYSYFTKFNKLREQLYVSDDIHTAVAHRIINDNYPVYIDNKLILERIRSEYKELYDLSENGRQLFHELNQTYTMAYGMSSSYISMYNSTISGTFDEDGNQTCRGLNQLINEYRQKNKECRIPYFKPLYKNLMSDKKPLFSVSYFESTAEIKDAVITFNESIRKPYERFISYITKSFPVDSWCVEKKNLNRLSHIICSNPFTLDNLVSASKKFSKNQPDIYSASDFKELLSENILEETEFHFDFLKYKDYLLQFRPQDFFSKIPFDKITDIQYDKKQALELKEYLQSVLDYYNMLRILVIDPEDERIVSSEITYDEEYYTELELIIDALNPIVKLYNKVRNFVTKSLKQEKEIKLNFDCSSLLDGWAESQEKVKNGLIFHDESEDKYYLGIYNQNMKKPDFEYVSDSTFKKMVLNTIPEPYKMLPKVFFSKKGLETYKPSEEIIEGYKNELHKKSSGKFDLSFCHKLIDYYKDSIGQRDEWKCFNFNFRPTEEYQDTFEFFKEVSEGGYSLEMVGINKDILMKAVDEGSIFLFEIYNKYLANKAHGKDTYTQIIRSALSGKKSNVQFCGGAQIYYRPALIKEEATHKKGSVIVNKISKEGFTINSDVYKNICSHFNHNTALSSEAKTLLDSGSVIYKTADRDLYKDRRYMYESFSFHCPVKINWQAKDINPLTFNKAVLDAIRSDDDVKILSVNRGENNLVYAVLMDKKGKVLLDKSFNLIQSGKQNVNYKNKLIEKSKDRANSRTNWQEIDKIKDLKSGYLSFVIAEITRLIIENNAVLVLESLSNDFKSGRQFIESNIYQQFEMALVTKLSCIILKENEYGTPGSLEHPYQLVPKFTSFDNIFLQFGFVFFINPAYISKIDPESGIINFFNFNALTNNEKRTEFFKNFDNITVENDKLVFLYHPGNFNKDFKSIDLFKVIAAGKRNIWNPKTKKFEIIDLELEGKAVYENLLSYDYTNIAELFKDKCCNGVLPHPAATERLLRIFMAAVSSRTFVLDDWQYISPMGNENEFTGKSFDFIAAYNLANKFKTILERSKDGEYLSNIKTVEYVSSLIWNRVANL

SEQ ID NO: 18 - protein, 1235 aa, unidentified; identical to SEQ ID NO: 12
  REGION 1..1235: note = Category: MG11 effectors
  REGION 1..1235: note = Description: MG11-20 effector
  source 1..1235: note = uncultivated organism sequence

SEQ ID NO: 19 - protein, 1226 aa, unidentified
  REGION 1..1226: note = Category: MG11 effectors
  REGION 1..1226: note = Description: MG11-21 effector
  source 1..1226: note = uncultivated organism sequence
MKEHTFNQFVKAGPITKAFNFEIIPEGKTRETIENLGLLDDDAHFRECTKAATPYIDAVVRNIADKALSKLDYDFNKLAIVKDDKKKREKEEIVLEKAIARCVKENLPTDMKSTKDIMSAAFLSTVLPAEVKKVPTLTTEEKDKAGVLFEELKGKTQLLTKFLQTRVIALNTWLPQRVIENFYRYTDNFDTINNIISEKLPVENIEELPSMLLPSYYSQFVTQEGINAYNLHISGIYTEDKVVMQGLNEIINIHNQVAKKNGKTQIAKMKPLYKQILMPSEKSFTIEALNSDKDCVDVVRRALAQVDNAESLVNHIAKARTESMVVRGSRLHGLSYIGLGSHAELPNSILEIKTEEFLAEHKKLTKKGERELNGIAAKVRSSTYSLDYIEKVAPGITASYKEEVSDTMKLLKELAVSTERVISDPSNISTSKTALKTIKDFFDTFTELRTMIGIVGRSDNKMGENDFYNRYDELNACLTVTWKAENLFRNYVTRKPVDAHAKTETVLGTALRKTSLWWKKGDLLKVPSQLMTCEDGKYYYYLPLPVSIGGRNIDPQGKDDNCMLMSQIKVQDAVKWIPAQTFTKAKKYFSENQSKDTYTIEEKVHEPVTITREVSEIYERKLHTKGALQNGEETEEEYRKNLLAVLNVIDTFARNYVLYDSFEIKTKPIEEYEDAKQYYDELNLCLTPVIEWVTGNKRLLDEGVANGSLLKFLIHSRNLYAPAEYTEARKTSYTKMLSFILSPANKGQITLNSRPVLMYRPAVISEERIVKHKKGSILVSKNTTRGEHIPDEIYNELKLYFNQNKPLSDEGAQYFNAHKNEISHHKAETTIIKDKRYTMEKFFLNMSYKKNADTIESKTLSYDLNKKMKAYAAAGCNVLSVIRSRNDLVYVSVVDQNNNVLEERSLNVIDGVDFAGRIKEAAQIKQKDKAENWKYDRKIKDLKTGFISRAISEIVSLAVKYEAVICIEYLSQNFKDKYSALDDTVYKSFETALVSRLSDLWFKNIDEGKAGSMSNPLQLATNNGNSFQDGILFYTGQKYIKKTDPETGYADLFDTRFITTITNKKSFFSKFSSIRYNAETKKIDMEFDYGNFRTFALTSKTKWKISIGGEGTIYQREQKCNVYEPQVSKILVLAMEQSGVALTSDLSDLARNGELPNNVTNALWDVFTVTRTGIVKAHNNKSAVFISPVTGKKYLASHVAALNLAKKFRIELSEGRKEEWIDYVQV

SEQ ID NO: 20 - protein, 1211 aa, unidentified
  REGION 1..1211: note = Category: MG11 effectors
  REGION 1..1211: note = Description: MG11-22 effector
  source 1..1211: note = uncultivated organism sequence
MNGLNLKELTKRNKVVKSCTFELVPQGATSKTIEQSKFLNTDADWKQLISEIAPYIDAFIRNIVSCALSRVELDCSKDEMDEVKLASEINLAINSALNEKYGIYVKQIKSAKFINSVLPDFVDTLDLDENESIAVHNVLEELRGKTELVNEFLTSRVTALNTSVARRVCENFERYQENVKVFEKLQASSLWDTIVALYPNAGDFANVDSYNECITQEQIDTYNDMINGISDENGIIVKGIRGLINEYRMLEKNEKLPSPKELYKQILIPGKKAFSIICIDNDDELYDVISEASEHAVAAGKRFCDLIDNASAYDIVVQYKNLHTISHIVTGEHRTIPDAVKDVMYAAINQQIEAATTAKKRLALQKKVDDIEKALKKCDWTMDELEKISNLGIFSAYKTSAKNAYLLASGTVGTIPALTKDIRNNDAQREELKSIFNVWTEFRDLVRLVKRQTLDKGYHAFYDALDEIIFELSYMAKAETLTIAYVTRKPKDVSKKALASMGYQARMGAAWLQPDKKLSICDMTILKRDGKYYLYMLAPGVKPVNITTDKSDEYVFVQKKGQDASKALPKVTFYTASKFFEENPDAEEFVITNNVTEPVTISRELFDMKENGLFKTDAVKKGLITQEEYEKNLFEILSFYRHFMDVYTEYSKFDVQTKSDLHDYKDSGEFFTDVNAANVSSEWLPADTKKMDEMVDKGEALMFLITNRNMYSQFGKKTAYAELFLTAMSDSNMGVFLNSSPKMYFRAKSITKPIVHKKGSILVHKHDTNGNKIPKAIYDEIYKYYNNKLFATDLSQEARDYIDRGLVGKKKADTDIVKDNRYTEDKWMIQFSYTKNRTVIPASTKLNDIIRQNAANMNVLSIIRSETDLAYYMVTAPDGTVLEKQSLNIIDGRDYWSELSTISAKRKDEKSQSWNYSRQVKDQRDPYIVRAISVIARKVIEYNAIVVIERIRPEIKNRFDAMDNTVFKKFEGMLISRLADLYFSDVPAGEPGSVMNPYQLCENSGNDYQDGIVFFVSNAYTGNVDNQTGFVNIFDLGNVGTVSAKRLFLSKFDSIVYDPAQNRFVFDFDYDNFVTKTCMKKTKWSILAGGEALIFNRKFKYNTYYPETASMITKIMAEKNVSLSDNLAKLAATGELPGDVTTALFDAFRRAISGVISKHEDMPKRYISPVTGEAVIYNDNAAENLTRRFRFNMAELEKDKTAREEWIDNIA

SEQ ID NO: 21 - protein, 1250 aa, unidentified
  REGION 1..1250: note = Category: MG11 effectors
  REGION 1..1250: note = Description: MG11-23 effector
  source 1..1250: note = uncultivated organism sequence
MAQNRTDAFGAMRNLYPVSKTVALRGIPIAETLKYMTEREIMQKGNTLSENRKLVKQAGDRYIKDFINMSLMHASLKIHSDGSKDSIEELNALLKEKPSKKGDNDERRSKEKEIQAIATKLKNQLAASFKDTAFLKKLGSEAFFKEVLAGADLNEKEAKALEAIKKNTTYMADYQKRRLSLFDPKFTGYSIMTRSIDDNLPIHLRNCEVFRKVAPIIREDLAPIFKEVRLNTSAESLDEVFTPAMFNVLLAQCDIETYNTIIGGKTLSERKMIHGVNACIERYNKTAAQDQKLPSMKKLKKQILSDREPVSWLPEEFKNDNEVVEAVDMLIKNFHMLCKDTPVEAAVREPDTDGIFVNAKNLNSFSNIAYGRFFLAKNAVIDELKHQFPKRPRKSIEKYEKEIEAKFKKQDHFSVAFLDRCIAAYNPTLGRSSADAFGDIIKNKADVETKIADYLQERGTEEVEKIDEALKQKIRLLLNEMMKFHHSVERFLLKDMPTAYDVTFYELVEENEANAESLIKTFNMIRNRMTKKPYNTSKVRLYFDNPTLGAGWAVTKEYTNRILLFKDMENGEDKIYFGIVPTECKNLTRNSKGELKEDILAGDGKQLEKVEITIIPDAAKMLSAMFFSANWARTGSVKASDYVLEIHDKVKASGSAKDLSPEEKVAMIDYYKKCIATVEHWKRFNLKYRPSDEYESVKEFCDSVTEQAVNVSSRPVSEEKVFAAVARGDLYLFQLDNQDMHKKHHGTVGNPTVWLREAISCDPAAAVRLCGNVAVYYRKASLNRKVTHPAGVPMENKNPDNPRKTRTLTYDLIKDKRYTEDNFSFHIPLEVNFRADNRNNKSIVINDLVNRAVKANPDMPVLGINRGERHLIAYAVTAPDGKILEQGNFNVINGYNYRELLATRERERSTNKQNWENIKDIANLKDGYLSLVIGEIARLVQKYNCVVAIENLDDDFINTRQKFERNVYSRFETALEQKFTLLTDKTTSRRSSESLQLAATNKSGSFEVQNGILFRTMPWMISRTDPSTGFISFLKLFHKNNESSQKYLSSFDSFRYNQKEDLFELSFDYKALRVDLQAGERTKWTVCTYGERTECHLDKEHMKLMVTDVHDLTKEMKTLLDGQGIKYASGKDILKDVAEAKNGGFYRDFFTIISRTVCGSSWYEDKKEYRFIGCTRNSEGRFYDTRTCRPDQPCDVDTLAAWNLSRRVHRILDNIRSFDPENPPLDEDGKKLKSPKKGLSRAEWLKIAQK

SEQ ID NO: 22 - protein, 1166 aa, unidentified
  REGION 1..1166: note = Category: MG11 effectors
  REGION 1..1166: note = Description: MG11-24 effector
  source 1..1166: note = uncultivated organism sequence
MKSIDKYCGEKFGYSVNKTFMFELKPVRETLEYIKQRKIIENDKVRTDKAVLVKDYIDRLHRKFIQNVLTAHCTELKTDDLGKLYSMLQNENSDKSKIKKSIKEIEAAKRKQVSEWFKKDDGYKKLFGKTLFDELIATAETEEERNSINHFKGYLQYFLNYNQVREYVYSDEEKHNTIPFRIINENLKIYFENLNKLEDIGIDTSILYHFPVTDDQIACYNLVIGGNSKEIKGYNQLVNEKKLEVPYLTQLYKNILSETKPLFTTESFKTTEEVKETCKELFESVAGLKNDFRRITSGGDESKIYIHRKNISKFSLIVSGDPLLVKNVLANENIIVTDYVSVGQIKQAFINQKKAGYYENFELNVSKYYTMESVFSDILKNISECDLTKITDLQTDKIQVLPLKDALDKILELFQQVKIVFLDEDFVGKYDAEFYNVLNKVYNALKPVVSVYNKTRNFVTKKLGEQKKLPLNFESSTLLGGWDVNKESASNSVIFYDEKEGKYYLGIFNVENRPSFTAKPGTGFKKMYYKYLPQPNKMIPHVVFSKKGLDTFSPSNEIIEGYKKGLHLKGENFDINFCHKIIDFFKNCIYQYESWKVFDFKFSNTTEYNDLSDFYNEINQQGYNVKLSDVDRDEVYSSVSDGKLYLFEITNRFMSGKSHKRHIPSEIFKSIFDKDSTVQLNGGAEIFYRPEMLKPKITHKKGSFLVNKYTTTGFSVSAEDYKSIYEHLNYNKPLTSSARTLLDTGTVVYKKADYDLIKDRRYSSDKFEFHVPVTINYKYKSSCSVKEFNKSVLNELRENHDINILSVTRGENNLVYAVLQSQEGKILLEKSFNIIGEKTKVNYKDKLHKVELSRNEARKNWQNVQQIKDLKEGFMGNVLNEIVRIMIENNAVLVTEDLSGAFKDSRMKIESNVYKIFETSLVNKLSCLILKNAENEGSIKNPYQLTPPLEGFSKAGSQYGWVFFINPAYISKIVPASTFINIFGLNSVNTFDQKKTFFLKFDSIEYTGDSIFLSYNNGVFVPKFKGKNVIEIKGSRTLWNKETKKYENYNTKDYISEAVVNLGIEEKGNIKPLLEKLQFNIRNNKGLEKLIQAVKIVCEMKTFAVDNYHFVSPTQDDNYDGKDIDFIACVNLAEKFKLAVRNTAEESFVKQPKTEELINTKAQEFK

SEQ ID NO: 23 - protein, 1315 aa, unidentified
  REGION 1..1315: note = Category: MG11 effectors
  REGION 1..1315: note = Description: MG11-25 effector
  source 1..1315: note = uncultivated organism sequence
MSVFENFVGLYPVSKTLRFELKPELLDGQTIDDFWSVYLNGSEEDDLHKLYMHDDERSKQYPVVKAILDQFHKMFIASALEHFEEGDKGVTWLSLASAYRQDKRSKEFQKLQDEMRKKLRISFEKHEWWSYMKSYSKLIGELIMRMVANNDKFVEAVQESNPELASNPEIRLDRDGMIKALKTFERFSVYFGNYATNRDNMYSEKAQTSSIANRVVNENLPKFLDNIVVYERLKELCPDELKAIEENLSSTLDGFKLDDIFVPDYFNNCLAQVGIEKYNRLLGGNPNEGVLGINSVGNQYLQHHPETSVKLRSLQMTQLFKQILSDRVRLSFLPEQFKSDEELMQSVSDFLEGLESCEVFARIQRTFEILKDESTDLTRIYIQGSNLTKLSTLLYGKWDVLGERLRSTIETGNSKKVRRELDKEIEAWLENKCFSIAQIQAVESELIERSSHSLSVNELFSSLSPWKYDTETHEWSRKPLLKICDDARIVNFKELMRKFKEGCSIRTDAAKEELKYVLDQYIDLFHVVELLRLGNKSAYLEKDDFYVTYEQLFISDDEVILSHIVPLYMKVQSYLTRQLKDEGKILLKFDSPTLADGWDANKEDANNATILLKEGKYYLMIMNPNKKPNLSDGLCDKGDYHKIVYHQIADASKDIQNLMVEKGVTVRKTGRKDSDNINRRLEAEKERLLPKIINEIRIKRSYLRSSEQFNKEDSQTYLAYYMERIVEYKRGEIDFHFKKPEEYECYQDFVDDVSRQKYSLSLVPFSGVIVELWRRQKRIFLFQISNKDFSEKSSGTANLHTLYWNEVFSELNLSDSIFKLNGEAEIFYRKKSDADSFTHKKGSILVNKTFSDGKPIEDKLYGRLLKFFNGTHVELSEEERKLLPMVITKEAKFDIVKDKRYHEHKFFLHVPITINFKASTKSAKQFNEWTLQTLRENRKELNIIGIDRGERNLVYVSVINQRGENLIPPRHFNLIGNYDYLAKLKQTERNRDDARKNWTAMARIKDLKSGYLSQVVHEIAKLAVQYRAIVVLEDLNFGFKRGRFNVERQVYQNFEKMLIQKLNYLAFKTETPSPNCGNIRSGLQLTAPFTSFREMGKQCGWLFYVPAGYTSKIDPATGFVNLFNMNKPAESLRKFFGAFTEISYKDGLFYFTFDYSNEVFNTVKSDYTNRWKLSSHGARIIGKEKELKDLTKEFINFFEKKARIPLDKVSVQTISSLDDANLQQLWGLFKLLLKMRNSNDQFDFIISPVAGEKPFLTGEDNPMQILDADANGAYNIALKGLYWVMNDFPIEDGYLKYIRDTKWFEFVQTKPYLNE

SEQ ID NO: 24 - protein, 998 aa, unidentified
  REGION 1..998: note = Category: MG11 effectors
  REGION 1..998: note = Description: MG11-26 effector
  source 1..998: note = uncultivated organism sequence
MSIFSGFTRRNNLIKTLQFKLTPMYGTAEQMEKLGVLYSDKERSRCWKILLDVLRRVDAAFIANALCAENSLDWQPLAEALAEGKKERIARQQAAMRKAVAKLLTKHSDYKNLVNPTKAIKLAAAATENAAEADAVTKYARFTTVLVDYFNLKKVFFSSEEKQTTIAYRIAHVNFSLYWQNLSLLKKYRDAGLDFQDKFSFPYTEINGYNQCLVQSQIDAYNRAVGKINMELQTLYRQHKLPQALKGVAVKLRMLHKQVMSGGSDKKVPFDLYTEMQNAVISLQNSLKEIFSLLDEAFGADLELADTYQKLRQQIVDSAKNLLFCEHDEQSIISIKNFLTAVVALRRFIKKTLRDYEQNFESDQEEIFLACSNVWSLLEEVPQLYIRVRGFLTRKPYKTDKIRMFFDCAAFGKGWDVNKESAYLLTLFRREELYYLGIRRQGAKINFADMLANTAEACYEKMVYKSFDFVKGFPGVVFAKSVLQKFVEGAERVVLDGDLYSCPLVVIREDFEQKYFVENGVLHEKEAGEVKYLKEYYAQTGDLAGYKQAVRQRIKLAKQFIAAYKNFAFFDMSQLKSASEYESWTDFLVHVNEFTYGLRWQRISAAAIEKLVAAGDLFFFRLDNQDFALADSKNRAEDEQTLFLREIFSERNARERVLKLLGDVEVYYRPASLAAEVTHRKGSVLVNKKDVHNNLLPRQLHQNICQYLNGEDEKLLPEAEELLAKGMVRYKRADTDIIKDKRFTEAQLSVHFPVSINYRCPNKDYSFNKDFRSMLKNNAAVNILGVHLGGKNLAEAVLIDQKGQILLRKEFNEFNQYNFYQALVLRAEERRQAQQNWLQMEKIKNIRSGFLSALVSEVSKLALAYNAVIVLENFENSRVKKDRGAAFAHTQFAMSLLHKLNYLVLKKREYLEPGGVLNGYQLAPKAESLAGFANQIGCVFLVLPDYDGGEDEKAAYNLALKGLLLLRRIHEAENVDKVDLLITKKNWLEFLREYGSRS

SEQ ID NO: 25 - protein, 1309 aa, unidentified
  REGION 1..1309: note = Category: MG11 effectors
  REGION 1..1309: note = Description: MG11-27 effector
  source 1..1309: note = uncultivated organism sequence
MKQFTNLYPVSKTLRFELKPELLEGQTIDDFWNSYLNGSGNSELHKLYMHDKERNESYPIMKAILDEFHKRFVASVLDGFELREDCSLTWNELLKEYQNDKKSKIYQKLQGNVRKAIHKAFLEHEWWPYLSSYSKLIGSLMRKLVGEDDDFVESVIENFRDMPLNREKMLKAIDVFDRFSVYFVKYQSNRDNVYSDKAQNTSIANRIVNDNFPKFVDNLIVYQRLKDCCPDELEAIEDNLQDKLKGLALDDVFEISYYNQCLTQNGIEKYNWILGGNPNENVFGLNSVGNQYLQHHPESNLKLRNLQMTPLYKQILSDRVRLSFLPEQFKSDDELMRSVSDFLNGLESQDCFAQIEKTMNSLKERETDLNKIFVQGANLTKLSTLLYGNWSLLGEKLRSTLITGNTKKDKEARNKEIEAWLENKCFSLSQIIAVEEELMEQVAHPLSVIELFTNMTIWKYDVERHEWVKKSLLKQCHDARITEFNTLMNRYKKGMPIKSDAAKETLKSVLDNYMELLHVVELLRLGNKTAYLEKDDFYLPYENLFETDNDNTSILSIVPLYMKVQTYLTRKLKKSEKLLLKFDSPTRANGWNDCSIAIKNGKYYLVLYLQKLLDEEVSKLYSGDSAEIVIYHQQKADFRNAPRLFINSKGDRRSPSVSKYHLPIEMIESLYKEQKGLKTQTEKKLFEERHPDYNEKLIDYYKIGFMHHEDFAAYRHTFESMWKKSSDYDSVQEFFEHTQEMCYMLTLKSIDYDYLYRLQNTGKLLLFRISNKDFNEQAKGTPNMHTLYWNELFSKENLTDVIYKLSSQGIEFFYRNAVSQQSFIHEKGSILVNKTFSDGAPIEDELYRKFLLHFNGKQVELSDDEVVLLPKVVTKKAKFNIVKDKRYHEHKFFLHIPITINFKESGISQKQFNERTLDILRDNKDGLNIIGIDRGERNLIYVSVINQKGENLITPRHFNLIESSTFEGLVRKFDYLAKLKQTEKNRDSARKNWTTMDRIKDLKSGYLSQVVHEIAKLVVQYKAIVVLEDLNFGFKRGRFNVERQVYQNFEKMLIQKLNYLVFKRDAPSSEYGNIRSGLQLTAPFTSFKDLGKQSGWIFYVPAGYTSKIDPVTGFVNLFNMNKPASSLKQFFGAFKNIKYEKGLFYFTFDYSNKDFNTVKIDYKNQWTLSSHGTRIVGKEKEFKDLTTEFVEFFRKVNLPLQQVSVQSILTLDDIQLQKLWGLFKLLLKMRNSNDKTDFIISPVSGECPFITGSDNLLGIEDADANGAYNIALKGLYWVYYGFPKDGDFLKYISDSEWFKFIQTKPYLTD

SEQ ID NO: 26 - protein, 1314 aa, unidentified
  REGION 1..1314: note = Category: MG11 effectors
  REGION 1..1314: note = Description: MG11-28 effector
  source 1..1314: note = uncultivated organism sequence
MNNLRQFTGIYPVSKTLRFELKPVLLDGQTVNDFWDIYLNGSTDNDLHKLYLHDKRRNDYYPIMKVILDQFHKKFIALALEQFEVGDKGVTWESLALAYQEDKKSKTFQRLQEEMRGKIRKAFTEHEWWSYISSYSKLIGSLIKQKVEDDDDFVESIQESNPKMSLDRDKMLQAIETFNNFSVYFGNYRDNRNNMYSDKDQATSVANRIVNENYPKFLDNIVVYNRLKDTCNNELKAIESNLSKVLNGISLDDVFTPKYYNRCLTQNGIETYNWVLGGSPNEGVLGINSVGNEYLHHHPDSQLKLRSLKMTQLHKQILSDRVRISFLPEQFNSDEELMQNVSAFFEAFESSKLFVHIQETLNILKDSDTDLNKIYVLGKNLSRLSTLLYGKWDVLGEKLRSVMVTGNTQKAQKDKDKEIEAWLENKCFSLAQIKAVENELMELSTRPLSLMELLTNLTIWKYDSENKIWSKKSLPKLCMDARITEFNVLMDKYKQGKLTIKTDAAKEVLKSVLELYMELFHVIELLRLGNKSPYLEKDDFYIPYEHLFESTDDTVLVSHIVPLYMKVQSYLTRKLADQGKMLLKFDSPTRANGWNDCSIAIKDGKYYLLLYLESLTNEEIAALYSGDSADLVIYQQQKTDYRNAPRLFINSKGDNQAPAVSKYHLPIEMVESLYKERKALKTQSAKREFDERHPDYLEKLINYYKIGFLRHEDFQPFQRTFENMWKDSLEYNSVQEFFEHTQELCYLLTFKPIDFDSLLNLQKSKKLLLFSITNKDYKEKAKGTPNMHTLYWEELFSKDNLSNVVYKLSGQGIEIFHREAISPELSFVHKKGSILVNKTFSDGTPIDTELYKKLLRHFNGLDVDLKPEEVNLLPMVRTKKAQFDLMKDKRYYEHKFFLHVPITINFKASATSQKQFNERTLNILRDSKEGLNIIGIDRGERNLIYVSVINQRGENLIAPRHFNLIETRTYDGKERKFDYLTKLKQTEKNRDEARKNWTTQEKIKDLKSGYLSQVVHEIAKLVVRYNAVIVLEDLNFGFKRGRFNVERQVYQNFEKMLIQKLNYLAFKKDAPSMDYGTIQSGLQLTAPFTSFKELGKQSGWLFYVPAGYTSKIDPSTGFVNLFNMNKPADSLREFFGAFDEITYRDGLFYFSFDYSKDVFFKVRTDFKNKWTLASHGERIVGKEKERKDLTAQFVKFFEEEANVPLEKVSVQTVSSLDESQLKTLWGLFKLLLKMRNSNDDTDFIISPVASDHPFITGKDNSMQIADADANGAYCIALKGLYWLYNDFPAEQGYLKYIKDEDWFRFIQTKPYRQD

SEQ ID NO: 27 - protein, 1235 aa, unidentified
  REGION 1..1235: note = Category: MG11 effectors
  REGION 1..1235: note = Description: MG11-29 effector
  source 1..1235: note = uncultivated organism sequence
MLDKFASLYPVTKTLRFRLLPQGRTEENMQAAKVLENDLERSEAAAVVKGLIKKYHLQFISDTLSGSTLSWQALTETLDKFKADHTATAELDSALAAYRCKLAELFTKSPKYKVMATPVSIIKEILKTETDPENIAALNKLNGYTYIIFDYVSTRMLTYSADAKATSLAYRLVDENYLRFYQDISAAAEISAVLEEAGFDNAEVEAFIRTDYNTCLTSEGIASFNAAAGSINQFVNVLLQQNPVLQSEPALRRHLQPLYKMLLDEAESKIIKFEDYGQLRDAVENFRRNFQDLPQSLIDIFAGRYDYSKIYVGYKYLNEASSQIAGGYNWKLLENALEDFYSKPYLVNGKMPVKYKTVVNKKMNQLAYSFTELQEALDAGDSGSSITDLFGKYAELHAAYAAADGNVFYKEYDRKSIASLKNYLDAVNAIARFIKIFAVPEVYVKDEGFYGIVDGAADKLRDFDLLYNMVRNYITKKPYKKTKVALTFNSSSFGRGWDENKIYDELTTIFTYNGKYYLGVINKNDKPDLAAAVSKDEGGYKRMVYKTFDIVKQLPRLSFTKAVKTHFAESDEDFIFDGPKFAKPLRVPKEIYLQSFTDNGDKLPDSAKKYTKAYLDMSGDYKGYYEAIVKRIDYTKKFLSAYKSTSIYDLAFLKPADQYEQWSNFTDDVQTALYKIRWDNIPAAAIDEMVESGKLYLFEIYSADLYKNPAEGRKIDTQAQIFKEIFSENGQKVIKLLGNCEVYFRPASLPAVVTHPKGSILVHKQLVNGKTLPDEVYREIYRYLNKKSENLSPLAKQLLDKELVKYRVAQEDIIKDKRFTENQYSFHLPVTLNYKVKQQFYINMEVMNMLRSRKDINILGINRGTRNLLYVTVINQQGEILYSRSLNEFNGVDYRDKLLVKERGIKDAAMNWQAADSIKNIKEGYLSRALGEIVRLMVKFNAICVVENLSSNFRNAGGGIFAYGNFYKGFETNLIKKLNCLIIKDAEKDKAGSVLRSLQMTRSFESFEKAGRQSGWLFMLDPAYISAVDPLTGFVNLFSFRNLKTIRQKAEFLQKFKSINYVPETKAFDFVFDYKDFGVTACGPVSCWVATSDVERIVKTTENGKVKFESVLPSMQLAKLFTDKDIDFTDGHNLISEITADSRLVTETLSIFMNIMRLYNYDIDRNNDYVSSPVMGRFDTRYDKKLHNPDELAAYNMARKGLMIIKRAQASEKDSKVDLFIKNADWFSFLQTGSI

SEQ ID NO: 28 - protein, 167 aa, unidentified
  REGION 1..167: note = Category: MG11 effectors
  REGION 1..167: note = Description: MG11-30 effector
  source 1..167: note = uncultivated organism sequence
MPLNKFVLTSKGKKWINVNNNGQWETIPTEPTKDLLKLFENRIDINGDIRAQITENKMSSEFYYDLTHIFKNVVQLRNSKIGDASVDYILSPYLLEDGTTFNSLDIQEQVQNGKNVMLPIDADANGAYHIALKGLMALETITEDGKIKISNKNTDWFEFIQKKKYRN

SEQ ID NO: 29 - protein, 496 aa, unidentified
  REGION 1..496: note = Category: MG11 effectors
  REGION 1..496: note = Description: MG11-31 effector
  source 1..496: note = uncultivated organism sequence
MKNNQFNENFREFTNQYSLTKTIRMELVPYNNDAKKLIHDYKSGCENGISKGKKFANNYVIVKKILDDYYRSQINEKLSVINLNDDKKIENAFDLFVNNKNDKNNKQFENSLKSLRIIIASALKPIKEIKYEKLINLYEVKGEKTCELIEFIKQNETLSEPDKEKYINAVSLFNSFVGYFSGYKENRNNMFSEKAEITAISNRLINENMLLYFENCLKLEKIKNNAEELHDELCEILKEFVLPKNYSMLLTQDKIEEYNKLIGHDASDKFAKGCNQLINEYRLKYPEKKKVIPFLNQLYNQILFRDIKTQNGIEKISTDKELFEIINVYIQNTLDDYLKTADNLFYDKTLFSDIYFLSNKFSSLSTILFESKNKSYSILKRKLAESNFDISKPVKINDIENNFKIDVYKILKCKYDQMNLEIKKNIERIKPILMLEKLNDDKSVPKIDNGNDKGGIGFQQIAIIQSLFNSIIELNRFMQLFSLELNGQKIEIENKN

SEQ ID NO: 30 - protein, 1282 aa, unidentified
  REGION 1..1282: note = Category: MG11 effectors
  REGION 1..1282: note = Description: MG11-32 effector
  source 1..1282: note = uncultivated organism sequence
MKDLNQFIGKYKVEKTLRFELAPIGKTEAWMESKGVIANDKRRADNYTIVKSLIDRYHKVCIRESLTGCNLNWTRLSEAVETYRRCQDTESRKALLKCQDEYRTEIAKKFLSFEDFAELTAPSPSALIKDTLPHHVTNKVHPEFSDIDDVDNAKQALSLFEGFAMYFESYQKNRSNLYTAKNIASSVAHRIVNDNFSKFLANIKVFENLRVIYPEIIEQCTNELRQLLKGKQLEEVFRVESFNNVLTQEGIDFYNTIIGGVSVQEGEKKFQGINELVNLTLHKEDQGRGKRTALTMVPLFKQILSDRNTYSYIPERINDEEELISVLRAFHAHLASFYLNGKEVNVMEELLKIVENINHFDPNGIFVDAKKLNGISKKLYDGLFELRTKMTSHLEEQKQTKKNIEKFFQKDAFSITELSLDKKHSLVKYFTGLKDVLKAIDQKWEQFETRNNKDGQKKYKDCHTGIELIKNLLDGYKEFFAVCSVLDVDSENALDNNFYGIFTPLLTELRGIIPLYNQVRNFLSQKPSDEKKYLLKFDNSKCSDGWDAPQTKSVRIFRGQGKFLLGVTDSENRSCLNDLSSYTPISPDDQIVFLDYSQGGHMGQNLLTLVVREGKTVMVKGRKENGENLGLERQLKELLPPDIYRIRKSQSYKNESPNFSKEDLLLFVDYYKQRAKEYYSHFSFTFKDSCYYASFTELVEDIDEKAYQIKFVPTSYKNLLRLVNEGKLYLFDIKNKDYEPGAHGKKNLHTLYWEQLFCQENLENLTIKLNAKSTLFCRPQIVANPKTHKKGSMLLNRKDKNGQPIPESIYQQLYKYVNGKIAEAKMSDEAKGYLDKIAVKEAQYAITKDKRYTKQKYFIHFSTTLNANAPKTTDINKEVLDYIKDNPDVNIIGIDRGERNLLYVTLINQKGEILDQKSLNIINGFDYHAKLEQREKERDEAQRSWQSVGNITDLKEGYLSAAIHEITTMMIENNAIIVLEDLNRGFKRGRFKFEKQVYQMFEKKLIEKLNYLCSKDIKPTANGSVLRGYQLTEKFVSFEKMTKQNGILFYVRPDYTSAIDPVTGFVTHFNFKDITNTKGRKDFFENMESITYKNGYFEFTFDYRKYKPKVKDFKNIWTVCSSGKRVLWSKETKEYTDYYPTTAISGAFASRGITLDEGADVKALLSGIDDSISNADFYRILFEAFKRIVQLRNTNSNTGEDYIHSPAIQDGKQYCSLDELRKWKDNGESSIPSLPIDADANGAYHIALKGLYLMLNLQAKQIENEKWFRFVVEKPFKEEKVM

SEQ ID NO: 31 - protein, 1308 aa, unidentified
  REGION 1..1308: note = Category: MG11 effectors
  REGION 1..1308: note = Description: MG11-33 effector
  source 1..1308: note = uncultivated organism sequence
MKDLNQFIGLYPVSKTLRFELKPVLQEGQTIDDFWNVYLNGPEKDVLHTLYTHDKERNDNYPIMKALLDQFHKNFIASALEDFEDGNGNVTWQKLEMEYQKNKKSKDYQDLQKKMRNKIREAFKKHELWPCISSYSTLISKQLKQMVKENEDGFVEAVQESHPKMELDRDKMLKAIETFNRFSVYFGNYQDNRNNMYSEEAQSTSIANRIVNENLPKFLDNIIVYQRLKDNCPNELKEIETNLSTTLNGLSLDDIFVPEYYNNCLTQNGIEKYNWILGGNPNEGVLGINSIGNDYLQHNPDSNLKLRNLEMTKLYKQILSDRERIAFLPEQFANDDELMQSINDFLDAFDSMNIFSCIQETMKILKDSNTNLEKIYVQGSKLTKLSTLLYGKWDVLGEKLRSTTVTGNTKKAQKEREEEIEKWLESKCFSLAEIKAVEDELMAQSAHPLSLMELLTDLTLWKYDQENNIWSKKSLIKLCEDSRITEFNVLMNDYQQGSISIKKDEAKEILKSVLDHYMELLHVLELLRLGKKSEYVEKDDFYTPYESLFEADDDKITISHIIPLYMKVQGYLTRKLTDQGKILLKFDSPTLANGWDDCSIVIKDNKYYLMMYLERLDDKETRALYAGNSADLVIYQQQKTDFRNAPRLFINSKGENRSPAVSKYNLPIEMVESLYKERKSLSSQAAKKAFDEQHPDYNTKLIDYYKIGFLRHDDFAPFRHTFESMWKSSSEYGSIQEFFEHTQEMCYMLSFKPIAFDYLCHLQKDGKVLLFNITNKDFNDGAKGTPNIHTLYWKELFSKDNLSNIVYKLSSQGIEFFYRKAIEKETAFVHKKGSVLVNKTFSDGTPIAGELYKKFVKHFNGSEVNLTQEEIVLLPMVKTKTAKFNITKDKRYYEHKFFLHVPITINFKASETTQKQFNERTLDIFRRNKQDLNIIGIDRGERNLVYVSVINQRGENLIPPRSYNLIGNYNYLAKLKQTEKNRDEARKNWTTIERIKDLKTGYLSQVVHEIAKLMVQYNAIVVLEDLNIGFKRGRFNVERQVYQNFEKMLIQKLNYLAFKKEMPSQECGNIRSGLQLTAPFTSFKDLGKQCGWLFYVPAGYTSKIDPSTGFVNLFNMNKPSTSLQEFFGAFDEIAYRNGLFYFTFDYSKEEFNTVKTDYTNRWTLSSHGNRIIGKEKELKDLTTKFREFFEKEVNMPLAEVSVQKVSSLEENKLQELWGLFKLLLKMRNSNDEYDYIISPVASETPFITGKDNRMQITDADANGAYNIALKGLYWLWNDFPTAEKGYLSYIKDEEWFRFIQTKPYLRDA

SEQ ID NO: 32 - protein, 1298 aa, unidentified
  REGION 1..1298: note = Category: MG11 effectors
  REGION 1..1298: note = Description: MG11-34 effector
  source 1..1298: note = uncultivated organism sequence
MRFSTNLDPNFSKMFEVKKTIRMELVPYNEDAKHLIHDYKSGLKNGISKGKKFADNYLLVKKVLDEWYRREINKKLLNINLNDDKKIENAFDLFVNNKIEKNEKQLEKALKTLRREIALLLKPIKDEKYDKLINLHNDGDSKTCELIKVIKKNENFSDVEKENYINAVKLFDAFAGYFSGYKENRNNMFSEKAEITAISNRLINENMILYFENCLKIEKIKNNAEELYDELCKILKEFVLPMNYSMLLTQDKIEKYNKLIGHEASDKFAKGCNQLINEYRLKYPEKKKVIPFLNQLYNQILFRDIETQNGIEKISTDKELFEIINVYIQNTLDDYLKTADNLFYDKTLFSDIYFLSNKFSSLSTILFEPENKSYSILKRKLAESNFDISKPVNINDIENNFKIDVYKILKCKYDQINLEIKKNVERIKPILLLEKLNDDKSVPKIDNGNDKGGIGFQQIAIIQNLFNSIIELNRFMQLFSLELNGQKIEIENKNLDFYYQYEKICELNKDFTIYLKTKDYLTKKPYSNDKIRLFFDNNSYFLNGFVESKTDTSDHGTQYGGYLFRKRNSFGEYDYFLGCSKNTKLFREHLASSISEEDRSEFERFYYYQLKTQTIYNNYKNQNGESYEIDKQKLKDAILDATKECGLPFSYEREDTPTNYLKKIEDENPSLFKLVISNENVMQLQLSIIKNLKTVFGKYVSKVPALKDVIDREYKLLKDFNDDIQTVSSNKIIYYAPVNQKELEDLQNQKEHLKKDAKFYLFKIENKDLRDKSKRINKIGTDNLHTMYFKALMSENQYTFDIGAGMVFFREQNYTGKKIIHEKNKPIKNKTYRYTKKESVFEYDIIKDKRYFEDKFFLHLSLSINYTKSSLKISDLNSKVNKFLYKNRNEITIMGIDRGERNLIYLTIIDLKGNIILQKSMNELIYNVKTDGTEFQVQKNYHTMLNNRVKERDLAKKSWGVIDSIKELKEGYLSQVVHEIILLMMRYNSIIVMEDLNPNFKHSRISIDSQIYQKFEKALIDKLGYLVLKRDEVIDGEIIEKGNVLNGFQLACPVPAIKDMKNQNGFIFYVWPQYTSKIDPISGFVSMFDTSEKNIDGYIAFFKKFSAIKYNGQDFEFYIDDYQLFFDKKNKMPLNKFVLTSKGTRWVNVKNNGKWESIPTEPTKDLLKLFENRIDINGDIRTQITENKMSSEFYYDLTLIFKNVVQLRNSKTGDASVDYILSPYLLENGTTFNSLEIQEQVQNGKNVMLPIDADANGAYHIALKGLMALETITEDGKIKISNKNTDWFEFIQKKKYKN

SEQ ID NO: 33 - protein, 1304 aa, unidentified
  REGION 1..1304: note = Category: MG11 effectors
  REGION 1..1304: note = Description: MG11-35 effector
  source 1..1304: note = uncultivated organism sequence
MARIIDEFCGQENFNDFVGLFSLTKTIRMELVPYNENAKHLVCDIQTDSDNAIERARTFANNYVIVKKILDNYYRQEINNKLLNYNLNVDNKIGKAFDLFLANKTTKETKLFDTILKDLRGQVVNELKSIKEIKYDNLINLHDVNGEKTCLLIELIKKDKSLSESEKEKKINAIKTFDKFAGFFSGYKENRNNMFSDKTEMTAIANRLINENMIFYFENCFKLEKIKNYALDLYNALCEILHDFVCPTNYGKLITQDAIEGYNTLIGHSFADKYSKGCNQIINEYRINHPDLKKHIPFLNRIYNQILFRDKKIENNSNEIITDKELFERIDSYTRYSLSDYLQSVDSLFNDRDLFSEIYFLPNKLNILSQILFEKERNSFSILKKKLAEKNIDSSIPVTLENISLVCSLDVYEILKCKYDQISSAIKTNLEHLKPILLLDKLNDDRSVPKLGAEYDKGGLGFQQIGIIQHFFNSVIELNRFVQLFSLELNGKEVEIENKNFDFYHRYCLINEFKDDFSIYLKVKDYLTRKPYSNDKVRVYFENNSYFLNGFVESRTEKSDHGTQYGGYLFRKLNSSGDYDYFLGCSKNAKLFREHLASSVSENDKSTYERFYYYQLKTQTIYYNYRNEQGETYEIEKQKLKDVILQATKENGRLFEYDDKDTPTNYLNKIERENQSLYKAIIENENVKQLQLSIIKNLKFAFEKYVSKVPALKDILDKDYQFLKDFNDDIQEVSNNKIIYYAPVSQQEWESVLNFTEDSSDKGKFYLFKIQNKDLKDKSNRKNKSGIDNLHTLYFKTLMSEHQHTFDIGAGMVFFREKNYRGKKIIHQRNKPIQNKTPNYSKLESLFEYDIVKDKRYFENKFFLHLSMMINYSKSSLRMADLNTKVNKFIYNNKDSINIMGIDRGERNLIYITIIDQKGNILLQKTMNNLTYMVKNAEADFFVNKDYHKLLSNRVKERDVAKKNWGTIDSIKELKEGYLSQVVHEIVLLMMRYNAIIVMEDLNPNFKRSRINIESQIYQKFEKALTDKLNYLVLKKDEVIDGKKIVKGDVQNGLQLTCPVPAIKDMKNQNGFIFYVWPQYTSQIDPITGFVSLFDTRAKNIEGYLSFFKKFSAIRFNGEDFEFTVDNYQQFCNQKDVMPFNSFVITSRGVRLIKVKKGSRWETITVEPTKQLYQLFENKIDIYGDIRAQITDVNMSSDFYYELMLIFKSIVQLRSSKSGDSSIDYILSPILLDDGTTFDSYQQKILEENGERALLPIDADANGAYHIALKGLMALDTITSDGKIKISNKNSDWFMFIQKKDYKK

SEQ ID NO: 34 - protein, 1302 aa, unidentified
  REGION 1..1302: note = Category: MG11 effectors
  REGION 1..1302: note = Description: MG11-36 effector
  source 1..1302: note = uncultivated organism sequence
MRNVENFTGLYQISKTLRFELKPMLKSGETTEDFWNRYINGNEDDRLHKLYMSDDGRHEKYPLMKAMLDQWHKIFISRVLSQFSETVVTWQQIAEAYINKSDDYKTLQEEMRKSIRKSFESHVWWKYMSAEFKNLISEQIRYMVENNENNFIETVQNSNPKMNATREDMLEAIDSFANFSAFFDIYKDNRMNMYSHEDKTTSIANRVVNENFPKFLDNIKVYEKLKEICPDELKIAENSLQAQLNGKTLDDVFKPEYYNNCISQQGIEVYNWIIGGNPNENVIGINSIGNEYIQSHPDTNYKLRNLKMTQLFKQILSDRVRLSFIPEQFGSDDELMQSISSFLDEVESSKLMTRIKETMGSLLDGTVNLEKVYIQGTNLTKLSAMMYGGSNWNALGEKLRAMTVNSKTKKGQAEIDEKIDSWLAKKCFSVAQTQKASYEISKEIQSSVTLLDVLGRLVAHKCDSETKTWSDKSYIDICNNARIIQFKELMNGYKSGNVSIKDDSAKEIIKTVLDNYIELFNVVNLLRLNKKMDSLDKDDFYVAYNALFESEDELTITQIIPLYNKVRNYLTRKLSNGGKIELKFDSPTRANGWNDCSIIIKDGKYYLAMYIDKISNVDTERLYAGNTASLVESKQQKTDFKNLSRLFFYSKGTKLAPAVTEYNLPIETISDMYNEKRGISGAAKLKEFNKKYPDFTRKMIDYLKVGLSKHSSFSMFSENFRSLWKDSSEYKSIKEFCDHTQTICYAVSLRPISFEYLYTLQNENKMLLFNITNKDFNSGSYGTPNLHTLYWKELFSEENMKNPVYKLSSQGVKFFFREAITEEKPYKHRKGSTLVNKTFADGTPIEGTLYKRLMLFLNGADIQLTDKEKELLPKLKTRKAKHEIVKNRRYYENKFFFHVPIVINYNVAAETPSLYQFNKSVLDNFRANKRDINIIGIDRGENNLIYVSVIDQHGKNIITPRSYNLIGNYNYMEKMKQVEKNRDEARKNWTTIEKIKDLKNGYLSQVVHEISSLIFRYNAIVIMENLDSEFKRGRYKIERQVYQNFEKMLMDKLNYLVFKRNANETCGTVRDGLQLTAPANFNELGKQNGWIFYVPAAYTSMMDPSTGFVNLFNMKKPAESLQKFFGSFNEITYKNSMFYFTFDYRNFKTIRNDYTNVWTLSSHGMRNYGKNKRLEVLTGLFCNFFDKVGIQYTDVSVKTVSELDESKLVELWNIFKCMLKMRNYNGDNVGFDISPVASENPFITGTNNSMGIMDADANDAYNIAIKGLYWLHNDFPVNDKGYLEYIKDEDWFKFVQSKPYSK

SEQ ID NO: 35 - protein, 1235 aa, unidentified
  REGION 1..1235: note = Category: MG11 effectors
  REGION 1..1235: note = Description: MG11-37 effector
  source 1..1235: note = uncultivated organism sequence
MLDKFASLYPVTKTLRFRLLPQGRTEENMQAAKVLENDLERSEAAAVVKGLIKKYHLQFISDTLSGSTLSWQALTETLDKFKADHTATAELDSALAAYRCKLAELFTKSPKYKVMATPVSIIKEILKTETDPENIAALNKLNGYTYIIFDYVSTRMLTYSADAKATSLAYRLVDENYLRFYQDISAAAEISAVLEEAGLDNAEVEAFIRTDYNTCLTSEGIASFNAAAGSINQFVNQLLQQNPVLQSEPSLRRHLQPLYKMLLDEAESKIIKFEDYGQLRDAVENFRRNFQDLPQSLIDIFAGRYDYSKIYVGYKYLNEASSQIAGGYNWKLLENALEDFYSKPYLVNGKLPVKYKTVVNKKMNQLAYSFTELQEALDAGESGSSITDLFGKYAELHAAYAAADGNVFYKEYDRKSIASLKNYLDAVNAIARFIKIFAVPEVYVKDEGFYGIVDGAADKLRDFDLLYNMVRNYITKKPYKKSKVALTFNSSSFGRGWDENKIYDELTTIFTYNGKYYLGVINKNDKPDLAAAVSKDEGGYKRMVYKTFDIVKQLPRLSFTKAVKAHFEESDEDYIFDGPKFAKPLRVPKEIYLQSFTDNGDKLADSTKKYTKAYLDMSGDYKGYYEAIVKRIDYTKEFLSAYKSTSIYDLAFLKPADQYEQWSNFTDDVQTALYKIRWDTIPAAAIDEMVESGKLYLFEIYSADLYKNPAEGRKIDTQAQIFKEIFSENGQKVIKLLGNCEVYFRPASLPAVVTHPKGSILVNKQLVNGKTLPDEVYREIYRYLNKKSENLSPLAKQLLDKELVKYRVAQEDIIKDKRFTENQYSFHLPVTLNYKVKQQFYINMEVMNMLRSRKDINILGINRGTRNLLYVTVINQQGEILYSRSLNEFNGVDYRDKLLVKERGIKDAAMNWQAADSIKNIKEGYLSRALGEIVRLMVKFNAICVVENLSSNFRNAGGGIFAYGNFYKGFETNLIKKLNCLIIKDAEKDKAGSVLRSLQMTRSFESFEKAGRQSGWLFMLDPAYISAVDPLTGFVNLFSFRNLKTIRQKAEFLQKFKSINYVPETKAFDFVFDYKDFGVTACGPVSCWVATSDVERIVKTTENGKVKFESVLPSMQLAKLFTDKDIDFTDGHNLISEITADSRLVTETLSIFMNIMRLYNYDIDRNNDYVSSPVMGRFDTRYDKKLHNPDELAAYNMARKGLMIIKRAQASEKDSKVDLFIKNADWFSFLQTGSI

SEQ ID NO: 36 - protein, 844 aa, unidentified
  REGION 1..844: note = Category: MG11 effectors
  REGION 1..844: note = Description: MG11-38 effector
  source 1..844: note = uncultivated organism sequence
KYAELHAAYAAADSNIFYKEYDRKSIASLKNYLDAVNAIARFIKIFAVPEVYVKDEGFYGIVDGAADKLRDFDLLYNMVRNYITKKPYKKSKVALTFNSSSFGRGWDENKIYDELTTIFTYNGKYYLGVINKNDKPDLAAAVSKDEGGYKRMVYKTFDIVKQLPRLSFTKAVKAHFEESDEDYIFDGPKFAKPLRVPKEIYLQSFTDNGDKLADSAKKYTKAYLDMSGDYKGYYEAIVKRIDYTKEFLSAYKSTSIYDLAFLKPADQYEQWSNFTDDVQTALYKIRWDNIPAAAIDEMVESGKLYLFEIYSADLYKNPAEGRKIDTQAQIFKEIFSENGQKVIKLLGNCEVYFRPASLPAVVTHPKGSILVNKQLVNGKTLPDEVYREIYRYLNKKSENLSPLAKQLLDKELVKYRVAQEDIIKDKRFTENQYSFHLPVTLNYKVKQQFYINMEVMNMLRSRKDINILGINRGTRNLLYVTVINQQGEILYSRSLNEFNGVDYRDKLLVKERGIKDAAMNWQAADSIKNIKEGYLSRALGEIVRLMVKFNAICVVENLSSNFRNAGGGIFAYGNFYKGFETNLIKKLNCLIIKDAEKDKAGSVLRSLQMTRSFESFEKAGRQSGWLFMLDPAYISAVDPLTGFVNLFSFRNLKTIRQKAEFLQKFKSINYVPETKAFDFVFDYKDFGLTACGPVSCWVVTSDVERIVKTTENGKVKFESVLPSMQLAKLFTDKDIDFTDGHNLISEITADSRLVTETLSIFMNIMRLYNYDIDRNNDYVSSPVMGRFDTRYDKKLHNPDELAAYNMARKGLMIIKRAQASEKDSKVDLFIKNADWFSFLQTGSI

SEQ ID NO: 37 - protein, 391 aa, unidentified
  REGION 1..391: note = Category: MG11 effectors
  REGION 1..391: note = Description: MG11-39 effector
  source 1..391: note = uncultivated organism sequence
MLDKFASLYPVTKTLRFRLLPQGRTEENMQAAKVLENDLERSEAAAVVKGLIKKYHLQFISDTLSGSTLSWQALTETLDKFKADHTATAELDGALAAYRCKLAELFTKSPKYKVMATPVSIIKEILKTETDPENIAALNKLNGYTYIIFDYVSTRMLTYSANAKATSLAYRLVDENYLRFYQDISAAAEISAVLEEAGFDNAEVEAFIRTDYNTCLTSEGIASFNAAAGSINQFVNVLLQQNPVLQSEPALRRHLQPLYKMLLDEAESKIIKFEDYGQLRDAVENFRRNFQDLPQSLIDIFAGRYDYSKIYVGYKYLNEASSQIAGGYNWKLLENALEDFYSKPYLVNGKMPVKYKTVVNKKMNQLAYSFTELQEALDAGESGSSITDLFG

SEQ ID NO: 38 - protein, 798 aa, unidentified
  REGION 1..798: note = Category: MG13 effectors
  REGION 1..798: note = Description: MG13-2 effector
  source 1..798: note = uncultivated organism sequence
FESDEDVLVAIEKAYVELYERVLCNERSLKELLCHLSDYDLNNIYVCNDLQLTDISQRLFGGWEVIQKAMIEELKRTVPRKSKSEKDEAYEERIQKMYKTFKSISIAQINHCLTSCKENDVQTIEGYFSNLGAIHTDTIQRENLFVRIENAYTDVKELLNTPYPKEKLLAQDKYNVEKIKTLLDSIKDLQHFVKPLLGKGDEAEKDEKFYGELVALWEELDKITPLYNMVRNYVTKKPYSIKKIKLNFENSTLMNGWDVNKERDNTTVILRKDGLYYLAIMNKKYNRVFDVDVMEMHGDCYEKMEYKLLPGANKMLPKVFFSKSRIDEFQPSEVLLENYKKETHKKGENFKLSDCHALIDFFKSSIEKHEDWNKFGFKFSDTCTYQDLSGFYREVEQQGYKISFRNVSVDYINSLVDEGKIYLFQIYNKDFSPYSKGTPNLHTLYWKMLFDERNLTDVVYKLNGEAEVFYRESSIHVEKPTHPANQSIKNKNELNEKKHSVFPYDLIKHRRYTVDKFQFHVPITMNFKGMGQENINHSVNEYIRESEDLHIIGIDRGERHLLYLTLIDMKGNIKEQYSLNEIVNEYKGNTYRVDYHDLLEKREKERMEARQSWQTIENIKELKEGYLSQVIHKISQLMVKYHAIVVLEDLNTGFMRGRQKIEKQVYQKFEKMLIDKLNYLADKQKSPEELGGILNAYQLTSKFVSFQKLGKQSGFLFYTPAWNTSKIDPVTGFVNLFDTRYETREKSRAFFGKFDFICYNADKDWFEFTFDYGKFTSKAEGTRTRWTLCTQGMRIETY

SEQ ID NO: 39 - protein, 1256 aa, unidentified
  REGION 1..1256: note = Category: MG13 effectors
  REGION 1..1256: note = Description: MG13-3 effector
  source 1..1256: note = uncultivated organism sequence
MEFKDFTNQYKMNKTLRFELKPVGHTLELIRQNAIISSDEGLAEAYQKVKKIIDEYHRYYIETQLANLQLQCEEQTDAKGKGKCNSLAEYYALRGDESDSGKKNFKKVKELLRKQVSDCLQKSAEYKTIFKKELIQVDLINFVNGLDISEEEKSKRRKLIEAFNNFTSYFVGFHQNRENMYTFEEKSTSIAYRLINENLPKFIDNISVFVKISEVPELKDKISQLTEDFSSYLGGVSVENVFKLEYFNKVVTQRQIEVYNALIGGRSEGDTKIQGLNEYINLYNQKHPEAKLPRFKVLYKQILSDREPISWLPEQFKRDGDLLDAVREYHEEMQLVAENIMVLLSDIKNYNLDGIFVSNDTQLTSISKALDENGNWGRIQRDFIEYFKSQNKKKKNEGDEKYYERMKDLYDANKSFSISEINSVAGLNVEEYFANMEVRDYTDDTARKKINVFDAISDAYSDVEYLLTSEYPKEKHLISEENDIESIKCLLDTWKSLQHFVKPLLGTGDEPAKDNAFYGEFNEYWDKLNKLNALYNKVRNYLTRKPYSDEKIKLNFRSAQLLGGWDQNKETDCLSVLFMKDGKYYLGIMNKRVKEDLDYNENKGNNKIFATKLSSTGDCYQKMVYKLLPGANKMLPKVFFSESRINEFAPSAKILHIREIGSYKSGDTFNLDDCHALIDFYKESLQKHEDWSKFNFEFPDTSEYSNINEFFEDVERQGYKVEFQPISVKVIDKFVNEGKLYLFEIYNKDFSEHSKGTPNLHTIYWKMLFDERNLKDVVYQLNGQAEVFFRKKSLDNKFPTHPAGTPIKNKNKQNPKKESVFEIDLIKNKRYTEDKFLFHVPITMNFKSGKIGSLNSKVLEYIKEADDLHIIGIDRGERNLLYVVVIDKNGNICEQVSLNQIGNVNYHNLIDEREGNRQKQRENWKTIEGIKDLKQGYLSQAVRIIADLMVKYKAIVVLENLNLGFMRGRQKVEKSVYQQFEKMLIEKLNYLVDKKAAPNLPGGALKAYQLANKFESFRAIGRQCGFLFYIPAWNTSKIDPATGFVNMLNPRYESIEKSKDYIGKFDAIRYNADKDYFEFDIDYSEFTVRAEGTKLKWPLCSYGTRIENYVDSQSGKWASRTVILTDEFKRAFKDLDINGDLKGQILSQSEKSFFEDLFRVLRLLVQLRNSEIQEHGESVKEPEDYILSPVANSEGVFFDSRKADDSMPKDADANGAYNIARKGLMIVNQVKQEKDLDKFKSDLTNKNWLNFAQEGK

SEQ ID NO: 40 - protein, 1256 aa, unidentified
  REGION 1..1256: note = Category: MG13 effectors
  REGION 1..1256: note = Description: MG13-4 effector
  source 1..1256: note = uncultivated organism sequence
MEFKDFTNQYKMNKTLRFELKPVGHTLELIRQNAIISSDEGLAEAYQKVKKIIDEYHRYYIETQLANLQLQCEEQTDAKGKGKCNSLAEYYALRGDESDSGKKNFKKVKELLRKQVSDCLQKSAEYKTIFKKELIQVDLINFVNGLDISEEEKSKRRKLIEAFNNFTSYFVGFHQNRENMYTFEEKSTSIAYRLINENLPKFIDNISVFVKISEVPELKDKISQLTEDFSSYLGGVSVENVFKLEYFNKVVTQRQIEVYNALIGGRSEGDTKIQGLNEYINLYNQKHPEAKLPRFKVLYKQILSDREPISWLPEQFKRDGDLLDAVREYHEEMQLVAENIMVLLSDIKNYNLDGIFVSNDTQLTSISKALDENGNWGRIQRDFIEYFKSQNKKKKNEGDEKYYERMKDLYDANKSFSISEINSVAGLNVEEYFANMEVRDYTDDTARKKINVFDAISDAYSDVEYLLTSEYPKEKHLISEENDIESIKCLLDTWKSLQHFVKPLLGTGDEPAKDNAFYGEFNEYWDKLNKLNALYNKVRNYLTRKPYSDEKIKLNFRSAQLLGGWDQNKETDCLSVLFMKDGKYYLGIMNKRVKEDLDYNENKGNNKIFATKLSSTGDCYQKMVYKLLPGANKMLPKVFFSESRINEFAPSAKILHIREIGSYKSGDTFNLDDCHALIDFYKESLQKHEDWSKFNFEFPDTSEYSNINEFFEDVERQGYKVEFQPISVKVIDKFVNEGKLYLFEIYNKDFSEHSKGTPNLHTIYWKMLFDERNLKDVVYQLNGQAEVFFRKKSLDNKFPTHPAGTPIKNKNKQNPKKESVFEIDLIKNKRYTEDKFLFHVPITMNFKSGKIGSLNSKVLEYIKEADDLHIIGIDRGERNLLYVVVIDKNGNICEQVSLNQIGNVNYHNLIDEREGNRQKQRENWKTIEGIKDLKQGYLSQAVRIIADLMVKYKAIVVLENLNLGFMRGRQKVEKSVYQQFEKMLIEKLNYLVDKKAAPNLPGGALKAYQLANKFESFRAIGRQCGFLFYIPAWNTSKIDPATGFVNMLNPRYESIEKSKDYIGKFDAIRYNADKDYFEFDIDYSEFTVRAEGTKLKWTLCSYGTRIENYVDSQSGKWASRTVILTDEFKRAFKDLDINGDLKGQILSQSEKSFFEDLFRVLRLLVQLRNSEIQEHGESVKEPEDYILSPVANSEGVFFDSRKADDSMPKDADANGAYNIARKGLMIVNQVKQEKDLDKFKSDLTNKNWLNFAQEGK

SEQ ID NO: 41 - protein, 1255 aa, unidentified
  REGION 1..1255: note = Category: MG13 effectors
  REGION 1..1255: note = Description: MG13-6 effector
  source 1..1255: note = uncultivated organism sequence
MNDFIRLYPLSKTLRFKLIPLRKTLEYIVSNGLLEQDRHRAESYVRVKDIIDNYHKAFIERVLSTFKLQYADRQSKDSLEEYYTYYMVGNKTEEQLKVFSEIQEKLRKQIAGCLVSDPVFKRIDKKELIKEDLVDFVSTEEERQLIAEFKDYTTYFTGFHENRRNMYSSEAQSTAIAYRLIHENLPKFIDNLQVFSKMAATSVAEKLPQLYADFEEYLNVAEINDMFRLDYFNVLLTQTQIDVYNAIIGGKALEDGTRIQGLNEYINLYNQQQKDKHVRLPKFKLLYKQILSDRNAISWLPDEFVSDNETLEAIERCYEDLESQILNRKVEGEHSLKTLLEGLEEYDLAKIYVRNDLQLTDISQKIFGDWSVVQRTYIDTFKNENPLTKKETMDKYEERIEKYWKGLKMLSIADIDARLILSGKDKTQTFACYFRRLGKDVKNDVEQNVFERIEIAYLNVKDLLNTPYPAHKNLAQDKESVEKIKLFLDAVKDLQYFVKPLLEKGLEVEKDERFYGEFIPLWEELDKITPLYNKVRNYLTRKPYSTQKIKLNFENSTLMDGWDENKERDNCTVILRKDGLYYLAIMNRNHRKIFDKKIMPSSGECYEKMVYKLLPGANKMLPKVFFSKSRIGEFNPSVRVREIYEKGTFKKGNDFNLEDCYAMIDFFKESINKHEDWSKFGFHFSKTEDYKDLSDFYKEVEQQGYKVSFVNVSQSYVDQLVDEGKLYLFQIYSKDFSPYTKGTPNMHTLYWKMLFDEQNLADVVYKLNGQAEVFYRKASIKSDRPTHPANVPIANKRKGTEKKESVFAYDLIKDKRYTVDHFQFHVPITLNFKSRGADNINQLVNEYIKQTGDELKIIGIDRGERHLLYLTLIDTKGRIVSGMQFSLNQVDQTDYHQLLTQREEERLKARQSWRTIENIKELKEGYLSQVVHTIATLMVEHNAIVVLEDLNMGFMRGRQKVEKQVYQKFERMLIDKLNYLVDKKKESSEAGGLLKAYQLTSKFESFQKLSKQSGFLFYVPAWNTSKIDPVTGFVNLFDIRYESVDKSKIFLAKFDDIRYNAGKDWFEFSFDYSHFTSKAQDTRQNWTVCSYGERIETYRNPTKNMNWDNREVLLTDEFKNLFQTYGIDYSAGSLKEQILNQTEKSFFCNEKLDKKTPIGLLQLLKLTLQMRNSITGTEVDYLVSPVVDEKGQFYDSRTCGDDLPQNADANGAYNIARKGLWVVQQIRQSTDLKKLKLTISNKEWLRFVQQKLYLE

SEQ ID NO: 42 - protein, 1298 aa, unidentified
  REGION 1..1298: note = Category: MG13 effectors
  REGION 1..1298: note = Description: MG13-7 effector
  source 1..1298: note = uncultivated organism sequence
MNDNRTDFNQFSNLYSQSKTLRFSLEPEPKEKTLENLGFIKKENVWVLDEKNSLLGQDKERADDYKKVKGLIDDYIKDFIEKSLSHLELNKEDLENFEKLYKKKGKNEEERICFDEIKAKLRGQIADYLKNDPCYPSILKESKGKGKGKGKKVVDHSSNASTNPSVPEVNKKKEKGKSKKEDNETFFFEHLYNFVEEDDRRYIDKFKKFTTYFRGFNENRKNLFTEEAQATAIAYRLVHDNLPKFIDNMQCFEAFKDAGLADKLPELYASLGAEPGVGTIDEMFRLDYYSRLLTQSHIDIYNAVIGGKTTDKEKIQGLNELVNLYNQQQTDRSMRLPLFKPLFKQILSDRGSLSWLPEQFGSDNEVLESIEACYKELEYTFSSLKQLLEELGNYDLHKVYVYYAMLPPISLAVYDDWSAIYRALDAAFMRENPRKKNEKDEKYEERRQKYFKNKSACSIAEVEEALVVQDADSPHALAGYFSRLDAGREDGEASADLFARIAALHKEAEPLLTASYPKEKNLARDKEGVGKLKNLLDAVKALQHFVAPLAATAEQPDKDERFYGQLMPLWHSLGQVTPLYNQVRDYLTRKPYSVEKIKLNFENSTLMDGWDVNKIRDNTTVILRKDGAYFLAIMDKKHNKTFDAKNIQTDGVCYEKMDYKLIPGPNKMLPKVFFSQKGKSEFNPSSQIMEIYEERGSFKKGDSFRIEDCRALIDFYKDAISRHPDWKNFGFQFSETQSYNDISDFYHEVEMQGYSISFSPVSENYINSMVDGGKLYLFKIYSKDFSSKSKGRPNLHTIYWRMLFDPRNLADVSFRLNGGGEVFYRKASLPNEPEKPTHPAGRPIANKRAGAKKKESCFNYDLIKDERFTERHFELHVPITLNFKSRQIKDINQMVKEYIHDAADLHVIGIDRGERNLLYLSLIDMQGRIVKQESLNRVDRTDYHALLEKREVERQKARRSWQTIESIKELKEGYLSQVVRVVANWMVEYHAIVALENLNFGFKRGRQKVEKQVYQKFEKMLTDKLCYLVDKTKDADEPGGALRAYQLAKPLEKSANMGFQNGFLFYVPAWNTSKIDPVTGFVNLFDTRYESKDKAKDFFKKFDAIRYNEATGLFEFVFQYSEFPTKAEGTRDGWTLCSHGERIEAFKDKAGHWDTCTVNLTEELKKLFAHYGIALDGDLRAAISRQTDKKFFQNDKREGDCPRGLMQLFRLMVQMRNSEPGTNTDYLISPVADAQGRFFDSREVGDDLPKDADANGAYNIARKGLWLVRKIKEGASPEELKLTNQEWLSFAQEKPYEE

SEQ ID NO: 43 - protein, 1231 aa, unidentified
  REGION 1..1231: note = Category: MG13 effectors
  REGION 1..1231: note = Description: MG13-9 effector
  source 1..1231: note = uncultivated organism sequence
MKFQDFTNLYPLNKTLRFELQPIGKTKENIERKGFLFNDKQRAGDYKKVKRIIDEYHKKLIDESLASFTLQYENKGKKDSLLEYYESLKSARTSNNETFAKIRTNLRQQISKCLRRSEEYKRIYKKELFSQDLPQFVAEENLDLIKKFNGFATYFSGFHQNRQNMYSDDAKSTAIAFRMIHENLPKFIDNIDIFNKIKHIPEIAENLAQLYKDFEQYINVGKIDEVFELPYFNYTLTQSQIEIYNAIIGGKSEGDIKIKGLNEYINIYNQTHKESRLPKFKVLYKQILSDREHISWLPEQFNDDNELLQAIKEYYDSIYNHLANLRVILETLDTYDLCGVFVRNDQQLTNISKRVSNDWSKIQSAITEDLKQVRRQKKKEDSETYEEELRKLYKKQGSFSIDYIYKVADLQINSYFTNLDAINTEDLQQENIFARITNAYTEIRSLLEEPYPANKKLIQDKNDVVTIKVFLDTLLELLHFVKPLLGTGEESDKDNRFYSEFIPIWEKLNLLTPLYNKVRNYVTRKPYSVEKYKLNFGSPQLLGGWDKNKEKDCLSVLLRKDGKYFLGVMNKHNNKIFEQFPCDGDCYEKVVYKLLPGANKMLPKVFFSKSRIGEFMPSEEVLDIYDSGSFKKGANFNLQDCHKLIEFYKGAIAKHEDWSKFEFDFSNTESYDDISGFYREVEEQGYKLTYQLISVSYIDTLVEEGKLYLFQIYNKDFSKHSKGTPNMHTLYWKMLFDERNLADVVYQLNGGAELFYRERSIEYDKPTHPAKIPIKNKNTHNPKNESCFRYDLIKNRRYTIDKFQFHVPITLNFKSPGRDNINSLVCDYLHSTENTHIIGIDRGERNLLYLVVINPKGEICEQISLNEICNYHNGNLHKTDYHNLLDKREKDRHNERQSWQTIEGIKELKEGYLSQVIHKISELMVKYNAIVVLEDLNSEFMRGRQKVEKSVYQKFEKMLIDKLNYLVDKKADPAIPGGLLRAYQLTNKFDSFTKLGKQSGFLFYVPAWNTSKIDPATGFVNLLDLRYESEDKAKLLLSKFDSIRYNNDKDRFEFKIDYNKFTTKAAGTRTKWTICTYGTRIETFRNPAKNSQWDSREVNLTAEFKDLFEGMDICGNLKEIIMQQNGKQFFERLLHLLRLTLQIRNSITGTDVDYIISPVANDRGEFFDSRNSDTTMPQDADANGAYNIARKGLMIIEQIKNSDTPQSIKFDLSNKRWLQFAQQEDKDVVYL

SEQ ID NO: 44 - protein, 1254 aa, unidentified
  REGION 1..1254: note = Category: MG13 effectors
  REGION 1..1254: note = Description: MG13-10 effector
  source 1..1254: note = uncultivated organism sequence
MKNILEQFVGLYPLSKTLRFELKPLGKTLEHIEKKGLIAQDEQRAEEYKLVKDIIDRYHKAFIHMCLKHFKLKMYSEQGYDSLEEYRKLASISKRNEKEEQQFDKVKENLRKQIVDAFKNGGSYDDLFKKELIQKHLPRFIEGEGEEEKRIVDNFNKFTTYFTGFHENRKNMYSDEKESTAIAYRLIHENLPLFLDNMKSFAKIAESEVAARFTEIETAYRTYLNVEHISELFTLDYFSTVLTQEQIEVYNNVIGGRVDDDNVKIQGLNEYVNLYNQQQKDRSKRLPLLKSLYKMILSDRIAISWLPEEFKSDEEMIEAINNMHDDLKDILAGDNEDSLKSLLQHIGQYDLSKIYIANNPGLTDISQQMFGCYDVFTNGIKQELRNSITPTKKEKADNEIYEERINKMFKSEKSFSIAYLNSLPHPKTDAPQKNVEDYFALLGTCNQNDEQQINLFAQIEMARLVASDILAGRHVNLNQSENDIKLIKDLLDAYKALQHFVKPLLGSGDEAEKDNEFDARLRAAWNALDIVTPLYNKVRNWLTRKPYSTEKIKLNFENAQLLGGWDQNKEPDCTSVLLRKDGMYYLAIMDKKANHAFDCDCLPSDGACFEKIDYKLLPGANKMLPKVFFSKSRIKEFSPSESIIAAYKKGTHKKGPNFSLSDCHRLIDFFKASIDKHEDWSKFRFRFSDTKTYEDISGFYREVEQQGYMLGFRKVSETFVNKLVDEGKLYLFHIWNKDFSKHSKGTPNLHTIYWKMLFDEKNLTDVVYKLNGQAEVFYRKKSLDLNKTTTHKAHAPITNKNTQNAKKGSVFDYDIIKNRRYTVDKFQFHVPITLNFKATGRNYINEHTQEAIRNNGIEHIIGIDRGERHLLYLSLIDLKGNIVKQMTLNDIVNEYNGRTYATNYKDLLATREGERTDARRNWQKIENIKEIKEGYLSQVVHILSKMMVDYKAIVVLEDLNTGFMRSRQKIERQVYEKFEKMLIDKLNCYVDKQKDADETGGALHPLQLTNKFESFRKLGKQSGWLFYIPAWNTSKIDPVTGFVNMLDTRYENADKARCFFSKFDSIRYNADKDWFEFAMDYSKFTDKAKDTHTWWTLCSYGTRIKTFRNPAKNNLWDNEEVVLTDEFKKVFAAAGIDVHENLKEAICALTDKKYLEPLMRLMTLLVQMRNSATNSETDYLLSPVADESGMFYDSREGKETLPKDADANGAYNIARKGLWTIRRIQATNSEEKVNLVLSNREWLQFAQQKPYLND

SEQ ID NO: 45 - protein, 1249 aa, unidentified
  REGION 1..1249: note = Category: MG13 effectors
  REGION 1..1249: note = Description: MG13-11 effector
  source 1..1249: note = uncultivated organism sequence
MKEFTNLYPVSKTLRFDLQPIGRTKENIERNGILQRDEKRAEDYKTVKGFIDEYHKQFIKDRLWSYKLPLYSEGHLNSLEEYQALYELSKRDETQEREFAEVKDNLRAFIAKRLTEGGSAYDRIFKKELIREDLVDFLENEDDREIVRQFADFTTYFGGFHENRKNMYSAEEKSTAIAYRLIHQNLPKFMDNMKAFAKIAESSVSEHFEEIYEGWKEYLNVGSLEEIFRLDYFSVTLTQPHIEVYNYIIGKKILEDGTEIKGINEYVNLYNQQQKDKTKRLPFLVPLYKQILSDREKLSWMAEEFDSDDQMLTAINESYSHLHDLLMGDDNESLRSLLEHLKDFNLEQINITNDLSLTDISQHLFGRYDVFTNGIKDELRIITPRKKKEDDESFEDRISKIFKTQKSFSIALLDKLPQPVMEDGKLRTVEDYFLSLGAVNTGLTQKENLFAQIENAYEDARTILQLKNTDDTLSQDKPAVAKIKTLLDALKDLQHFIKPLLGSGEENEKDELFYGSFQMMWDELDTVTPLYNKVRNWLTRKPFSTEKIKLNFDNSQLLGGWDVNKEPDCTGVLLRKDGLYYLGIMDKKSNRIFEADVTPTDGVCYEKFDYKLLPGANKMLPKVFFSKSRIDEFSPSETIIASYKRGAHKKGANFNLAECHRLIDFFKQSISKHEDWSKFGFHFSDTKTYEDISGFYREVEQQGYMLSYHPVSSSYINQLVDEGKLYLFRIWNKDFSEFSKGTSNLHTLYWKMLFDEQNLANVVYKLNGQAEVFYRKASIKSENRIIHKANQPINNKNELNKKDTSTFEYDIIKDRRYTVDKFQFHVPITINFKATGQTNINPIVQDVIRQGGFSHIIGIDRGERHLLYLSLIDLQGNIVKQMTLNDIINEYKGQTYKTNYHDLLAKREGERTDARRSWETIETIKELKEGYLSQVVHIISKMMVEYNAIVVLEDLNTGFMRGRQKIERQVYEKFEKMLIEKLNCYIDKHAEPTEETGLLHPLQLTCDAKKWTRSHQCGCLFYIPAWNTSKIDPVTGFVNLLDTRYDTREKARLFFSKFQRISFNVDMGWFEFAFDYNDFNTKAEGTRTQWNLCTFGERIRSFRNPKKNNQWDDERIVLTDEFKQLFEKYDIDIAGNLKEAISAQSDAQFFKELLGLMKLLLQMRNSVTNSEEDYLLSPVADENGHFFDSREGISSLPIDADANGAYNIARKGLWVIRKIQETQEDEKVSLNITNKEWLQFAQTKPYRND

SEQ ID NO: 46 - protein, 1262 aa, unidentified
  REGION 1..1262: note = Category: MG13 effectors
  REGION 1..1262: note = Description: MG13-12 effector
  source 1..1262: note = uncultivated organism sequence
MRKFDEFVGLYPISKTLRFELKPIGKTLEHIQRNKLLEEDAVRADDYVKVKKIIDKYHKCLIDEALSGFTFETEVDGRSNNSLSEYYLYYNLRKRNEQEQKTFKTIQNNLRKQIVNKLTQSEKYKRIDKKELITTDLPDFLTNESEKELVEKFKNFTTYFTEFHKNRKNMYSKEEKSTAIAFRLINENLPKFVDNIAAFEKVASSPLAEKINALYEDFKEYLNVEEISRVFRLDYYNELLTQKQIDLYNAIVGGRTEEDNRIQIKGLNQYINEYNQQQTDRSNRLPKLKPLYKQILSDRESVSWLPPKFESDKELLIKIKECYDALSEKEKVFDKLESILKSLSTYDLSKIYISNDSQLSYISQKMFGRWDIIGKAIREDCAKGNPQKNRESLEKFAERIDKKLKAIDSISIGDVDECLAQLGEPYVKRVEDYFAAMGASDMVEEQTDTTSFKKNIERAYKSVKELLNNADNITDNNLMQDKGNVEKIKTLLDTIKDLQRFIKPLLGKGDEADKDGVFYGEFTSLWTKLDAVTPLYNMVRNYLTSKPYSTKKIKLNFENSTLMDGWDLNKEPDNTTVIFRKDGLYYLGIMGKRYNRVFVDREDLPHDGECYDKMEYKLLPGANKMLPKVFFSETGIQRFRPSEELLGKYERGTHKKGAGFDLGDCRALIDFFKKSIERHDDWKKFDFKFSDTSTYQDISEFYREVEQQGYKMSFRKVSVDYIKSLVEEGKLYLFQIYNKDFSAHSKGTPNMHTLYWKMLFDEENLKNVVYKLNGEAEVFFRKSSITVRTPTHPANSPIKNKNKDNQKKESKFEYDLIKDRRYTVDKFLFHVPITMNFKSVGGSNINQLVKRHIRSATDLHIIGIDRGERHLLYLTVIDSRGNIKEQFSLNEIVNEYNGNTYRTDYHELLDTREGERTEARRNWQTIQNIRELKEGYLSQVIHKISELAIKYNAVIVLEDLNFGFMRSRQKVEKQVYQKFEKMLIDKLNYLVDKKKPVAETGGLLRAYQLTGEFESFKTLGKQSGILFYVPAWNTSKIDPVTGFVNLFDTHYENIEKAKGFFDKFKSIRYNSDKDWFEFVVDDYTRFSPKAEGTRRDWTICTQGKRIQNYRNPQRNNEWEGRKIDLTKAFKEHFEAYGVDISKDLREQINTQNKKEFFEELLRLLRLTLQMRNSMPSSDIDYLISPVADDTGCFFDSRKQAELKENAVLPMNADANGAYNIARKGLLTIRKMKQEENDSAKISLAISNKEWLKFAQTKPYLED

SEQ ID NO: 47 - protein, 1261 aa, unidentified
  REGION 1..1261: note = Category: MG13 effectors
  REGION 1..1261: note = Description: MG13-13 effector
  source 1..1261: note = uncultivated organism sequence
MKQKKSQNPFNQFTGLYPLSKTLRFELRPIGKTKENIISAGILAEDNHRAESYKKVKKIIDEYHKAFIERVLKNLDLDKGALQAFYECYKKSTKEEKREETLQEIGNNLRSQISNAFKKDPKYSTLTSKDLINKELPSIATTEEERILLEEFHGFSTYFVGFHQNRENMYSKEEKATSIAYRLINENLPKFIDNIRSFEKIANSPIADKLESIYNEYAKEGYMNVNNLNEMFEISFYNRVLTQTQIDLYNAIIGGKTEKDGRKTQGINEYINLYNQRGEVQKKDRLPLLKPLFKQILSDREHISWFEEGFVDDQAMLSAIKDFYLKLTETEPTTTESILDRTRSLLRNIADYDLTKIYLEYTSLSKISQQIFGEWDRIQRALEAEYDATHLQRKKTKTYEEQKEQYFQSLKSVSIGFIDECLNSFETEKQLSLSIKEYIAQVGKKNDDPDLIEHITASYKAVKAILTTEWPKERNVAQEKDIVALIKKLLDRIKDLQYFIKPLLGSGKESDKDNLFYGELASIWEVINTVTPLYDKVRNRMTRKPYSTEKIKVNFRNSHFLSYWPQDYETKGGILFEKEGLYYLAIIDKKLKAKDIERLHCTKSNAVRIIVDTQKPDNKNTPRLFIRSKGENYAPAIDEYKLPIHEIIDLYDRKLFKKPLKGASPEDTEIFKASLTKLIDYFKLGFSRHESYRHYKFNWKKSDEYNDIDEFYQDTIESCYQIIRQPIDWDVVEEYTKEGKIYLFQIYNKDFSSHSKGTPNMHTLYWKTLFDEQNLANVVYKLNGEAEIFFREASLERKVTHPANEPIKTKNPETSIREKTFAYDLIKDKRYTEDKFQLHVPITMNFKGLNVKNINSRVNNYIKTEEDLHFIGIDRGERNLLYVCVIDSKGNIKEQYSLNEIVTQYNRTDYKYLLEKREEEREKERRSWQTIENIKDLKQGYLSQVVHKIAQLMVQYHAIVVLEDLNSGFKRSRQKVEKSVYQQFEKSLIDKLNYLVDKQLPIDEEGGVLRAYQLTNKFESFKTMKMQNGFLFYIPAWNTSKMDPTTGFVNLFDTRYTNINKSKEFFEKFEAIRYNEEKDWFELEFDYKNFTAKAEGTQTQWTLCTWGERINTFRNKSKNSSWDYKTINLTEEYKALFEQFSINYRGNLKKEILEQTSKDFFERLLSLLRLTLQMRNSIPNTDTDYLISPVADANGCFYYSEQCGDNLPKNADANGAYNIARKGMWMAEQIRRSNEGDELNLAISNKEWLRFVQEKPYLEEK

SEQ ID NO: 48 - protein, 1253 aa, unidentified
  REGION 1..1253: note = Category: MG13 effectors
  REGION 1..1253: note = Description: MG13-14 effector
  source 1..1253: note = uncultivated organism sequence
MNNLEQFTGLYPVSKTLRFELLPIGKTKENIEKNGILQRDEKRAEDYKLVKVFIDEYHKQFIKDRLWNFKLPILNEGNHDSLEEYQALYELSKRDDVQEAEFTEVKDNLRGIIAKRLTEKGSAYERIFKKELIREDLVDFLENEEDKNIVRQFEEFTTYFGGFHENRKNMYSAEEKSTAIAYRLIHQNLPKFMDNMKAFAKIAESSVSEHFEEIYEGWKEYLNVGSIEEIFRLDYFSETLTQPHIEVYNYIIGKKILDDGTEIKGINEYVNLYNQQQRDKSKRLPFLVPLYKQILSDREKLSWMAEEFDSDEKMLAAINESYNHLHDLLMGDENESLRSLLTHLKDFNLERINITNDLSITDISQHLFGRYDVFTNGIKGKLREITPRKRKESDEGFEERISKIFKTQKSFSISFLNKLPQPVMEDGKSRSIEEYFMSLGAINTVTTQKENLLAQIENTFENARDVLHMKDTGDALSQNKPAVAKIKAFLDTLKDLQHFIKPLLGSGDENDKDELFYGSFQMMWDELDTVTPLYNKVRNWLTRKPYSTEKIKLNFDNSQLLAGWDVNKEPDCTGILLCKGSFYYLGIMDKRSNRIFDSRITPSDGDCYDKIDYKLLPGANKMLPKVFFSKSRIDEFAPSESIVSNYKRGTHKKGTGFNLSDCHKLIDFFKESINKHDDWSKFNFHFSDTKTYDDISGFYREVEQQGYMLSTHPVSSAYINQMVNEGKLYLFRIWNKDFSEFSKGTPNLHTLYWKMLFDERNLANVVYKLNGQAEVFYRKASIKPENCIIHRANQPIINKNEFNKKQTSTFEYDIIKDRRYTVDKFQFHVPITINFKAMGQANINPIVQETIRKGGFSHIIGIDRGERHLLYLSLIDLKGNIVKQMTLNDIINEYKGQTYKTNYHDLLTKREGDRTDARRSWDTIETIKELKEGYLSQVIHIISKMMIEYNAIVVLEDLNTGFMRGRQKIERQVYEKFEKMLIEKLNCYIDKQANPQSIGGQLRPIQLTNKFDSFQKLGKQSGCLFYIPAWNTSKIDPVTGFVNLLDTRYETREKARLFFSKFQRISYNAEKGWFEFAFDYNDFTTKAESTRTQWTLCTYGERIRTFRNPLKNHQWDDERIILTDEFKHLFEKYDIDIRGNIKEAISAQSDAQFYRNLLGLIKLLLQMRNSITNSKEDYLISPVADDFGHFFDSREGISTLPIDADANGAYNIARKGLWIIRKVQETREGEKPSLTIKNKEWLQFAQNKPYLND

SEQ ID NO: 49 - protein, 1243 aa, unidentified
  REGION 1..1243: note = Category: MG13 effectors
  REGION 1..1243: note = Description: MG13-15 effector
  source 1..1243: note = uncultivated organism sequence
MKQFTNLYPVSKTLRFELIPQGETRAHLNDLIAEDEQRAEDYKEVKKYIDRYHKWFIDDCLSKVPNSPLGEEMIRLLNKFIEANDEKDGEGPDKVQDDLRKLIVKALKSGVSLDKDPEQEERFKSLFSEELVKNILPNFVQTEEEKSKVAKFRDMTTYFVGFHKNRENMYSEEAQTTAISYRLIHENLPRFLDNIAVYEKIKPVLSDEIVSLEEQLHQNGYVEACCIDSLFSVDFYLRVLTQRGIEQYNAVIGKIVNDESDEIKGLNERINLYNQVHKKEKLPLFKPMYKQILSDREQLSWLPETFENDASLLDAVKGFHQDLLSNDILSRIDKLLSSLQDFNLDQIWIANDVQLRGLSKDLYGDWSLIDRALGIERSEDVVQGLTAAQKKAASAAKKRSSFSIVELNAAIRSRVPDEKYVPVQNYFSAMGKVCAQGEATRENFVTRICAAYQELEEYIPSIRKSLLQEKRATEFIKNYLDAVNDLLRFIKPLLGRGNETDKDANFYGEFAFLTDCLFAIVPLYNEVRNYLTQKPYSTEKFKLNFRGSTLLNGWDKNKEKDNLGVILRKEGKYFLAIMNKKHNTLFTEGKLQQHTGGECYEKMEYKLIPGSKMLPKVFFSQKGISTFQPSEELLLNYRIGTYKKGEKFNLEHLHKLIDFYKHSIAVHEDWSKFDFHFSDTSSYRDISGFYKEVEQQGYKLTFRNVSVSYINRLVEEGKLYLFQIYNKDFSEYSKGTPNLHTLYWKMLFDLENLKDVVYKLSGEAEVFFRKKSLDVSHPTHPQNEPIEKKNINNKGEKSLFSYDLIKDRRFTVDKFQFHVPITMNFKGEQGDRVNQMVQSYVRNHKGLNVIGIDRGERNLLYLAVINEHGEILEQFSLNEIRNAYNGKEHKIDYHTLLEERSKKRQDARQSWQTIEGIKDLKTGYLSQVIHVITQLMVKYNAIVVLEDLNFGFKSSRQKFEQSVYQQFERKLIDKLNFLVNKKVAPNEVGGLLNAYQLTAPLGNSRKMGKQNGFLFYVPAWHTSKIDPRTGFVNLLDTRYENVANSKEFFAKFASITYNPEKKWFEFAFDYKAFGNRADGSRTKWTICSYGERIETFRNPKNNNQWDTKTVPLTERLTELFSNYGIDYTTNLKEQILNQTDKAFFVELLGALRLTLQLRNSRKSTGEDFLFSPVADENGCFFDSRKANDNEPKDADANGAYHIALKGLWVLDTIRNTEEGKNPKLAITNKEWLSFAQAKPFAHE

SEQ ID NO: 50 - protein, 1262 aa, unidentified
  REGION 1..1262: note = Category: MG13 effectors
  REGION 1..1262: note = Description: MG13-16 effector
  source 1..1262: note = uncultivated organism sequence
MRKFNEFVGLYPISKTLRFELKPIGKTLEHIQRNKLLEHDAVRADDYVKVKKIIDKYHKCLIDEALSGFTFETEADVRSNNSLSEYYLYYNLKKRNEQEQKTFKTIQNNLRKQIVNKLTQSEKYKRIDKKELITTDLPDFLTNESEKELVEKFKNFTTYFTEFHKNRKNMYSKEEKSTAIAFRLINENLPKFVDNIAAFEKVASSPLAEKINALYEDFKEYLNVEEISRVFRLDYYNELLTQKQIDLYNAIVGGRTEEDNRIQIKGLNQYINEYNQQQTDRSNRLPKLKPLYKQILSDRESVSWLPPKFDSDKDLLIKIKECYDALSEREKVFDKLESILKSLSTYDLSKIYISNDSQLSYISQKMFGRWDIIGKAIREDCAKRNPQKSRESLEKFAERIDKKLKAIDSISIGDVDECLAQLGETYVKRVEDYFAAMGELEIDDEQIDTTSFKKNIEEAYESVKELLNNADNITDNNLMQDKGNVEKIKNLLDAIKDLQRFIKPLLGKGDEADKDGVFYGEFTSLWTKLDQVTPLYNMVRNYLTSKPYSTKKIKLNFENSTLMDGWDLNKEPDNTTVIFCKDGLYYLGIMGKKYNRVFVDREDLPHDGECYDKMEYKLLPGANKMLPKVFFSETGIQRFRPSEELLGKYERGTHKKGAGFDLGDCRALIDFFKKSIERHDDWKKFDFKFSDTSTYQDISEFYREVEQQGYKMSFRKVSVDYIKSLVEEGKLYLFQIYNKDFSAHSKGTPNMHTLYWKMLFDEENLKDVVYKLNGEAEVFFRKSSITVQSPTHPANSPIKNKNKDNQKKESEFEYDLIKDRRYTVDKFLFHVPITMNFKSVGGSNINQLVKRHIRSATDLHIIGIDRGERHLLYLTVIDSRGNIKEQFSLNEIVNEYNGNTYRTDYHELLDTREGERTEARRNWQTIQNIRELKEGYLSQVIHKISELAIKYNAVIVLEDLNFGFMRSRQKVEKQVYQKFEKMLIDKLNYLVDKKKPVAETGGLLRAYQLTGEFESFKTLGKQSGILFYVPAWNTSKIDPVTGFVNLFDTHYENIEKAKGFFDKFKSIRYNSDKDWFEFVVDDYTRFSPKAEGTRRDWTICTRGKRIQICRNHQRNNEWEGREIDLTKAFKEHFEAYGVDISKDLREQISTQNKKEFFEELLRLLRLTLQMRNSMPSSDIDYLVSPVADDAGCFFDSRKQAELKENAVLPMNADANGAYNIARKGLLAIRKMKQEENDSAKISLAISNKEWLKFAQTKPYLED

SEQ ID NO: 51 - protein, 1262 aa, unidentified
  REGION 1..1262: note = Category: MG13 effectors
  REGION 1..1262: note = Description: MG13-17 effector
  source 1..1262: note = uncultivated organism sequence
MRKFNEFVGLYPISKTLRFELKPIGKTLEHIQRNKLLEDDAVRADDYVKVKKIIDKYHKCLIDEALSGFTFDTEVDGRSNNSLSEYYLYYNLRKRNEQEQKTFKTIQNNLRKQIVNKLTQSEKYKRIDKKELITTDLPDFLTNESEKELVEKFKNFTTYFTEFHKNRKNMYSKEEKSTAIAFRLINENLPKFVDNIAAFEKVASSPLAEKINALYEDFKEYLNVEEISRVFRLDYYNELLTQKQIDLYNAIVGGRTEEDNRIQIKGLNQYINEYNQQQTDRSNRLPKLKPLYKQILSDRESVSWLPPKFDSDKELLTKIKECYDALSEKEKVFDKLESILKSLSTYDLSKIYISNDSQLSYISQKMFGRWDIIGKAIREDCAKRNPQKNRESLEKFAERIDKKLKAIDSISIGDVDECLAQLGEPYVKRVEDYFATMGASEIGEEQIGQEFFKKNIEEAYESVKELLNNADNITDNNLMQDKGNVEKIKNLLDAIKDLQRFIKPLLGKGDEADKDGVFYGEFTSLWTKLDTVTPLYNMVRNYLTSKPYSTKKIKLNFENSTLMDGWDLNKEPDNTTVIFRKDGLYYLGIMGKKYNRVFVDREDLPHDGECYDKMEYKLLPGANKMLPKVFFSETGIQRFRPSEELLGKYERGTHKKGAGFDLGDCRALIDFFKKSIERHDDWKKFDFKFSDTSTYQDISEFYREVEQQGYKMSFRKVSVDYIKSLVEEGKLYLFQIYNKDFSAHSKGTPNMHTLYWKMLFDEENLKDVVYKLNGEAEVFFRKSSITVQSPTHPANSPIKNKNKDNQKKESKFEYDLIKDRRYTVDKFLFHVPITMNFKSVGGSNINQLVKQHIRSATDLHIIGIDRGERHLLYLTVIDSRGNIKEQFSLNEIVNEYNGNTYRTDYHELLDTREGERTEARRNWQTIQNIRELKEGYLSQVIHKISELAIKYNAVIVLEDLNFGFMRSRQKVEKQVYQKFEKMLIDKLNYLVDKKKPVAETGGLLRAYQLTGELESFKTLGKQSGILFYVPAWNTSKIDPVTGFVNLFDTHYENIEKAKGFFDKFKSIRYNSNKDWFEFVVDDYTRFSPKAEGTRRDWTICTQGKRIQICRNHQRNNEWEGREIDLTKAFKEHFEAYGVDISKDLREQINTQNKKEFFEELLRLLRLTLQMRNSMPSSDIDYLISPVADDTGCFFDSRKQAELKENAVLPMNADANGAYNIARKGLLAIRKMKQEENDSAKISLAISNKEWLKFAQTKPYLED

SEQ ID NO: 52 - protein, 1239 aa, unidentified
  REGION 1..1239: note = Category: MG13 effectors
  REGION 1..1239: note = Description: MG13-18 effector
  source 1..1239: note = uncultivated organism sequence
MDNIMKKLNDFTGLYSLNKTLRFELQPVGETADKIKEAGILKDDEYRANNYEAVKKIIDKYHRSFIERVLSGFTFICESSNKENSLEEFYNFYTSTIRDEKKFRTIRSNLRKQIVTAFNEDKDFALLFKKDFIKKVLMEFVETKEEQLLIKKFEKDTTFFKRFNDKRKNIYSADAKHTTIVYRLVHDNLPRFIDNISRFNKLVNCLGLDELQTLCADLKNSLGVRDISNLFELKYYNQVLTQGQIDVYNKIIGGVNKYVNLYNQSQKNRSACLPKLNFLFKQILSEKETISWLPEQFESDNALLASVRNAYQELYIKNKSDLVRLLSNLPEYDLDKIYIKNDDQLSRISKNMFGCSDTIQEALKKELRNTSRKKKDESRIEKEFQKRQSIPIGYINRCLSTEGTETKKIEEYFRECGVTHEDEKSLWNQVEDAYAKVCDLLESAYPQDKTLITDDINIENIKVLLDALKRIQLFVKPLLGNGDETEKDERFYGDFVAVCDTLNEITPLYNRVRNYLTRKPYSKDKIKLIFGESQLLNGWDLNKEQACKSVIFRKGELFYLGIMNKKYNKILEVKNEQSDGDCYEKMELKSFGESFRRIPKSSVAMNEVKTHFDKSEKDYVLDNKKNFLLPLYISKEIYDLGKGGVLDNLRKIEDLEIRRKKLNLWINFCIDFLEKYKSTSIYDVKNLKNKDYEDVNDFYNDVDHICYRITFRNVSVQYIDSLVSDGKLYLFKIHNKDFEPSSKGTPNMHTLYWRMLFDERNLSDVVYQLNGGAEVFFRKASLERRITHPANRPINNKNKNNSKRQSIFKYDLIKDKRYTIDKYLFHVPITLNFNSLNDSDLNTSVQEYIRKSNDLHIIGIDRGERNLVYISVIDLYGNIKAQYSLNEIKNSYLSYSTDYHDLLLNRERERQEARSGWKAIKNIKDLKEGYLSQVVHVIAELMLEYNAIVVLEKLNKGFYRGRQKVEMSVYAKFEKMLIDKLSYYVNKKKDPEDVGGLLNALQLTNKDMDEKSSQNGFLFYVRPQYTSKIDPVTGFVDLFKVQYENKEKAKQFFESFDFIRYNKEKDWFEFSFDYEHFPTKGKSARTSWTVCTHGSRIRSTKSITKNGHWSSEEIILTEEFKRHFEHYGIDWNFDLKDAILAQEDSSFFKDLLSLFKLTLQLRNSRSDVDYIVSPVINENGDRCYDEFLPKDGDANGAYNIARKGLYLVRKIKESNSLDCLSIEDKEWFDFAQKRPYLKI

SEQ ID NO: 53 - protein, 1243 aa, unidentified
  REGION 1..1243: note = Category: MG13 effectors
  REGION 1..1243: note = Description: MG13-19 effector
  source 1..1243: note = uncultivated organism sequence
MKTFNDLTGLYSLSKTLRFELKPVGKTKDNIETKGIIAQDEKRAEEYKKVKDIIDRYHKSFIDMCLAGLVLKTTSDGNNDSLKDYVALASKSNRDEKEDKDFDDVKTALRKQIVDAFKKGGSYSDLFKKELIQVHLPDFVTDEQEKQMVENFGKFTTYFTGFNENRQNMYSDEEKSTSIAYRLIHENLPMFIDNIKSFAKIAEHEDIDFLPDIENGFKEELKRLKVQSISEVFDLANFTNTLTQSQIDSYNAIIGARYDENGDKVQGINEYVNLYNQQHKDARLPLLKPLYKMILSDRVALSWLPEEFATDEEMLAAINETHGNLKNVMTDVRKLLQNIDSYDTEHIYIANDKGLTDISQQIFGQYDVYTSAIKAELRDSITPSAKERKDPELLEKRINDIFKASKSFSIEYLNSHVDSDKTIQSYYKELGAYDRNGEQRINLLSQIELAYVDAHDVLLGKHTNLNQSEDSIKKIKALLDAYKALQHFIKPLLGNGDEADKDNEFDAKLRAIWDELDIVTPLYDKVRNRLTRKPYSTEKIKLNFDNAQLLNGWDMNKEPDCTSVLLRKDGQYYLAIMDKKSNHAFDIDELPCDGECYDKMDYKLLPGANKMLPKVFFSKSRIKEFAPSKEICDAYQKGTHKKGANFSIKDCRRLIDFFKDSIAKHEDWSKFPFTFSDTSTYEDISGFYREVEQQGYMLGYRKVSVSFINQLVDEGKLYLFQIWNKDFSEYSKGTPNMHTLYWKMLFDERNLANVVYKLNGQAEVFYRKRSLDLNKTTIHRANQPIANKNMQNEKRESTFSYDIVKNRRYTVDKFQFHVPITINFKATGSDNINASVLDVIRNNGIEHIIGIDRGERHLLYLSLIDMKGNIVKQMTLNDIINEYKGNTYTTNYKELLQAREGDRKEARQNWQKIENIKELKEGYLSQVVHVITKMMVEYKAIVVLEDLNGGFMRGRQKIERQVYEKFEKMLIDKLNYYVDKQKDANENGGLLHAYQLASKFDTFKKLGKQSGCLFYIPAWNTSKIDPVTGFVNMLDTRYENADKARKFFSKFKSISYNADKNWFEFVIDDYSKFTDKAKDTRTDWVLCTYGTRIKTFRNPEKLNQWDNKEIVLTDEFKKVFMEAGIDINGNLKEAICTLTEKKHLESLMQLMKLLVQMRNSETNSEVDYLLSPVADTEGHFYDSRNCDDNLPKDADANGAYNIARKGLWAVMKIKASKPQENLKLGISNKEWLQFAQEKPYLND

SEQ ID NO: 54 - protein, 1238 aa, unidentified
  REGION 1..1238: note = Category: MG13 effectors
  REGION 1..1238: note = Description: MG13-20 effector
  source 1..1238: note = uncultivated organism sequence
MNTYEELTGLYSLIKTINFALNPIGETLRHIEEKGFIAQDEQRAEDYKKVKDIIDRYHKYFITMCLDGFKFSTDKLMKYVALAENAKRDEDAFDEVKTQLRKEIVAAFEKGETYKDLFKKELILKHLPNFVTDENEKRLVASFNKFTTYFKKFHKCRKNMYSDEAKSTAIAHRLIHENLPMFYDNMKSFKKIAACEDCIDLAEFEAAFSEEFKAFKVEHLADIFQLEYFNNTLTQRKIDFYKLVVGGKVLEDGTKLKGVNEYVNLYNQQHKDARLPLLKPLYKMILSDKVALSWLPEEFKSDEEMVEAIQEMHKNLKGALTDNAENNLRDLLLNMGKYDLAHIYIANDLGLRDISQNIFGQYDVYTSALKQALRNEYAPTTDECQNLELYDERINKLFKSRTSFSIAELNSLADCDHTIENHFKQLGAAERNGKQEIDLFSQIETAYAKASDILSGKHGNIGQSEAETALVKNLLDAYKSLQHFIKPLLGHGDEAEKDNEFDAKLRAAWDALDIINPLYNKVRNWLTRKPYSTEKIKLNFENAQLLDGWDKNKETVNTSVLLRKDGMYYLAIMNKKANDAFACDELPSDGDCYEKIDYKQISNARMDLPRVLLPPKNIDKYAPSEEIKDIYSKRTYRKGKNFNLEHCRRLIDFFKRSITKHKDWKNFQFIFSPTEKYECISSFYNEVEQQAYMLDFRKVSVAYINQLVESGNLYLFQIWNKDFSKFSKGTPNMHTLYWKQLFDERNLADVVYKLNWQAEVFYRKRSLKLEETTVHHAHQPIPNKNKQNEKRQSQFNYDIVKNRRFTVDKFQFHVSITLNFKATGGGDINDKVLEIIRNNGIKHVIGIDRGERHLLYLSLIDLKGNIIKQMTLNDIVNEYRGHTYTTNYKDLLAEREDNRTEARRNWKRIDNIKEIKQGYLAQVVHIISKMMVEYKAIVILEDLNMGFMRRWQKIERSVYEQFEKSLIEKLNYYVDKQKDENEVGGLLHAFQLTSKFKSFKELGKQSGCLFYVPAWNTSKIDPVTGFVNLFDTKNVKGEKVRAFFSNFDAIRYNAERDWFEFAFNYSNFTNKARDTREEWTLCTHGTSIRTFRNPSKINHRDSEEVVLTDEFKKVFEKAGIDICGNLKNAICALKEKAHLEKLMQLMKLLLQMRNSKPNTEVDYMISPVADEQGNFYDSRCGNSALPDNADANGAYNIARKGLWVIKQIRETPAGKRPDWAIKNKEWLKFAQQKPYLDD

SEQ ID NO: 55 - protein, 1262 aa, unidentified
  REGION 1..1262: note = Category: MG13 effectors
  REGION 1..1262: note = Description: MG13-21 effector
  source 1..1262: note = uncultivated organism sequence
MRKFDEFVGLYPISKTLRFELKPIGKTLEYIQRNKLLEHDAVRADDYVKVKKIIDKYHKCLIDEALSGFTFDTEADGRSNNSLSEYYLYYNLRKRNEQEQKTFKTIQNNLRKQIVNKLTQSEKYKRIDKKELITTDLPDFLTNESEKELVEKFKNFTTYFTEFHKNRKNMYSKEEKSTAIAFRLINENLPKFVDNIAAFEKVASSPLAEKINALYEDFKEYLNVEEISRVFRLDYYNELLTQKQIDLYNAIVGGRTEEDNRIQIKGLNQYINEYNQQQTDRSNRLPKLKPLYKQILSDRESVSWLPPKFDSDKDLLIKIKECYDALSEKEKVFDKLESILKSLSTYDLSKIYISNDSQLSYISQKMFGRWDIIGKAIREDCAKRNPQKNRESLEKFAERIDKKLKAIDSISIGDVNECLAQLGEPYVKRVEDYFAAMGASEIGEEQIGQEFFKKNIEEAYESVKELLNNADNITDNNLMQDKGNVEKIKTLLDAIKDLQRFIKPLLGKGDEADKDGVFYGEFTSLWTKLDQVTPLYNMVRNYLTSKPYSTKKIKLNFENSTLMDGWDLNKEPDNTTVIFCKDGLYYLGIMGKKYNRVFVDREDLPHDGECYDKMEYKLLPGANKMLPKVFFSETGIQRFRPSEELLGKYERGTHKKGAGFDLGDCRALIDFFKKSIERHDDWKKFDFKFSDTSTYQDISEFYREVEQQGYKMSFRKVSVDYIKSLVEEGKLYLFQIYNKDFSAHSKGTPNMHTLYWKMLFDEENLKDVVYKLNGEAEVFFRKSSITVQSPTHPANSPIKNKNKDNQKKESKFKYDLIKDRRYTVDKFLFHVPITMNFKSVGGSNINQLVKRHIRSATDLHIIGIDRGERHLLYLTVIDSRGNIKEQFSLNEIVNEYNGNTYRTDYHELLDTREGERTEARRNWQTIQNIRELKEGYLSQVIHKISELAIKYNAVIVLEDLNFGFMRSRQKVEKQVYQKFEKMLIDKLNYLVDKKKPVAETGGLLRAYQLTGEFESFKTLGKQSGILFYVPAWNTSKIDPVTGFVNLFDTHYENIEKAKGFFDKFKSIRYNSDKDWFEFVVDDYTRFSPKAEGTRRDWTICTQGKRIQIYRNPQRNNEWEGREIDLTKAFKEHFEAYGVDISKDLREQINTQNKKEFFEELLRLLRLTLQMRNSMPSSDIDYLISPVADDTGCFFDSRKQAELKENAVLPMNADANGAYNIARKGLLAIRKMKQEENDSAKISLAISNKEWLKFAQTKPYLED

SEQ ID NO: 56 - protein, 1275 aa, unidentified
  REGION 1..1275: note = Category: MG13 effectors
  REGION 1..1275: note = Description: MG13-22 effector
  source 1..1275: note = uncultivated organism sequence
MNNLNDLTGQYPVSKTIRFDLQPIGKTKENIEKGGILQQDEQRAEDYKTVKGFIDEYHKQFIKDRLWNFRLPLISEGHLDSLEEYQTLYLLAKRNDAQEAEFKEVKDNLRSIIARRLTEKGSAFERIFKKELIREDLIDFVEKPEDKDLVKSFADFTTYFTEFHKNRANMYTAEEKSTAIAYRLIHQNLPKFMDNIKAFAKIAQTSVAGHFVEIYNGSKEYLNVGSLEEVFQLDYFSDTMTQPHIEVYNSIIGKRVLEDGTEIKGINEYVNLYNQQQKDKRQRLPLLVPLYKQILSDREKLSWLAQEFDSDKKMLAAINETFIHLREILMGEDSESLRSILTHLKDFDLTQINITNDLSLTDISQHLFKRFDVFSNGIKAKIRSITPKKKKESDEELEDRVSKIFKTQKSFSIAFLDNLPQPEMEDGKRRSVADYFTALGAVNNEVTQKENLFAQIEIAYEDARDVLQMTETGDTLSQDKPAVAKIKALLDALKDLQHFIKPLRGSGEENEKDELFYGSFLMMWDELDTVTPLYNKVRNWLTRKPYSTEKIKLNFDSPTLLNGWPNPQTNSGAIFRDEEGLYYLAILDAQNRACLNELSSNVNGNEDHIEMMKYLQGGDMGKNVQNLMVIDGEVRKVNGRKETSGEFAGQNLRLENAKHQYLPKNINEIRLKQSYLTSSPTFNKKDLVSFIEYYIPLVEAYYSDYVFHFRKSSEYKSFADFTEHINQQAYQVQFKPVSKTSLYSLVEEGKLYLFRIWNKDFSEFSKGTPNLHTLYWKMLFDERNLADVVYKLNGQAEVFYRKASIKPENKIVHPANRAIANKNELNKKRTSSFDYDIIKDRRYTVDKFQFHVPITINFKATGQTNVNPIVQDTIRRGGFTHIIGIDRGERHLLYVSLIDLKGNIVKQMTLNEILNEYKGLTHKTNYHDLLAKREGERTDARRSWDTIENIKELKEGYLSQVVHIISKMMVEYNAIVVLEDLNPGFMRGRQKIERQVYEKFEKMLIEKLNCYIDKKAEPIEIGGLLHPLQLSCDIKKWKKSHQCGCLFYIPAWNTSKIDPVTGFVNLFDTHYETREKARSFFSKFQRIHFNSEKNWFKFTFDYGNFTTKAEGTRTQWTLCSYGTRIRNFRNPLKNHQWDDEEVELVDEFKHLFDKYSIDIFGNLKESICNQTDAQFYKELMGLMKLLLQMRNSRTNSEVDYLLSPVADEQGHFFDSREGIGSLPDNADANGAFNIARKGLWIIRKVQGTPSDEKMSLAISNKEWLQFAQNRPYLND

SEQ ID NO: 57 - protein, 1263 aa, unidentified
  REGION 1..1263: note = Category: MG13 effectors
  REGION 1..1263: note = Description: MG13-23 effector
  source 1..1263: note = uncultivated organism sequence
MRDFNEFVGLYPISKTLRFELKPIGKTLEHIQRNELLEDDAVRADDYVKVKKIIDKYHKCLIDEALSGFTFDTEADGRSNNSLSEYYLYYNLKKRNEQEQKTFKTIQNNLRKQIVNKLTQSEKYKRIDKKELITTDLPDFLTNESEKKLVEKFKNFTTYFTEFHKNRKNMYSKEEKSTAIAFRLINENLPKFVDNIAAFEKVASSPLAEKINALYEDFKEYLNVEEISRVFRLDYYNELLTQKQIDLYNAIVGGRTEEDNRIQIKGLNQYINEYNQQQTDRSNRLPKLKPLYKQILSDRESVSWLPPKFDSDKDLLIKIKECYDALSEREKVFDKLESILKSLSTYDLSKIYISNDSQLSYISQKMFGRWDIIIGKAIREDCAKRNPQKSRESLEKFAERIDKKLKAIDSISIGDVDECLAQLGETYVKRVEDYFAAMGESEIDDEQTDTTSFKKNIEGAYESVKELLNNADNITDNNLMQDKGNVEKIKTLLDAIKDLQRFIKPLLGKGDEADKDGVFYGEFTSLWTKLDQVTPLYNMVRNYLTSKPYSTKKIKLNFENSSLMKGWDLNKEPDNTTVIFRKDGLYYLGIMGKKYNRVFVDREDLPHDGECYDKMEYKLLPGANKMLPKVFFSETGIQRFRPSEELLGKYERGTHKKGAGFDLGDCRALIDFFKKSIERHDDWKKFDFKFSDTSTYQDISEFYREVEQQGYKMSFRKVSVDYIKSLVEEGKLYLFQIYNKDFSAHSKGTPNMHTLYWKMLFDEENLKDVVYKLNGEAEVFFRKSSITVQSPTHPANSPIKNKNKDNQKKESEFKYDLIKDRRYTVDKFLFHVPITMNFKSVGVSNINQLVKRHIRSATDLHIIGIDRGERHLLYLTVIDSRGNIKEQFSLNEIVNEYNGNTYRTDYHELLDTREGERTEARRNWQTIQNIRELKEGYLSQVIHKISELAIKYNAVIVLEDLNFGFMRSRQKVEKQVYQKFEKMLIDKLNYLVDKKKPVAETGGLLRAYQLTGELESFKTLGKQSGILFYVPAWNTSKIDPVTGFVNLFDTHCENIEKAKGFFDKFKSIRYNSDKDWFEFVVDDYTRFSPKAEGTRRDWTICTQGKRIQIYRNPQRNNEWEGREIDLTKAFKEHFEAYGVDISKDLREQINTQNKKEFFEELLRLLRLTLQMRNSMPSSDIDYLISPVADDTGCFFDSRKQAELKENAVLPMNADANGAYNIARKGLLAIRKMKQEENDSAKISLAISNKEWLKFAQTKPYLED

SEQ ID NO: 58 - protein, 1250 aa, unidentified
  REGION 1..1250: note = Category: MG13 effectors
  REGION 1..1250: note = Description: MG13-24 effector
  source 1..1250: note = uncultivated organism sequence
MEQLTNLYPVSKTLRFELQPIGKTRENIEKRGILQQDEERAENYKLVKGFIDEYHKQYIKSRLWNFELPLDDEGRHNSLAEYRALYELPKRDAEQETAFTEVKDNLRAIIARRLTEKGSAYDRIFKKELIREDLIEFLEDENDKEIVRQFADFTTYFTGFHENRANMYSSEEQSTAIAYRLIHQNLPKFMDNMKSFTKIAETSVAEHFADIYAGWEEYLNVGSINDMFRLDYFSQTLTQEHIEVYNYIIGKRILDDGTEIKGINEYVNLYNQQQKDKKQRLPLLVPLYKQILSDREKLSWLSEEFDSDIKMQQAIKETYDHLYDLLMGDENESLKSLLMHLGDFDLSQINITNDLSLTDISQHLFGKYDVFTNGIKDKLRIITPRKKKETDEDFEERITKLFKTQKSFSIAELNSLPHPIIEGSQPKNIEDYYMALGAVNTETVQKENLFAQIENAYTDVLPILQLTDTGDKLSQNKAEVAKIKKLLDAFKDLQHFVKPLLGSGEEVEKDERFYGAFQTIWDELDTEIPLYNKVRNWLTRKPYSTEKIKLNFDNAQLLGGWDVNKEPDCTGVLLRKDGFYYLGIMNKKNNRIFEKDMTPSDGDCYDKIDYKLLPGANKMLPKVFFSKSRIDEFAPSASLVEKYKAGTHKKGANFSLKDCHKLIDFFKQSIAKHEDWSKFGFHFSDTNTYEDISGFYREVEHQGYSLSSHNVSVDYIHRMVDEGKLFLFRLWNKDFSEYSKGTPNLHTLYWKMLFDERNLNDVFYKLNGQAEVFYRKASIKEENRIIHPAKKDINNKNALTDKQTSRFDYDIIKDRRFTVDKFQFHVPITINFKAIGQTNINPVVHDIIRQGGIKHIIGIDRGERHLLYLSLIDLQGRIVKQMTLNEIINEYSGHKYKTNYHDLLAKREGERTDARRSWDTIENIKELKEGYLSQVVHVITRMMVKYKAIVVLEDLNMGFMRGRQKIERQVYEKFEHMLIDKLNCYIDKQEDPSKPGGMLHALQLSNKFESFARLGKQSGCLFYIPAWNTSKIDPVTGFVNLLDTHYDTMKAAKSFFSKFECIRYNGENDWFEFTFDYDEFNKKAEGTKTRWTLCTYGTRIRNFRNPQKNNQWDDEEVVLTDMFKKLFDVYGIDYRGNLKEAIQQPTEAKFYQELMLLMKSLLQMRNSKINSEVDYLLSPVADENGHFFDSRQGDATLPDNADANGAYNIARKGLWAIRKIQESPKDEKVSLAISNKEWLTFAQTKPYLDK

SEQ ID NO: 59 - protein, 1252 aa, unidentified
  REGION 1..1252: note = Category: MG13 effectors
  REGION 1..1252: note = Description: MG13-25 effector
  source 1..1252: note = uncultivated organism sequence
MKNLKQFTNLYPVSKTLRFELQPIGKTKENIEKNGILTRDEKRAKDYQVVKGFIDEYHKQFIKDRLWDFKLPLISEGNLDSLEEYQMLYEMARRDDAQEAEFSEIKDNLRAIIAKRLTENGSAYDRIFKKELIREDLVDFLDNEEDKALVRQFADFTTYFSGFHENRRNMYSAEEKSTAIAYRLIHQNLPKFMDNMKAFTKIAETSVAEHFINIYKGWEEYLNVGSIEEIFRLDYFSETLTQPHIEVYNYIIGKKVLEDGTEIKGINEYVNLYNQQQKDKSKRLPFLVPLYKQILSDREKLSWMAEEFDSDEKMLAAINESYTHLHELLMGNENESLRSLLLHLREYDLSQINITNDLSLTDISQHLFGRYDVYTNAIKEQLKIITPRKKKETDEDFEDRISKIFKTQKSFSISFLNNLPHPETEDGKPRSVEEYFISTGAINTETTQKENLFAQIENAYENVRVILKMKDTDDALSQNKPAVTKIKALLDAFKDLQHFIKPLLGSGEELEKDELFYGSFQMIWDELDNVTPLYNKVRNWLTRKPYSTEKIKLNFDNSQLLGGWDVNKEPDCTGILLRKDGFYYLGIMDKKSNRVFEADVTPSDGDCYEKIDYKLLPGANKMLPKVFFSKSRIDEFAPSKSIVSSYKRGTHKKGKDFNLSDCHRLIDFFKRSINKHEDWCKFGFHFSDTHTYDDISGFYREVEDQGYMLSSHSVSSSYINQLVDEGKLYLFRIWNKDFSEYSKGTPNLHTLYWKMLFDERNLSNVVYKLNGQAEVFYRKASIQPENRIIHKAKQSIANKNELNKKRTSTFEYDIIKDRRYTVDKFQFHVPITINFKGTGQFNINPIVQETIRQGDFTHIIGIDRGERHLLYLSLIDLNGNIVKQMTLNDIINEYKGQTYKTNYHDLLVKREGDRTNARRSWDTIETIKELKEGYLSQVVHVISKMMVEYKAIVVLEDLNSGFMRGRQKIERQVYEKFEKMLIEKLNCYIDKQADATEVTGLLHPLQLTCEAKKWKRSHQCGCIFYIPAWNTSKIDPVTGFVNLLDTRYDTREKARLFFSKFQRISFNTEKGWFEFTFDYNDFTTKADGTRTQWTLCTYGERIRTFRNSQKNNQWDNERIILTDEFKKLFDEKEIDISGNIKEAICNQADAQFYRDLLGLMKLLLQMRNSITNSEEDYLLSPVADENGHFFDSRESISNLPIDADANGAYNIARKGLWIVRKIRDNPEDEKLSLTITNKEWLLFAQNKSYLND

SEQ ID NO: 60 - protein, 1249 aa, unidentified
  REGION 1..1249: note = Category: MG13 effectors
  REGION 1..1249: note = Description: MG13-26 effector
  source 1..1249: note = uncultivated organism sequence
MKQFTNLYPVSKTLRFELQPIGKTKENIEKKGILTRDEKRAKDYQIVKGFIDEYHKQFIKDRLWNFKLPLASEGNLDSLEEYQMFYEMPRRDDAQETDFSEVKDNLRVIIANRLRESGSAYDRIFKKELIREDLVEFLSDEEDKNIVRQFADFTTYFSGFHENRRNMYSAEEKSTAIAYRLIHQNLPKFMDNMKAFTKIAKTSVAEHFADIYAGWKEYLNVGSIEEVFRLDYFSETLTQPHIEVYNYIIGKKVLEDGKEIKGINEYINLYNQQQKDKSKRLPFLVPLYKQILSDREKLSWLAEEFDSDEKMLAAIDKLYTHLHELLMGEENESLRSLLMHMKDYDLSQINITNDLSLTDISQHLFNRYDVYTNGVKEQLKGITPRKKKENDEDFEDRISKIFKTQKSFSISLLNGLPHPEIEDSQPRRIEEYFMAMGAVNTATIQRENLFSKIESAYEDARAILQMKDTGDSLSQNKPAVAKIKALLDAFKDLQHFIKPLLGSGEELEKDELFYGSFQMIWDELDTVTPLYNKVRNWLTRKPYSTEKIKLNFDNSQLLGGWDVNKEPDCTGVLLRKDGFFYLGIMDKRYNHIFEADLPHSDDDCYDKVDYKLLPGANKMLPKVFFSKSRIDEFAPSAAIVSSYKRGTHKKGKNFDLSDCHRLIDFFKQSIQKHADWCKFGFHFSDTQTYEDISGFYREVEEQGYMLSSHQVPSSYINELVDGGKLYLFRIWNKDFSENSKGTPNLHTLYWKMLFDKRNLSDVVYKLNGQAEVFFRKASIKPENRVVHKANQSITNKNALNKKTTSTFEYDIIKDRRYTVDKFQFHVPITINFKASGQTNINPIVQETIRQGGFKHIIGLDRGERHLLYLSLIDLNGNIVKQMTLNDIVNEYNGQTYKTNYHDLLTKREGERTDARRSWDTIETIKELKEGYLSQVIHIISKMMVEYKAIVVLEDLNTGFMRGRQKIERQVYEKFEKMLIEKLNCYIDKKADATDATGLLHPLQLTCDAKKWNRSHQCGCLFYIPAWNTSKIDPVTGFVNLLDTRYETREKAHLFFSKFQRISFNQKKGWFEFAFDYADFTTKAEGTRTQWTLCTYGERIRTFRNPQKNNQWDNERIVLTDEFKRIFDEKGIDIFGNLKDAICNQRDAKFFKDLLGLMKLLLQMRNSITNSEEDYLLSPVADEKGHFFDSREGISSLPIDADANGAYNIARKGLWVIRKIQETPENERPSLSITNKEWLQFAQTKPYLKE

SEQ ID NO: 61 - protein, 1238 aa, unidentified
  REGION 1..1238: note = Category: MG13 effectors
  REGION 1..1238: note = Description: MG13-27 effector
  source 1..1238: note = uncultivated organism sequence
MNTYEELTGSYPLIKTINLALNPIGETLRHIEEKGFIAQDEQRAEDYEKVKDIIDRYHKYFITMCLDEFKFSTDKLMKYVALAEDSKRDEDAFDEVKTQLRKEIVAAFEKGETYNDLFKKKLILKHLPNFVTDENEKRLVASFNKFTTYFKKFHKCRKNMYSDEAKSTAIAHRLIHENLPMFYDNMKSFKKIAACEDCIDFAEFEAAFSEEFKEFKVEHLADIFQLEYFNNTLTQRKIDFYKLVIGGKVLEDGTKLKGVNEYVNLYNQQHKDARLPLLKPLYKMILSDKVALSWLPEKFESDEEMVEAIQEMHKNLKGTLIDNAENNLRDLLLNMGKYDLAHIYIANDLGLRDISQSIFGQYDVYTSALKQALRNEYAPTTDECQNLELYDERINKLFKSRTSFSIAELNSLADCDHTIENHFKQLGAAERNGKQEIDLFSQIETAYAKASDILSGKHGNIGQSEVETALVKNLLDAYKSLQHFIKPLLGHGDEAEKDNEFDAKLRAAWDALDIINPLYNKVRNWLTRKPYSTEKIKLNFENAQLLDGWDKNNETVNTSVLLRKDGMYYLAIMNKKANDAFACDELPSDGDCYEKIDYKQISKAKMNLPHGFFPQKNIDKYAPSEEIKDIYSKRTYRKGKNFNLEHCRRLIDFFKRSFTKHKDWKNFQFIFSPTEKYECISSFYNEVEQQAYMLDFRKVSVAYINQLVESGKLYLFQIWNKDFSKFSKGTPNMHTLYWKQLYDERNLADVVYKLNGQAEVFYRKRSLKLEETTVHQAHQPIPNKNKQNEKRQSQFNYDIVKNRRFTVDKFLFHVPIVLNFKATGGGDINDKVLEIIRNNGIKHVIGIDRGERHLLYLSLIDLKGNIIKQMTLNDIVNEYRGHTYATNYKDLLAEREDNRTEARRNWKRIDNIKEIKQGYLAQVVHIISKMIVEYKAIVILEDLNMGFMRGRQKIERSVYEQFEKSLIEKLNYYVDKQKDEKEVGGLLHALQLTSKFKSFKELGKQSGCLFYVPAWNTSKIDPVTGFVNLFDTRYVNVEKARAFFSNFDAIRYNAEKDWFEFAFNYSNFTDKAKDTREEWTLCTHGTSIRMFRNPSKLDHWDGEEVVLTDEFKKVFEKAGIDICGNLKNAICALKEKAHLEKLMQLMKLLLQMRNSKPNTEVDYMISPVADEQGNFYDSRCGNSALPDNADANGAYNIARKGLWVIKQIRETPAGKRPDWAIKNKEWLKFAQQKPYLDD

SEQ ID NO: 62 - protein, 1249 aa, unidentified
  REGION 1..1249: note = Category: MG13 effectors
  REGION 1..1249: note = Description: MG13-28 effector
  source 1..1249: note = uncultivated organism sequence
MKQFTNLYPVSKTLRFELQPIGKTKENIEKKGILTRDEKRAKDYQIVKGFIDEYHKQFIKDRLWNFKLPLASEGNLDSLEEYQMFYEMPRRDDAQETDFSEVKDNLRAIIANRLRESGSAYDRIFKKELIREDLVEFLSDEDDKNIVRQFADFTTYFSGFHENRRNMYSAEEKSTAIAYRLIHQNLPKFMDNMKAFTKIAKTSVAEHFADIYAGWKEYLNVGSIEEVFRLDYFSETLTQPHIEVYNYIIGKKVLEDGKEIKGINEYINLYNQQQKDKSKRLPFLVPLYKQILSDREKLSWLAEEFDSDEKMLAAIDKLYTHLHELLMGEENESLRSLLMHMKDYDLSQINITNDLSLTDISQHLFNRYDVYTNGVKEQLKGITPRKKKENDEDFEDRISKIFKTQKSFSISLLNGLPHPEIEDSQPRRIEEYFMAMGAVNTATTQRENLFSKIESAYEDARAFLQMKDTGDSLSQNKPAVAKIKALLDAFKDLQHFIKPLLGSGEELEKDELFYGSFQMIWDELDTVTPLYNKVRNWLTRKPYSTEKIKLNFDNSQLLGGWDVNKEPDCTGVLLRKDGFFYLGIMDKRYNHIFEVDLPHSDDDCYDKVDYKLLPGANKMLPKVFFSKSRIDEFAPSAAIVSSYKRGTHKKGKNFDLSDCHRLIDFFKQSIQKHADWCKFGFHFSDTQTYEDISGFYREVEKQGYMLSSHQVPSSYINELVDGGKLYLFRIWNKDFSENSKGTPNLHTLYWKMLFDKRNLSDVVYKLNGQAEVFFRKASIKPENRVVHKANQSITNKNALNKKTTSTFEYDIIKDRRYTVDKFQFHVPITINFKASGQTNINPIVQETIRQGGFKHIIGLDRGERHLLYLSLIDLNGNIVKQMTLNDIVNEYNGQTYKTNYHDLLTKREGERTDARRSWDTIETIKELKEGYLSQVIHIISKMMVEYKAIVVLEDLNTGFMRGRQKIERQVYEKFEKMLIEKLNCYIDKKADATDATGLLHPLQLTCDAKKWNRSHQCGCLFYIPAWNTSKIDPVTGFVNLLDTRYETREKAHLFFSKFQRISFNQKKGWFEFAFDYADFTTKAEGTRTQWTLCTYGERIRTFRNPQKNNQWDNERIVLTDEFKRIFDEKGIDIFGNLKDAICNQRDAKFFKDLLGLMKLLLQMRNSITNSEEDYLLSPVADEKGHFFDSREGISSLPIDADANGAYNIARKGLWVIRKIQETPENERPSLSITNKEWLQFAQTKPYLKE

SEQ ID NO: 63 - protein, 1262 aa, unidentified
  REGION 1..1262: note = Category: MG13 effectors
  REGION 1..1262: note = Description: MG13-29 effector
  source 1..1262: note = uncultivated organism sequence
MRDFNEFVGLYPISKTLRFELKPIGKTLEHIQRNKLLEDDAVRADDYVKVKKIIDKYHKCLIDEALSGFTFETEADVRSNNSLSEYYLYYNLKKRNEQEQKTFKTIQNNLRKQIVNKLTQSEKYKRIDKKELITTDLPDFLTNESEKELVEKFKNFTTYFTEFHKNRKNMYSKEEKSTAIAFRLINENLPKFVHNIAAFEKVASSPLAEKINALYEDFKEYLNVEEISRVFRLDYYNELLTQKQIDLYNAIVGGRTEEDNRIQIKGLNQYINEYNQQQTDRSNRLPKLKPLYKQILSDRESVSWLPPKFDSDKDLLIKIKECYDTLSEREKVFDKLESILKSLSTYDLSKIYISNDSQLSYISQKMFGRWDIIGKAIREDCAKRNPQKSRESLEKFAERIDKKLKAIDSISIGDVDECLAQLGETYVKRVEDYFAAMGASDMGEKQTDTTSFKKNIEGAYESVKELLNNADNITDNNLMQDKGNVVKIKNLLDAIKDLQRFIKPLLGKGDEADKDGVFYGEFTSLWTKLDAVTPLYNMVRNYLTSKPYSTKKIKLNFENSTLMDGWDLNKEPDNTTVIFRKDGLYYLGIMGKKYNRVFVDREDLPHDGECYDKMEYKLLPGANKMLPKVFFSETGIQRFRPSEELLGKYERGTHKKGAGFDLGDCRALIDFFKKSIERHDDWKKFDFKFSDTSTYQDISEFYREVEQQGYKMSFRKVSVAYIKSLVEEGKLYLFQIYNKDFSAHSKGTPNMHTLYWKMLFDEENLKDVVYKLNGEAEVFFRKSSITVQSPTHPANSPIKNKNKDNQKKESEFKYDLIKDRRYTVDKFLFHVPITMNFKSVGVSNINQLVKRHIRSATDLHIIGIDRGERHLLYLTVIDSRGNIKEQFSLNEIVNEYNGNTYRTDYHELLDTREGERTEARRNWQTIQNIRELKEGYLSQVIHKISELAIKYNAVIVLEDLNFGFMRSRQKVEKQVYQKFEKMLIDKLNYLVDKKKPVAETGGLLRAYQLTGEFESFKTLGKQSGILFYVPAWNTSKIDPVTGFVNLFDTHYENIEKAKGFFDKFKSIRYNSDKDWFEFVVDDYTRFSPKAEGTRRDWTICTQGKRIQICRNPQRNNEWEGREIDLTKAFKEHFEAYGVDISKDLREQINTQNKKEFFEELLRLLRLTLQMRNSMPSSDIDYLISPVADDTGCFFDSRKQAELKENAVLPMNADANGAYNIARKGLLAIRKMKQEENDSAKISLAISNKEWLKFAQTKPYLED

SEQ ID NO: 64 - protein, 1232 aa, unidentified
  REGION 1..1232: note = Category: MG13 effectors
  REGION 1..1232: note = Description: MG13-30 effector
  source 1..1232: note = uncultivated organism sequence
MQQFTNLYPVSKTLRFELIPDERTRAMLEHSDLIAQDEHRAASYKLVKKIIDRYHMAYIDSVLEALILPSGYLKGMCDLYLKSQKSDADKKALEQLQDKLRKMIAGALTKDNRFKRIDKKELIREDIMSVITPEERALIDEFRDFTTYFTGFHKNRQNMYSAEAQSTAIAYRLIHENLPKFIDNMATFARIAASPVAEKFPQLYQEMSEYLNVREIGDLFKLDYYTELLTQRQIDVYNAVIGGRTQDDGDKKIQGINEYVNLYNQQQATKETRIPKLKPLFKQILSDREAVSWLPEEFASDKDMLEAVRDCCNSLNSHVFGMLRELLTNLSGYRLDGIYIPNDLSISDISQAMFKDWAVIKKGIVEDLKRNYPPKRSEKADNYEERIRKLIKRENSFSIGYLNSCINKDICDYFASLGAIDDGENQAVNLFMRIQNAYTEVQSLLENGYPEDCNLAQDKDNVAKLKTLLDAIKALQHFVKPLLGNGDEPDKDERFYGELAVLWEELDRVTPLYNKVRNRMTRKPYSIEKFKLNFENSTLLDGWDVNKERDNTCVILRREGKYYLGIMRKQFNDIFVNVPNAQGEDNFEKMEYKLLPGANKMLPKVFFSKSRIKEFNPSPTLLEHYHQGTHKKGDNFSLQDCHELIDFFKVSLAKHEDWGKFDFHFSPTESYEDMSGFYREVEQMGYKISYKLIPFSYIDQMVEEGKLFLFQIYNKDFSRFSKGTPNLHTLYWKMVFDERNLADVVYKLNGQAEVFYRKKSLAYKRPTHPAYQAIKNKNSEGKKAESTFDYDIVKDRRFTTDKFQFHVPITINFKATGTGNINVRVNQFIHDHDDLHFIGIDRGERHLLYVTVIDSKGRIKEQFSLNEIVNEYQGTKYKTNYRSLLDKREEERQRERQSWNTIEGIKELKQGYLSQVIHKIVTLMVKYRAVVVLEDLNMGFKRGRQKVESSVYQQFEKALIDKLNLLIDKRIDATAPGGLLHAYQLTNKFTSFREMRRQNGFMFYIPSWNTSKIDPVTGFVDLLHPRYESVEKSRVFFSKFKSIRYNQDNGWYEFSLDYKDFTSKADGSRTEWTLCTHGTRVVTYRNPKKNSSWDSREINLTEEFNALFEAYGIQAQGNLKQAIAEQSEKDFFDKLTHLLSLTLQLRNSITGTEVDYMISPVADEYGHFFDSRTCGKDLPQNADANGAYNIARKGLWVARQIQASAVDEKVDIIMSNKEWLVFAQEKPYLADD

SEQ ID NO: 65 - protein, 1262 aa, unidentified
  REGION 1..1262: note = Category: MG13 effectors
  REGION 1..1262: note = Description: MG13-31 effector
  source 1..1262: note = uncultivated organism sequence
MRKFDEFVGLYPISKTLRFELKPIGKTLEHIQRNKLLEHDAVRADDYVKVKKIIDKYHKCLIDEALLGFTFETEVDGRSNNSLSEYYLYYNLRKRNEQEQKTFKTIQNNLRKQIVNKLTQSEKYKRIDKKELITTDLPDFLTNESEKKLVEKFKNFTTYFTEFHKNRKNMYSKEEKSTAIAFRLINENLPKFVDNIAAFEKVASSPLAEKINALYEDFKEYLNVEEISRVFRLDYYNELLTQKQIDLYNAIVGGRTEEDNRIQIKGLNQYINEYNQQQTDRSNRLPKLKPLYKQILSDRESVSWLPPKFDSDKDLLIKIKECYDALSEREKVFDKLESILKSLSTYDLSKIYISNDSQLSYISQKMFGRWDIIGKAIREDCAKRNPQKSRESLEKFAERIDKKLKAIDSISIGDVDECLAQLGEPYVKRVEDYFAAMGTSDMGEEQTDTTSFKKNIEGAYKSVKELLNNADNITDNNLMQDKGNVEKIKNLLDAIKDLQRFIKPLLGKGDEADKDGVFYGEFTSLWTKLDQVTPLYNMVRNYLTSKPYSTKKIKLNFENSTLMDGWDLNKEPDNTTVIFCKDGLYYLGIMGKKYNRVFVDREDLPHDGECYDKMEYKLLPGANKMLPKVFFSETGIQRFRPSEELLGKYERGTHKKGAGFDLGDCRALIDFFKKSIERHDDWKKFDFKFSDTSTYQDISEFYREVEQQGYKMSFRKVSVDYIKSLVEEGKLYLFQIYNKDFSAHSKGTPNMHTLYWKMLFDEENLKDVVYKLNGEAEVFFRKSSITVQSPTHPANSPIKNKNKDNQKKESKFEYDLIKDRRYTVDKFLFHVPITMNFKSVGGSNINQLVKRHIRSATDLHIIGIDRGERHLLYLTVIDSRGNIKEQFSLNEIVNEYNGNTYRTDYHELLDTREGERTEARRNWQTIQNIRELKEGYLSQVIHKISELAIKYNAVIVLEDLNFGFMRSRQKVEKQVYQKFEKMLINKLNYLVDKKKPVAETGGLLRAYQLTGEFESFKTLGKQSGILFYVPAWNTSKIDPVTGFVNLFDTHCENIEKAKGFFDKFKSIRYNSDKDWFEFVVDDYTRFSPKAEGTRRDWTICTQGKRIQIYRNPQRNNEWEGREIDLTKAFKEHFEAYGVDISKDLREQINTQNKKEFFEELLRLLRLTLQMRNSMPSSDIDYLISPVADDTGCFFDSRKQAELKENAVLPMNADANGAYNIARKGLLAIRKMKQEENDSAKISLAISNKEWLKFAQTKPYLED

SEQ ID NO: 66 - protein, 1275 aa, unidentified
  REGION 1..1275: note = Category: MG13 effectors
  REGION 1..1275: note = Description: MG13-32 effector
  source 1..1275: note = uncultivated organism sequence
MNNLNDLTGQYPVSKTIRFDLQPIGKTKENIEKGGILQQDEQRAEDYKTVKGFIDEYHKQFIKDRLWNFRLPLISEGHLDSLEEYQTLYLLAKRNDAQEAEFKEVKDNLRSIIARRLTEKGSAFERIFKKELIREDLIDFVEKPEDKDLVKSFADFTTYFTEFHKNRANMYTAEEKSTAIAYRLIHQNLPKFMDNIKAFAKIAQTSVAGHFVEIYNGSKEYLNVGSLEEVFQLDYFSDTMTQPHIEVYNSIIGKRVLEDGTEIKGINEYVNLYNQQQKDKRQRLPFLVPLYKQILSDREKLSWLAQEFDSDKKMLAAINETFIHLREILMGEDSESLRSILTHLKDFDLTQINITNDLSLTDISQHLFKRFDVFSNGIKAKIRSITPKKKKESDEELEDRVSKIFKTQKSFSIAFLDNLPQPEMEDGKRRSVADYFTALGAVNNEVTQKENLFAQIEIAYEDARDVLQMTETGDTLSQDKPAVAKIKALLDALKDLQHFIKPLRGSGEENEKDELFYGSFLMMWDELDTVTPLYNKVRNWLTRKPYSTEKIKLNFDSPTLLNGWPNPQTNSGAIFRDEEGLYYLAILDAQNRACLNELSSNVNGNEDHIEMMKYLQGGDMGKNVQNLMVIDGEVRKVNGRKETSGEFAGQNLRLENAKHQYLPKNINEIRLKQSYLTSSPTFNKKDLVSFIEYYIPLVEAYYSDYVFHFRKSSEYKSFADFTEHINQQAYQVQFKPVSKTSLYSLVEEGKLYLFRIWNKDFSEFSKGTPNLHTLYWKMLFDERNLADVVYKLNGQAEVFYRKASIKPENKIVHPANRAIANKNELNKKRTSSFDYDIIKDRRYTVDKFQFHVPITINFKATGQTNVNPIVQDTIRRGGFTHIIGIDRGERHLLYVSLIDLKGNIVKQMTLNEILNEYKGLTHKTNYHDLLAKREGERTDARRSWDTIENIKELKEGYLSQVVHIISKMMVEYNAIVVLEDLNPGFMRGRQKIERQVYEKFEKMLIEKLNCYIDKKAEPIEIGGLLHPLQLSCDIKKWKKSHQCGCLFYIPAWNTSKIDPVTGFVNLFDTHYETREKARSFFSKFQRIHFNSEKNWFEFTFDYGNFTTKAEGTRTQWTLCSYGTRIRNFRNPLKNHQWDDEEVELVDEFKHLFDKYSIDIFGNLKESICNQTDAQFYKELMGLMKLLLQMRNSRTNSEVDYLLSPVADEQGHFFDSREGIGSLPDNADANGAFNIARKGLWIIRKVQGTPSDEKMSLAISNKEWLQFAQNRPYLND

SEQ ID NO: 67 - protein, 1249 aa, unidentified
  REGION 1..1249: note = Category: MG13 effectors
  REGION 1..1249: note = Description: MG13-33 effector
  source 1..1249: note = uncultivated organism sequence
MKEFTNLYPVSKTLRFDLQPIGRTKENIERNGILQRDEKRAEDYKTVKGFIDEYHKQFIKDRLWSYKLPLYSEGHLNSLEEYQALYELSKRDETQEREFAEVKDNLRAFIAKRLTEGGSAYDRIFKKELIREDLVDFLENEDDREIVRQFADFTTYFGGFHENRKNMYSAEEKSTAIAYRLIHQNLPKFMDNMKAFAKIAESSVSEHFEEIYEGWKEYLNVGSLEEIFRLDYFSVTLTQPHIEVYNYIIGKKILEDGTEIKGINEYVNLYNQQQKDKTKRLPFLVPLYKQILSDREKLSWMAEEFDSDDQMLTAINESYSHLHDLLMGDDNESLRSLLEHLKDFNLEQINITNDLSLTDISQHLFGRYDVFTNGIKDELRIITPRKKKEDDESFEDRISKIFKTQKSFSIALLDKLPQPVMEDGKLRTVEDYFLSLGAVNTGLTQKENLFAQIENAYEDARTILQLKNTDDTLSQDKPAVAKIKTLLDALKDLQHFIKPLLGSGEENEKDELFYGSFQMMWDELDTVTTLYNKVRNWLTRKPFSTEKIKLNFDNSQLLGGWDVNKEPDCTGVLLRKDGLYYLGIMDKKSNRIFEADVTPTDGVCYEKFDYKLLPGANKMLPKVFFSKSRIDEFSPSETIIASYKRGAHKKGANFNLAECHRLIDFFKQSISKHEDWSKFGFHFSDTKTYEDISGFYREVEQQGYMLSYHPVSSSYINQLVDEGKLYLFRIWNKDFSEFSKGTSNLHTLYWKMIFDEQNLANVVYKLNGQAEVFYRKASIKSENRIIHKANQPINNKNELNKKDTSTFEYDIIKDRRYTVDKFQFHVPITINFKATGQTNINPIVQDVIRQGGFSHIIGIDRGERHLLYLSLIDLQGNIVKQMTLNDIINEYKGQTYKTNYHDLLAKREGERTDARRSWETIETIKELKEGYLSQVVHIISKMMVEYNAIVVLEDLNTGFMRGRQKIERQVYEKFEKMLIEKLNCYIDKHAEPTEETGLLHPLQLTCDSKKWTRSHQCGCLFYIPAWNTSKIDPVTGFVNLLDTRYDTREKARLFFSKFQRISFNVEMGWFEFAFDYNNFTTKAEGTRTKWNLCTFGERIRSFRNPKKNNQWDDERIVLTDEFKQLFDKYDIDIAGNLKEAISAQSDAQFFKELLGLMKLLLQMRNSVTNSEEDYLLSPVADENGHFFDSREGISSLPIDADANGAYNIARKGLWVIRKIQETQEDEKVSLNITNKEWLQFAQTKPYRND

SEQ ID NO: 68 - protein, 1240 aa, unidentified
  REGION 1..1240: note = Category: MG13 effectors
  REGION 1..1240: note = Description: MG13-34 effector
  source 1..1240: note = uncultivated organism sequence
MKTFNDLTGLYSLSKTLRFELKPVGKTKDNIETKGIIAQDEKRAEEYKKVKDIIDRYHKSFIDMCLAGLVLKTTSDGNNDSLKDYVALASKSNRDEKEDKDFDDVKTVLRKHIVDAFKKGNSYGDLFKKELIQNHLPDFVTDEQEKLMVENFSKFTTYFTGFNENRKNMYSDEEKSTSIAYRLIHENLPMFIDNIKSFAKITEQEDIDFIADVEHSFKEELKGKSITQMFCLENFTETLTQGHIELYNKIVGGRVEDSGVKKQGINEYVNLYNQQHKDARLPLLKPLYKMILSDRVALSWLPEEFATDEEMLAAINETHGNLKNVMTDVRKLLQNIDSYDTEHIYIANDKGLTDISQQIFGQYDVYTSAIKAELRDSITPSAKERKDPELLEKRINDIFKASKSFSIEYLNSHVDSDKTIQSYYKELGAYDRNGEQRINLLSQIELAYVDAHDVLLGKHTNLNQSEDSIKKIKALLDAYKALQHFIKPLLGNGDEADKDNEFDAKLRAIWDELDIVTPLYDKVRNRLTRKPYSTEKIKLNFDNAQLLNGWDMNKEPDCTSVLLRKDGQYYLAIMDKKSNHAFDIDELPCDGECYEKMEYKLLPGANKMLPKVFFSKSRIKEFAPSKEILDAYQKGTHKKGPNFSIKDCRRLIDFFKDSIAKHEDWSKFPFAFSDTSTYEDISGFYREVEQQGYMLGYRKVSVSFINQLVDEGKLYLFQIWNKDFSEYSKGTPNIHTLYWKMLFDERNLANVVYKLNGQAEVFYRKRSLDLDKTTIHRANQPIANKNKQNEKRESTFSYDIVKNRRYTVDKFQFHVPITINFKATGSDNINASVLDVIRNNGIEHIIGIDRGERHLLYLSLIDMKGNIVKQMTLNDIINEYKGNTYTTNYKELLQAREGDRKEARQNWQKIENIKELKEGYLSQVVHVITKMMVEYKAIVVLEDLNGGFMRGRQKIERQVYEKFEKMLIDKLNYYVDKQKDVNDNGGLLHAYQLASKFDTFKKLGKQSGCLFYIPAWNTSKIDPVTGFVNMFDTRYENADKARKFFNKFKSISYNADKEWFEFVIDDYSKFTDKAKDTRTDWVLCTYGTRIKTFRNPEKLNQWDNKEIVLTDEFKKVFMEAGIDINGNLKEAICTLTEKKHLESLMQLMKLLVQMRNSETNSEVDYLLSPVADTEGHFYDSRNCGDNLPKDADANGAYNIARKGLWAVMKIKASKPQENLKLGISNKEWLQFAQEKPYLND

SEQ ID NO: 69 - protein, 1251 aa, unidentified
  REGION 1..1251: note = Category: MG13 effectors
  REGION 1..1251: note = Description: MG13-35 effector
  source 1..1251: note = uncultivated organism sequence
MKEFINLYPVSKTLRFELQPIGKTKENIERNGILKRDSKRAEDYKIVKGFIDEYHKQFIKDRLWSFKLPLQSEGHLDSLEEYQTLYELSKRDATQEAEFTEVKDNLRGIIAKRLTQSGSNYERIFKKELIREDLVEFLENEEDKEIVRQFADFTTYFVGFHENRKNMYSAEEKSTAIAYRLIHQNLPKFMDNMKAFAKIAETTVSEHFADIYEGWKEYLNVGSIEEMFRLDYFSETLTQTHIEVYNYIIGKKILEDGTEIKGINEYVNLYNQQQKDKSKRLPFLVPLYKQILSDREKLSWLADEFDSDEKMLAAINELYINLHDLLMGDENESLRSLLTHLTDFDLTQINITNDISLTDISQHLFGRYDVFTNGIKDKLRVITPKKKKESDEDFEDRISKIFKSQKSFSIDFLNKLPQPVMDDGKPRTIEDYFMALGAVSTDAVQKENLFAQIENAYEDARTILQMNDTGDTLSQNKPAVAKIKVLLDTLKDLQRFIKPLLGSGEENEKDELFYGSFQMMWDELDAVTPLYNKVRNWLTRKPYSTEKIKLNFDNSQLLGGWDVNKEPDCTGILLRKNGYYYLGIMDKKSNHAFDVEISPSDGECYDKIDYKLLPGANKMLPKVFFSKSRIDEFAPSETIVSNYKRGTHKKGADFSLSDCHKLIDFFKQSISKHEDWSKFGFHFSDTDTYEDISGFYREVEQQGYMLSSHRVSVAYVNQLVDEGKLYLFRIWNKDFSEYSKGTANLHTLYWKMLFDERNLADVVYKLNGQAEVFYRKASIKSENRIVHKANQPIANKNELNAKRNSTFEYDIVKDRRYTVDKFQFHVPITINFKAAGQTNINPIVQDTIRRGGFTHIIGIDRGERHLLYLSLIDLKGNIIKQMTLNDIVNEYKGQTYKTNYHDLLAKREGDRTEARRSWDTIETIKELKEGYMSQVVHIISKMMVEYNAIVVLEDLNPGFMRGRQKIERQVYEKFEKMLIDKLNCYIDKQASPTSEGGLLHPLQLTNKFESFRKLGKQSGCLFYIPAWNTSKIDPVTGFVNLLDTRYDTREKARVFFSKFQRISFNPNKGWFEFALDYYNDFTAKAEGTRTQWTLCTYGERIRTFRNPQKNHQWDDERIMLTDAFKQLFERYGIDINGNLKEAIGSQTDAQFYKDMMGLMKLLLQMRNSITNSEEDYLLSPVADEKGNFFDSRKGIESLPIDADANGAYNIARKGLWAIRKIQETRDDEKPSLNITNKEWLQFAQTKPYFND

SEQ ID NO: 70 - protein, 1278 aa, unidentified
  REGION 1..1278: note = Category: MG13 effectors
  REGION 1..1278: note = Description: MG13-36 effector
  source 1..1278: note = uncultivated organism sequence
MKKFTNKFQLSKTLRFELIPQGKTLENIKSKGLIAKDDQRAISYKKMKKSIDEYHKYFIGLALSNVKLSKLQDFADLYFETNPDKKKEDAYKKSLEKIQTDLRKEIVKGFKEGDAKEIFGKLNKKELFTELLEEWKQEKGDFYFDEEFKTFTTYFTGFNKNRANMYSDEAKSTAIAFRLIHENLPKFLDNIKVFEKAKSIPQLQENCKLLYKEIEEYLNISKIDEVFELGYFNEALTQNDIDVYNLIIGGRTAKEGVQKIQGLNEYINLYNQKQDKKNRIPKLKVLYKQILSDRENISFLPEKFNDSNEVLEAIENFYKSNLLEFQTGDMEHSENVLASLKTLVGEIANFDTSKIYLRNDKSITDISQTIFGDWGIIKSALEFSFIQGLIIGKKGISIKQEVEKDKYLSKQSYYSIAEIENALMLYKDQNELLKELKPTDLPVANYFKNHFKIKVKKDDNSEKEFDLITNIEDKYRCIKGILANDYPEDKDLKSTNNPDTLNIKLFLDSLMEFLHFIKPLALPKDTVLEKDEHFYNPFVIGYEQMQLLIPLYNKVRNYATQKPYSEEKFKLNFENSTLLSGWDVNKEETNTSILFIKEGIYYLGVMDKDHNKIFRDIPKARSNSVYQKINYKLLPGASKMLPKVFFSDKNISFFNPSDEIQNIRNHGTHTKGGSPQEGYSKLDFNVNDCRKMIDFFKTSIEKHPEWKNFGFQFSDTTTFDSIDAFYREVEAQGYTISYSNLDKDYIDQLVSEGKLYLFKIYNKDFSSYSKGQPNMHTLYWKALFDKDNLKDVVYKLNGQAELFYRKKSINYDEKTMKEGHHYQELKDKFAYPIIKDKRFTEDKFHFHVPITLNFKASGNDYINADVLTYLKNNPDVNIIGLDRGERHLIYLSLINQKGEVLKDKNGNPIQYSLNEIINEHKGKTYPTNYQTLLDSKEKERDSARKNWGEIENIKELKEGFISQVVHKIAHLMIDFNAIVVMEDLNFGFKRGRFKVEKQVYQKLEKMLIDKLNYLVFKDKEPTEIGGIYNALQLTNKFKSFKEMGKQSGFLFYVPAWNTSKIDPTTGFVNLFNTKYETIEKAQEFFSKFNDIRFNEKENHFEFEVDDYTKFNLKAEGTKTDWVVCTNEDRILTFRNPETNNNWDNKKVVLTDEFVKFFTENQIEYKTNLQTQILEKTEGKFFKDLFHLFKLTLQMRNSITNSEVDYLISPVKNNDSYFYDSRKADNTLPQDADANGAYHIAKKGLWVLEQINQYEKDDNWKKLQLAISNKMWLNFVQKK

SEQ ID NO: 71 - protein, 1253 aa, unidentified
  REGION 1..1253: note = Category: MG13 effectors
  REGION 1..1253: note = Description: MG13-37 effector
  source 1..1253: note = uncultivated organism sequence
MKNLTEFTGLYPVSKTLRFELKPQGRTLEYIEKNGLLEQDEHRASSYILVKKIIDDYHKAFIANALRDFKLYSLEDYYLYYNIQKRDDEQKKKFEDIQSKLRKQIADRFTKEESFKNLFAKELIKENLIEFVQTVEDRELIKEFESFTTYFTGFHENRKNMYSAEEKSTAIAYRLIHQNLPKFIDNMRVFEKIANSPVKDKFQTILSDNQLGPVIQVMAVEDMFRLDYFNETLTQIGIDKYNSLCGGFSPNEGKEKIQGLNEYINLYNQTAKKEERIPKLKPLFKQILSDRSTASFIPDEFENDSEVLESIELFYQEVNEQVINKNVEGEHSLKELLKSLPEYELTKIYLRNDLSITDISQKIFGDWGVFQKAMNTWFELNYNGKAKFGTEKYEEEQRKYFANLDSFSIGFINECLLQLDTPYHKNIADYFALRGKTDTETQDLFAVLEDKYNAVTDLLNNPYPQDQDLAQDQKQVDKLKELLDAVKAIQWFIKPLLGKGNEADKDERFYGEFTSLWITLDQITPLYNKVRNYMTRKPYSTDKIKLNFENSYFLNGWAQDYESKAGLIFTKDGNYYLGINDKKLSNEDKTLLKSNSELNLAKRIVLDFQKPDNKNIPRLFIRSKGNNFAPAVEKYNLPIHEVIEIYDNGKFKTEYRKINETDYLKSLHLLIDYFKIGFSKHESYKHYPFSWKNTTEYKDIAEFYHDVEVSCYQVFEENVNWDTLMNFVDEGKLYLFQLYNKDFSPNSKGTPNLHTLYWKMLFDADNLKDVVYKLNGQAEVFFRKSSIKPENIVLHKANEAVNNKNEQNTKKQSRFEYDIIKDKRYTVDKFQFHVPITMNFKARGLNNINTEVNQWLQKSDNVHIIGIDRGERHLLYLTLIDSKGNIKQQFSLNEIVNEYEGKTYKTDYHKLLDNREGNRDEARKNWKTIETIKELKEGYLSQVIHKISELMVEYNAIVVLEDLNMGFMRGRQKVEKQVYQKFEKMLIDKLNYLVDKKQNPAEMGGTLHAYQFTNKFESFQKMGKQSGMLFYVPAWNTSKMDPVTGFVNLFDTRYENMEKARSFIGKFDTIRYNPKKEYFEFDFDYNKFTAKAEGTRTRWTLCTNDTRIETFRNPAKNSQWDNREIILSDEFINLFKLYNIDYQNSDLKVQICKQTEKAFFERLLHLLKLTLQMRNSMTGTEVDYLISPVTNSRGEFYDSRTASDILPKNADANGAYNIARKGMWVIEQIRKATDFRKLKLAISNKEWLSFVQH

SEQ ID NO: 72 - protein, 1251 aa, unidentified
  REGION 1..1251: note = Category: MG13 effectors
  REGION 1..1251: note = Description: MG13-38 effector
  source 1..1251: note = uncultivated organism sequence
MNTFNGFTGLYPLSKTLRFELKPIGKTLQFIINNGILEQDKHRADSYSQVKEIINEYHKAFIERGLTGFELKYNNEGKKNSLLEYFMYYNIKNREERDKNTYKQIQNNLRKQITDRLSKDEAFQRINKKELIQQDLISFVETQPNSAKKRALVEEFRNFTTYFSGFHENRKNMYSAEEKSTSIAYRLINENLPKFVDNIQVFSKVMGTEISKKMPQLYQEFQKFLNVENIEEMFHLKYFSSTLTQSQIDVYNAIIGGITSDDNVRIKGLNEYINLYNQQHKDTKLPKLKLLLKQILSERNPVSWLPEKFDSDEQMLTAIKQCYENLSERVFGNTSLRLQLELLGDFDLNGIFISNDPQLADISQKIFGNWGIIQKAIQTKIANCLPQKRKESFEDYQERITKRFKSFDSFSIGYIEECLSAVGIPSNKIEKYFSDLGVVNNRIEQKENHFVRIANAYEEIRDLLNNPYPMEKRLSQDKAHVEKIKQLLDAIKALQHFIKPLLSGGDEPNKDERFYGEFTALWNELDQITPLYNMVRNYITRKPYSEKKIKLNFENSTLMDGWDLNKEKDNTTIILRKDNLYYLGIMNKKFNKIFDKYPGSTSDEYYEKMEYKLLPGANKMLPKVFLLSKSGLDEFNPSQEIRDNYEKGTHKKGINFKLEDCHALIDFFKTSINKHSDWKKFDFKFSETSTYEDLSGFYKEVEQQGYKVSFRNVSANYIDTLIDEGKLYLFQIYNKDFSPYSKGIPNMHTLYWKMLFDEQNLENVVYKLNGQAEIFYRESSLEYHHPTHPANQPVMNKNQSNVKQESVFPYDLIKNRRYTIDKFQFHVPITMNFKSNGVNNINQQVNECLQHADDTHIIGIDRGERHLLYLVVIDKKGNIKEQCSLNEIMNEYNGNRYSTDYHNLLNRREDERLKARQSWQSIESIKDLKEGYLSQVIHKISELIVKYNAIVVLEDLNLGFIRGRQKIEKQIYQKFEKMLIDKLNYLVDKKKEPNELGGILKAYQLANKFESFQKMGKQSGFLFYIPAWNTSKIDPQTGFVNLLDVHYESTEKAKSFFCKFDSIKYNTSKDWFEFELDYSKFNQKAEGTRIHWTLCSYGTRIETLRYVSKNSQWDSVEVNLTEKFKEHFNKYHIDIHTNLKEAISRQIEKNFFEGLLHLLKLTLQMRNSKIGADIDYLISPVADDNGIFYDSRSCDPSLPANADANGAYNIARKGLWILKQIKETVDLKKLKLTISNKEWLRFAQEKPYLND

SEQ ID NO: 73 - protein, 1249 aa, unidentified
  REGION 1..1249: note = Category: MG13 effectors
  REGION 1..1249: note = Description: MG13-39 effector
  source 1..1249: note = uncultivated organism sequence
MKNFESFTNLYPLSKTLRFELRPIGRTLENIQANGLLEQDNHRAESYKLVKAIIDRYHKVFIDEALSHCVLPVENSGNKNSLSEVYQYLTTKDHSEKETDDFNKTQDNLRKMIVSALKKDTHFGRIFKKELIREDLLNNDLQGFDLNEEEYDLIKEFRDFTTYFVGFNENRANMYSEEAKSTAIGYRLIHENLPKFIDNMVIFQKVKVSPVSEYFANIETEMEDMLQGIKVEDIFDLNFFNQVLVQRFIDLYNAVIGGQVASEEDHRKGLNQYINEYNQVQKDKKDRLPKFKPLFKQILSDRIHASWQIDNFESDNEVLKAIENAYETLDEEVISRKDSNLPLLFASISDFDLSGIYVSAKAITDFSQQIFKDWNAIDSALEAACRRSNQPKKKETEEKYAERIKKQRSHIDSYSVGEIIESLVAFQPNPEKSILDYLGGMGRREDKPSIIESIKSAYRDVEELLKTEYPANKNLALDKDNISKVKALLDAIKELQFFIKPLLGTGKESGKDERFYGEFVDYWQTLDIITPLYNKVRNYATRKPYSTAKFKLNFENSTLLNGWDVNKEPDNTSVLLRKDGLYYLAIMKKSCNRVFAVDQYDTVGDCYEKIDYKLLPGANKMLPKVFFAKSRIDEFAPSREVLDIYKRGSFKKGEEFCKADLHTLIDFYKASITKHEDWKKFGFEFSPTSSYDDISGFYREVEQQGYQIRFRKVSCTYIDSLVDQGQIYLFQIYNKDFSPFSKGTPNMHTLYWKMIFDERNLKDVVYKLNGQAEIFFRKSSLPVETPTHPANQPIANKNPLNRKKESLFTYDIVKNRRYRYDKFQFHVPITMNFKSIGSEYINDQVQDYIRQSKDLHFIGIDRGERHLLYLTVIDSKGIIEEQFSLNVINNEYNGTTYSTNYHDLLEERGDDRTKARREWLAIESIKELKEGYLSQVVKKITDLMIKYNAIVVLEDLNMGFKRGRQKVESSAYQQFEHKLIDKLNYLAGKTAPIDKVGGLLKAYQLATPYQNEMGFQNGFVFYIPAWNTSKIDPVTGFTNLFDLHIETMEQAKKFFSKFDYIRWNAANNWFEFAFDYKNFTEKADGSRTQWTLCTQGTRIRTFRNPEKNSEWDNVEVDLTDQFLSLFNSKNIDIKSDLKTQILAQNEKDFFMSLLLCLKLTLQMRNSISNSEVDYLISPVADANGDFFDSRKVDLSLPANADANGAYNIARKGLWMARRIKKSRPEDKVSLKITNKEWLNFAQNKPYLTD

SEQ ID NO: 74 - protein, 1249 aa, unidentified
  REGION 1..1249: note = Category: MG13 effectors
  REGION 1..1249: note = Description: MG13-40 effector
  source 1..1249: note = uncultivated organism sequence
MEQFTNLYPLSKTLRFELIPHEKTKELLERTDYLAQDEKRAESYKIVKGIIDRYHKSFIEDVLSKPIEDQGEKRPILKFAKESTKNCDSLEEFYELYSKSQKSETEKNTLEITQNNLRKQIVYALTQDARFKNLDKKELIYQDIYAIAKPEEIPFIKEFEGFATYFVGFHENRMNMYSSEAKSTAIGNRLINENLPIFTDNMGTFQKLLNSPVSEHFDTICKDMEDILPYDNIEEIFMLHNYNDFLTQKQITVYNAIIGGRVLEDGTKIQGINEYVNLYNQQQPTRETRLPKLKTLFKQILSDKESVSWLAEEFTSDEEMLKSIRDYYTSFKNNASQQMIDILTNIKSYDIDHIFIPNDISLTTISKKVFKDWEAINKSIIKRLKEDNPQKGREKDDNYEERMSKAFKSYDSFSLGLINSCTATDDVCIYFSKIAKTDEETGLSHNLLDNIEEAYDKAKEYLNNGYPSNLNLAQDKSTVQKIKNLLDSIKDLQKFIKPLLGSGTEAVKDERFYGDISLVWEILDQITPLYNKVRNRMTRKAYSIEKIKLNFENSTLLAGWDLNKEKDNTSIILKKDGLYYLAIMRKEFNKVFQNTPQLTSGEDSFEKMEYKLLPGANKMLPKVFFSKSRISEFAPSDVLIEKYKKGTHKKGSNFNIDDCHNLIDFFKSSIQKHDDWSKFNFKFSPTDSYEDMSGFYREVEKMGYKITFKKISADYIEELVTSGKIFLFKIYNKDFSQYSKGTPNLHTLYWKMVFDENNLKDVVFKLNGEAEIFYRKKSLSYKSPTHPAHQPIRNKNPYNAKEESVFAYDLIKDKRYTLDKFHFHIPITINFKSEGVNNINTLVCNYIRNNDDIHFIGIDRGERHLLYVSVIDSKGRIKEQFSLNQIINEYKGNSYSTDYHKLLEERDEKRTKERQSWDSIESIKELKQGYLSQVIHKIASLVVKYNAIVVLEDLNIGFKRGRQKVESSIYQQFEKALIDKFNYLVDKNVAPEQPGGLMKGYQLTNKFSSFRDMGKQNGFLFYIPAWNTSKIDPVTGFVDMLHPKYESVEKAREFFTKFNKISYNQEKGWFEFLFDYNDFTTKAEGTRTVWTLCTFGKRIEKFRNKDKNSMWDNKEIDLTSAFISLCEKYNVPLSCDMKNDIVAQTEKDFYVELIRILRLTLQMRNSITGTDIDHLISPVADENGNFYDSRNADSTLPENADANGAYNIARKGLWAAMQIRSCTDPDLKVNLAISNKEWLTFAQTKPYIK

SEQ ID NO: 75 - protein, 1243 aa, unidentified
  REGION 1..1243: note = Category: MG13 effectors
  REGION 1..1243: note = Description: MG13-41 effector
  source 1..1243: note = uncultivated organism sequence
MKQFTNLYPVSKTLRFELIPQGETRAHLNDLIAEDEQRAEDYKEVKKYIDRYHKWFIDDCLSKVPNSPLGEEMIRLLNKYIEANDEKDGEGPDKVQDDLRKLIVKALKSGVSLDKDPEQEERFKSLFSEELVKNILPDFVQTEEEKNNVAKFRDMTTYFVGFHKNRENMYSEEAQTTAISYRLIHENLPRFLDNIAVYEKIKPVLSDEIVSLEEQLHQNGYVEACCIDSLFSVDFYLRVLTQRGIEQYNAVIGKIVNDESDEIKGLNERINLYNQVHKKEKLPLFKPMYKQILSDREQLSWLPETFENDASLLDAVKGFHQDLLSNDILSRIDKLLSSLQDFNLNQIWIANDVQLRGLSKDLYGDWSLIDRALGIERSEDVVQGLTAAQKKAASAAKKRSSFSIVELNAAIRSRVPDEKYVPVQNYFSAMGKVCAQGEATRENFVTRICAAYQELEEYIPSIRKSLLQEKRATEFIKNYLDAVNDLLRFIKPLLGRGNETDKDANFYGEFAFLTDCLFAIVPLYNEVRNYLTQKPYSTEKFKLNFRGSTLLNGWDKNKEKDNLGVILRKEGKYFLAIMNKKHNTLFTEGKLQQHTGGECYEKMEYKLIPGSKMLPKVFFSKKGISTFQPSEELLLNYRIGTYKKGEKFNLEHLHKLIDFYKHSMAVHEDWSKFDFHFSDTSSYRDISGFYKEVEQQGYKLTFRNVSVSYINRLVEEGKLYLFQIYNKDFSEYSKGTPNLHTLYWKMLFDPENLKDVVYKLNGEAEVFFRKKSLDVSHPTHTKNEPIEKKNKNNKGEKSLFSYDLIKDRRFTVDKFQFHVPITMNFKGEQGDRVNQMVQSYVRNNKGLNVIGIDRGERNLLYLVVINEHGEILEQFSLNEIRNAYNGKEHKIDYHTLLEERSKKRQDARQSWQTIEGIKDLKTGYLSQVIHVITQLMVKYNAIVVLEDLNFGFKSSRQKFEQSVYQQFERKLIDKLNFLVNKKAAPNEVGGLLNAYQLTAPFESFRKMGKQNGFLFYVPAWHTSKIDPRTGFVNLLDTRYENVANSKEFFAKFASITYNPEKKWFEFAFDYKAFGNRADGSRTKWTICSYGERIETFRNPENNNQWDTKTVPLTERLTELFSKYGIDYTTNLKEQILNQTDKAFFVELLGALRLTLQLRNSRKSTGEDFLFSPVAAENGCFFDSRKANDNEPKDADANGAYHIALKGLWVLDTIRNTEEGKNPKLAITNKEWLSYAQAKPFAHE

SEQ ID NO: 76 - protein, 1249 aa, unidentified
  REGION 1..1249: note = Category: MG13 effectors
  REGION 1..1249: note = Description: MG13-42 effector
  source 1..1249: note = uncultivated organism sequence
MKQLTNLYPVSKTLRFELQPIGKTRENIEKGGILQQDEERAENYKLVKGFIDEYHKQYIKSRLWNFELPLADEGRHNSLAEYRVLYEMPKRDAEQEALFTEVKDNLRAIIARRLTEKGSAYDRIFKKELIREDLIEFLENEKDKEIVRQFADFTTYFTGFHENRANMYSSEEQSTAIAYRLIHQNLPKFMDNMKSFVKIAETAVAEHFPEIYAGWEEYLNVGSINDMFHLDYFSQTLTQEHIEVYNYIIGKRILDDGTEIKGINEYVNLYNQQQKDKKQRLPLLVPLYKQILSDREKLSWLSEEFDSDERMQHAIKETYDHLYNLLMGDENESLKSLFMHLRDFDLSQINITNDLSLTDISQHLFGKYDVFTNGIKDKLRIITPRKKKETDEVFEERITKLYKTQKSFSIAELNGLPHPVVEGSQPNNIVDYFMALGAVNTDTIQKENLFAQIENAYTDVLPILQMTDTGDKLSQNKPAVAKIKRLLDALKDLQHFVKPLLGSGEEVEKDERFYGQFQTIWDELDYVTPLYNKVRNWLTRKPYSTEKIKLNFDNSQLLGGWDVNKEPDCTGVLLRKGGFYYLGIMNKKNNRIFEKDLTPSDGDCYDKIDYKLLPGANKMLPKVFFSKSRIDEFAPSTSLVEKYKAGTHKKGANFNLKDCHNLIDFFKQSIAKHEDWRKFGFHFSNTDSYEDISGFYREVEQQGYSLTSHKVSTDYIHRMVDEGKLFLFRLWNKDFSEHSKGTPNLHTLYWKMLFDERNLQDVVYKLNGQAEVFYRKASIKEENRIIHPAKKDISNKNALNNKHTSRFDYDIIKDRRYTVDKFQFHVPITINFKAIGQTNINPVVHDIIRQGGIKHIIGIDRGERHLLYLSLIDLKGRIVKQMTLNEIINEYSGRQYKTNYHDLLVKREGERTDARRSWDTIENIKELKEGYLSQVVHVITKMMVEYKAIVVLEDLNMGFMRGRQKIERQVYEKFEHMLIDKLNCYIDKQEDPSKSGGLLHALQLSNKFESFARLGKQSGCLFYIPAWNTSKIDPVTGFVNLLDTHYDTMKAAKSFFSKFERISYNGEKDWFEFTFDYNEFNKKAEGTRTHWTLCTYGARIRNFPNPQKNNQWDDEEVVLTDMFKNFFEDYGIDYRGNLKEAIQQPTEAKFYQELMSLMKLLLQMRNSKINSEVDYLLSPVVDENGQIFDSRLVNTTLPDNADANGAYNIARKGLWVIRKIQESPKDEKMSLAISNKEWLTFAQTKPYLE

SEQ ID NO: 77 - protein, 1249 aa, unidentified
  REGION 1..1249: note = Category: MG13 effectors
  REGION 1..1249: note = Description: MG13-43 effector
  source 1..1249: note = uncultivated organism sequence
MKQFTNLYPVSKTLRFELQPIGKTKENIEKNGILMRDEKRAKDYKIVKEFIDDYHKQFIKERLWDFKLPLNSEGKLNSLEEYQALYELSKRDEVQEAEFTEVKDNLRSIIAKRLTESGSAYERIFKKELIREDLVDFLENEEDKDIVRQFADFTTYFSGFHENRHNMYVAEEKSTAIAYRLIHQNLPKFMDNMKAFAKIAETSVAEHFADIYDGWKEYLNVESIEEVFRLDFFSETLTQPHIEVYNYIIGKKILEDGTEIKGINEYVNIYNQQQKDKSKRLPFLVPLYKQILSDREKLSWLAEEFDSDEKMLSAINESYSHLHDLLMSNENESLRSLLLHIKEFNLSHINIANDLSLTDISQHLFSRYDVFTNGIKDELRIITPRKKKESDEDFEERITKIFKAIKSFSIDFLDNLPQPVMEDGKRRSIENYFMTLGAVNTETTQKENLFAQIENAYEDARNILQLKDTGDTLSQNKPAVAKIKALLDALKDLQHFIKPLLGSGEENEKDELFYGSFMMMWDELDTITPLYNKVRNWLTRKPFSTEKIKLNFDNAQLLGGWDVNKEPDCTGVLLRKDGFYYLGIMNKKSNRIFESEVTPSDGECYDKIDYKLLPGANKMLPKVFFSKSRIDEFAPSEAVVSSYKRGTHKKGANFNLSECHRLIDFFKQSINKHEDWSKFGFHFSPTDTYEDISGFYREVEQQGYMLSSHPVSSSYINQLVDEGKLYLFRIWNKDFSEFSKGTPNLHTLYWKMLFDERNLADVVYKLNGQAEVFYRKASIKPENRIIHKANQPIANKNELNEKRTSTFEYDIIKDRRYTVDKFQFHVPITINFKAAGQTNINPIVQDVIRQGGFSHIIGIDRGERHLLYLSLIDLKGNIIKQMTLNEIINEYKGQTYKTNYHTLLAKREGDRTDARRSWETIETIKELKEGYLSQVVHIISKMMVEYNAIVVLEDLNTGFMRGRQKIERQVYEKFEKMLIEKLNCYIDKHADPSEDAGLLHPLQLTSDIQKWKRSHQCGCLFYIPAWNTSKIDPVTGFVNLLDTRYDTREKARVFFSKFQRISFNAQKGWFEFAFDYNDFTTKAEGTRTQWTLCTQGERIRTFRNPQKNNQWDDERIVLTDAFKQLFDKYDIDINGNLKEAISAQTDAQFFKELLGLMKLLLQMRNSITNSEEDYLLSPVADNTGNFFDSREGIYSLPIDADANGAYNIARKGLWVIRKIQETPNGEKTSLSITNKEWLQFAQTKPYLND

SEQ ID NO: 78 - protein, 1237 aa, unidentified
  REGION 1..1237: note = Category: MG13 effectors
  REGION 1..1237: note = Description: MG13-44 effector
  source 1..1237: note = uncultivated organism sequence
MHTMKKINELTALYPLSKTLRFELKPIGKTLDHIEQKGLIVQDEQRAEEYKQVKKIIDSYHKEFITMCLKGLKLNMVYLERYESLAREVHRDEAEFDKVKAALRKQIVEAFKQGGSYNDLFKKELIQKHLPEFVESEEEKKMVANFSKFTTYFTGFYENRKNMYSDEEKSTAIAYRLIHENLPLFLDNMRSFRKIAESEVGEQFANIEVRFEEYLNVEHLAEMFELDYFSDTLTQEQIAVYNSVIGGRTLDDGTKIQGINEYVNLYNQQHKEARLPLLKPLYKMILSDRVALSWLPENPFESDEEMVEAIKEMCQSLKEVLMGNDGLRNLLLNIDLYDIEHIYIANDLGLTDISQQMFGQYDVYASAIKQKLRQGVKQSPKERREPELFEERINRLYKSTKSFSIADLNSHTDANHTIESYFKQLGAYDREGEQRDNLFTQIEMAQIAATDILAGKHGNISQSDKEIAILKGLLDAYKSLQHFVKPLLGHGDEADKDNEFDAKLREAWNALDIVTPLYNKVRNWLTRKPYSVEKIKLNFENAQLLGGWDVNKEPDCTSVLLRKDGFYYLAIMDKKSNHAFDSDELPCDGKCYEKIDYKLLPGANKMLPKVFFSKSRIDEFAPSKEIVEAYKNGTHKKGKDFNLAHCRRLIDFFKRSITKHEDWKNFPFVFSPTESYEDISGFYREVEQQGYMLSFRKVSESFINQLVDEGKLYLFKIWNKDFSEYSKGMPNMHTLYWKMLFNEQNLADTVYKLNGQAEVFYRKRSLDMADTTVHRASQPLVNKNALNKKRHSTFDYDIVKDRRYTVDKFQFHVPMTMNFKAVGRDNINSEVLNIIRNGGIKHIIGIDRGERHLLYLSLIDLKGNIVKQMTLNDIVNEYNGNTYATNYRDLLAEREGNRTEARRNWKKIENIKEIKQGYLSQVVHIISKMMVEYDAIVVLEDLNMGFMRGRQKIERSVYEQFEKMLIDKLNYYVDKQKRIDEAGGLLHALQLTSKFESFKKLGKQSGCLFYIPAWNTSKIDPVTGFVNLFDTRYVNADKAREFFSKFDSIRYNDAKNWFEFAFDYNKFTEKAKGTRTRWTLCTWGTRIRTFRNPAKLNQWDNEEVVLTDVFKKAFDEAGIDIHSNLKEAICTLTEKKHLESLLHLMKLLLQMRNSITNSEIDYLLSPVADENGHFYDSRTCDDTLPKDADANGAYNIARKGLWAIRTIQESSETERPNLALKNQDWLRFAQQKPYLND

SEQ ID NO: 79 - protein, 1274 aa, unidentified
  REGION 1..1274: note = Category: MG13 effectors
  REGION 1..1274: note = Description: MG13-45 effector
  source 1..1274: note = uncultivated organism sequence
MNVDLLIKKTYNMRDFNEFVGLYPISKTLRFELKPIGKTLEHIQRNKLLEDDAVRADDYVKVKKIIDKYHKCLIDEALSGFTFDTEADGRSNNSLSEYYLYYNLKKRNEQEQKTFKTIQNNLRKQIVNKLTQSEKYKRIDKKELITTDLPDFLTNESEKKLVEKFKNFTTYFTEFHKNRKNMYSKEEKSTAIAFRLINENLPKFVDNIAAFEKVASSPLAEKINALYEDFKEYLNVEEISRVFRLDYYNELLTQKQIDLYNAIVGGRTEEANRIQIKGLNQYINEYNQQQTDRSNRLPKLKPLYKQILSDRESVSWLPPKFDSDKDLLIKIKECYDALSEKEKVFDKLESILKSLSTYDLSKIYISNDSQLSYISQKMFGRWDIIGKAIREDCAKRNPQKSRESLEKFAERIDKKLKAIDSISIGDVDECLAQLGETYVKRVEDYFAAMGESEIDDEQTDTTSFKKNIEGAYESVKELLNNADNITDNNLMQDKGNVEKIKTLLDAIKDLQRFIKPLLGKGDEADKDGVFYGEFTSLWTKLDAVTPLYNMVRNYLTSKPYSTKKIKLNFENSSLMKGWDLNKEPDNTTVIFRKDGLYYLGIMSKKYNRVFVDREDLPHDGECYDKMEYKLLPDANKMLPHVFLSKKGIQRFRPSGELLGKYERGTHTKGADFDLGDCRALIDFFKKSIERHDDWKKFDFKFSDTSTYQDISEFYREVEQQGYKMSFRKVSVDYIKSLVEEGKLYLFQIYNKDFSAHSKGTPNMHTLYWKMLFDEENLKDVVYKLNGEAEVFFRKSSITVQSPTHPANSPIKNKNKDNKKKESEFEYDLIKDRRYTVDKFLFHVPITMNFKSVGGSNINQLVKRHIRSATDLHIIGIDRGERHLLYLTVIDSRGNIKEQFSLNEIVNEYNGNTYRTDYHELLDAREGERTEARRNWQTIQNIRELKEGYLSQVIHKISELAIKYNAVIVLEDLNFGFMRSRQKVEKQVYQKFEKMLIYKLNYLVDKKKPIAETGGLLRAYQLTGELESFKTLGKQSGILFYVPAWNTSKIDPVTGFVNLFDTHYENIEKAKGFFDKFKSIRYNSDKDWFEFVVDDYTRFSPKAEGTRRDWTICTQGKRIQIYRNPQRNNEWEGRKIDLTKAFKEHFEAYGVDISKDLREQINTQNKKEFFEELLRLLRLTLQMRNSMPSSDIDYLISPVADDTGCFFDSRKQAELKENAVLPMNADANGAYNIARKGLLAIRKMKQEENDSAKISLAISNKEWLKFAQTKPYLED

SEQ ID NO: 80 - protein, 1252 aa, unidentified
  REGION 1..1252: note = Category: MG13 effectors
  REGION 1..1252: note = Description: MG13-46 effector
  source 1..1252: note = uncultivated organism sequence
MKQFTNLYPVSKTLRFEIQPIGKTRENIEKNGILQRDEKRAEDYKIVKGFIDEYHKQFIKDRLWSFKLPLHSEGHLDSLEEYQALYEMSKRNDAQEAEFTEIKDNLRSIIAKRLTESGSAYERIFKKELIREDLIDFLESNEDKDIVRQFADFTTYFSGFHENRRNMYVAEEKSTAIAYRLIHQNLPKFMDNMKAFAKIAGTSVAEHFTDIYEGWKEHLNVGSIEEIFRLDYFSETLTQIHIEVYNYIIGKKILEDGTEIKGINEYVNLYNQQQKDKSKRLPFLVPLYKQILSDRDKLSWLAEEFDSDEKMLAAINESYNHLHDLLMGNENESLRSLLLHIKDFNLSQINITNDFSLTDISQHLFGRYDVFTSGIKDELRIITPRKKKESDEDFEDRISKIFKTQKSFSIDFLDKLPQPVMEDGKPRCIEDYFMTLGAVNTETTQKENLFAQIENAYEDARAILQMKDTGDTLSQNKSAVAKIKALLDALKDLQHFIKPLLGSGEENEKDELFYGSFQMMWDELDTVTPLYNKVRNWLTRKPFSTEKIKLNFDNSQLLGGWDVNKEPDCTGVILRKDSYYYLGIMDKKSNRIFEANATPSDGDCYDKIDYKLLPGANKMLPKVFFSKSRIDEFAPSEAIVSSYKRGTHKKGADFNLAECHRLIDFFKQSINKHEDWSKFNFHFSDTKTYEDISGFYREVEQQGYMLSSHPISSSYVNQLVDEGKLYLFRIWNKDFSESSKGTPNLHTLYWKMLFDERNLADVVCKLNGQAEVFYRKASIKPENRIVHKANQPIANKNELNTKRASTFEYDIIKDKRYTVDKFQFHVPITINFKAAGQTNINPIVQDAIRQGGFSHIIGIDRGERHLLYLSLIDLKGKIIKQMTLNEIINEYKGQTYKTNYHDLLAKREGDRTDARRSWETIETIKELKEGYLSQVVHIISKMMVEYNAIVVLEDLNTGFMRGRQKIERQVYEKFEKMLIEKLNCYIDKQLSPTDEGGLLHPLQLTCDAQKWKRAHQCGCLFYIPAWNTSKIDPVTGFVNLINTSRYDTREKARGFFSKFQRISFNEKKDLFEFTLDYNDFDYIAKAEGTRTQWTLCTQGERIRTFRNPQKNHQWDDERIVLTDAFKQLFDKYDIDINGNLKEAISAQTDAQFFKELLGLTKLMLQMRNSITNSEEDYLLSPVADITGHFFDSREGISSLPIDGDANGAYNIARKGLLVIRKIQETPDGEKPSLTITNKEWLLFAQTKPYLND

SEQ ID NO: 81 - protein, 1249 aa, unidentified
  REGION 1..1249: note = Category: MG13 effectors
  REGION 1..1249: note = Description: MG13-47 effector
  source 1..1249: note = uncultivated organism sequence
MKQFTNLYPVSKTLRFELQPVGKTKENIEKNGILLRDEQRAEDYKRVKLLIDEYHKQFIKDRLWNFKLPMINNGHHDSLEEYQALYELSKRDDDQEATFTEVKDNLRSIIAKQLTVGSAYERIFKKELIREDLIEFLEDEKDKDIVRQFADFTTYFSGFHENRKNMYSAEEKSTAIAFRLIHQNLPKFMDNMKAFAKIKQTSVAEHFTDIYEGWKEYLNVESIEEIFSLDYFSETLTQPHIEVYNYIIGKKILDDGTEIKGINEYVNLYNQQQKDKNKRLPFLVPLYKQILSDREKLSWIAEEFDSDEKMLSAINESYSHLHDLLMGEENESLRSLLSHIKDYDLTQINITNDLSLTEISQHLFSRYDVFTNGIKDELRVITPRKKKEGDEIFEDRISKIFKTLKSFSIAFLDRLPQPVMEDGKPRSVEDYFMSLGAVNTETTQRENLFVQIENAYEDARAILQMKDTGDTLSQNKSAVAKIKTLLDTLKDLQHFIKPLLGSGEEQEKDELFYGSFQMMWDELDAITPLYNKVRNWLTRKPYSTEKIKLNFDNAQLLGGWDVNKEPDCTGVLLRKDGLYYLGIINKNHNRIFDADVTPTDGDCFIKIDYKLLPGANKMLPKVFFSKSRIDEFAPSKAIVSSYKQGTHKKGTNFNLTDCHRLIDFFKHSINKHPDWSKFGFHFSDTETYEDISGFYREVEQQGYMLSSHSVSVSYINQMVDEGKLYLFRIWNKDFSEFSKGTPNLHTLYWKMLFDERNLADVVYKLNGQAEVFYRKASIKPENRIVHQAHRPITNKNELNEKRTSTFEYDIIKDRRYTVDKFQFHVPITINFKAKGQNNINPIVQETIRQDGFKHIIGIDRGERHLLYLSLIDLNGNIVKQMTLNDIINEYKGQTYKTNYHHLLAKREGERTDARRSWDTIETIKELKEGYLSQVIHIISKMMVEYNAIVVLEDLNIGFMRGRQKIERQVYEKFEKMLIDKLNCYIDKQIAPQEVGGMLHPIQLTNKFESFGKLGKQSGCLFYIPAWNTSKIDPMTGFVNLFDTRYETREKARLFFSKFQRISFNEEKGWFEFAFDYNDFTTKAEGTRTQWTLCTYGERIRTFRNPDNNHQWDDERIELTEEFKLLFEKYNINIRGNLKEAISNQSDAQFYRDLLGLMKLLLQMRNSIINSEEDYLLSPVADENGHFFDSREEIESLPNNADANGAYNIARKGLWIMEQIKKTDNLAKLKLTISNKEWLHFAQNKPYLNE

SEQ ID NO: 82 - protein, 1171 aa, unidentified
  REGION 1..1171: note = Category: MG13 effectors
  REGION 1..1171: note = Description: MG13-48 effector
  source 1..1171: note = uncultivated organism sequence
MIRLLNKYIEANNEKDGEGPDKVQDDLRKLIVKALKSGVSLDKDPEQEERFKSLFSEKLVKNILPNFVQTEEEKSKVAKFRDMTTYFVGFHKNRENMYSEEAQTTAISYRLIHENLPRFLDNIAVYEKVKPVLSDEIASLEEQLHQNGYVEASCIDSLFSVDFYLRVLTQRGIEQYNAVIGKIVNDESDEIKGLNERINLYNQVHKKEKLPLFKPMYKQILSDREQLSWLPETFENDASLLDAVKGFHQDLLSNDILSRIDKLLSSLQDFNLDQIWIANDVQLRGLSKDLYGDWSLIDRALGIERSEDVVQGLTAAQKKAASAAKKRSSFSIVELNAATRSSVPDEKYVPVQNYFSAMGKVCAQGEATRENFVTRICAAYQELEEYIPSIRKSLLQEKRATELIKNYLDAVNDLLRFIKPLLGRGDETDKDANFYGEFTFLTDCLFAIVPLYNEVRNYLTQKPYSTEKFKLNFRGSTLLNGWDKNKERVNLGVILRKEGKYFLAIMNKKHNTLFTEGKLQQHTGGECYQKMEYKLIPGSKMLPKVFFSKKGISTFQPSEELLLNYRIGTYKKGEKFNLEHLHKLIDFYKHSIAVHEDWSKFDFHFSDTSSYRDISGFYKEVEQQGYKLTFRNVSVSYINRLVEEGKLYLFQIYNKDFSEYSKGTPNLHTLYWKMLFDPENLKDVVYKLSGEAEVFFRKKSLDVSHPTHPKNEPIEKKNKNNKGEKSLFSYDLIKDRRFTVDKFQFHVPITMNFKGEQGDRVNQMVQSYVRNNKGLNVIGIDRGERNLLYLVVINEHGEILEQFSLNEIRNAYNGKEHKIDYHTLLEERSKKRQDARQSWQTIEGIKDLKTGYLSQVIHVITQLMVKYNAIVVLEDLNLGFKSSRQKFEQSVYQQFERKLIDKLNFLVNKKAAPNEMGGLLNAYQLTAPFESFRKMGKQNGFLFYVPAWHTSKIDPRTGFVNLLDTRYENVAKAKEFFAKFESITYNPEKKWFEFAFDYKAFGNRADGSRTKWTICSYGERIETFRNPKNNNQWDTKSVPLTERLTELFSKYGIDYTTNLKEQILNQTDKAFFVELLGALRLTLQLRNSRKSTGEDFLFSPVADENGCFFDSRKANDNEPKDADANGAYHIALKGLWVLDTIRNTEEGKNPKLAITNKEWLSFAQAKPFAHE

SEQ ID NO: 83 - protein, 1243 aa, unidentified
  REGION 1..1243: note = Category: MG13 effectors
  REGION 1..1243: note = Description: MG13-49 effector
  source 1..1243: note = uncultivated organism sequence
MKTFNDLTGLYSLSKTLRFELKPVGKTKDNIETKGIIAQDEKRAEEYKKVKDIIDRYHKKFIEMCLANLKLKTISDGNNDSLKEYVTLASKANKDEKEDNDFKDVKTALRKQIVDAFKKGGSYSDLFKKELIQVHLPDFVTDEQEKQMVENFGKFTTYFTGFNENRQNMYSDEEKSTSIAYRLIHENLPMFIDNIKSFAKIAEHEDIDFFPDIENGFKEELKRLKAQSISEVFDLANFTNTLTQSQIDSYNAIIGARHDENGDKVQGINQYVNLYNQKNKDARLPLLKPLYKMILSDRVALSWLPEEFATDEEMLNAINEAHENLKSVLEKVRVLLLNIGNYDTEHIYIANDKGLTDISQQIFGQYDVYTSAIKAELRDSITPSAKERKDPELLEKRINDIFKASKSFSIEYLNSHVDSDKTIQSYYKELGAYDRNGEERINLFSQIELAYVDAHDVLLGKHTNLNQSEDSIKKIKALLDAYKELQHFIKPLLGNGDEADKDNEFDAKLRAIWDELDIVTPLYDKVRNRLTRKPYSTEKIKLNFDNAQLLNGWDMNKEPDCTSVLLRKDGQYYLAIMDKKSNHAFDIDELPCDGECYDKMDYKLLPGANKMLPKVFFSKSRIKEFAPSNEICDAYQKGTHKKGANFSIKDCRRLIDFFKDSIAKHEDWSKFPFTFSDTSTYEDISGFYREVEQQGYMLGYRKVSVSFINQLVDEGKLYLFQIWNKDFSEYSKGTPNMHTLYWKMLFDERNLANVVYKLNGQAEVFYRKRSLDLNKTTIHRANQPIANKNIQNEKRESTFCYDIVKNRRYTVDKFQFHVPITINFKATGSDNINASVLDVIRNNGIEHIIGIDRGERHLLYLSLIDMKGNIVKQMTLNDIINEYKGNTYTTNYKELLQAREGDRKEARQNWQKIENIKELKEGYLSQVVHVITKMMVEYKAIVVLEDLNGGFMRGRLKIERQVYEKFEKMLIDKLNYYVDKQKDVNDNGGLLHAYQLASKFDTFKKLGKQSGCLFYIPAWNTSKIDPVTGFVNMLDTRYENADKARKFFSKFKSINYNADKNWFEFVIDDYSKFTDKAKDTRTDWVLCTYGTRIKTFRNPEKLNQWDNKEIVLADEFKKVFMEAGIDINGNLKEAICTLTEKKHLESLMQLMKLLVQMRNSETNSEVDYLLSPVADTEGNFYDSRNCGDNLPKDADANGAYNIARKGLWAVMKIKASKPGENLKLGISNREWLQFAQEKPYLND

SEQ ID NO: 84 - protein, 1171 aa, unidentified
  REGION 1..1171: note = Category: MG13 effectors
  REGION 1..1171: note = Description: MG13-50 effector
  source 1..1171: note = uncultivated organism sequence
MIRLLNKYIEANDEKDSEGPDKVQDDLRKLIVKALKSGVSLDKDPEQEERFKSLFSEKLVKNILPNFVQTEEEKSKVAKFRDMTTYFVGFHKNRENMYSEEAQTTAISYRLIHENLPRFLDNIAVYEKVKPVLSDEIASLEEQLHQNGYVEACCIDSLFSVDFYLRVLTQRGIEQYNAVIGKIVNDESDEIKGLNERINLYNQVHKKEKLPLFKPMYKQILSDREQLSWLPETFENDASLLDAVKGFHQDLLSNDILSRIDKLLSSLQDFNLDQIWIANDVQLRGLSKDLYGDWSLIDRALGIERSEDVVQGLTAAQKKAASAAKKRSSFSIVELNAATRSSVPDEKYVPVQNYFSAMGKVCSQGEPKRENFVTRICAAYQELEEYIPSIRKSLLQEKRATELIKNYLDAVNDLLRFIKPLLGRGNETDKDANFYGEFAFLTDCLFAIVPLYNEVRNYLMQKPYSTEKFKLNFRGSTLLNGWDKNKERDNLGVILRKEGKYFLAIMNKKHNTLFTEGKLQQHTGGECYQKMEYKLIPGSKMLPKVFFSKKGISTFQPSEELLLNYRIGTYKKGEKFNLEHLHKLIDFYKHSIAVHEDWSKFDFHFSDTSSYRDISGFYKEVEQQGYKLTFRNVSVSYINRLVEEGKLYLFQIYNKDFSEYSKGTPNLHTLYWKMLFDPENLKDVVYKLSGEAEVFFRKKSLDVSHPTHPQNEPIEKKNINNKGEKSLFSYDLIKDRRFTVDKFQFHVPITMNFKGEQGDRVNQMVQSYVRNHKGLNVIGIDRGERNLLYLVVINEHGEILEQFSLNEIRNAYNGKEHKIDYHTLLEERSKKRQDARQSWQTIEGIKDLKTGYLSQVIHVITQLMVKYNAIVVLEDLNFGFKSSRQKFEQSVYQQFERKLIDKLNFLVNKKVAPNEVGGLLNAYQLTAPLGNSRKMGKQNGFLFYVPAWHTSKIDPRTGFVNLLDTRYENVANSKEFFAKFASITYNPEKKWFEFAFDYKAFGNRADGSRTKWTICSYGERIETFRNPKNNNQWDTKTVPLTERLTELFSNYGIDYTTNLKEQILNQTDKAFFVELLGALRLTLQLRNSRKSTGEDFLFSPVADENGCFFDSRKANDNEPKDADANGAYHIALKGLWVLDTIRNTEEGKNPKLAITNKEWLSFAQAKPFAHE

SEQ ID NO: 85 - protein, 1244 aa, unidentified
  REGION 1..1244: note = Category: MG13 effectors
  REGION 1..1244: note = Description: MG13-51 effector
  source 1..1244: note = uncultivated organism sequence
MKQFTNLYPVSKTLRFELIPQGETRAHLNDLIAEDEQRAEDYKEVKKYIDRYHKWFIDDCLSKVPNSPLGEEMIRLLNKYIEANDEKDGEGPDKVQDDLRKLIVKALKSGVSLDKDPEQEERFKSLFSEDLVKNILPNFVQTEEEKSKVAKFRDMTTYFVGFHENRKNMYSEEAQTTAIGYRVIHENLPRFLDNIAVYEKVKPVLSDEIASLEEQLHQNGYVEASCIDSLFSVDFYLRVLTQRGIEQYNAVIGKIVNDESDEIKGLNERINLYNQVHKKEKLPLFKPMYKQILSDREQLSWLPETFENDASLLDAVKGFHQDLLSNDILSRIDKLLSSLQDFNLDQIWIANDVQLRGLSKDLYGDWSLIDRALGIERSGDVVQGLTAAQKQAAAVAKKRSSFSIVELNVATRSRVPDEKYVPVQNYFSAMGKVCAQGEATRENFVTRICAAYQELEEYIPSIRKSLLQEKRATELIKNYLDAVNDLLRFIKPLLGRGNETDKDANFYGEFAFLTDCLFAIVPLYNEVRNYLTQKPYSTEKFKLNFRGSTLLNGWDKNKERDNLGVILRKEGKYFLAIMNKKHNTLFTESKLQQHTAGECYEKMEYKLLPGPNKMLPKVFFSKKGISTFQPSEELLLNYRIGTHKKGEKFNLEHLHKLIDFYKHSIAVHEDWSKFDFHFSDTSSYRDISGFYKEVEQQGYKLTFRNVSVSYINRLVEEGKLYLFQIYNKDFSEYSKGTPNLHTLYWKMLFDPENLKDVVYKLSGEAEVFFRKKSLDVSHPTHPKNEPIEKKNINNKGGKSLFSYDLIKDRRFTVDKFQFHVPITMNFKGEQGDRVNQMVQSYVRNNKGLNVIGIDRGERNLLYLVVINEHGEILEQFSLNEIRNAYNGKEHKIDYHTLLEERSKKRQDARQSWQTIEGIKDLKTGYLSQVIHVITQLMVKYNAIVVLEDLNFGFKSSRQKFEHSVYQQFERKLIDKLNFLVNKKTAPNEVGGLLNAYQLTAPLGNSRKMGKQNGFLFYVPAWHTSKIDPRTGFVNLLDTRYGNVAKAKEFFAKFESITYNPEKKWFEFAFDYKAFGNRADGSRTKWTICTFGERIETFRNPENNNQWDTKTVPLTERLTELFSNYGINFTTNLKEQILNQTDKAFFVVLLGALRLTLQLRNSRKSTGEDFLFSPVADENGRFFDSRIANDNEPKDADANGAYHIALKGLWVLDTIRNTEEGKNPKLAITNKEWLSFAQAKPFAHE

SEQ ID NO: 86 - protein, 1246 aa, unidentified
  REGION 1..1246: note = Category: MG13 effectors
  REGION 1..1246: note = Description: MG13-52 effector
  source 1..1246: note = uncultivated organism sequence
MSIYNELTNLYPVQKTLKFELCPIGNTLEHFLTSGILEEDEQRHEEYKSVKKIIDRYHKQFIEKALSNFSFKVQNEEKLNSLEEYIELFIHKKSVENGAEKFKKVQDNLRKQITSHFAKQEAFANLFKKELIQDDLPAFVTSTDEKEMIAHFTRFTTYFVDFHKNRKNMYSDEAKATSIAYRLIHENLPKFLTNALAFERIRNSEVANHFEAIQESLNIENIASLFDPLSYSQVLTQAKIDIYNGVIGGKTLDNLGNRSQGLNEYINLYNQTHNERLPLLKPLYKQILSDRSSLSWLPDTFKDDEQLADTLNDWYNEIENEIISPQDGQISLRELLENISTYNTDTIYIQNDTSITDISTRLFKRYDTITNAVSSEFQRILPRKKNESQEKYDERIKKIIDKKSSFSIGYLNYCLSQVPNLSYQTIDSYFKSLGAYERDGVQKENLLTSIERAHFLAQPYIINAKGDNLIHNSEAIKAIRELLVSVNNLLHFIKPLCIGEEEADADASFYGDFTHIWAILEKTTLLYNMVRNYLTRKPYSTDKFKLNFKNDQLLLGWDQNKEVDRTTVLLRKDGYYYLAIMNKAHNRIFDMEHLPDDGDCYEKMDYKLLPGPNKMLPKVFFSKSRIDEFAPDTTLLENYNKGTHKKGNNFRIEDCHALIDFFKASIDKHEDWKKFGFHFSDTKDYEDLSDFYQEVEKQGYKVSFRNVSVSYIDNLVNEGKLYLFKIYNKDFSSNSKGTPNLHTLYWKMLFDERNLKHVVYKLNGEAEIFYRKASIPEDKRIIHHVNDEKRFRSPWNQQRHEVFKHEIIQDRRYTIDKFQFHVPITINFQSKGIGDINEKVQQLIHDGKIRHIIGLDRGERHLLYLSLIDMKGNIVKQISLNEIANQYNGNIYKTHYQNLLKQREEDRLEARKNWQVINNIKNLKQGYLSQVVHKISEMIVEYDAIVVLEDLNFGFMRGRQKIERSIYQQFEVALIEKLNYLVDKKQSVEKECGLLQALQLTNQFESFQKLGKQTGVLFYIPAWNTSKIDPVTGFTNLFDTRCDTREKIHDFISSFDSIKYNPDKNYFEFSFNYDNFTKKAEGSRTHWTICSYGERIETFHNLEKNNNWDMRVIDLSAQIRSLLEEEKIDINGNLKDAILRIDKTSFLKSIMHYIKLMLQMRNSKTGTEEDYILSPVADENGIFFDSRTQKANLPLDADANGAYNIARKGLWIVRQIQKKQENEKLNLAISNKEWLKFAQEKTYLND

SEQ ID NO: 87 - protein, 1249 aa, unidentified
  REGION 1..1249: note = Category: MG13 effectors
  REGION 1..1249: note = Description: MG13-53 effector
  source 1..1249: note = uncultivated organism sequence
MKQFTNLYPVSKTLRFELQPIGKTKENIEKNGILMRDEKRAEDYKIVKGFIDDYHKQFIKERLWSFKLPLNSEGHLNSLEEYQALYEVSKRNEVQEAEFSEVKDNLRSIIAKRLTESGSAYERIFKKELIREDLIDFLESKEDKDIVRQFADFTTYFSGFHENRKNMYVAEEKSTAIAYRLIHQNLPKFMDNMKTFAKIAETSVAEHFSDIYEGWKEYLNVGSIEEIFRLDYFSETLTQPHIEVYNYIIGKKILEDGTEIKGINEYVNLYNQQQKDKSKRLPFLIPLYKQILSDREKLSWLVEEFDSDEIMLAAINEAYNHLHDLLMGRENESLRSLLLHIKDFDLSQISITNDLSLTDISQHLFSRYDVFTNGIKDELRIITPRKKKESDEDFEDRISKIFKTQKSFSIDFLDKLPQPVMEDGKTRSIEDYFMTLGAVNTETTQKENLFAQIENAYEDARFVLQLKDTGDTLSQNKSAVAKIKALLDALKDLQHFIKPLLGSGEENEKDDLFYGSFQMMWDELDTITPLYNKVRNWLTRKPFSTEKIKLNFDNSQLLGGWDVNKEPDCTGVLLRKDGLFYLGIMDKKSNHIFETDVIPTDGECFDKIDYKLLPGANKMLPKVFFSKSRIDEFAPSESIITSYKRGTHKKGVGFNLAECHRLIDFFKQSINKHEDWSKFGFHFSDTKTYEDISGFYREVEQQGYMLSSRPVSSSYIDTLVSEGKLYLFRIWNKDFSEFSKGTPNLHTLYWKMLFDERNLSDVVYKLNGQAEVFYRKASIKPENRIVHKANQPVANKNELNTKLASTFEYDIIKDKRYTVDKFQFHVPITINFKAAGQTNINTIVQDAIRQEEFSHIIGIDRGERHLLYLSLIDLKGNIVKQMTLNEIINEYKGQTYKTNYHDLLAKREGDRTNARRSWETIETIKELKEGYLSQVVHIISKMMVEYNAIVVLEDLNTGFMRGRQKIERQVYEKFEKMLIEKLNCYIDKQVSPTAKGGLLNPLQLTCDAQKWKRSHQCGCLFYIPAWNTSKIDPVTGFVNLLDTHYDTREKARVFFSKFQRISYNAQKGWFEFAFDYNDFTSKAEGTRTQWTLCTQGERIRTFRNPQKNHQWDDERIALTDAYKQLFDKYDIDINGNIKEAISAQTDAQFFKELMGLMKLLLQMRNSVTNSEEDYLLSPVADDAGHFFDSREGISNLPIDADANGAYNIARKGLWIIRKIQEAPSGERISLSITNKEWLQFAQTKPYFND

SEQ ID NO: 88 - protein, 1274 aa, unidentified
  REGION 1..1274: note = Category: MG13 effectors
  REGION 1..1274: note = Description: MG13-54 effector
  source 1..1274: note = uncultivated organism sequence
MNELKQFTNLYQLSKTLRFELQPIGKTKDNIETNGILQRDKKRAEDYIRVKQFIDEYHKQFIKERLWNFTLPMESEGCHDSLEEYQSLYELPKRDTAQEAAFTEVKDNLRGIIAKRLTEKGTAYDRIYKKELIREDLIEFLEKDEEKDIVRQFADFTTYFTGFYENRANMYTAEEKSTAIAYRLIHQNLPKFMDNMKAFAKIAQTSVAEHFADIYDGWKEYMNVGSLEGIFQLDYFSETLTQPHIEVYNYIIGKRILEDGTEIKGINEYVNLYNRQQKDKSLRLPFLVPLYKQILSDREKLTWLSEELDSDEKMLAAIKETYTNLHDLLMGEENESLRSLLQHLKDFNLAQVNITNDISLTDISQHLFGQYDVFTRGLKDELRIITPRKKNESDEAFEERITKIFKTQKSFCIAVLDKLPQPVMEDGKPRCIEDYFMTLGAVNTETNQKVNLFAQIENAHEDARAILQMTDTGDMLSQNKPAVAKIKALLDAFKDLQHFIKPLLGSGEENEKDELFYGVFHLIWDELDTITPLYNKVRNWLTRKPYSTEKIKLNFDSPTLLKNMANPQTSSAAIFRDKEGYYYLGILNPKHRNCLNNMPSAADDKAESIEFLNYRQGGDMGKNVQNLMVIDGETRMVHGRKETSGKFAGQNLRLENAKNEYLPADVNAIRLRQSYLTTSSTFNKDDLATFIAYYIPLVKSYYSDFVFHFKEPHEYISLPDFTDHINQQAYQLYFTSVSKAYIDQMVKEGKIFLFRIWNKDFSEYSKGTPNLHTLYWRMLFDEHNLRDVVYMLNGQGAEVFFRKASIKPENRIVHKANNAIANKNSLNEKRTSTFDYDIIKDRRYTVDKFQFHVPITINFKEPKERNINPIVLDTIRNGGFTHVIGIDRGERHLLYISLIDLQGHIVKQMTLNEIVNEYKGLTHKTNYHDLLAKREGERTTARRSWDTIENIKELKEGYLSQVVHVISKMMVEYNAIIVLEDLNKGFTRGRQKIERQVYDKFERMLMDKLNCYIDKQIEPDATGGLLHSLQLTNEYKLFSKLKQKQSGCLFYIPAWNTSKIDPVTGFVNLFDTRYETREKARLFFLRFQRISFNVDKNWFEFAFDYNDFTTKAEETRTQWTLCTHGTRIRSFRNPNKNYQWDDDEIVLTDEFKRLFEKYGIDIRGNLKEAINSQAEAQFYKDLMSLMKLLLQMRNSRINSEVDYLLSPVADEKGLFFDSREGIDGLPDNADANGAYNIARKGLWMMEQIKQSDESAKPKLSISNKEWLRYTQGME

SEQ ID NO: 89 - protein, 1263 aa, unidentified
  REGION 1..1263: note = Category: MG13 effectors
  REGION 1..1263: note = Description: MG13-55 effector
  source 1..1263: note = uncultivated organism sequence
MRKFNEFVGLYPISKTLRFELKPIGKTLEYIQRNKLLEHDAVRADDYVKVKKIIDKYHKCLIDEALSGFTFETEADVRSNNSLSEYYLYYNLKKRNEQEQKTFKTIQNNLRKQIVNKLTQSEKYKRIDKKELITTDLPDFLTNESEKELVEKFKNFTTYFTEFHKNRKNMYSKEEKSTAIAFRLINENLPKFVDNISAFEKVASSPLAEKINALYEDFKEYLNVEEISRVFRLDYYNELLTQKQIDLYNAIVGGRTEEDNRIQIKGLNQYINEYNQQQTDRSNRLPKLKPLYKQILSDRESVSWLPPKFDSDKDLLIKIKECYDALSEREKVFDKLESILKSLSTYDLSKIYISNDSQLSYISQKMFGRWDIIIGKAIREDCAKRNPQKSRESLEKFAERIDKKLKAIDSISIGDVDECLAQLGETYVKRVEDYFAAMGESEIDDEQTDTTSFKKNIEGAYESVKELLNNADNITDNNLMQDKGNVEKIKTLLDAIKDLQRFIKPLLGKGDEADKDGVFYGEFTSLWTKLDQVTPLYNMVRNYLTSKPYSTKKIKLNFENSSLMKGWDLNKEPDNTTVIFRKDGLYYLGIMGKKYNRVFVDREDLPHDGECYDKMEYKLLPGANKMLPKVFFSETGIQRFRPSEELLGKYERGTHKKGAGFDLGDCRALIDFFKKSIERHDDWKKFDFKFSDTSTYQDISEFYREVEQQGYKMSFRKVSVDYIKSLVEEGKLYLFQIYNKDFSAHSKGTPNMHTLYWKMLFDEENLKDVVYKLNGEAEVFFRKSSITVQSPTHPANSPIKNKNKDNQKKESEFKYDLIKDRRYTVDKFLFHVPITMNFKSVGVSNINQLVKRHIRSATDLHIIGIDRGERHLLYLTVIDSRGNIKEQFSLNEIVNEYNGNTYRTDYHELLDTREGERTEARRNWQTIQNIRKLKEGYLSQVIHKISELAIKYNAVIVLEDLNFGFMRSRQKVEKQVYQKFEKMLIDKLNYLVDKKKPVAETGGLLRAYQLTGEFESFKTLGKQSGILFYVPAWNTSKIDPVTGFVNLFDTHYENIEKAKGFFDKFKSIRYNSDKDWFEFVVDDYTRFSPKAEGTRRDWTICTQGKRIQIYRNHQRNNEWEGREIDLTKAFKEHFEAYGVDISKDLREQINTQNKKEFFEELLRLLRLTLQMRNSMPSSDIDYLISPVADDTGCFFDSRKQAELKENAVLPMNADANGAYNIARKGLLAIRKMKQEENDSAKISLAISNKEWLKFAQTKPYLED

SEQ ID NO: 90 - protein, 1249 aa, unidentified
  REGION 1..1249: note = Category: MG13 effectors
  REGION 1..1249: note = Description: MG13-56 effector
  source 1..1249: note = uncultivated organism sequence
MKNFESFTNLYPLSKTLRFELRPIGRTLENIQANGLLEQDNHRAESYKLVKAIIDRYHKVFIDEALSHCVLPVENSGNKNSLSEVYQYLTTKDHSEKETDDFNKTQDNLRKMIVSALKKDTHFGRIFKKELIREDLLNNDLQGFDLNEEEYDLIKEFRDFTTYFVGFNENRANMYSEEAKSTAIGYRLIHENLPKFIDNMVIFQKVKVSPVSEYFANIETEMEDMLQGIKVEDIFDLNFFNQVLVQRFIDLYNAVIGGQVASEEDHRKGLNQYINEYNHVQKDKKDRLPKFKPLFKQILSDRIHASWQIDNFESDNEVLKAIENAYETLDEEVISRKDSNLPLLFASISDFDLSGIYVSAKAITDFSQQIFKDWNAIDSALEAACRRSNQPKKKETEEKYAERIKKQRSHIDSYSVGEIIESLVAFQPNPEKSILDYLGGMGRREDKPSIIESIKSAYRDVEELLKTEYPANKNLALDKDNISKVKALLDAIKELQFFIKPLLGTGKESGKDERFYGEFVDYWQTLDIITPLYNKVRNYATRKPYSTAKFKLNFENSTLLNGWDVNKEPDNTSVLLRKDGLYYLAIMKKSCNRVFAVDQYDTVGDCYEKIDYKLLPGANKMLPKVFFAKSRIDEFAPSREVLDIYKRGSFKKGEEFCKADLHTLIDFYKASITKHEDWKKFGFEFSPTSSYDDISGFYREVEQQGYQIRFRKVSCTYIDSLVDQGQIYLFQIYNKDFSPFSKGTPNMHTLYWKMIFDERNLKDVVYKLNGQAEIFFRKSSLPVETPTHPANQPIANKNPLNRKKESLFTYDIVKNRRYRYDKIQFHVPITMNFKSIDSEYINDQVQDYIRQSKDLHFIGIDRGERHLLYLTVIDSKGIIEEQFSLNVINNEYNGTTYSTNYHDLLEERGDDRTKARREWLAIESIKELKEGYLSQVVKKITDLMIKYNAIVVLEDLNMGFKRGRQKVESSAYQQFEHKLIDKLNYLAGKTAPIDKVGGLLKAYQLATPYQNEMGFQNGFVFYIPAWNTSKIDPVTGFTNLFDLHIETMEQAKKFFSKFDYIRWNAANNWFEFAFDYKNFTEKADGSRTQWTLCTQGTRIRTFRNPEKNSEWDNVEVDLTDLFLSLFKSKNIDIKSDLKTQILAQNEKDFFMSLLLCLKLTLQMRNSISNSEVDYLISPVADANGDFFDSRKVDSSLPANADANGAYNIARKGLWMALRIKKSRPEDKVSLKITNKEWLNFAQNKPYLTD

SEQ ID NO: 91 - protein, 1235 aa, unidentified
  REGION 1..1235: note = Category: MG13 effectors
  REGION 1..1235: note = Description: MG13-57 effector
  source 1..1235: note = uncultivated organism sequence
MKAFTNFYSLPKTLKFELKPIGKTLEFINTNGLLAQDEHRADNYIKVKKIIDDYHKAFIENSLRNLKLKYEDIEAYYSYYIIKNREENQKKAFVNIQTSLRKQIASRFKDNDLSRLFGKELIKEDLINFVKTNDDRILIEEFKNFTTYFTGFHENRKNMYSEEEKSTSIAYRLINENLPKFIDNISTFEKVRNTSIENDFNTIYSELEEYLNVVSIEEIFNLNYFTEVLTQTQIDVYNAIIGGKSFDDGRKIKGLNEYINLYNQTQKDKTKRLPKLKVLFKQILSDRNAISYIPEEFKNDNEVLNSIEKVYQDLNQEVFNKKKEGEYSLKELLLHIKEFELDKIYLRNDLSLTDISKKHLGDWGIINKAIANQYIKENPKKTKDKQEKYDEKIKKYLNSFDSFSIQFINDCLEDKTKKVEDYFIQCKNKDDKNLFEQIEIYYNGIKDLLNTDYPENKQLSQDKESVEKIKLFLDSIKELQWFIKPFLEKGEVAEKDEKFYGEFSSMWKLLDDSITPLYNKVRNYMTKKPYSQEKIKLNFENSTLLDGWDVNKESDNASIILRKDGLYYLGIMNKKHNRIFDNKNIKTNGVCYEKMDYKLLPGANKMLPKVFFSKSRIDEFSPSEKLLENYKNDTHKKGDTFNINDCRDLIDFYKSSIQKHEDWKKFNFKFSDTKTYNDLSGFYREVEQQGYKITFRNVSEEYINTLVEEGKLYLFQIYNKDFSPNSKGTPNMHTLYWKMLFDEENLKNVVYKLNGQAEVFFRKSSIKDENKIIHKANSPILNKNEKNHKKESLFDYDLIKDKRYTIDKFQFHVPITINFKAIGSENINPNVNQYIKENKVKHIIGIDRGERHLLYLSLIDLKGNIIKQFSLNEIRNEYKGETYKTNYHDLLNKKEVDRDEARKNWQTIENIKELKEGYLSQVIHKISQLMVEYNAIVVLEDLNFGFMRGRQKVEKQVYQKFEKMLIDKLNYLVDKKKDPQEEGGLLNAYQLTSKFESFQKLGKQSGFLFYVPAWNTSKIDPTTGFVNLFDTRYENIDKSIEFFGKFSSIEYNKAKDYFEFEFDYSKYTTKADGTKTSWTICTNSTRIETFRNTEKNSQWDSKEIVLSQAFKDLFDKYKINYSSNLKASILSQDKKEFFEELLHLLKLTLQMRNSKTGTDIDYLISPVANNKGVFYDSRVVNDTLPKDADANGAYNIARKGLWVIDQIKKTEDLKNLKLAISNKEWLSYVQSLVEK

SEQ ID NO: 92 - protein, 1272 aa, unidentified
  REGION 1..1272: note = Category: MG13 effectors
  REGION 1..1272: note = Description: MG13-58 effector
  source 1..1272: note = uncultivated organism sequence
MKQFTNLYPVSKTLRFELQPIGKTKEHIEKTGILQRDEKRAEDYKIVKGFIDDYHKQFIKDRLWSFKLPLHSEGHLDSLEEYQALYEMSKRNDVQEAEFTEIKDNLRSIIAKRLTESGSAYERIFKKELIREDLIDFLESNEDKDIVRQFADFTTYFSGFHENRRNMYVAEEKSTAIAYRLIHQNLPKFMDNMKAFAKIAGTSVAEHFTDIYEGWKEYLNVGSIEEIFRLDYFSETLTQTHIEVYNYIIGKKILEDGTEIKGINEYVNLYNQQQKDKSKRLPFLVPLYKQILSDRDKLSWLAEEFDSDEKMLAAINESYNHLHDLLMGNENESLRSLLLHIKDFDLSQINITNDLSLTDISQHLFGRYDVFTNGIKDELRNITPRKRKEGEEDFEDRISKIFKTQKSFSIDFLDKLPQPVMDDGKLRSIEDYFITLGAVNTETTQKENLFAQIENAYEDARTILQLKDTGDSLSQNKSAVAKIKALLDALKDLQHFIKPLLGSGEENEKDELFYGSFQMMWDELDTVTPLYNKVRNWLTRKPFSTEKIKLNFESPTLLKNMAVPQTSSAAIFRDRQGYYYLGILDSNSRNCINELLSVSADPSGFDFMQYHQGGDMGKNVQNLMVINGEVCKKNGRKERSGQFVGQNLILEKLKNEYLPKDVNEIRLKQSYLTSSSTFSKKDLVRFVEYYIPLVKAYYSEYSFVFKTPSEYKSFADFTDHINQQAYQLSFTPISKDSIDNLVEEGRLYLFRIWNKDFSKFSKGTPNLHTLYWQMLFDERNLQNVVYMLNGQGAEVFYRKASIKPENRIIHKANQPIANKNELNTKRTSTFEYDIIKDKRYTVDKFQFHVPITINFKAAGQTNINPIVQEAIKQGEFSHIIGIDRGERHLLYLSLTDLKGNIVKQMTLNDIVNEYKGQTYKTNYHDLLAKREGDRTDARRSWEAIETIKELKEGYLSQVVHIISKMMIEYNAIIVLEDLNTGFMRGRQKMERQVYEKFERMLIDKLNCYIDKQLSPTDEGGLLHPLQLTCDAQKWKRSHQCGCLFYIPAWNTSKIDPVTGFVNLLDTHYDTREKARVFFSKFQRISFNVPKGWFEFAFDYNDFTTKAEGTRTQWTLCTQGERIRTFRNPQKNNQWDDERIVLTDAFKQLFDKYDIDINGNIKEAISEQTDAQFFKDLLGLMKLLLQMRNSITNSEEDYLLSPVADDAGHFFDSREGISSLPIDADANGAYNIARKGLWIVRKIKETPNGEKTTLSISNKEWLQFAQTKPYIND

SEQ ID NO: 93 - protein, 1252 aa, unidentified
  REGION 1..1252: note = Category: MG13 effectors
  REGION 1..1252: note = Description: MG13-59 effector
  source 1..1252: note = uncultivated organism sequence
MNTFDQFTNLYNVQKTLCFELQPLGKTKDYIEKNGILMRDEKRAEDYKVVKRIIDEYHKKFIKDRLWSFKLPLNSEGRHNSLEEYQTLYEMSKRDESQESAFTEVKDNLRTIIAKRLTESGTKYDTIFKKELIREDLIDSLVDEEEKELVRQFADFTTYFTGFHENRKNMYSAEEKSTAIAYRLIHQNLPKFMDNMKAFAKIAETSVAEHFADIYEGSKEMLNVGSIEEIFRLDYFSETMTQPHIEVYNSIIGKRVLEDGTEIKGINEYVNLYNQQQKEKSQRLPLLVPLYKQILSDREKLSWLAEEFDCDEKMLAAVNETYARLHDLLMGNENESLRSLLLHLGDYDLEQINIANDLSLTDISQHLFGRYDVFTNGIREELRVITPRKRKETDEQLEDRISKIFKTQKSFSIAFLNSLPQPAMEDGKPRNIEGYFMALGAVNTETTQKENLFAQIENAYENAKSVLQMKETGDMLSQNKPAVAKIKALLDALKDLQHFIKPLLGSGEENEKDELFYGSFQMMWDELDAVTPLYNKVRNWLTRKPYSTEKIKLNFDNAQLLGGWDVNKEPDCTGVLLRKDGFYYLGIMDKKSNRVFEPEATPNDGDCFDKIDYKLLPGPNKMLPKVFFSKSRIDEFAPSEAIVSGYKRGTHKKGADFSLSDCHRLIDFFKQSINKHEDWKKFGFRFSDTSTYEDISGFYREVERQGYMLSSHRVSASYVERLVDEGKLYLFRIWNKDFSEYSKGTPNLHTLYWKMLFDERNLADVVYKLNGQAEVFYRKSSIQPEHRIVHPAGKPIANKNELNAKRTSTFEYDIVKDRRYTVDKFQFHVPITINFKATGQENINPVVQDTIRKGGFTHIIGIDRGERHLLYLSLIDLQGNIVMQMTLNEIINEYNGLKHKTNYHDLLAKREGERTEARRSWDTIENIKEMKEGYLSQVVHIISKMMVEYNAIVVLEDLNTGFMRSRQKIERQVYEKFEKMLIDKLNCYIDKQTDPTSEGGLLHPLQLACEAKKWKRSHQCGCLFYIPAWNTSKIDPVTGFVNLFDTRYENAAKAKAFFGKFGSIRYNANKDWFEFAFNYKDFTTKAEGTRTQWTLCTYRERIRTFRNPQKNHQWDDEEIVLTDAFKQLFDKYDIDMKGNLKEAICAQNDAQFFKDMMELMKLLLQMRNSITNSETDYLLSPVADEKGQFFDSRRGITTLPDNADANGAYNIARKGLWVIRKIQETAENEKPSLAITNKEWLQFAQTKPYLKD

SEQ ID NO: 94 - protein, 1240 aa, unidentified
  REGION 1..1240: note = Category: MG13 effectors
  REGION 1..1240: note = Description: MG13-60 effector
  source 1..1240: note = uncultivated organism sequence
MKQFTNLYPVSKTLRFELIPDKRTKEYLEQSDLISKDEKRSENYKIVKKIIDRYHKQFIDEVLSTTKLQYAKEGKLNSLEEFYFLYTNSNKTDADKKALDKVKEQLRKQIADALKKDNRFKRIDKKELIREDILKVATQEERPLIDEFRDFTTYFTGFHENRKNMYSPEAQSTAIAYRLIHENLPKFVDNIATFQKILHSPIAENLPVLYKEMEEFLNVNSIEEMFMLDYYSDVLTQPQIEVYNAIIGGRTLEDGTKIQGLNEYVNLYNQRQTLRENRLPKLKPLFKQILSDKEAVSWLPEEFESDQQLLKSVREFYASFKDNVMQQLKELLLNLPNYNLDKIYIPNDLALTDISQSLYGDWSVIKNRINEDFRNEYPQKKKETAEKYEERITKLVKSMDSFSIGYLNSCLTSQVKNICSHFTSLGAVNTDKKQKENIFIQIENAYIDVCDLLEKEYPQNKNLAQDKVHVNNLKAFLDAIKTLQHFIKPFLNTENEAEKDERFYGDITVLGEELNSITPLYNKVRNRMTRKPYSIAKFKLNFENSTLLDGWDVNKERDNSCVILRKDGFYYLAIMRKDSNRIFADAPKVENNADAYEKMEYKLLPGANKMLPKVFFSKSRIDEFQPSSLLLEHYEKGTHKKGDSFSLKDCHELIDFFKASINKHEDWKNFNFKFSPTETYEDLSGFYREVEQMGYKISFKNIPVSYINVMVSEGKLFLFQIYNKDFSQYSKGTPNLHTLYWKMIFDEQNLANVIYKLNGQAEVFYRKKSLNIVKATHPANQAIINKNPFNKKEKSTFKYDLIKDKRFTVDKFQFHVPITINFKAIGMGNINPLVNQFIKNTSDLHIIGIDRGERHLLYVTVIDSKGNIKEQFSMNQIVNEHKGNTYKTDYHDLLDKREEERLKERQSWSTIEGIKELKQGYLSQVIHKIVTLMVKYNAIVVLEDLNMGFKRGRQKVESSVYQQFEKALIEKLNYLVDKQQNPHEYGGLLKGFQLTNKFTSFRDMGRQNGFLFYIPAWNTSKMDPVTGFVNLLHPKYESVEKARSFICKFKSIRFNEKKGWYEFTFDYNDFTAKAEGTRTEWTLCTYSTRIETFRNKEKNSSWDSREVNLTEEFNKLFSQYGISDDENLKEAIAKQTEKHFFETLMHLLNLTLQMRNSKTGTEIDYLISPVTNEEGYFYDSRNCGSSLPENADANGAYNIARKGLWITRQIQSSENFEKVDITMSNKEWLNFAQTKPYLND

SEQ ID NO: 95 - protein, 1252 aa, unidentified
  REGION 1..1252: note = Category: MG13 effectors
  REGION 1..1252: note = Description: MG13-61 effector
  source 1..1252: note = uncultivated organism sequence
MKDLKQFTNLYPVSKTLRFELQPIGKTKENIEKNGILARDEQRAKDYMLVKGFIDEYHKQYIKDRLWSFKIPMNDEGHLDSLEEYQMFYEMSKRDDTQEASFTEVKDNLRGIIVNRLTENGSPYERIFKKELIREDLIDFLEDDESREIVRQFADFTTYFSGFHENRRNMYSAEEKSTAIAYRLIHQNLPKFMDNMKAFAKIAETSVAEHFPDIYEGWKEYLNVGSIEEIFRLDYFSETLTQPHIEVYNYIIGKKVLEDGTEIKGINEYVNLYNQQQKDKSKRLPFLVPLYKQILSDREKLSWLAEEFDSDDKMLSAINELYNHLHDLLMGKENESLRLLLSHLKDYNLEQINIANDLSLTDISQQLFGRYDVFTNGIKEELRAITPRKKKESDEEFEDRISKIFKTQKSFSIALLDKLPQPVMEDAKPRRVEDYFMSLGAVNTEKTQKENLFAQIENAYEDVRSILQMKDTSNMLSQNKVAVAKIKTLLDALKDLQHFIKPLLGSSEENEKDELFYGSFQMMWDELDTLTPLYNKVRNWLTRKPYSTEKIKLNFDNAQLLGGWDVNKEPDCTGVLLKKDGLYYLGIMDKKSNRIFDADVTPADGDCYDKIDYKLLPGANKMLPKVFFSKSRIDEFAPSEAIIDKYKRGTHKKGKDFSLTDCHRLIDFFKSSISKHEDWSKFGFRFSDTKTYEDISGFYREVEQQGYMLSSHPVSASYIHQLVDEGKLYLFRIWNKDFSEYSKGTPNLHTLYWKMLFDERNLADVVYKLNGQAEVFYRKASIKAENRIIHPAKHPIANKNVLNENRTSTFEYDIIKDRRYTVDKFQFHVPITIGFKAAGQTNINPVVQETIRSGGFSHIIGIDRGERHLLYFSLIDLKGNIVKQMTLNDIVNEYKGVTYKTNYHDLLAKREGERTDARRSWDTIETIKELKEGYLSQVVHIISKMMVEYNAIIVLEDLNTGFMRGRQKIERQVYEKFERMLIDKLNCYIDKQANPSENGGLLHPLQLTCDAQKWKRSHQCGCLFYIPAWNTSKIDPVTGFVNLFDTRYDTREKARLFFSKFQRISYNAKKDWFEFAFDYNDFTTKAEGTRTEWTLCTYGERIRTFRNPEKNHQWDDERIMLTEEFKQLFDRYDIDIHGNLKEAISAQSDAQFFKELLSLMKLLLQMRNSITNSEEDYLLSPVADENGHFYDSREDNISLPNNADANGAYNIARKGLWLIEQIKHADELSKLKLAISNKEWLQFAQTKPYLND

SEQ ID NO: 96 - protein, 1249 aa, unidentified
  REGION 1..1249: note = Category: MG13 effectors
  REGION 1..1249: note = Description: MG13-62 effector
  source 1..1249: note = uncultivated organism sequence
MKQFINQYQVAKTLRFDLQPIGKTKDNIEKTSILARDEQRAKDYVIVKGFIDDYHMQFIKDRLWSFKIPLKSEGHLDSLEEYQMLYGLSKRDEAQETAFTEVKDNLRSIIAKRLTGNGSAYDRIFKKELIREDLVDFLEKEEDKEIVRQFADFTTYFTGFHENRRNMYSAEEKSTAIAYRLIHQNLPKFMHNLKAFAKIAETPVAEHFADIYKGWEEHLNVGSIEEIFQLDYFSETLTQPHIEVYNYIIGKKILEDGTEIKGINEYVNLYNQQQKDKSKRLPFLVPLYKQILSDREKLSWMAEEFDSDDKMLSAINESYSHLHDLLMGEENDSLRSLLLHIKDFNLEQINITNDLSLTDISQHLFNRYDVFTNGIKDELRTITPRKKKETDEIFEDRISKIFKTQKSFSIAFLDKLPQPVMEDGKPRRVEEYFLSLGAVNTETTQKENLFARIEHAYEDAQSILQMKDTIDTLSQNKPAVAKIKALLDALKDLQHFIKPLLGSGEENEKDELFYGSFQMMWDELDTVTPLYNKVRNWLTRKPYSTEKIKLNFDNAQLLAGWDVNKEADCTGVLLQRDGFYYLGIMNKKTNRIFDADVTPSHGECYDKIDYKLLPGANKMLPKVFFSKSRIDEFAPSDAIINSYKRGTHKKGTDFSLSDCHRLIDFFKASIRKHEDWSKFGFHFSDTKIYDDISGFYREVEQQGYKLASHPVSVSYVHQLVEEGKLYLFRIWNKDFSQFSKGTPNLHTLYWKMLFDPRNLEDVVYKLNGQAEVFYRKASIKPENRIIHPAHRPITNKNEFNEKRTSTFEYDIIKDRRYTVDKFQFHVPITINFKATGQTNINPIVQEAIRRRGFTHIIGIDRGERHLLYLSMIDLKGNIVKQMTLNDIINEYNGITYRTNYHDLLAKREGERTDARRSWDTIENIKELKEGYLSQVVHIISKMMVEYNAIVVLEDLNTEFMRGRQKIERQVYEKFEKMLIETLNCYIDKHADPLEGGGLLHPLQLTCDVKKWKRSHQCGCLFYIPAWNTSKIDPVTGFVNLFDTRYDTREKARLFFSKFQRISYNSEKDWFEFTFDYSNFTSKAEGTRTKWTLCTYGERIRTFRNPKKNHQWDDEQIVLTKDFKQLFDKYGIDIHGNLKEAISTQSDSQFFRDMLGLMKLLLQMRNSITNSEVDYLLSPVADEAGHFFDSREEIESLPNNADANGAFNIARKGLWVIRKIQETAENDKISLAISNKEWLQFAQTKPYLND

SEQ ID NO: 97 - protein, 1249 aa, unidentified
  REGION 1..1249: note = Category: MG13 effectors
  REGION 1..1249: note = Description: MG13-63 effector
  source 1..1249: note = uncultivated organism sequence
MKEFTNLYPVSKTLRFELQPIGMTKENIEKNGILQRDEKRAEDYKIVKGFIDEYHKQFIKERLWSFKLPLNCEGHLNSLEEYQALYELPKRNDAQEAEFTEIKDNLRSIIAKRLTESGSAYERIFKKELIREDLIDFLESNEDKEIVRQFADFTTYFSGFHENRRNMYVAEEKSTAIAYRLIHQNLPKFMDNMKAFAKIAETPVAEHFDDIYEGWKEFLNVGSIDEIFRLDYFTETLTQPHIEVYNYIIGKKILEDGTEIKGINEYVNLYNQQQKDKSKRLPFLVPLYKQILSDREKLSWLGEEFDSDEKMLAAINESYTHLHDLLMGDENESLRALLLHIKDFDLTKINITNDLSLTDISQHLFGRYDVFTNGIKDELRNITPRKRKESDEELEDRISKIFKTQKSFSIDFLDKLPQPVMDDEKPRSIEDYFMTLGAVNTETTQKVNLFAQIENAYEDARTILQLTDTGDTLSQNKSAVAKIKALLDALKDLQHFIKPLLGSGEENEKDELFYGSFQMMWDELDTVTPLYNKVRNWLTRKPFSTEKIKLNFDNSQLLGGWDVNKEPDCTGVILRKEGFYYLGIMDKKSNHIFEADITPSVGECYDKIDYKLLPGANKMLPKVFFSKSRIDEFAPSEAIISSYKRGTHKKGADFNLVECHRLIDFLKQSINKHEDWSKFNFHFSDTKSYEDISGFYREVEQQGYMLSSHPVSSSYINQLVDEGKLYLFRIWSKDFSEFSKGTPNLHTLYWKMLFDERNLADVVYKLNGQAEVFYRKASIKPENRIIHKANHSIANKNELNSKRTSTFEYDIIKDRRYTVDKFEFHVPITINFKAAGQTNINPIVQDVIRQGGFSHIIGIDRGERHLLYLSLIDQKGNIIKQMTLNEIINEYKGQTYKTNYHDLLAKREGDRTDARRSWETIETIKELKEGYLSQVVHIISKMMVEYNAIVVLEDLNTGFMRGRQKIERQVYEKFEKMLIEKLNCYIDKHEAPSENTGLLHPLQLTCDAQKWKRSHQCGCLFYIPAWNTSKIDPVTGFTNLLDTRYDTREKARVFFSKFQRISYNAEKGWFEFALDYNDFTAKAEGTRTQWTLCTYGERIRTFRNPKKNHQWDDERIVLTDAFKQLFDTYDIDINGNLKETISAQTDAQFFKELLGLMKLLLQMRNSITNSEEDFLLSPVADDAGHFFDSREGNSSLPIDADANGAYNIARKGLWVIRKIQETANEEKPSLSITNKEWLHFAQTKPYLKD

SEQ ID NO: 98 - protein, 1252 aa, unidentified
  REGION 1..1252: note = Category: MG13 effectors
  REGION 1..1252: note = Description: MG13-64 effector
  source 1..1252: note = uncultivated organism sequence
MNNLKQFTGLYPVNKTLRFELKPVGKTKENIENKGVLERDSQRAVDYKVVKGFIDEYHKQFIKDRLWSFKLPLFSEGRLDSLEEYMALYELSKRDEAQEAEFSEVKDNLRSIIAKRLTESGSAYERIFKKELIREDLIAFLEKDEDKEIVRQFADFTTYFGGFHENRKNMYSAEEKSTAIAYRLIHQNLPKFMDNMKAFAKIAETSVAEHFADIYMGWKEYLNVGSIEEIFCLDYFSETLTQPHIEVYNYIIGKKILEDGTEIKGINEYVNLYNQQQKDKSKRLPFLVPLYKQILSDREKLSWLTEEFDSDEKMLAAINESYEHLYDLLMGNENESLRSLLIHLKDFNLAQINITNDLSLTDISQHLFSRYDVFTNGIKDKLRIITPRKKKENDEDFEDRISKIFKTQKSFSIDFLDKLPQPVMDDGKPRSVEDYFMSLGTVNTETTQKENLFAKIENAYEDVRPILQMKDTGDALSQNKPAVAKIKSLLDALKDLQHFIKPLLGSGEENGKDELFYGSFQIMWDELDTVTPLYNKVRNWLTRKPYSTEKIKLNFDNAQLLGGWDVNKEPDCTGILLRKDGQYYLGIMDKKSNRIFEADVTPADGDCYDKIDYKLLPGANKMLPKVFFSKSRIDEFAPSEAIVSSYKKGTHKKGAYFNLLECHRLIDFFKQSINKHEDWSKFGFRFSDTETYEDISGFYREVEQQGYMLSSHPVSSLYINQLVDEGKLYLFRIWNKDFSEFSKGTPNLHTLYWKMLFDERNLADVVYKLNGQAEVFYRKASIKPENRVVHQANKPIDNKNGLNKKRTSTFEYDIIKDKRYTVDKFQFHVPITINFKATGQNNINPVVQETIRQGGFSHIIGIDRGERHLLYLSLIDLKGNIVKQMTLNDIVNEYKGQTYKTNYHDLLAKREGERTDARRSWETIETIKELKEGFLSQVVHIISKMMVEYNAIVVLEDLNTGFMRGRQKIERQVYEKFEKMLIEKLNCYIDKHAAPTEDTGLLHPLQLTCDAQKWKRSHQCGCLFYIPAWNTSKIDPVTGFVNLLDTRYDTREKARVFFSKFQRISFNSEKGWFEFVLDYNDFTTKAEGTRTQWTLCTYGERIRTFRNPQKNHQWDDERIMLTEAFKQLFDKYDIEINGNLKEAISAQSDAQFFKGLLSLMKLLLQMRNSITNSEEDFLLSPVSDESGHFFDSREGISCLPIDADANGAYNIARKGLWVIRKIQAVQDGEKLSLAITNKEWLQFAQTKPYLKE

SEQ ID NO: 99 - protein, 1249 aa, unidentified
  REGION 1..1249: note = Category: MG13 effectors
  REGION 1..1249: note = Description: MG13-65 effector
  source 1..1249: note = uncultivated organism sequence
MKNFESFTNLYPLSKTLRFELRPIGRTLENIQANGLLEQDNHRAESYKLVKAIIDRYHKVFIDEALSHCVLPVENSGNKNSLSEVYQYLTTKDHSEKETDDFNKTQDNLRKMIVSALKKDTHFGRIFKKELIREDLLNNDLQGFDLNEEEYDLIKEFRDFTTYFVGFNENRANMYSEEAKSTAIGYRLIHENLPKFIDNMVIFQKVKVSPVSEYFANIETEMEDMLQGIKVEDIFDLNFFNQVLVQRFIDLYNAVIGGQVASEEDHRKGLNQYINEYNQVQKDKKDRLPKFKPLFKQILSDRIHASWQIDNFESDNEVLKAIENAYETLDEEVISRKDSNLPLLFASISDFDLSGIYVSAKAITDFSQQIFKDWNAIDSALEAACRRSNQPKKKETEEKYAERIKKQRSHIDSYSVGEIIESLVAFQPNPEKSILDYLGGMGRREDKPSIIESIKSAYRDVEELLKTEYPANKNLALDKDNISKVKALLDAIKELQFFIKPLLGTGKESGKDERFYGEFVDYWQTLDIITPLYNKVRNYATRKPYSTAKFKLNFENSTLLNGWDVNKEPDNTSVLLRKDGLYYLAIMKKSCNRVFAVDQYDTVGDCYEKIDYKLLPGANKMLPKVFFAKSRIDEFAPSREVLDIYKRGSFKKGEEFCKADLHTLIDFYKASITKHEDWKKFGFEFSPTSSYDDISGFYREVEQQGYQIRFRKVSCTYIDSLVDQGQIYLFQIYNKDFSPFSKGTPNMHTLYWKMIFDERNLKDVVYKLNGQAEIFFRKSSLPVETPTHPANQPIANKNPLNRKKESLFTYDIVKNRRYRYDKFQFHVPITMNFKSIGSEYINDQVQDYIRQSKDLHFIGIDRGERHLLYLTVIDSKGIIEEQFSLNVINNEYNGTTYSTNYHDLLEERGDDRTKARREWLAIESIKELKEGYLSQVVKKITDLMIKYNAIVVLEDLNMGFKRGRQKVESSAYQQFEHKLIDKLNYLAGKTAPIDKVGGLLKAYQLATPYQNEMGFQNGFVFYIPAWNTSKIDPVTGFTNLFDLHIETMEQAKKFFSKFDYIRWNAANNWFEFAFDYKNFTEKADGSRTQWTLCTQGTRIRTFRNPEKNSEWDNVEVDLTDQFLSLFKSKNIDIKSDLKTQILAQNEKDFFMSLLLCLKLTLQMRNSISNSEVDYLISPVADANGDFFDSRKVDSSLPANADANGAYNIARKGLWMARRIKKSRPEDKVSLKITNKEWLNFAQNKPYLTD

SEQ ID NO: 100 - protein, 1171 aa, unidentified
  REGION 1..1171: note = Category: MG13 effectors
  REGION 1..1171: note = Description: MG13-66 effector
  source 1..1171: note = uncultivated organism sequence
MIRLLNKYIEANNEKDGEGPDKVQDDLRKLIVKALKSGVSLDKDPEQEERFKSLFSEKLVKNILPNFVQTEEEKSKVAKFRDMTTYFVGFHKNRENMYSEEAQTTAISYRLIHENLPRFLDNIAVYEKVKPVLSDEIASLEEQLHQNGYVEASCIDSLFSVDFYLRVLTQRGIEQYNAVIGKIVNDESDEIKGLNERINLYNQVHKKEKLPLFKPMYKQILSDREQLSWLPETFENDASLLDAVKGFHQDLLSNDILSRIDKLLSSLQDFNLDQIWIANDVQLRGLSKDLYGDWSLIDRALGIERSEDVVQGLTAAQKKAASAAKKRSSFSIVELNAATRSSVPDEKYVPVQNYFSAMGKVCAQGEATRENFVTRICAAYQELEEYIPSIRKSLLQEKRATELIKNYLDAVNDLLRFIKPLLGRGDETDKDANFYGEFTFLTDCLFAIVPLYNEVRNYLTQKPYSTEKFKLNFRGSTLLNGWDKNKERVNLGVILRKEGKYFLAIMNKKHNTLFTEGKLQQHTGGECYQKMEYKLIPGSKMLPKVFFSKKGISTFQPSEELLLNYRIGTYKKGEKFNLEHLHKLIDFYKHSIAVHEDWSKFDFHFSDTSSYRDISGFYKEVEQQGYKLTFRNVSVSYINRLVEEGKLYLFQIYNKDFSEYSKGTPNLHTLYWKMLFDPENLKDVVYKLSGEAEVFFRKKSLDVSHPTHPKNEPIEKKNKNNKGEKSLFSYDLIKDRRFTVDKFQFHVPITMNFKGEQGDRVNQMVQSYVRNNKGLNVIGIDRGERNLLYLVVINEHGEILEQFSLNEIRNAYNGKEHKIDYHTLLEERSKKRQDARQSWQTIEGIKDLKTGYLSQVIHVITQLMVKYNAIVVLEDLNLGFKSSRQKFEQSVYQQFERKLIDKLNFLVNKKAAPNEMGGLLNAYQLTAPFESFRKMGKQNGFLFYVPAWHTSKIDPRTGFVNLLDTRYENVAKAKEFFAKFESITYNPEKKWFEFAFDYKAFGNRADGSRTKWTICSYGERIETFRNPKNNNQWDTKSVPLTERLTELFSKYGIDYTTNLKEQILNQTDKAFFVELLGALRLTLQLRNSRKSTGEDFLFSPVADENGCFFDSRKANDNEPKDADANGAYHIALKGLWALDTIRNTEEGKNPKLAITNKEWLSFAQAKPFAHE

SEQ ID NO: 101 - protein, 1275 aa, unidentified
  REGION 1..1275: note = Category: MG13 effectors
  REGION 1..1275: note = Description: MG13-67 effector
  source 1..1275: note = uncultivated organism sequence
MNNLNDLTGQYPVSKTIRFDLQPIGKTKENIEKGGILQQDEQRAEDYKTVKGFIDEYHKQFIKDRLWNFRLPLISEGHLDSLEEYQTLYLLAKRNDAQEAEFKEVKDNLRSIIARRLTEKGSAFERIFKKELIREDLIDFVEKPEDKDLVKSFADFTTYFTEFHKNRANMYTAEEKSTAIAYRLIHQNLPKFMDNIKAFAKIAQTSVAGHFVEIYNGSKEYLNVGSLEEVFQLDYFSDTMTQPHIEVYNSIIGKRVLEDGTEIKGINEYVNLYNQQQKDKRQRLPLLVPLYKQILSDREKLSWLAQEFDSDKKMLAAINETFIHLREILMGEDSESLRSILTHLKDFDLTQINITNDLSLTDISQHLFKRFDVFSNGIKAKIRSITPKKKKESDEELEDRVSKIFKTQKSFSIAFLDNLPQPEMEDGKRRSVADYFTALGAVNNEVTQKENLFAQIEIAYEDARDVLQMTETGDTLSQDKPAVAKIKALLDALKDLQHFIKPLRGSGEENEKDELFYGSFLMMWDELDTVTPLYNKVRNWLTRKPYSTEKIKLNFDSPTLLNGWPNPQTNSGAIFRDEEGLYYLAILDAQNRACLNELSSNVNGNEDHIEMMKYLQGGDMGKNVQNLMVIDGEVRKVNGRKETSGEFAGQNLRLENAKHQYLPKNINEIRLKQSYLTSSPTFNKKDLVSFIEYYIPLVEAYYSDYVFHFRKSSEYKSFADFTEHINQQAYQVQFKPVSKTSLYSLVEEGKLYLFRIWNKDFSEFSKGTPNLHTLYWKMLFDERNLADVVYKLNGQAEVFYRKASIKPENKIVHPANRAIANKNELNKKRTSSFDYDIIKDRRYTVDKFQFHVPITINFKATGQTNVNPIVQDTIRRGGFTHIIGIDRGERHLLYVSLIDLKGNIVKQMTLNEILNEYKGLTHKTNYHDLLAKREGERTDARRSWDTIENIKELKEGYLSQVVHIISKMMVEYNAIVVLEDLNPGFMRGRQKIERQVYEKFEKMLIEKLNCYIDKKAEPIEIGGLLHPLQLSCDIKKWKKSHQCGCLFYIPAWNTSKIDPVTGFVNLFDTHYETREKARSFFSKFQRIHFNSEKNWFEFTFDYGNFTTKAEGTRTQWTLCSYGTRIRNFRNPLKNHQWDDEEVELVDEFKHLFDKYSIDIFGNLKESICNQTDAQFYKELMGLMKLLLQMRNSRTNSEVDYLLSPVADEQGHFFDSREGIGSLPDNADANGAFNIARKGLWIIRKVQGTPSDEKMSLAISNKEWLQFAQNRPYLND

SEQ ID NO: 102 - protein, 1249 aa, unidentified
  REGION 1..1249: note = Category: MG13 effectors
  REGION 1..1249: note = Description: MG13-68 effector
  source 1..1249: note = uncultivated organism sequence
MKNFESFTNLYPLSKTLRFELRPIGRTLENIQANGLLEQDNHRAESYKLVKAIIDRYHKVFIDEALSHCVLPVENSGNKNSLSEVYQYLTTKDHSEKETNDFNKTQDNLRKMIVSALKKDTHFGRIFKKELIREDLLNNDLQGFDLNEEEYDLIKEFRDFTTYFVGFNENRANMYSEEAKSTAIGYRLIHENLPKFIDNMVIFQKVKVSPVSEYFANIETKMEDMLQGIKVEDIFDLNFFNQVLVQRFIDLYNAVIGGQVASEEDHRKGLNQYINEYNQVQKDKKDRLPKFKPLFKQILSDRIHASWQIDNFESDNEVLKAIENAYETLDEEVISRKDSNLPLLFASISDFDLSGIYVSAKAITDFSQQIFKDWNAIDSALEAACRRSNQPKKKETEEKYAERIKKQRSHIDSYSVGEIIESLVAFQPNPEKSILDYLGGMGRREDKPSIIESIKSAYRDVEELLKTEYPANKNLALDKDNISKVKALLDAIKELQFFIKPLLGTGKESGKDERFYGEFVDYWQTLDIITPLYNKVRNYATRKPYSTAKFKLNFENSTLLNGWDVNKEPDNTSVLLRKDGLYYLAIMKKSCNRVFAVDQYDTVGDCYEKIDYKLLPGANKMLPKVFFAKSRIDEFAPSREVLDIYKRGSFKKGEEFCKADLHTLIDFYKASITKHEDWKKFGFEFSPTSSYDDISGFYREVEQQGYQIRFRKVSCTYIDSLVDQGQIYLFQIYNKDFSPFSKGTPNMHTLYWKMIFDERNLKDVVYKLNGQAEIFFRKSSLPVETPTHPANQPIANKNPLNRKKESLFTYDIVKNRRYRYDKFQFHVPITMNFKSIGSEYINDQVQDYIRQSKDLHFIGIDRGERHLLYLTVIDSKGIIEEQFSLNVINNEYNGTTYSTNYHDLLEERGDDRTKARREWLAIESIKELKEGYLSQVVKKITDLMIKYNAIVVLEDLNMGFKRGRQKVESSAYQQFEHKLIDKLNYLAGKTAPIDKVGGLLKAYQLATPYQNEMGFQNGFVFYIPAWNTSKIDPVTGFTNLFDLHIETMEQAKKFFSKFDYIRWNAANNWFEFAFDYKNFTEKADGSRTQWTLCTQGTRIRTFRNPEKNSEWDNVEVDLTDQFLSLFKSKNIDIKSDLKTQILAQNEKDFFMSLLLCLKLTLQMRNSISNSEVDYLISPVADANGDFFDSRKVDSSLPANADANGAYNIARKGLWMARRIKKSRPEDKVSLKITNKEWLNFAQNKPYLTD

SEQ ID NO: 103 - protein, 1249 aa, unidentified
  REGION 1..1249: note = Category: MG13 effectors
  REGION 1..1249: note = Description: MG13-69 effector
  source 1..1249: note = uncultivated organism sequence
MKQFTNLYPVSKTLRFELQPIGKTKENIEKKGILTRDEKRAKDYQIVKGFIDEYHKQFIKDRLWNFKLPLASEGNLDSLEEYQMFYEMPRRDDAQETDFSEVKDNLRAIIANRLRESGSAYDRIFKKELIREDLVEFLSDEDDKNIVRQFADFTTYFSGFHENRRNMYSAEEKSTAIAYRLIHQNLPKFMDNMKAFTKIAKTSVAEHFADIYAGWKEYLNVGSIEEVFRLDYFSETLTQPHIEVYNYIIGKKVLEDGKEIKGINEYINLYNQQQKDKSKRLPFLVPLYKQILSDREKLSWLAEEFDSDEKMLAAIDKLYTHLHELLMGEENESLRSLLMHMKDYDLSQINITNDLSLTDISQHLFNRYDVYTNGVKEQLKGITPRKKKENDEDFEDRISKIFKTQKSFSISLLNGLPHPEIEDSQPRRIEEYFMAMGAVNTATTQRENLFSKIESAYEDARAFLQMKDTGDSLSQNKPAVAKIKALLDAFKDLQHFIKPLLGSGEELEKDELFYGSFQMIWDELDTVTPLYNKVRNWLTRKPYSTEKIKLNFDNSQLLGGWDVNKEPDCTGVLLRKDGFFYLGIMDKRYNHIFEADLPHSDDDCYDKVDYKLLPGANKMLPKVFFSKSRIDEFAPSAAIVSSYKRGTHKKGKNFDLSDCHRLIDFFKQSIQKHADWCKFGFHFSDTQTYEDISGFYREVEEQGYMLSSHQVPSSYINELVDGGKLYLFRIWNKDFSENSKGTPNLHTLYWKMLFDKRNLSDVVYKLNGQAEVFFRKASIKPENRVVHKANQSITNKNALNKKTTSTFEYDIIKDRRYTVDKFQFHVPITINFKASGQTNINPIVQETIRQGGFKHIIGLDRGERHLLYLSLIDLNGNIVKQMTLNDIVNEYNGQTYKTNYHDLLTKREGERTDARRSWDTIETIKELKEGYLSQVIHIISKMMVEYKAIVVLEDLNTGFMRGRQKIERQVYEKFEKMLIEKLNCYIDKKADATDATGLLHPLQLTCDAKKWNRSHQCGCLFYIPAWNTSKIDPVTGFVNLLDTRYETREKAHLFFSKFQRISFNQKKGWFEFAFDYADFTTKAEGTRTQWTLCTYGERIRTFRNPQKNNQWDNERIVLTDEFKRIFDEKGIDIFGNLKDAICNQRDAKFFKDLLGLMKLLLQMRNSITNSEEDYLLSPVADEKGHFFDSREGISSLPIDADANGAYNIARKGLWVIRKIQETPENERPSLSITNKEWLQFAQTKPYLKE

SEQ ID NO: 104 - protein, 1249 aa, unidentified
  REGION 1..1249: note = Category: MG13 effectors
  REGION 1..1249: note = Description: MG13-70 effector
  source 1..1249: note = uncultivated organism sequence
MEQFTNLYQVSKTLRFDLQPIGKTQENIEKNGILARDEQRAKDYLLVKGFIDDYHKQFIKERLWDFKLPLESEGRLDSLQEYQELYELSKRDDAQEAAFTEIKDNLRSIIAKRLTESGSAYERIFKKELIREDLVEFLEKEEAKDIVRQFADFTTYFSGFHENRRNMYSAEEKSTAIAYRLIHQNLPKFLDNMKAFAKIAETSVAKHFADIYDGWKEHLNVGSIEEIFRLDYFSETLTQTHIEVYNYIIGKKIFEDGTEIKGINEYVNLYNQQQKDKSQRLPFLVPLYKQILSDREKLSWMAEEFDSDEQMLSAINESYNHLHDLLMGDENDSLRSLLLHIKDFNLSQINITNDLSLTDISQHLFSRYDVFTNGIKDELRIITPRKKKESDEDFEDRISKIFKTQKSFSVAFLDNLPQPVMDDGKSRSVEDYFMSLGAVNTETTQKENLFAQIENAYEDARHILQMIDTGDTLSQNKPAVAKVKALLDSLKDLQHFIKPLLGSGEENEKDELFYGLFQMIWDELNTVTPLYNKVRNWLTRKPYSTEKIKLNFDNAQLLGGWDVNKEPDCTGVLLQHDGFYYLGIMNKKANHIFDADVTPSDGDCYDKIDYKLLPGANKMLPKVFFSRSRIDEFAPSETIVNSYKRGTHKKGTGFSLSDCHRLIDFFKTSISKHEDWSKFGFRFSDTKTYEDISGFYREVEQQGYMLSSHPVSTSYIHQLVEDGKLYLFRIWNKDFSEFSKGTPNMHTLYWKMLFDERNLADVVYKLNGQAEVFYRKASIKLENRIVHPSNRPIANKNELNKKRTSTFEYDIIKDRRYTVDKFQFHVPITINFKAAGQTNINPIVQDAIRRGGFKHIIGIDRGERHLLYLSLIDLKGNIVKQMTLNDIVNEYKGITYRTNYHDLLAKREGDRTEARRSWDTIETIKELKEGYLSQVIHIISKMMVEYNAIVVLEDLNTGFMRGRQKIERQVYEKFEKMLIEKLNCYIDKQADPSEITGLLHPLQLTCDAQKWKRSHQCGCLFYIPAWNTSKIDPVTGFVNLLDTRYDTREKARLFFSKFQRISFNAKKDWFEFAFDYNDFTTKAEGTRTNWTLCTYGERIRTFRNPQKNNQWDDERIVLTDAFKQLFDKYNIDIIGNIKESISAQSDTQFFKELLGLMKLLLQMRNSITNSEEDYLLSPVADQNGHFFDSRESNDSLPNNADANGAYNIARKGLWIIEQIKQTEDLSKLKLAVSNKEWLQFAQNKPYLND

SEQ ID NO: 105 - protein, 1220 aa, unidentified
  REGION 1..1220: note = Category: MG13 effectors
  REGION 1..1220: note = Description: MG13-71 effector
  source 1..1220: note = uncultivated organism sequence
MNTLKDFTNLYQVSKTLRFELKPVGKTLEHIQNNGILENDEHRAESYILVKKIIDEYHKHFIEDAFQGFKLDSNDLSEYYLYFQIRNREESQQKAFETVQSKLRKQISKSFDTKRLFGKELIREDLPDFVNEETDKQLVQEFKDFTTYFTGFHENRKNMYSHEDKSTAIAYRLIHENLPKFINNMTVFDKIKQPLANNLQTLYVDFKEYLNDREIAELFTLNYFSEVLAQTQIDVYNLMIGGKTLEDGTKIKGLNEYINLYNQQQTNRNARLPKFTPLFKQILSDRETISWLPEMFANDNELLESIEKVYQEIPFGEIKSIIEKLHEYDLSKIYVRNDLGITDISQHLLGNYAAIPNAIKENIKQSNPQKRTENQENYEERINKLFKSRGSFSIELINKVIPEKSLTTYFKDYNKTEENPDLLNRIQNCYLQVKNLLNTDYPADKSLKQDKQNVEKIKQLLDNIKEVQQFIKPLLGKGDEADKDAIFYAEFEKLWHKLDNITPLYNMVRNYITQKPYSTGKIKLNFENSTLLDGWDVNKERNNSSIILRKGGLYYLAIMNKKHNTVFLKENTPSTGSCYEKMEYKLLPGANKMLPKVFFSESRIDEFNPSKQLLDNYNNETHKKGEKFNLQDCRSLIDFFKQSINKHEDWENFGFQFSDTSTYQDLSGFYREVEQQGYKITFRNISEDYINQLVDEGKLYLFQVYNKDFSPFSKGTPNMHTLYWRMLFSPENLQNVVYKLNGQAEVFFRKKSLNYTDETWQKGHHYDKLKNKFAYPIISKRRYALDKFQFHVPVTMNYKAVGNERINELVNQFIKNNGIEHIIGIDRGERHLLYLSLIDLNGKIVKQFSLNEIVNEYKDNIYKINYRDLLDKKETERDDARKSWNEIETIKELKEGYLSQVIHKITQLIIEYKAIVVLEDLNFGFMRGRQKVEKQVYQKFEKMLIDKLNYLVDKKKQVADEGGLLNAYQLTNKFESFKKEGKQNGFLFYVPAWNTSKIDPVTGFVNLFSVKYESVSKAQEFFKKFDCIRFNQIDDNNCRFDFYFDYKNFTDKAEGSQTKWTLCSSNDTRYRWNKSLNQGKGAQEEVKVTEALKLLFSDKDYNIAYGDGKDLRERISNQTSAKFFKELMSLLSTLLSMRHNNGKKCDEEQDFILSPVEPFFNSLHATDEHPKDADANGAYNIARKGLWAIEQIKRANDLKNVSLAISNKQWLQFVQQSFEL

SEQ ID NO: 106 - protein, 1249 aa, unidentified
  REGION 1..1249: note = Category: MG13 effectors
  REGION 1..1249: note = Description: MG13-72 effector
  source 1..1249: note = uncultivated organism sequence
MEQFTNLYPLSKTLRFELIPHEKTKELLERTDYLAQDEKRAESYKIVKGIIDRYHKSFIEDVLSKPIEDQGEKRPILKYAKESTKNCDSLEEFYELYSKSQKSETEKNTLEIIQNNLRKQIVYALTQDARFKNLDKKELIYQDIYAIAKPEEIPFIKEFEGFATYFVGFHENRMNMYSSEAKSTAIGNRLINENLPIFTDNMGTFQKLLNSPVSEHFDTICKDMEDILPYDNIEEIFMLHNYNDFLTQKQITVYNAIIGGRVLEDGTKIQGINEYVNLYNQQQPTRETRLPKLKTLFKQILSDKESVSWLAEEFTSDAEMLKSIRDYYTSFKNNASQQMIDILTNIKSYDIDHIFIPNDISLTTISKKVFKDWEAINKSIIKRLKEDNPQKGREKDENYEERMSKAFKSYDSFSLGLINSCTATDDVCIYFSKIAKTDEETGLSHNLLDNIEEAYDKAKEYLNNGYPSNLNLAQDKSTVQKIKTLLDSIKDLQKFIKPLLGSGTEAVKDERFYGDISLVWEIIDQITPLYNKVRNRMTRKAYSTEKIKLNFENSTLLAGWDLNKERDNTSIILKKDGLYYLAIMRKEFNKVFQNAPRQTSDEDSFEKMEYKLLPGANKMLPKVFFSKSRIDEFAPSDVLIEKYKKGTHKKGSNFNIDDCHNLIDFFKSSIQKHDDWSKFNFKFSPTNSYEDMSGFYREVEKMGYKITFKKIPADYIEELVTTGKIFLFKIYNKDFSQYSKGTPNLHTLYWKMVFDDNNLKDVVFKLNGEAEIFYRKKSLSYKSPTHPAHQPIRNKNPYNAKEESNFAYDLIKDKRYTLDKFHFHIPITINFKSEGVSNINSLVCKYLRENDDIHFIGIDRGERHLLYVSVIDSRGRIKEQFSLNQIINEYKGNSYSTDYHKLLEERDEKRAKERQSWDSIESIKELKQGYLSQVIHKIASLVVKYNAVVVLEDLNIGFKRGRQKVESSIYQQFEKALIDKFNYLVDKNVAPEQPGGLMKGYQLTNKFSSFRDMGKQNGFLFYIPAWNTSKIDPVTGFVDMLHPKYESVEKAREFFTKFNKISYNQEKGWFEFLFDYNDFTTKAEGTRTVWTLCTFGKRIETFRNKNKNSMWDNKEIDLTSAFISLCEKYNVPLSCDMKNDIVAQTEKDFYVELIRILRLTLQMRNSITGTDVDYLISPVADENGNFYDSRNADSTLPENADANGAYNIARKGLWAAMQIRSCTDPDLKVNLAISNKEWLTFAQTKPYTK

SEQ ID NO: 107 - protein, 1249 aa, unidentified
  REGION 1..1249: note = Category: MG13 effectors
  REGION 1..1249: note = Description: MG13-73 effector
  source 1..1249: note = uncultivated organism sequence
MKQFTNLYPVSKTLRFELQPIGKTKENIEKNGILMRDEKRAKDYKIVKEFIDDYHKQFIKERLWDFKLPLNSEGKLNSLEEYQALYELSKRDEVQEAEFTEVKDNLRSIIAKRLTESGSAYERIFKKELIREDLVDFLENEEDKDIVRQFADFTTYFSGFHENRHNMYVAEEKSTAIAYRLIHQNLPKFMDNMKAFAKIAETSVAEHFADIYEGWKEHLNVESIEEVFRLDYFSETLTQPHIEVYNYIIGKKILEDGTEIKGINEYVNLYNQQQKDKSKRLPFLVPLYKQILSDREKLSWLAEEFDSDEKMLSAINESYSHLHDLLMSNENESLRSLLLHLKEFNLSHINIANDLSLTDISQHLFSRYDVFTNGIKDELRIITPRKKKESDEDFEERITKIFKTIKSFSIDFLDNLPQPVMEDGKRRSIENYFMTLGAVNTETTQKENLFAQIENAYEDARNILQLKDTGDTLSQNKPAVAKIKALLDALKDLQHFIKPLLGSGEENEKDELFYGSFMMMWDELDTITPLYNKVRNWLTRKPFNTEKIKLNFDNAQLLGGWDVNKEPDCTGVLLRKDGFYYLGIMNKKSNRIFESEVTPSDGECYDKIDYKLLPGANKMLPKVFFSKSRIDEFAPSEAVVSSYKRGTHKKGANFNLSECHRLIDFFKQSINKHEDWSKFGFHFSPTDTYEDISGFYREVEQQGYMLSSHPVSSSYINQLVDEGKLYLFRIWNKDFSEFSKGTPNLHTLYWKMLFDERNLADVVYKLNGQAEVFYRKASIKPENRIIHKANQPIANKNELNEKRTSTFEYDIIKDRRYTVDKFQFHVPITINFKAAGQTNINPIVQDVIRQGGFSHIIGIDRGERHLLYLSLIDLKGNIIKQMTLNEIINEYKGQTYKTNYHTLLAKREGDRTNARRSWETIETIKELKEGYLSQVVHIISKMMVEYNAIVVLEDLNTGFMRGRQKIERQVYEKFEKMLIEKLNCYIDKHADPSEDAGLLHPLQLTSDIQKWKRSHQCGCLFYIPAWNTSKIDPVTGFVNLLDTRYDTREKARVFFSKFQRISFNTQKGWFEFAFDYNDFTTKAEGTRTQWTLCTQGERIRTFRNPQKNNQWDDERIVLTDAYKQLFDKYNIDINGNIKEAISAQTDAQFFKELLGLMKLLLQMRNSITNSEEDYLLSPVADNTGHFFDSREEIYSLPIDADANGAYNIARKGLWVIRKIQETPNGEKTSLSITNKEWLQFAQTKPYLND

SEQ ID NO: 108 - protein, 1249 aa, unidentified
  REGION 1..1249: note = Category: MG13 effectors
  REGION 1..1249: note = Description: MG13-74 effector
  source 1..1249: note = uncultivated organism sequence
MKQFTNLYPVSKTLRFELQPIGKTKENIEKNGILLRDEKRAEDYKIVKGFIDDYHKQFIKERLWSFKLPLNSEGHLNSLEEYQALYEVSKRNEVQEAEFSEVKDNLRSIIAKRLTESGSAYERIFKKELIREDLIDFLESKEDKDIVRQFADFTTYFSGFHENRKNMYVAEEKSTAIAYRLIHQNLPKFMDNMKTFAKIAETSVAEHFSDIYEGWKEYLNVGSIEEIFRLDYFSETLTQPHIEVYNYIIGKKILEDGTEIKGINEYVNLYNQQQKDKSKRLPFLIPLYKQILSDREKLSWLVEEFDSDEIMLAAINESYNHLHDLLMGRENESLRSLLLHIKDFDLSQISITNDLSLTDISQHLFSRYDVFTNGIKDELRIITPRKKKESDEDFEDRISKIFKTQKSFSIDFLDKLPQPVMEDGKTRSIEDYFMTLGAVNTETTQKENLFAQIENAYEDARFVLQLKDTGDTLSQNKSAVAKIKALLDALKDLQHFIKPLLGSGEENEKDDLFYGSFQMMWDELDTITPLYNKVRNWLTRKPFSTEKIKLNFDNSQLLGGWDVNKEPDCTGVLLRKDGLFYLGIMDKKSNHIFETDVIPTDGECFDKIDYKLLPGANKMLPKVFFSKSRIDEFAPSESIITSYKRGTHKKGVGFNLAECHRLIDFFKQSINKHEDWSKFGFHFSDTKTYEDISGFYREVEQQGYMLSSRPVSSSYIDTLVSEGKLYLFRIWNKDFSEFSKGTPNLHTLYWKMLFDERNLSDVVYKLNGQAEVFYRKASIKPENRIVHKANQPVANKNELNTKIASTFEYDIIKDKRYTVDKFQFHVPITINFKAAGQTNINTIVQDAIRQEEFSHIIGIDRGERHLLYLSLIDLKGNIVKQMTLNEIINEYKGQTYKTNYHDLLAKREGDRTNARRSWETIETIKELKEGYLSQVVHIISKMMVEYNAIVVLEDLNTGFMRGRQKIERQVYEKFEKMLIEKLNCYIDKQVSPTAKGGLLNPLQLTCDAQKWKRSHQCGCLFYIPAWNTSKIDPVTGFVNLLDTHYDTREKARVFFSKFQRISYNAQKGWFEFAFDYNDFTSKAEGTRTQWTLCTQGERIRTFRNPQKNHQWDDERIALTDAYKQLFDKYDIDINGNIKEAISAQTDAQFFKELMGLMKLLLQMRNSITNSEEDYLLSPVADDAGHFFDSREGISNLPIDADANGAYNIARKGLWIIRKIQETPSGERISLSITNKEWLQFAQTKPYFND

SEQ ID NO: 109 - protein, 1249 aa, unidentified
  REGION 1..1249: note = Category: MG13 effectors
  REGION 1..1249: note = Description: MG13-75 effector
  source 1..1249: note = uncultivated organism sequence
MKNFESFTNLYPLSKTLRFELRPIGRTLENIQANGLLEQDNHRAESYKLVKAIIDRYHKVFIDEALSHCVLPVENSGNKNSLSEVYQYLTTKDHSEKETDDFNKTQDNLRKMIVSALKKDTHFGRIFKKELIREDLLNNDLQGFDLNEEEYDLIKEFRDFTTYFVGFNENRANMYSEEAKSTAIGYRLIHENLPKFIDNMVIFQKVKVSPVSEYFANIETEMEDMLQGIKVEDIFDLNFFNQVLVQRFIDLYNAVIGGQVASEEDHRKGLNQYINEYNQVQKDKKDRLPKFKPLFKQILSDRIHASWQIDNFESDNEVLKAIENAYETLDEEVISRKDSNLPLLFASISDFDLSGIYVSAKAITDFSQQIFKDWNAIDSALEAACRRSNQPKKKETEEKYAERIKKQRSHIDSYSVGEIIESLVAFQPNPEKSILDYLGGMGRREDKPSIIESIKSAYRDVEELLKTEYPANKNLALDKDNISKVKALLDAIKELQFFIKPLLGTGKESGKDERFYGEFVDYWQTLDIITPLYNKVRNYATRKPYSTAKFKLNFENSTLLNGWDVNKEPDNTSVLLRKDGLYYLAIMKKSCNRVFAVDQYDTVGDCYEKIDYKLLPGANKMLPKVFFAKSRIDEFAPSREVLDIYKRGSFKKGEEFCKADLHTLIDFYKASITKHEDWKKFGFEFSPTSSYDDISGFYREVEQQGYQIRFRKVSCTYIDSLVDQGQIYLFQIYNKDFSPFSKGTPNMHTLYWKMIFDERNLKDVVYKLNGQAEIFFRKSSLPVETPTHPANQPIANKNPLNRKKESLFTYDIVKNRRYRYDKFQFHVPITMNFKSIGSEYINDQVQDYIRQSKDLHFIGIDRGERHLLYLTVIDSKGIIEEQFSLNVINNEYNGTTYSTNYHDLLEERGDDRTKARREWLAIESIKELKEGYLSQVVKKITDLMIKYNAIVVLEDLNMGFKRGRQKVESSAYQQFEHKLIDKLNYLAGKTAPIDKVGGLLKAYQLATPYQNEMGFQNGFVFYIPAWNTSKIDPVTGFTNLFDLHIETMEQAKKFFSKFDYIRWNAANNWFEFAFDYKNFTEKADGSRTQWTLCTQGTRIRTFRNPEKNSEWDNVEVDLTDQFLSLFKSKNIDIKSDLKTQILAQNEKDFFMSLLLCLKLTLQMRNSISNSEVDYLISPVADANGDFFDSRKVDSSLPANADANGAYNIARKGLWMARRIKKSRPEDKVSLKITNKEWLTFAQNKPYLTD

SEQ ID NO: 110 - protein, 1249 aa, unidentified
  REGION 1..1249: note = Category: MG13 effectors
  REGION 1..1249: note = Description: MG13-76 effector
  source 1..1249: note = uncultivated organism sequence
MKEFTNYYPVSKTLRFELQPIGKTKENIEKSGILARDEQRAKDYMIVKGFIDEYHKQFIKERLWNFELPLKSEGHLDSLEEYKTFYDLPKRSEAEEVSFTEIKNNLRSIITKRLTESGVAYDRIFKKELIREDLVDFLKDEEDKKIVRQFADFTTYFSGFHENRRNMYSSEEKSTAIAYRLIHQNLPKFMDNMKAFAKIAESTVSEHFADIYGGWKEYLNVERLEDVFQLDYFSETLTQPHIEVYNYIIGKKILEDGTEIKGINEYVNLYNQQQKDKGERLPLLVPLYKQILSDRDKLSWMAEEFDSDEKMLAAINDSYSHLRDLLMGEENESLRSLLFQIKDFDLDKINITNDISLTGISQHLFGRYDVLTNGIKEQLRVITPRKKKESDEDFEDRISKIFKTLKSFSIAFLNKLPQPVMEDGIPRKVEEYFMSLGAVNTETTQKENLFVQIENAYVDAGSILNTRDTGNKLSQNKQAVAKIKTLLDALKDLQRFIKPLLGSGEENEKDELFYGSFQMMWDELDTVTPLYNKVRNWLTRKPFSTEKIKLNFDNAQLLGGWDVNKEPDCTGVLLQKDGFYYLGIMNKKANRIFDTDVTPSDGDCYDKIDYKLLPGANKMLPKVFFSKTRIEEFAPSEAIVNSYKRGTHKKGADFSLSDCHRLIDFFKASIYKHEDWSKFNFHFSDTQTYEDISGFYREVEQQGYRLTSHPVSTSYINNLVEEGKLYLFRIWNKDFSEYSKGTPNLHTLYWKMLFNERNLADVIYKLNGQAEVFFRKASIKPENRIIHPAHCPIANKNELNEKRTSTFEYDIIKDRRYTVDKFQFHVPITINFKAIGQTNINPIVQDSIRRSGFSHIIGIDRGERHLLYLSLIDLKGNIVKQMTLNDIVNEHNGVTYKTDYHNLLVKREGDRTDARRSWDTIETIKELKEGYISQVIHIISKMMVEYNAIIVLEDLNIGFMRGRQKIERQVYEKFEKMLIEKLNCYIDKHAEPKEAGGLLQPLQLTSEAKNWKRSHQCGCLFYIPAWNTSKIDPVTGFVNLFDTRYDTREKAKLFFSKFQRISFNSKKDWFEFTFDYSDFTTKAEGTRTEWTLCTYGERIRTFRNPQKNHQWDDEHIILTVEFKQLFEKYNIDIRGNLKEAISTQSDAQFFRELLGLMKLLLQMRNSITNSEEDYLLSPVADGNGHFFDSRENIGTLPNNADANGAYNIARKGLLLIRKLQESKEGEKLSLAISNKEWLLFAQTKPYLSD

SEQ ID NO: 111 - protein, 1275 aa, unidentified
  REGION 1..1275: note = Category: MG13 effectors
  REGION 1..1275: note = Description: MG13-77 effector
  source 1..1275: note = uncultivated organism sequence
MKEFTNLYPVSKTLRFELQPIGKTKEHIEKNGILQRDEKRAEDYKIVKGFIDEYHKQFIKERLWSFKLPLHSEGRLDSLEEYQALYELSKRNDAQEAEFTEIKDNLRSIIAKRLTESGSAYERIFKKELIREDLIDFLESEEDKDIVRQFADFTTYFSGFHENRRNMYVAEEKSTAIAYRLIHQNLPKFMDNMKAFAKIAETSVAEHFKDIYEGWKEYLNVGSIEEIFRLDYFSETLTQIHIEVYNYIIGKKILEDGTEIKGINEYVNLYNQQQKDKSKRLPFLVPLYKQILSDRDKLSWLAEEFDSDEKMLAAINESYNHLHDLLMGNENESLRSLLLHIKDFNLSQINITNDFSLTDISQHLFGRYDVFTSGIKDELRIITPRKKKESDEDFEDRISKIFKTQKSFSIDFLDKLPQPVMEDGKPRRIEDYFTSLGAVNTKTTQKENLFAQIENAYEDARAILQMKDTGDTLSQNKSAVAKIKALLDALKDLQHFIKPLLGSGEENEKDELFYGSFQMMWDELDTVTPLYNKVRNWLTRKPFSTEKIKLNFESPTLLKNMAVPQTSSAAIFRDRQGYYYLGILDSNSRNCLNELLSLSADHSGFDFMQYHQGGDMGKNVQNLMVINGEVCKKNGRKERSGQFVGQNLILEKLKNEYLPKDVNEIRLKQSYLTSSSTFSKKDLVRFVEYYIPLVKAYYSEYSFVFKTPSEYKSFADFTDHINQQAYQLSFTPISKDSIDNLVEEGRLYLFRIWNKDFSKFSKGTPNLHTLYWQMLFDERNLQNVVYMLNGQGAEVFYRKASIKPENRIVHKANQPIANKNELNTKRASTFEYDIIKDKRYTVDKFQFHVPITINFKAAGQTNINPIVQDAIRQGGFSHIIGIDRGERHLLYLSLIDLKGKIIKQMTLNEIINEYKGQTYKTNYHDLLAKREGDRTDARRSWETIETIKELKEGYLSQVVYIISKMMVEYNAIVVLEDLNTGFMRGRQKIERQVYEKFEKMLIEKLNCYIDKQLSPTDEGGLLHPLQLTCDAQKWKRAHQCGCLFYIPAWNTSKIDPVTGFVNLINTSRYDTREKARGFFSKFQRISFNEKKDLFEFTLDYNDFDYIAKAEGTRTQWTLCTQGERIRTFRNPQKNHQWDDERIVLTDAFKQLFDKYDIDINGNLKEAISAQTDAQFFKELLGLTKLMLQMRNSITNSEEDYLLSPVADITGHFFDSREGISSLPIDGDANGAYNIARKGLLVIRKIQETPDGEKPSLTITNKEWLLFAQTKPYLND

SEQ ID NO: 112 - protein, 1252 aa, unidentified
  REGION 1..1252: note = Category: MG13 effectors
  REGION 1..1252: note = Description: MG13-78 effector
  source 1..1252: note = uncultivated organism sequence
MKQFTNLYQVSKTLRFELQPVGKTKENIEKGGLLEQDETLARNYLIVKGFIDEYHKQYIKDRLWNFELPLKSEGNHDSLEEYKTLYEVSQRNADQEEEFQEVKDNLRAIIAKRLTEKGSQFDRIDKKELIREDLLHFLTNEEDREIVSQFADFTSYFTGFHENRRNMYSSEEKSTAIAYRLIHQNLPKFMENMKAFAKIAQTPVAEHFIDIYTGWEEFLNVRSIEDMFRLEYFSQTLTQPHIEVYNYIIGKKIQEDGSEIKGINEYVNLYNQQQKDKTQRLPLLVPLYKQILSDREKLSWLADEFDSDAKMLTAISEIYAHLYDVLRGEETENLHSLITHLKDYNLSRIYVSNDLSLSDISQHIFGRYDVFSTGIKENLKTAYPQKNKENAEAYEERIGKLFKARKSFSLDELNNLPQPDMGDSKLRRLEDYFRTLGAVNSESVQKENLLAQIEIAYDEVLPVLQQSKNDNNLSQNKDAVAKIKKLLDALKDLQHFIKPLLGSGEENEKDELFYGLFQTIWDELDAVTPLYNKVRNWLTRKPYSTEKIKLNFENAQLLNGWDVNKEPDCTGVLLCKNGFYYLGIMNKKANHIFAYDSLTTNSDDSFEKIEYKLLPGANKMLPKVFFSKSRIDEFAPTPKIIENYKKGTHKKGSSFSLDDCHQLIEFFKDSISKHEDWSKFNFHFSDTDSYNDISEFYHEVEQQGYKLSTRPISATWINQMVEEGKLYLFRIWNKDFSEYSKGTPNLHTLYWKMLFDEKNLADVVYKLNGQAEIFFRKASINPKNRIVHPANQAIKNKNTLNEKQTSTFGYDIIKDRRYTVDKFQFHVPITINFKAAGQSNINPIVHETIRKNGFTHVIGIDRGERHLLYLSLIDLHGNIVKQMTLNEIINEYKGKKYVTNYHDLLAKREGERTDARRSWSTIETIKELKEGYLSQVVHIIARMMVEYNAIIVLEDLNMGFMRGRQKIERQVYEKFEKMLIEKLNCYIDKQADPEVEGGLLHPLQLTNEFKSFRKLGKQSGCLFYIPAWNTSKIDPVTGFVNLFDTRYETIGKSRSFFSSFKRIWFNSDKDWFEFSFDYNDFTAKAEGTRSQWTLCSYGTRIRNFRNPQKNNQWDNEEVVLTEQFKKLFAYYHIDVNSNLKEAIIGQTEAKFFQSLMGLMKLLLQMRNSKINSDVDYLLSPVADEDGRFFDSRSASESLPENADANGAFNIARKGLWVIRKIKNATASDEKLSLAVSNKEWLQFAQTKPYRND

SEQ ID NO: 113 - protein, 1252 aa, unidentified
  REGION 1..1252: note = Category: MG13 effectors
  REGION 1..1252: note = Description: MG13-79 effector
  source 1..1252: note = uncultivated organism sequence
MKQFTNLYQVSKTLRFELQPVGKTKENIEKGGLLEQDETLARNYLIVKGFIDEYHKQYIKDRLWNFELPLKSEGNHDSLEEYKTLYEVSQRNADQEEEFQEVKDNLRAIIAKRLTEKGSQFDRIDKKELIREDLLHFLTNEEDREIVSQFADFTSYFTGFHENRRNMYSSEEKSTAIAYRLIHQNLPKFMENMKAFAKIAQTPVAEHFIDIYTGWEEFLNVRSIEDMFRLEYFSQTLTQPHIEVYNYIIGKKIQEDGSEIKGINEYVNLYNQQQKDKTQRLPLLVPLYKQILSDREKLSWLADEFDSDAKMLTAISEIYAHLYDVLRGEETENLHSLITHLKDYNLSRIYVSNDLSLSDISQHIFGRYDVFSTGIKENLKTAYPQKNKENAEAYEERIGKLFKARKSFSLDELNNLPQPDMGDSKLRRLEDYFRTLGAVNSESVQKENLLAQIEIAYDEVLPVLQQSKNDNNLSQNKDAVAKIKKLLDALKDLQHFIKPLLGSGEESEKDELFYGLFQTIWDELDAVTPLYNKVRNWLTRKPYSTEKIKLNFENAQLLNGWDVNKEPDCTGVLLCKNGFYYLGIMNKKANHIFAYDSLTTNSDDSFEKIEYKLLPGANKMLPKVFFSKSRIDEFAPTPKIIENYKKGTHKKGSSFSLDDCHQLIEFFKDSISKHEDWSKFNFHFSDTDSYNDISEFYHEVEQQGYKLSTRPISATWINQMVEEGKLYLFRIWNKDFSEYSKGTPNLHTLYWKMLFDEKNLADVVYKLNGQAEIFFRKASINPKNRIVHPANQAIKNKNTLNEKQTSTFGYDIIKDRRYTVDKFQFHVPITINFKAAGQSNINPIVHETIRKNGFTHVIGIDRGERHLLYLSLIDLHGNIVKQMTLNEIINEYKGKKYVTNYHDLLAKREGERTDARRSWSTIETIKELKEGYLSQVVHIIARMMVEYNAIIVLEDLNMGFMRGRQKIERQVYENFEKMLIEKLNCYIDKQADPEVEGGLLHPLQLTNEFKSFRKLGKQSGCLFYIPAWNTSKIDPVTGFVNLFDTRYETIGKSRSFFSSFKRIWFNSDKDWFEFSFDYNDFTAKAEGTRSQWTLCSYGTRIRNFRNPQKNNQWDNEEVVLTEQFKKLFAYYHIDVNSNLKEAIIGQTEAKFFQSLMGLMKLLLQMRNSKINSDVDYLLSPVADEDGRFFDSRSASESLPENADANGAFNIARKGLWVIRKIKNATASDEKLSLAVSNKEWLQFAQTKPYRND

SEQ ID NO: 114 - protein, 1252 aa, unidentified
  REGION 1..1252: note = Category: MG13 effectors
  REGION 1..1252: note = Description: MG13-80 effector
  source 1..1252: note = uncultivated organism sequence
MKQFTNLYQVSKTLRFELQPVGKTKENIEKGGLLEQDETLARNYLIVKGFIDEYHKQYIKDRLWNFELPLKSEGNHDSLEEYKTLYEVSQRNADQEEEFQEVKDNLRAIIAKRLTEKGSQFDRIDKKELIREDLLHFLTNEEDREIVSQFADFTSYFTGFHENRRNMYSSEEKSTAIAYRLIHQNLPKFMENMKAFAKIAQTPVAEHFIDIYTGWEEFLNVRSIEDMFRLEYFSQTLTQPHIEVYNYIIGKKIQEDGSEIKGINEYVNLYNQQQKDKTQRLPLLVPLYKQILSDREKLSWLADEFDSDAKMLTAISEIYAHLYDVLRGEETENLHSLITHLKDYNLSRIYVSNDLSLSDISQHIFGRYDVFSTGIKENLKTAYPQKNKENAEAYEERIGKLFKARKSFSLDELNNLPQPDMGDSKLRRLEDYFRTLGAVNSESVQKENLLAQIEIAYDEVLPVLQQSKNDNNLSQNKDAVAKIKKLLDALKDLQHFIKPLLGSGEENEKDELFYGLFQTIWDELDAVTPLYNKVRNWLTRKPYSTEKIKLNFENAQLLNGWDVNKEPDCTGVLLCKNGFYYLGIMNKKANHIFAYDSLTTNSDDSFEKIEYKLLPGANKMLPKVFFSKSRIDEFAPTPKIIENYKKGTHKKGSSFSLDDCHQLIEFFKDSISKHEDWSKFNFHFSDTDSYNDISEFYHEVEQQGYKLSTRPISATWINQMVEEGKLYLFRIWNKDFSEYSKGTPNLHTLYWKMLFDEKNLADVVYKLNGQAEIFFRKASINPKNRIVHPANQAIKNKNTLNEKQTSTFGYDIIKDRRYTVDKFQFHVPITINFKAAGQSNINPIVHETIRKNGFTHVIGIDRGERHLLYLSLIDLHGNIVKQMTLNEIINEYKGKKYVTNYHDLLAKREGERTDARRSWSTIETIKELKEGYLSQVVHIIARMMVEYNAIIVLEDLNMGFMRGRQKIERQVYENFEKMLIEKLNCYIDKQADPEVEGGLLHPLQLTNEFKSFRKLGKQSGCLFYIPAWNTSKIDPVTGFVNLFDTRYETIGKSRSFFSSFKRIWFNSDKDWFEFSFDYNDFTAKAEGTRSQWTLCSYGTRIRNFRNPQKNNQWDNEEVVLTEQFKKLFAYYHIDVNSNLKEAIIGQTEAKFFQSLMGLMKLLLQMRNSKINSDVDYLLSPVADEDGRFFDSRSASESLPENADANGAFNIARKGLWVIRKIKNATASDEKLSLAVSNKEWLQFAQTKPYRND

SEQ ID NO: 115 - protein, 1202 aa, unidentified
  REGION 1..1202: note = Category: MG13 effectors
  REGION 1..1202: note = Description: MG13-81 effector
  source 1..1202: note = uncultivated organism sequence
MRQKYDGFESCYGISKVIRTGLIPQGATLEHIEKKGLLLLEAKRAEDYTKVKKIIDRYHRKYIDNQLKDAELSGVEESYSLYCKTNRTEKENTDLKKDLEKLRKQVSNFLTLSAEFKRIDKKELIEKDLLNFVQGDEEEEELVKSFKGFTTYFKGFHKNRKNMYSHEEKSTAIAYRVINQNMFRYFDNIRSISKFILANSENNIAELESIYSDKLNGKTLEEFFSVDNYSFFISQSGIDTYNMIIGGYSVDEKTKVKGINEYINLFNQENHEKFGTLKPLYKQILAERTTESFLPEKFENDKEVIESLAVFNHNISDTLSELMQIFSKMGEYDASGIYLKYDSLKDISTCVFSDWSAITNALWEQYDVQYTGKKKKETKAYFEEKRKYFKNLKSISASEINTAMGENVLIPYSDAAKSLFEKICVAEENIRELINLDYPDDKELSKDKAAVKDIKAYLDSVKALQHHMKPLLGNQDESGKNEFFYGNFSGLWDELDALTPLYNKVRNYVTKKPYSTEKIKLNFDNSTLLNGWDLNKEEANTAILMQREGFLYLGIMDKKHNKLFRNIANTDCEDCYQKMEYRQLPGAYKMLPKVFFSKKGIDTFKPPLKILEIYRSETFKKGTNFNIDDCHKIIDFYKKAINEHESWKRFKFKFSETKDYRDISEFYQEVDVQGYNISFKAIPKKIIDEYVEKGWLYLFKIWNKDFSEYSKGTPNLHTLYLKMLFDPRNLENAVYKLNGEAEIFYRKASIQPKDIIKHPANEAIKNKNPLNQKQSSTFKYDLIKDRRYTADKFEFHVPITLNFKARGKENINTEVREYIKRSKNLYVIGIDRGERNLLYVSVVDADGSIVEQYSLNDIVNEYKGVQYRTDYHALLDTKEKNRDKARKEWTEIQNIKELKEGYISQVVHKICELMMKYEAIIALEDLNGGFKNSRKKVEKQVYQKFEKMLIEKLNYLVDKKADINEPTGLLHALQLTSKFEGFNKLFGQSGFVFYVPAWNTSNIDPCTGFTNLFFSKDLRYSGVENSLEFWKRFDSVAYDDRKDMFAFAFDYNNFNQRAEGSKSKWTVYSYGDRLETFRNPDLNQQYDSREVKLTEAFKELFKKYGISYKSCEIKENILNCKERGFHEKLLHLFKLTLQLRNSKTGTMIDYMTSSVISVDGNFFDSRTASSKLPQDADANGAYNIARKGLWLIEKLQRCTKGT

SEQ ID NO: 116 - protein, 1278 aa, unidentified
  REGION 1..1278: note = Category: MG13 effectors
  REGION 1..1278: note = Description: MG13-82 effector
  source 1..1278: note = uncultivated organism sequence
MKKFTNKFQLSKTLRFELIPQGKTLENIKSKGLIAKDDQRAISYKKMKKSIDEYHKYFIGLALSNVKLSKLQDFADLYFETNADKKKEDAYKKSLEKIQTDLRKEIVKGFKEGDAKEIFGKLNKKELFTELLEEWKQEKGDFYFDEEFKTFTTYFTGFNKNRANMYSDEAKSTAIAFRLIHENLPKFLDNIKVFEKAKSIPQLQENCKLLYKEIEEYLNISKIDEVFELGYFNEALTQNDIDVYNLIIGGRTAKEGVQKIQGLNEYINLYNQKQDKKNRIPKLKVLYKQILSDRENISFLPEKFNDSNEVLEAIENFYKSNLLEFQTGDMEHSENVLASLKTLVGEIANFDTSKIYLRNDKSITDISQTIFGDWGIIKSALEFSFIQGLIIGKKGISIKQEVEKDKYLSKQSYYSIAEIENALMLYKDQNELLKELKPTDLPVANYFKNHFKIKVKKDDNSEKEFDLITNIEDKYRCIKGILANDYPEDKDLKSTNNPDTLNIKLFLDSLMEFLHFIKPLALPKDTVLEKDEHFYNPFVIGYEQMQLLIPLYNKVRNYATQKPYSEEKFKLNFENSTLLSGWDVNKEETNTSILFIKEGIYYLGVMDKDHNKIFRDIPKARSNSVYQKINYKLLPGASKMLPKVFFSDKNISFFNPSDEIQNIRNHGTHTKGGSPQEGYSKLDFNVNDCRKMIDFFKTSIEKHPEWKNFGFQFSDTSTFDSIDAFYREVEAQGYTISYSNLDKDYIDQLVSEGKLYLFKIYNKDFSSYSKGQPNMHTMYWKALFDKDNLKDVVYKLNGQAELFYRKKSINYDEKTMKQGHHYNELKDKFSYPIIKDKRFTEDKFHFHVPITLNFKASGNDYINADVLTYLKNNPDVNIIGLDRGERHLIYLSLINQKGEVLKDKNGNPIQYSLNEIINEHKGKTYPTNYQTLLDSKEKERDSARKNWGEIENIKELKEGFISQVVHKIAQLMIDFNAIVVMEDLNFGFKRGRFKVEKQVYQKLEKMLIDKLNYLVFKDKEPTEIGGIYNALQLTNKFKSFKEMGKQSGFLFYVPAWNTSKIDPTTGFVNLFNTKYETIEKAQEFFSKFNDIRFNEMENYFEFVVDDYTKFNLKAEGTRLDWTVYTNEDRILTFRNPETNNNWDNKKVVLTDEFVKFFTENQIEYKTNLQTQILEKTEGKFFKDLFHLYKLTLQKRNSITNSEVDYLISPVKNNDSYFYDSRKADNTLPQDADANGAYHIAKKGLWVLEQINQYEKDDNWKKLQLAISNKKWLNFVQKK

SEQ ID NO: 117 - protein, 1251 aa, unidentified
  REGION 1..1251: note = Category: MG13 effectors
  REGION 1..1251: note = Description: MG13-83 effector
  source 1..1251: note = uncultivated organism sequence
MKQFTNLFQVSKTLRFELQPVGKTKEHIEQGGILTRDEQRAENYKKVKGFIDEYHKQFIKDRLWTFQLPLSDEGRHDSLEEYQALYELSKRDEAQEAAFTEVKDNLRHIIAKRLTEKDSAYDRIFKKELIREDIVEFLDNEEDKDIVRQFADFTTYFTGFHENRKNMYSPDEKSTAIAYRLIHQNLPKFMDNMKSFAKIAQTAVAEHFIDIYEGWKEYLNVESLEAIFRLDYFSETLTQPHIEVYNYIIGKKILEDGTEIKGINEYVNLYNQQQKDKSQRLPLLVPLYKQILSDREKLSWLAEEFDSDEKMLAAINETYNHLHDLLMGEENESLRTLLAHLKDFDLTQINITNDQSLTDISQGMFGQYDVFTRGIKDELRQITPRKKKESDEDFEARISKIFKTQKSFSIDVLDRLPQPVMEDGKQRFIADYFMTLGAVNTDTIQKENLFAQIENAYEDVRPILQMSDTGGDTLSQNKSAVAKIKTLLDVFKDLQHFIKPLLGSGEENEKDELFYGGFQMIWDELDTVTPLYNKVRNWLTRKPYSTEKIKLNFDNAQLLGGWDVNKEPDCTGVLLRKDGFYYLGIMNKKANRIFDADITPSDGICYEKIDYKLLPGANKMLPKVFFSKSRIGEFAPSDAIVSSYKRGTHKKGADFSLSDCHRLIDFFKASINKHEDWSKFGFHFSDTQTYEDISGFYREVEQQGYRLTSHYVSQSYVDQMVDEGKLFLFRIWNKDFSEFSKGTPNLHTLYWRMLFDERNLADVVYKLNGQAEVFYRKASIKQENRIVHPAHQAIANKNELNPKDKSTFGYDIIKDRRYTIDKFQFHVPITINFKATGRDNINPIVHETIRQGGFTHIIGIDRGERHLLYLSLIDLQGNIIKQMTLNEIINEYNGLTHKTNYHDLLVKREGERTAARRSWDTIENIKELKEGYLSQVIHIISKMMVDYNAIVVLEDLNMGFMRGRQKIERQVYEKFEKMLIDKLNCYIDKQANPESVGGMLHPIQLANKFESFRKLGKQSGCLFYIPAWNTSKIDPVTGFVNLFDTRYETREKARLFFSRFQRIGYNAGNDWFEFSFDYDDFTTKAEGTRTQWTLCSYGTRIRNFRNPLLNHQWDDEEIVLTEEFKKLFCKYDVDFQGNLKEAINAQTDAQFFKDLMGLMKLLLQMRNSRSNSEVDYLLSPVADERGQFFDSRKGIASLPDNADANGAYNIARKGLWAIRKVQETPDGEKLSLAITNKEWLQFAQTKPYLND

SEQ ID NO: 118 - protein, 1063 aa, unidentified
  REGION 1..1063: note = Category: MG13 effectors
  REGION 1..1063: note = Description: MG13-84 effector
  source 1..1063: note = uncultivated organism sequence
MRDFNEFVGLYPISKTLRFELKPIGKTLEHIQRNELLEDDAVRADDYVKVKKIIDKYHKCLIDEALSGFTFDTEADGRSNNSLSEYYLYYNLKKRNEQEQKTFKTIQNNLRKQIVNKLTQSEKYKRIDKKELITTDLPDFLTNESEKKLVEKFKNFTTYFTEFHKNRKNMYSKEEKSTAIAFRLINENLPKFVDNIAAFEKVASSPLAEKINALYEDFKEYLNVEEISRVFRLDYYDELLTQKQIDLYNAIVGGRTEEDNRTQIKGLNQYINEYNQQQTDRSNRLPKLKPLYKQILSDRESVSWLPPKFESDKDLLIKIKECYDALSEREKVFDKLESILKSLSTYDLSKIYISNDSQLSYISQKMFGRWDIIGKAIREDCAKRNPQKSRESLEKFAERIDKKLKAIDSISIGDVDECLAQLGEPYVKRVEDYFAAMGASDMVEGQTDATSFKKNIEGAYKSVKELLNNADNITDNNLMQDKGNVEKIKTLLDAIKDLQRFIKPLLGKGDEADKDGVFYGEFTSLWTKLDQVTPLYNMVRNYLTSKPYSTKKIKLNFENSTLMDGWDLNKEPDNTTVIFCKDGLYYLGIMGKKYNRVFVDREDLPHDGECYDKMEYKLLPGANKMLPKVFFSETGIQRFRPSEELLGKYERGTHKKGAGFDLGDCRALIDFFKKSIERHDDWKKFDFKFSDTSTYQDISEFYREVEQQGYKMSFRKVSVDYIKSLVEEGKLYLFQIYNKDFSAHSKGTPNMHTLYWKMLFDEENLKDVVYKLNGEAEVFFRKSSITVRTPTHPANSPIKNKNKDNQKKESKFKYDLIKDRRYTVDKFLFHVPITMNFKSVGGSNINQLVKQHIRSATDLHIIGIDRGERHLLYLTVIDSRGNIKEQFSLNEIVNEYNGNTYRTDYHELLDTREGELTEARRNWQTIQNIRELKEGYLSQVIHKISELAIKYNAVIVLEDLNFGFMRSRQKVEKQVYQKIEKMLINKLNYLVDKKKPVAETGGLLRAYQLTGEFESFKTLGKQSGILFYVPAWNTSKIDPVTGIIVKTKSTSFQNEKYKKIPFS

SEQ ID NO: 119 - protein, 1205 aa, unidentified
  REGION 1..1205: note = Category: MG19 active effectors
  REGION 1..1205: note = Description: MG19-2 active effector
  source 1..1205: note = uncultivated organism sequence
MKGYKIHIKRINQSNGEIIRTIKYLLTPINQNNSQEIFFSNFIFDDLKVRGISSITDFIKHNSNYDLFDFWIDTLKAGVIFQPTKKSLEYFIKVIKNEKNDAELIFDKSSEIIKKYFKKEDFIQIIILSNAKRTRSKKSAFLNELFKMIKDEFKDNKNKIIVDKQLNDTVNFIINSFYNEDGDLKLEGEEKQIQFWKTNFAIDKTLLNKNKFKENSVGDITNFILPEIIKINESISIEELINIRINLAEKYLSLINRKTDKFNIVESFLGLGNDFNSLSNYLNNFYNYLLSKKIDEIIKSYKKIINLNEPEIAMIKEALKYLSDKAQLLEKPRFINKSWQEYRKVFGGKIQSWYSNYVNRLSKSSENYKKIIGNIDQIISIINKYKTTENENYLNKIIEKTLQLKDIMTKNTDILQVPYKFDIFSDLLADLKIDLNYFYQTYIKKNDDDQINKDPIFKFLFDEIEKPINFYGHSKKQILNKIVNQTAIRINEGFKIIRFLLEEYKNLRRSDFKKSFPELLENYFDKLAKKTVYSKFFYSKYKDILKNYILSTENINDIFNNPEKYTFFKNNFERQKSILIKTINIENNDYLILDLHEKFYNFLINIDQNLLINNPDTSIEYLETAKTFISFCIENNNKKEFQLESNLYNNFEGIKNYIKLFKQDKLNNKDYSKILNQYFFSELKGDLTLSSKKNYIAKYTLQIMNSDKVFPLIIKFKNNQISKNQLLTNSKEIINYPHQYFIVFDLGLKFKKINSEVEKTDTFLINKNGITPIKNLGFTNNLLYKISSSRYQIQFLDRLIYKPRNWQQIAIKIREPSFILEVNNNIKFDIINNKISLSEKSKKFYASIPFEIKSINNTSINANKNNKLYLGIDAGEYGVAYSLVDFENEKNPRIINSFYIKSKNIRRIKDHYQKIQEKSKKGVFLSSSNLLNKIRENSINEIRNNIHDIFLKYSPKMIVYEYSISNFETGSGRVTKIYDSIKKSDVHPDNEADKSIIKHIWGRDYNYIRIGTNASAYASSYTCTHCGRSIFSIIENINNNQIFITQRLTENGLKNIVEISTPYGKLYGYTSEKKYINGYLFKNTQESKKELKKILQNFARPPLDKSEVLLTFKKLDKNILRKIKIKRGNSSIFVCPFSDCLHVFDADLQASFIMAVRGYIKDINQNNKNLNIFEETLKYLKKIEDLNYKMLEIPDLASLPQSKNQ

SEQ ID NO: 120 - protein, 1240 aa, unidentified
  REGION 1..1240: note = Category: MG19 active effectors
  REGION 1..1240: note = Description: MG19-3 active effector
  source 1..1240: note = uncultivated organism sequence
MKIKGYRLHKERIKFTSGTTIRSIKLPIKEFSLNEDKKELILKIKKQVKNDDLLLKGDVNLNDYAQKGFRGNPSYNFFDFWVDSLRAGVIWKKTTNELIDFVNGKLSKKDIIGEILIKASDKFLKYFDIANQDLKNFFKLSEVRANKNKQSLSRSLVSYLKQDYKKKKDKYDYEIINSDAQNLINFIVNSFFDNQSLLKLKGPQKQNQFWLKNFGIDKTKLKQFRPQGELGNISFVIVPQLISIDKDINIVDLIEKRIHFLERLNLNNDNEIKSILGLENNFSALSNYLGIIFKKLYQGEIEEIFQALVFIYKDLEDYKNVAFKSLNFLKEKAKLLSPEPSLEFISNWADYRSLLGGKIESWLSNYLRRKKEINQQINDFFNGLDLTKKFLIENKNYKKELKDNDLDSILKIIKEINQFGNKDLNNKKNYEIFDSFLSILKSDLNLFYQKYLIDEKNEIKVDEFSPFEAIYKKIYKPVSFYGEIKRENNDKNLRLVLPIIKTGLEFSKLMINELTENFSFNDDDDAEIFFRKLLNFYHQKILTKSINSNDFKNFFIDILVHYISEEDKKNIFKKNRVFYKSDYSKGTQSLFKLINTEFSQEFKKLIFKIKDFLASFENDYILINKDLLLDWIETFKNLSSILIKFSINNDFDSKIFEPLLKNYLKIKIYYDVFNPPDFDKNLFTKLWQQFFLSEFKGAAILYSKKTYLARYVSQFIGSENKIKIFFYSSNQDLLEKINDFENIDNDVSKNLVNKRKYLISFDENLKLSTKRKLETDVCLIKLSKNLNQFKKVYIKKESFDNLFEITSSYYQLQFLDRLFYKPKDWRNVDIKLSEWNLILEQDYEINWKLEANKAEFIKKENSKKNKLYINIPFEISSKNLVIKFKQLDNNRFAYPICGIDVGEYGLAYCLIKVGGNQTNIIDKGFFEDKNIANIKDKFAKIQERSRKGIFNETDSTIVQVRENAIGALRNQIHDLVVKYNASPVYEYSISNFETGSGRTTKIYNSVKRSDVFEEGSEVSVFLKTQIWGIKKTIGRNVSSYASSYTCINCKRSLYELNFQKKHLENGEVIIVVQKRQGNIIYFQINNNLIICGYSDKNKFVNNYQLKTRQDLDDFNKALKDFTRPPVKSNSEVLVKFANDLTMKKLKKEDKELSFIDVFRKRRGNSSIFVCPFDDCHFVADADIQAAFIMAIRGYIKFLKGANNNNQNNDKNRQKIDYFKETLIFLKKLQLQEDIFYPSID

SEQ ID NO: 121 - protein, 1256 aa, unidentified
  REGION 1..1256: note = Category: MG19 active effectors
  REGION 1..1256: note = Description: MG19-4 active effector
  source 1..1256: note = uncultivated organism sequence
MTKRKSSLAGYRLHRERILFSGGQVIRTIKFPLTPLNPSKETALFLKDFEKAIIADDLKIRGDLNINDYFVYTAKWKPPYTLFDFWVDSLRAGVIWMPKVTKLIDFLTSQYNITSPFDMVWEKASHRIAVIFQKDKFKDIFLSAPIRNTSTRNSFYERILKSLKDDLVRKNDIISTDAKKEVDLIVNSFFNDDGKLILKGKDQLDFWKREYNLDRSTIESLKPKGAYTDITFVNIPELMHNLDAKQSFEELINKREIWISDKKLLSSILGLSDNFNGFSNYLGVVLKGLQKKDGDIEALYEAQKTIFPRLGNYEDEILNALDFLSQKAKLLGETSLPLVNGWHDYRSVFGGKLQSWFTNSQNRKKELNGQISQFREGLSQVKNYLQKGNFGEEADKEKKDILSFLSLLENFFTDEQKSIKVEVNYQLFESLLALIRRRLNFFYQKYIQKEGNETKVNKYKEFEGLYKTIYKPVAFYGYTAKRANEKFVNKTIPILEDGVENTIKLISYLRDSFSVQKTFESVKQEKEKVDDLYRKFLQFFWNKYVDASINSRLFLEKYEKIIKENIEDSKWKEISDKNRKGRYVFYKSPYAKGSLEKIQIKTNDYLQQLQASVLELAEFILSFKKDTLLSDAILLLDWIELSKNTISLLIRFNTKETYKLDGLLLDIFSQAKRYKELFRRENYPRNEFSFIIQSLILSEIRGAATLYSKKEYIASYSVQVIGADDRYKLYYIPKKEISINADTIKSKPSSIERKQLMKSHNFAIALDKVYEKNKNKTFNAILLSKSGITAVYLPSESLQKLFRLSSSPYQLQFLDKYIYLPDGWENIDISLSEWSFIVEKRYKIDWDLQTKKPTLLPITGSEQAKKNKIYLAIPFNLIPNKQAVQSAPLKVIAKGKETIEKDFSRLNFPILGIDVGEYGIAYCLVRFIFDKNTYKITGVELGSYKEEILGFIEDKNIGNIKDKFAEIQQKARQGAFDEEDNVVARIRENAIGHLRNKIHVIVTQEKSSSVYEDSITNFETGSGRTTKIYNSVKRADTESNTEADKQIHNHVWGEKTKWIGRNIGAYASSYTCLSCLKSLYQIKKEDLAKMIINQKEGRVVTISSRHGNIKGYVSKEEKYDMGYQFKGTDEDLKKIRKIVQDFARPPVTNHSEVLEKYAKKILETGRIEEWRKSRGNSSIFVCPFCQYVADADKQAAFMMAVRGYLRFSGIVPSQSSKKKQGQEEEKTTGESFLEQTQKQLKDIDRSGIKNAFSVRI

SEQ ID NO: 122 - protein, 1222 aa, unidentified
  REGION 1..1222: note = Category: MG19 active effectors
  REGION 1..1222: note = Description: MG19-5 active effector
  source 1..1222: note = uncultivated organism sequence
MKKVRGYRLHLKRILFSGGEIVRTIKFPIVARNLSKNDNDYLEIFKKNLIEDDIKIRGDLNLNDYLLYTSSNKHIYTLLNFWIDSLKSGIIWADKAASLIDFINDLYQFEDSPVDIIWNNASEDIKKFFDKDKFKEIIISDPLRATTKKESFKKRLISYLNNIYLEKNHEIKSKEAELLIEKIINNFFDEKGNLILDGKGQNDFWLRNFNLDKSIIDNAKPKGELADITFIIIPELIEDLNCYYTVEYLVKKRIDFLSEKINTSKKLEFILGLSNNFNGYSNFFGKGLRLFQERKINIIFDSMAKVNPFLNRSEYKDKVINSLKFLSDKSKNIPNEPSVPNIGNWANYRSFFGGKIQSWYTNGQKRKTELRQQLYNLEYSLNKAFDFIEKNFSSKEKDEEKEYFFESIKQSIERLKQIIVKFINFLDKGKSQEDIYSLFYDVFSSFKLDLNLYFHKYLKSEENETIDKNQYFSGIFKKIYKPVNFFGESKKEYNKKIIEKTIVTIEHGIDIVFNLLKKLKDSFVPKEKIGEKENSEIIFRDFLDFYWNKLKNKMINSSYFIDLITKIINESLINCNLEKINQKRNWNRYTFKINEYQKGTLVVFELKKINYLDVFEDKVFEIIDFLISFEKNRLLSDKNILIDWIEVSKNIISKLIKFNRSETFDLDQFNFNLENFPKAANYISIFQLKKLNKKDFLFFIQSLIFSEFKGAAVVFSKEKYLAKYTIQVIDTDEKFKLLYKPKDNKIDKNVDRKGLLKLHEYFICLDEVKNINKKNHQFNFIILEKNNFKPTFIDDNYLSKIYKIESSKYQIQFLDKFLSMPDKYKNIGVKLSEWGFILEQEYKIIWDLEKKRPKFQLIENSRRNKLYLSIPFIFYFKGEKSKVLLHSVLNNSTKYPVLGIDVGEYGLAYALVDFSQKNIIKILKIGFIEDRNIANIKDKFTQIQLKSRRGIFNEADNIVSQVKENAIGNLRNQVHFVLTDGMGASLIYEHSISNFETGSGRVTKIYNSVKRADTKFESKADEQIHNHVWGKNTKYIGKELSAYASSYTCVSCYNSIYQFKKEDLNDINIVKREGNIIFFSSSSYKKTFCGYSKEKKYQPGFKFENKEKNFNTFLKICKDFARPPIGKDKSEVLEKYFIFNQERRNKIEDFRKKRGNSAIFVCPFCQFVADADIQAAFIMAIRGFLKFSEKENLKEKKELIFEKTIKFLKATGFRPQEQFSPF

SEQ ID NO: 123 - protein, 1264 aa, unidentified
  REGION 1..1264: note = Category: MG19 effectors
  REGION 1..1264: note = Description: MG19-6 effector
  source 1..1264: note = uncultivated organism sequence
MAKRKNRLAGYRLHKERVLFSGGKVIRTIKYPLVPLGPSEETAQFLKDFERAIIADDLKIRGDLNINDYLACTVEGKSLYTLFDFWVDSLQAGIIWMPKGTKLIDFLASQYNTASPFDGVWKKASPRITAIFKKDKFKGIFLSDPIRNTSTKNSFYKRILESLKDDLVKENIIISTDAKEEVELIVNSFFNNDGQLILDGESQFDFWEKEYNLDKGIIESAKPKGKYTDITFVIIPELISNLNTKQTLEDLINKRATWLSNRELDEDNKLLASILGFSDNANGFSNYLGVVLRGLQEEDGDKEALYEAQKTIFPRLENYRDKVLESLDFLSQKAKLLGETSLPLVNCWHDYRSVFGGKLQSWFTNFQKRKEELDGQISQFKESLFKAKSYLQKENFGEEADKEKEDILSFLSLLGNFFTDEQKSIKIEENYQLFEPLIALIRRRLNFFYQKYIQKEGDETKVNKFKEFEGLYKTIYKPVAFYGYSAKRANEKFVNKTVPILEDGIENIKKIIFYLQDSFSVQKTFEDVKQEREEIDDPYRKFLQFFWNKYLDASINSYLFLGKYEEIIKENVEDNKWKEISDKNKKGRYVFYKSPYTKGTLEKIPIKANSYLDKLQVSVLELVEFILSFKKDTLLSDSALLLDWVELSKNIISLLLKFNTKETYKLDGLLLENFSQAKKYQELFKREDYPKNEFSFIIQSLVLSEIRGAATLYSKREYIASYSVQVVNSDEKFKLYYIPKEEIPITPDTIKSKPDSIERKQLMKPHCFVVALDKVSEEKKNQNFNAILLSKSNTTAVFLPDESLQKLCKLSSSPYQLQFLDKYLFRPAGWENIDISLGEWNFVVEKGYKINWDLQTKKPKLLPITDSEQAKKNKIYLAIPFNLSPNNQIKQSAPLKSIAKGNEKKEKDLSRLNYPILGVDVGEYGLAYCLVKFDFDKNTYKITGIKLGSDEKETFGFIEDKNIGNIKDKFSEIQQKARQGAFDEEDTIVARVRENAIGHLRNRIHIVVTQEKSSSVYEDSITNFETGSGRTTKIYNSVKRSDTESGTKADEQIHNHILGEKTKLVGRNVSAYASSYICVNCLKSLYQIKKEDLTKMTITQKDGRSRVVTISSPYGDIKGYVSKEEKYDVGYQFRGNDEDLKKLRKIVQDFARPPVSNRSEVLEKYAKPILETGRIEEWRKRRGNSSIFVCPFCQYVADADIQAAFMMAVRGYLRFSGIVPSLSNKNKQDQEKEKTAGESFLEQTQKQLKNIDINKIKSAFSIRI

SEQ ID NO: 124 - protein, 1194 aa, unidentified
  REGION 1..1194: note = Category: MG19 effectors
  REGION 1..1194: note = Description: MG19-7 effector
  source 1..1194: note = uncultivated organism sequence
MKSYKIHIKRLKTTKGETTRSIKFLLKPVNQTDAYEKIIENFVNDDHKVRGIANLIDIKSENQYSLLDFWVDTLKCGIVFQSKGKKIRYFIQSIRGKKTMEEIIFDQADEKIKNYFKKVDFIKNIIISDAKRSSSTKKSFFNTLFDILNNEFKNEKEKIIINSDANKLVNFITNSFYDEEGKLILDSEEKQNQFWKNNFNIDKNLLNGKTNNELGELTSFILPELIRLNGDIKLEELINLRFDLVKKYLKINSIEPNEKIINEQTASLLGLSDNFNAFSNYFNNFFNVLLEGNIEVIINYYKTIIDLSNQEEEKIKESLIYLAEKSRLLGKPKFISYSWQEYRSVFGGKLESWFSNYLNRLTKSQENYNKIKGEISKIIAYFDRLQILDKKFSEDNDFQKSKLKIKNQLVNLKNLLEQNPDLLNIPGKYSIFSDYLAEIKTDLNFFYQKYLKISEDDMINNDKNFKFLYEKFEKPINFYGQSKKESLLKIIEKSKLKVIDGFKIIRILLDESKSLKDNDFKKTLSEILNVFFEKLSKKILSNQSIFFNDYKKIIDYYISEENNKKEIYNQPQKYAFYISKFSNNNSLKIIKIKNFDNQDSQITNLIRSLYSFLKNINHNLLLKDVQSAIEYLEITKSFLSFVIENNKKNEFIVDKNLFSNFEGVLNFINLHKSNCLINQEFNRLLNQYFFADLKGTLNILSKKYDLAKYTLQILKSDERFPILINFKDIKVSLKQLLTESKKIINYSHRYLIVIGDKINDYFEFKKLNQEDQTDYFIITKQGIRPILITNLNKNHVFQIHSSRHQLQFLDRLIYKPYYWQNISISISEPSFILEIKHQIDLEKFVFKKESQNLYLSLPFQINSEEPQKKLNEKIYLGIDAGEYGVAYCLTDFTEDIPKIIESSYIKNKNVRKIRDKFEIIKQRARGGVFIQSENVVRKVRENAINEIRNQIHKVFLKYKVPIIYEYSISNFETGSGRITKIYNSIKKSDVDSKANKPIIKHIWGSNSINIGLNLSAYASSYTCSVCGRSIFEVVNDFDTSQATVVSRLKTDGLKNVIEIKTTHGNLYGYTQNKKFIENYRFQNTKQEKEEFLKIIKNFARPPLEKSEVLLTLKKLDPLKLKEIKKQRGNCAVFICPFVDCGKIFDADLQAAFNMSVRGYVKNNLKNNQEVNIFEETIRYLKNHKPINYKMLEIV

SEQ ID NO: 125 - protein, 1069 aa, unidentified
  REGION 1..1069: note = Category: MG20 active effectors
  REGION 1..1069: note = Description: MG20-1 active effector
  source 1..1069: note = uncultivated organism sequence
MANISLKKALQQFPQTTLSKVTNPKTGKVQTRNVLKTMQCGLAISLTPKQRKVELEELSPDKKKLLDEYIDTFENKKQLILEDFYHYYEKSIWDFLIYCSRIKDTTETTYIVIPELPEITTKIKKSDGTYLKVKAYKGISNTTGNIHKTLYWFADDIDTKDGCTKVQFQYTEQRKEYITTDNYEKYNFDPALFELQPDTQQISNRISFFYMTNAQKKDKNGIYHETPKYQEYKKKGISIKGIVDDIEIDIKEPLRTKTAAVLKAFVDKLQESIKEIESVISEKNERIALLNKEDPKNNFPEFFVTNLKEDDKKLLSELTQLQIEDRDVKKFSELYNTLAKSFNQILNNAIQTYISIKLKESKIKQSDKEQEGKRLWDTYHLNHLKGIPSFPQMKNESQGKITAEMIYHFIQEQLQQYKNFSAFDHLLLDKNDFIFTDQKRKLSEDTVEQEQEWKEQWKTIKEKENNSFILTLRKILWRKNNIPGKKLMHYAHYLVQQGKITTNSAIVKALIEYALQELLKKQEHLSCEQFSSDQKAKREFCDYARIIISFIAYQLKKEEKRKEARNLELQIDDMSGNYKGTAFDLLKKGESNILPLSGFDFDNHGTKKGACLVFRNTTDHGNIRTHWYFALNLYNKIHFEEFDQQYDHPLEYPVDQYFVLASKGNDKTVSHHIYQLSPKEFDPGSKTMLIPLLLGTRQLREYITNFEISPFKNLLYFNSAEIQRIRNHKEEQYFLNLVTTRPEVEAYELTQEKKKGLIGIDRGENTVAWAALVNTQGNPLFEGKDERNFIELAPKFGKKFREEYKEISKRQSHGSVKKLNIQGRVKKVIEGVGAKIISNALEYGLQIVLENLDRGFGRHGKNTFVGVRQFTHLQKFIESKLKQNNISFKKDSILQTVPAAYTSKMCSNCGVINSLTGKEDFIAAVIEQFKDHPQQKDPKISCNKLCINLDQEITSWDRNKKREVVENSFEKIKAIFSNTKIQKHEAYVEIILKKLLNPRKEKADLFKCNFCGHTCHADKQAALNIARFSLLPYRSESEKKKGITAISKLEEEYQQRLNDGIFQRGSLIL

SEQ ID NO: 126 - protein, 845 aa, unidentified
  REGION 1..845: note = Category: MG26 effectors
  REGION 1..845: note = Description: MG26-2 effector
  source 1..845: note = uncultivated organism sequence
ENKKDITLQKKYWDFIIDEETWRYKKQNKNYMTMWTLWNKNFIRPYFEELLTNNLNSNKKLENLNRQENLLARKSDISFEIQKINSKDFLWNLYILLEWWYLDHKNDVNVIKELKKQLSKIKELINDLLLLLKPSQSFWIVVDNISLNYYTRKKTPKDYDEEIRKKEVWLKNKYNWKLWKLYWINENQWIKELYEEMKTFKANQKSVFLQLLQDKSSYIDFTKLFLEKEDKNKKYFTFKDNKEIEHKNFELKLFDDISKENYDKMLNLTNQIEKESDKQKRTKLKEKRGRHFMSKSSCAKYINFCNEYKKVAMEYGKRKALVLSLQREQIESQKERWWGIISTDWKNHFLNTISIKNTEIAKNIFQKEIYRKQDEIKYYTFSSITLRALEKLCFKKESKFISNIINSLNTEFKVFVDFWKEKKDILNFDFINESEKNKIDFLNNILENQNTLWIIYRDLEKSKDILKKSKTIDEFEINLKKETYVLDTYFMSKIDFEENIKKIDWKVYEITSWDLIEKRNNSEFQTKTWFEFWSKENKENKFPIRINPEINIWYIEKNETWQKEEKNKNQTNNRRNRNRFLMMSTVSYKADKKYINNAFIKDEERIDNIQKFNEIFNENNKYDYFYWLDKWVLELVTLWIYKKVKDKIEPIKLDKINIYKITERWFNFEKNITNKNWDIKTHYLKNNPSIFIEEYINDNAIFEKLNITSCIWDLSCAKVIKWNIILNADINTYNKLQEINIKRLLYKAITEWKCISDNINYDKEKNIFSYTFENRWKNEERIISCYWKNINIEIFEKDLNNYMQFVRNKNSDTDVSITKINNLKNAICANIVWVIIELQKNILDL

SEQ ID NO: 127 - protein, 1086 aa, unidentified
  REGION 1..1086: note = Category: MG26 effectors
  REGION 1..1086: note = Description: MG26-3 effector
  source 1..1086: note = uncultivated organism sequence
HSIPDYELELSELLDSYKGLIENLINFFYSEKEVVESKKSKFSNLKWFKEAFANFDFDEAEEKVFDLKNKEFSKMPRFKHMFFKENFKEDWYAIKDRLIKKNKTKNYEILDSLPFFQKVLKDFFEKSEQLYKELDEIISSPDNASKRKSDLRFVLQKISWNEVFKKIIKLFSLWFVDHKNDVEIVWKISEELWEFSEKIQNAIELLRVNDSFWFPVEYLSLNYYTINKTPKEYDKEITEKQNNLEKLYEWGLSELYWIDKNQTIEQLRNDMKMFKARQKSAFLQQLQNWVPFEEFQKLDFTDNKWELHKDYEILLFNDIGNDKYGEMLEITEKIAKEQDKDKRKGLKEKRWKYFIHHCKKYNKFCDEFKKVAIQYMKLKAEKLSLEREREQARFERWLAILSKDLDWNYYINSFSNNDSKNAFEKLKNINSTSGDYSYFIMKSITLRALQKLCWKENFKKTVVNKISEKFTKVNENDTGRQVRKFKSFEEIGNNIVEFYVDILDKQRTLDVSYRSWYEEWLKKLKWAKDLDELEILLKQETYTLEEHKISKNDFEEILEDYNWNSYKITSEDLEKNIETNNFTKWWNIFWTTENKEHKYISRLNPELVISLRAWEKVFKDRKKHRKSDKSFLLTMSYSHYTDKSYIDDAFIKDEERKSSLEQFNKHYNENHKFDYIYWLDKWTNELVTLWIFKKVWDKLEKVNISEKIPVYRITEKWLKYSKKYSTIVEWLNWEREIFLYKNPSLFIDEIDNEELFEKVDIDSCIWNLNCAKLIKWNIILNWDINWFLSLSKIAAKRKLYLAITEWKIRWDTVVFGYENGNKYIWYKYENRWKIDENPVFFLESFTDIVSEREFEIEFNEYIKLVKNHNSKEDVSISWINKKRVAISWNIVWIMMKLQEFFPWYIAWEAITIKTNEEDSKKNHSFLWNMVNDKIYQKLMLSLDVPPILKKYRSEIKDKEYLQHGKIFYVNKESTSSACPNCNNTLTITNNWWQFEDKTEEYVSKLFWHISQYENEMHHINDKSDQNYEKKWESWILEDGSICDYNMKHNPKWFDFIRSWDDLATYNIAKKAKEYLEFLEKQKNNNS

SEQ ID NO: 128 - protein, 996 aa, unidentified
  REGION 1..996: note = Category: MG26 effectors
  REGION 1..996: note = Description: MG26-4 effector
  source 1..996: note = uncultivated organism sequence
LRFVLQKISWNEVFKKIIKLFSLWFVDHKNDVEIVWKISEELWEFSEKIQNAIELLRVNDSFWFPVEYLSLNYYTINKTPKEYDKEITEKQNNLEKLYEWGLSELYWIDKNQTIEQLRNDMKMFKARQKSAFLEFLQMKNEFSELEELKTYLNDIEKKYKQKKWSKYNFYEELQNNTFELDSSDVDTDIDKVFKAFSLILFLETEKDDYEKLLNLTKKIEKSSTLSERTSYKIERWEFFKGKNENWIFSEDRDTSYDWFCSEFKKVAISYWRLKAEKLSLEREREQARFERWLAILSKDLDWNYYINSFSNNDSKKAFEKLKNINSTSGDYSYFIMKSITLRALQKLCWKENFKKTVVNKISEKFTKVNENDTGRQVRKFKSFEEIGDNIVEFYVDILDKQRTLDVSYRSWYEEWLKKLKWAKDLDELEILLKQETYTLEEHKISKDDFEGILEDYKWNSYKITSEDLEKNIETNNFTKWWNIFWTIENKEHKYISRLNPELVISLRAWEKVFKDRKKHRKSDKSFLLTMSYSHYTDKSYIDDAFIKDEERKSSLEQFNKHYNENHKFDYIYWLDKWTNELVTLWIFKKVWDKLEKVNISEKIPVYRITEKWLKYSKKYSTRVDWLGWEREIFLYKNPSLFIDEIDNEELFEKVNIDSCIWNLNCAKLIKWNIILNWDINWFLSLNKIAAKRHLYDAITKGFMLKDKITFDEVKNNFYYEHTLAWKKFNKVVFYLDSFESITTKDEIEKELNNYIKLVIEHKSEEDVSIDWINKKRVAISWNIVWIILKLQEKFPWYIVWEALNLDQNNKNISSNHAFLWNLINDKIYQKLMISLDVPPILKKYRSELTKDTLTQHGKVFYINENLTSKACPSCNDTLTIEVNWTLKEKDPNKHKVKVYQLFWHLTEYENEMHHLTDEEYDNLYDNDKNFKKFHSNDKWNKKQNSYLAWENCDYNMKHNPKWFDFIRSWDDLATYNIAKKAKEYLEFLEKQKNNNS

SEQ ID NO: 129 - protein, 1187 aa, unidentified
  REGION 1..1187: note = Category: MG26 effectors
  REGION 1..1187: note = Description: MG26-5 effector
  source 1..1187: note = uncultivated organism sequence
MEKFKNLYEVRKTIRFNLLPVKHNYKKITDGQFKSDLKSFLKKYKQVVDNLSELVFIQNEDDDQILNENTRVSIAWLKEYEKQEFHKNKEKLVKRNKRGNKTGNYVSLRDTDFLLEKFQLWILRNWQEKNEEGKKIGILNNLEILSGQPLESQERNADFAYHIHQIYRRTNFEFIYEFFKNAQGAKSDALIIEIIPVLEDCKNLLKNLENYLRPKQSFGHVIEQSSLNYYTVNKKPKDYPREIKKWEEKKDEKYLSLSFYDSNVGKKKNFFFPDDFQSHLENLIESLNEEKNDEKKIKKEFGDISEINNWKLEQTYKNFKLYKAKQKSQFYEYVYQILEKYDADSEYVFFESHLQDIPTPLFANITDDKFKNLVEESKIIRDKSTKYNNSKDKKLKEAIISLKKKRGDTYFNVQNKPCPFSRYETFCGLFKEIAMTYGKIKAEVRSLEKEQIEAERLQSWAILLEKENQHYVMTIPRDRKILINNKNEYQLPSVYKKIKQLKDTTYSEYWTLFLFESLTLRALEKLCFGMDKNTFITDTNLINELKKKFKNFFITNKRGRQNLKRKDQFLEDGKELIKFYQAVLSLEETKKMILVEEYLPNEITKENICDGEFESLRDFQIALEKTCYIRQEIKISDHKKEELENKYGANVYQITSYDLFEKRKSEKEHTKIWKKFWKQDKNSGYTTRLNPQFSISYVEKREDSIKDKSGNEVERNRRKQAEYILSTTISENNDKPKFDMAFADKDRIKQNIEDFNKEFNKKAKSDPYSLYYYGIDRGQEELLTLGLFKFENQDITFTHPSDSSKSGTYKKPLPVDLEVWELPKGKLLEVVPYETKNGTKFTEAYKSISYAEKAGILEKKIISSCIDLTSAKLVNGKIVLNGDVSTLINLKLENAKRKILEIVNSLALVKKNKKGIMPAKIIFREKNKSNPERFVVNINVDGETIEKNIYFPSSNFFDFEKGQVEDGLNKILNESLQKIKEQGYCSINIPITKINHLRDAICANAVGILNFLQQKYFGIISFEDLPIDGGGSKNEHFSQNNANLGSRIEFMLLNKFKTLGLVPPNYKMVMSMQSKKEIEQLGIITYIKTEGTSSNCPHCSQGIDKKTQREHKWKHHKFKCCNNGKSCGFNTYSQEEIDKNKSSDKWNFTADKKGLDFLNSSDDVATYNIAKRGLQFIKSSNSKDKTS

SEQ ID NO: 130 - protein, 882 aa, unidentified
  REGION 1..882: note = Category: MG26 effectors
  REGION 1..882: note = Description: MG26-6 effector
  source 1..882: note = uncultivated organism sequence
MLENFKDLYEVRKNASFRLEPQENAVTNENLYNQDVDLSEILNKYKNFVYDLKNLLYIEGEKVTEEESDEEPSFTSKPFSRIFANLDLWVLQSNTENKEKDNDLSVDKLDSSNVVHINHKYLSKYFSKEFFENYDRIVKRNKHWAKTKNWTTIGNNDFLEVFFRSFFNDAFENINKLQELIDTKENEQKRKADIAFEVRRLLSRNHLWKIFPLFKGGYLTHKNDIKTIPELTDQAKELKELLDNAKIYFLEDSNFWVQVEHISLNYYTRNKTQKEYDELIKGKKKLLDSPYNKDISKLYWIDRNLPIKQLYEEMKMFKARQKSAFFQQLQNKTPFEKFKEPFTFIDNEWIKHKEFRTELFFDVEEKYYNEMLSLTKKIEKSGSKELKKERWNFLMFQDKWIKSFKWWSWFCSEYKKVAMEYWKRKAESLSLEREKILAEQERWWWVFSKVNNEFYINTFPIDKVKDAYQSLSKKQNDWELSYFILSSITLRALNKLCFSKDSKFINKEILIKLDNEFLKEKEYNNKTKEIVLRKKSDLTELELIKLYYNVLELQDSLWISYINKDSLSKLKSSKNLEEFELNLKNETYKLEEIKTTEDEFNKILKSNEWKSYKIINKEKWNFEKWWKNFWNSSKDWEIRINPELNISLRKWNEDYNDKISFHRKKDDVYLLNVNFSHFANRSYIDSSFIEDDHRKENLKKFNNLYNENIILNYFYWLDKWTNELITLGLFKKEWGKINSVNISKEIPVYRITKKWLLHSKITLKKAPKEWQNPETIHTLYKNPSLFIDELDNEEIFEKVNIESCLWNLNSAKLIKWNIILNWDILTNLNLHKLSAKRQLYIAITEWKTIIENIWFDEKEQENWAFFYEYINKGKTEKNMFFI

SEQ ID NO: 131 - protein, 1151 aa, unidentified
  REGION 1..1151: note = Category: MG26 effectors
  REGION 1..1151: note = Description: MG26-7 effector
  source 1..1151: note = uncultivated organism sequence
MLENFKDLYEVRKNASFRLEPQENAVTNENLYNQDVDLSEILNKYKNFVYDLKNLLYIEGEKVTEEESDEEPSFTSKPFSRIFANLDLWVLQSNTENKEKDNDLSVDKLDSSNVVHINHKYLSKYFSKEFFENYDRIVKRNKHWAKTKNWTTIGNNDFLEVFFRSFFNDAFENINKLQELIDTKENEQKRKADIAFEVRRLLSRNHLWKIFPLFKGGYLTHKNDIKTIPELTDQAKELKELLDNAKIYFLEDSNFWVQVEHISLNYYTRNKTQKEYDELIKGKKKLLDSPYNKDISKLYWIDRNLPIKQLYEEMKMFKARQKSAFFQQLQNKTPFEKFKEPFTFIDNEWIKHKEFRTELFFDVEEKYYNEMLSLTKKIEKSGSKELKKERWNFLMFQDKWIKSFKWWSWFCSEYKKVAMEYWKRKAESLSLEREKILAEQERWWWVFSKVNNEFYINTFPIDKVKDAYQSLSKKQNDWELSYFILSSITLRALNKLCFSKDSKFINKEILIKLDNEFLKEKEYNNKTKEIVLRKKSDLTELELIKLYYNVLELQDSLWISYKNKDSLSKLKSSKNLEEFELNLKNETYKLEEFKTTEDEFNKILKSNEWKSYKIINKEKWNFEKWWKNFWNSSKDWEIRINPELNISLRKWNEDYNDKISFHRKKDDVYLLNVNFSHFANRSYIDSSFIEDDHRKENLKKFNNLYNENIILNYFYWLDKWTNELITLGLFKKEWGKINSVNISKEIPVYRITKKWLLHSKITLKKAPKEWQNPETIHTLYKNPSLFIDELDNEEIFEKVNIESCLWNLNSAKLIKWNIILNWDILTNLNLHKLSAKRQLYIAITEWKTIIENIWFDEKEQENWAFFYEYINKGKTEKKHVFYINEEFLTIISLDELKNELNEYIKYIKNEPNEYKKYMWNNALDTDISILAINKIKNALCANIIGIIMKLQEKFPGYVCFESLSNDNNNRDMEKEHSFLWNLINDKLYSKLNINVSVPPILKKFRSELKNSYYQYGQVIYVNEDSTSSACPVCNDKFIKWINKKWNLEEYEKNKLYGHLTESESSMHHLTDDEYNKKYDNNEKFREKHTNDKGKKKDNIYGSWNWCNYHMKDNPKWFDFIKSWDDLATYNIAKKALEYLEYLKSLNSDETK

SEQ ID NO: 132 - protein, 906 aa, unidentified
  REGION 1..906: note = Category: MG26 effectors
  REGION 1..906: note = Description: MG26-8 effector
  source 1..906: note = uncultivated organism sequence
MLENFKDLYEVRKNASFRLEPQENAVTNENLYNQDVDLSEILNKYKNFVYDLKNLLYIEGEKVTEEESDEEPSFTSKPFSRIFANLDLWVLQSNTENKEKDNDLSVDKLDSSNVVHINHKYLSKYFSKEFFENYDRIVKRNKHWAKTKNWTTIGNNDFLEVFFRSFFNDAFENINKLQELIDTKENEQKRKADIAFEVRRLLSRNHLWKIFPLFKGGYLTHKNDIKTIPELTDQAKELKELLDNAKIYFLEDSNFWVQVEHISLNYYTRNKTQKEYDELIKGKKKLLDSPYNKDISKLYWIDRNLPIKQLYEEMKMFKARQKSAFFQQLQNKTPFEKFKEPFTFIDNEWIKHKEFRTELFFDVEEKYYNEMLSLTKKIEKSGSKELKKERWNFLMFQDKWIKSFKWWSWFCSEYKKVAMEYWKRKAESLSLEREKILAEQERWWWVFSKVNNEFYINTFPIDKVKDAYQSLSKKQNDWELSYFILSSITLRALNKLCFSKDSKFINKEILIKLDNEFLKEKEYNNKTKEIVLRKKSDLTELELIKLYYNVLELQDSLWISYKNKDSLSKLKSSKNLEEFELNLKNETYKLEEFKTTEDEFNKILKSNEWKSYKIISKEKWNFAKWWKNFWNSSKDWEIRINPELNISLRKWNEDYNDKISFHRKKDDVYLLNVNFSHFANRSYIDSSFIEDDHRKENLKKFNNLYNENIILNYFYWLDKWTNELITLGLFKKEWGKINSVNISKEIPVYRITKKWLLHSKITLKKAPKEWQNPETIHTLYKNPSLFIDELDNEEIFEKVNIESCLWNLNSAKLIKWNIILNWDILTNLNLHKLSAKRQLYIAITEWKTIIENIWFDEKEQENWAFFYEYINKGKTEKKHVFYINEEFLTIISLDELKNELNEYKIY

SEQ ID NO: 133 - protein, 1119 aa, unidentified
  REGION 1..1119: note = Category: MG26 effectors
  REGION 1..1119: note = Description: MG26-9 effector
  source 1..1119: note = uncultivated organism sequence
MLESFKDLYEVRKNASFRLEPQENAATNENLYNQDVDLSEILSKYKNFVYDLKNLLYIEGEKVTEKEKDNDLSVDKLDSSNVVHINHKYLSKYFSKEFFENYDRIIKRNKHWAKTKNWTTIGNNDFLEVFFRSFFNNAFENINKLQELIDTKENEQKRKADIAFEIRRLLSRNHLWKIFPLFKGGYLTHKNDIKTIPELTNQAKELKELLDNAKIYFLEDSNFWVQVEHISLNYYTRNKTQKEYDELIKGKKKLLDSPYNKDISELYWIDRNLPIKQLYEEMKMFKARQKSAFFQQLQSKTPFKKFKEPFTFTDNEWIKHKEFRTELFFDVEEEYYNKMLDLTKKIEKSGSNKFKKERWDFLLFQDKWTKSFKWWSWFCSEYKKVAMEYWKRKAESLSLEREKILAEQERWWWVFSKVNNEFYINTFPIDKVKDAYQSLSKKKNDWELSYFILSSITLRALNKLCFSKDSKFINKEILIKLDNEFLKEKEYNNKTKEIVLRKKSDLTELKLIKLYYNVLELQNSLRISYKNSDSFDKLKSSKNLEEFELNLKNETYKLEEFKTTEDEFNKILKSNEWKSYKIINKEKWNFEKWWKNFWNSSKDWEIRINPELNISLRKWNEDYNDKISFHRKKDDVYLLNVNFSHFANRSYIDSSFIEDDKRKENLKKFNDLYNKNIKLNYFYWLDKWTNELITLGLFKKEWGKIKSVNISKEIPVYRITRKWLLHSKVTFKKAPKEWQNPKTIHTLYKNPSLFIDELDNEEIFEKVNIESCLWNLNSAKLIKWNIILNWDILTNLNLHKLSAKRKLYIAITEWKTIIKNIWFDEKEQENWAFFYEYINKGKTEKEPVFYINEEFLTIVSLDELKNELNEYIKYIKNEPNEYKKYMWNNALDTDISMLAINKIKNALCANIIGIIMKLQEKFPGYVCFESLSNDNNNRDMEKEHSFLWNLINDKLYSKLNINASVPPILKKFRSELKNSYYQYGQVIYVNEDSTSSACPVCNDKFIKWINKKWNLEEYKKNKLYGHLTESESSMHHLTDDEYNKKYDNNDKFREKHTNDKGKKKDNIYRSWNWCNYHMKDNPKWFDFIKSWDDLATYNIAKKALEYLEYLESQNNDETK

SEQ ID NO: 134 - protein, 1151 aa, unidentified
  REGION 1..1151: note = Category: MG26 effectors
  REGION 1..1151: note = Description: MG26-10 effector
  source 1..1151: note = uncultivated organism sequence
MLESFKDLYEVRKNASFRLEPQENAVTNENLYNQDVDLSEILSKYKNFVYDLKNLLYIEGEKVTEEESDEEPSFTSKPFSRIFANLDLWVLQSNTENKEKDNDLSVDKLDSSNVVHINHKYLSKYFSKEFFENYDRIIKRNKHWAKTKNWTTIGNNNFLEVFFRSFFNDAFENINKLQELIDTKENEQKRKADIAFEIRRLLSRNHLWKIFPLFKGGYLTHKNDIKTIPELTNQAKELKELLDNAKIYFLEDSNFWVQVEHISLNYYTRNKTQKEYDELIKGKKKLLDSPYNKDISELYWIDRNLPIKQLYEEMKMFKARQKSAFFQQLQNKTPFEKFKEPFTFIDNEWIKHKEFRTELFFDVEEKYYNEMLILTKKIEKSGSKELKKERGNFLMFQDKWTKSFKWWSWFCSEYKKVAMEYWKRKAESLSLEREKILTEQERWWWVFSKVNNEFYINTFPIDKVKGAYQSLSEKQNDWELSYFILSSITLRALNKLCFSKDSKFINKEILIKLDNEFLKEKEYNNKTKEIVLRKKSDLTELVLIKLYYNVLELQNSLRISYKNSDSFDKLKSSKNLEEFEINLKNETYKLEEFKTTEDEFNKILKSNEWKSYKIINKEKWNFEKWWKNFWNSSKDWEIRINPELNISLRKWNEDYNDKISFHRKKYDVYLLNVNFSHFANRSYIDSSFIEDDKRKENLKKFNDLYNKNIKLNYFYWLDKWTNELITLGLFKKEWGKIKSVNISKEIPVYRITRKWLLHSKVTFKKAPKEWQNPKTIHTLYKNPSLFIDELDNEEIFEKVNTESCLWNLNSAKLIKWNIILNWDILTNLNLHKLSAKRKLYIAITEWKTIIKNIWFDEKEQENWAFFYEYINKGKTEKEPVFYINEEFLTIVSLDELKNELNEYIKYIKNEPNEYKKYMWNNALDTDISMLAINKIKNALCANIIGIIMKLQEKFPGYVCFESLSNDNNNRDMEKEHSFLWNLINDKLYSKLNINASVPPILKKFRSELKNSYYQYGQVIYVNEDSTSSACPVCNDKFIKWINKKWNLEEYKKNKLYGHLTESESSMHHLTDDEYNKKYDNNDKFREKHTNDKGKKKDNIYRSWNWCNYHMKDNPKWFDFIKSWDDLATYNIAKKALEYLEYLESQNNDETK

SEQ ID NO: 135 - protein, 1112 aa, unidentified
  REGION 1..1112: note = Category: MG26 effectors
  REGION 1..1112: note = Description: MG26-11 effector
  source 1..1112: note = uncultivated organism sequence
MNKFTKPYEVRKSIKFKLIPEIQKRPHSIPDYELELSELLDSYKGLIENLINFFYSEKEVVESKKSKFSNLKWFKEAFANFDFDEAEEKVFDLKNKEFSKMPRFKHMFFKENFKEDWYAIKDRLIKKNKTKNYEILDSLPFFQKVLKDFFEKLEQLYKELDEIISSPDNASKRKSDLRFVLQKISWNEVFKKIIKLFSLWFVDHKNDVEIVWKISEELWEFSEKIQNAIELLRVNDSFWFPVEYLSLNYYTINKTPKEYDKEITEKQNNLEKLYEWGLSELYWIDKNQTIEQLRNDMKMFKARQKSAFLQQLQNWVPFEEFQKLDFTDNKWELHKDYEILLFNDIGNDKYGEMLEITEKIAKEQDKDKRKGLKEKRWKYFIHHCKKYNKFCDEFKKVAIQYWKLKAEKLSLEREREQARFERWLAILSKDLDWNYYINSFSNNDSKNAFEKLKNINSTSGDYSYFIMKSITLRALQKLCWKENFKKTVVNKISEKFTKVNENDTGRQVRKFKSFEEIGNNIVEFYVDILDKQRTLDVSYRSWYEEWLKKLKWAKDLDELEILLKQETYTLEEHKISKNDFEEILEDYNWNSYKITSEDLEKNIETNNFTKWWNIFWTTENKEHKYISRLNPELVISLRAWEKVFKDRKKHRKSDKSFLLTMSYSHYTDKSYIDDAFIKDEERKSSLEQFNKHYNENHKFDYIYWLDKWTNELVTLWIFKKVWDKLEKVNISEKIPVYRITEKWLKYSKKYSTIVEWLNWEREIFLYKNPSLFIDEIDNEELFEKVDIDSCIWNLNCAKLIKWNIILNWDINWFLSLSKIAAKRKLYLAITEWKIRWDTVVFGYENGNKYIWYKYENRWKIDENPVFFLESFTDIVSEREFEIEFNEYIKLVKNHNSKEDVSISWINKKRVAISWNIVWIMMKLQEFFPWYIAWEAITIKTNEEDSKKNHSFLWNMVNDKIYQKLMLSLDVPPILKKYRSEIKDKEYLQHGKIFYVNKESTSSACPNCNNTLTITNNWWQFEDKTEEYVSKLFWHISQYENEMHHINDKSDQNYEKKWESWILEDGSICDYNMKHNPKWFDFIRSWDDLATYNIAKKAKEYLEFLEKQKNNNS

SEQ ID NO: 136 - protein, 1112 aa, unidentified
  REGION 1..1112: note = Category: MG26 effectors
  REGION 1..1112: note = Description: MG26-12 effector
  source 1..1112: note = uncultivated organism sequence
MNKFTKPYEVRKSIKFKLIPEIQKRPHSIPDYELELSELLDSYKGLIENLINFFYSEKEVVESKKSKFSNLKWFKEAFANFDFDEAEEKVFDLKNKEFSKMPRFKHMFFKENFKEDWYAIKDRLIKKNKTKNYEILDSLPFFQKVLKDFFEKSEQLYKELDEIISSPDNASKRKSDLRFVLQKISWNEVFKKIIKLFSLWFVDHKNDVEIVWKISEELWEFSEKIQNAIELLRVNDSFWFPVEYLSLNYYTINKTPKEYDKEITEKQNNLEKLYEWGLSELYWIDKNQTIEQLRNDMKMFKARQKSAFLQQLQNWVPFEEFQKLDFTDNKWELHKDYEILLFNDIGNDKYGEMLEITEKIAKEQDKDKRKGLKEKRWKYFIHHCKKYNKFCDEFKKVAIQYWKLKAEKLSLEREREQARFERWLAILSKDLDWNYYINSFSNNDSKNAFEKLKNINSTSGDYSYFIMKSITLRALQKLCWKENFKKTVVNKISEKFTKVNENDTGRQVRKFKSFEEIGNNIVEFYVDILDKQRTLDVSYRSWYEEWLKKLKWAKDLDELEILLKQETYTLEEHKISKNDFEEILEDYNWNSYKITSEDLEKNIETNNFTKWWNIFWTTENKEHKYISRLNPELVISLRAWEKVFKDRKKHRKSDKSFLLTMSYSHYTDKSYIDDAFIKDEERKSSLEQFNKHYNENHKFDYIYWLDKWTNELVTLWIFKKVWDKLEKVNISEKIPVYRITEKWLKYSKKYSTIVEWLNWEREIFLYKNPSLFIDEIDNEELFEKVDIDSCIWNLNCAKLIKWNIILNWDINWFLSLSKIAAKRKLYLAITEWKIRWDTVVFGYENGNKYIWYKYENRWKIDENPVFFLESFTDIVSEREFEIEFNEYIKLVKNHNSKEDVSISWINKKRVAISWNIVWIMMKLQEFFPWYIAWEAITIKTNEEDSKKNHSFLWNMVNDKIYQKLMLSLDVPPILKKYRSEIKDKEYLQHGKIFYVNKESTSSACPNCNNTLTITNNWWQFEDKTEEYVSKLFWHISQYENEMHHINDKSDQNYEKKWESWILEDGSICDYNMKHNPKWFDFIRSWDDLATYNIAKKAKEYLEFLEKQKNNNS

SEQ ID NO: 137 - protein, 1112 aa, unidentified
  REGION 1..1112: note = Category: MG26 effectors
  REGION 1..1112: note = Description: MG26-13 effector
  source 1..1112: note = uncultivated organism sequence
MNKFTKPYEVRKSIKFKLIPEIQKRPHSIPDYELELSELLDSYKGLIENLINFFYSEKEVVESKKSKFSNLKWFKEAFANFDFDEAEEKVFDLKNKEFSKMPRFKHMFFKENFKEDWYAIKDRLIKKNKTKNYEILDSLPFFQKVLKDFFERSEQLYKELDEIISSPDNASKRKSDLRFVLQKISWNEVFKKIIKLFSLWFVDHKNDVEIVWKISEELWEFSEKIQNAIELLRVNDSFWFPVEYLSLNYYTINKTPKEYDKEITEKQNNLEKLYEWGLSELYWIDKNQTIEQLRNDMKMFKARQKSAFLQQLQNWVPFEEFQKLDFTDNKWELHKDYEILLFNDIGNDKYGEMLEITEKIAKEQDKDKRKGLKEKRWKYFIHHCKKYNKFCDEFKKVAIQYWKLKAEKLSLEREREQARFERWLAILSKDLDWNYYINSFSNNDSKNAFEKLKNINSTSGDYSYFIMKSITLRALQKLCWKENFKKTVVNKISEKFTKVNENDTGRQVRKFKSFEEIGNNIVEFYVDILDKQRTLDVSYRSWYEEWLKKLKWAKDLDELEILLKQETYTLEEHKISKNDFEEILEDYNWNSYKITSEDLEKNIETNNFTKWWNIFWTTENKEHKYISRLNPELVISLRAWEKVFKDRKKHRKSDKSFLLTMSYSHYTDKSYIDDAFIKDEERKSSLEQFNKHYNENHKFDYIYWLDKWTNELVTLWIFKKVWDKLEKVNISEKIPVYRITEKWLKYSKKYSTIVEWLNWEREIFLYKNPSLFIDEIDNEELFEKVDIDSCIWNLNCAKLIKWNIILNWDINWFLSLSKIAAKRKLYLAITEWKIRWDTVVFGYENGNKYIWYKYENRWKIDENPVFFLESFTDIVSEREFEIEFNEYIKLVKNHNSKEDVSISWINKKRVAISWNIVWIMMKLQEFFPWYIAWEAITIKTNEEDSKKNHSFLWNMVNDKIYQKLMLSLDVPPILKKYRSEIKDKEYLQHGKIFYVNKESTSSACPNCNNTLTITNNWWQFEDKTEEYVSKLFWHISQYENEMHHINDKSDQNYEKKWESWILEDGSICDYNMKHNPKWFDFIRSWDDLATYNIAKKAKEYLEFLEKQKNNNS

SEQ ID NO: 138 - protein, 752 aa, unidentified
  REGION 1..752: note = Category: MG26 effectors
  REGION 1..752: note = Description: MG26-14 effector
  source 1..752: note = uncultivated organism sequence
NIMEKMQNLYEVRKSLRFELKPISDNIKFLESNKSIVLDNFGTLILEHKKFINLLSETLFYKEVENLIEKEEKIQNVFWKFFSENNFEINKEIEENKQEDFSEYEIYKTVYFKYQWVQKIFKSEWIENKKDITLQKKYWDFIIDEETWRYKKQNKNYMTMWTLWNKNFIRPYFEELLTNNLNSNKKLENLNRQENLLARKSDISFEIQKINSKDFLWNLYILLEWWYLDHKNDVNVIKELKKQLSKIKELINDLLLLLKPSQSFWIVVDNISLNYYTRKKTPKDYDEEIRKKEVWLKNKYNWKLWKLYWINENQWIKELYEEMKTFKANQKSAFLQLLQDKSSYIDFTKLFLEKEDKNKKYFTFKDNKEIEHKNFELKLFDDISKENYDKMLNLTNQIEKESDKQKRTKLKEKRGRHFMSKSSCAKYINFCNEYKKVAMEYGKRKALVLSLQREQIESQKERWWGIISTDWKNHFLNTISIKNTEIAKNIFQKEIYRKQDEIKYYTFSSITLRALEKLCFKKESKFISNIINSLNTEFKVFVDFWKEKKDILNFELINESEKNKIDFLNNILENQNTLWIIYRDLEKSKDILKKSKTIDEFEINLKKETYVLDTYFMSKIDFEENIKKIDWKVYEITSWDLIEKRNNSEFQTKTWFEFWSKENKENKFPIRINPEINIWYIEKNETWQKEEKNKNQTNNRRNRNRFLMMSTVSYKADKKYINNAFIKDEERIDNIQKFNEIFNENNKYDYFY

SEQ ID NO: 139 - protein, 1283 aa, unidentified
  REGION 1..1283: note = Category: MG26 effectors
  REGION 1..1283: note = Description: MG26-18 effector
  source 1..1283: note = uncultivated organism sequence
MSHLFNRFTNLYSLSKTLRFELKPVGETQKMLEDAKIFEIDKVRKEKYEATKPYFDRLHREFVEKALENAEISNLSGYFEIFKKWKKDKKAHEKELQNKEKTLRKEVVSLFDAQAKSWTEKYPGLKKKDIGILDEEGVFEQILKVRYGSEDESFLREADGNFILDDEGEKISIFDEWKGFTGYFKKFFETRKNFYKSDGTSTALATRIIDQNLKRFCDNMENFEKIKKKIDFSEVEKDFGESMNEVFSVSFYNSCLLQEGIDFYNKVLGGETLKNGEKLKGLNELINKYRQDHKGEKIPFFKLLDKQILSEKEKFIDEIERDDQLLEVLKDFYQSAEQRTKVLKALFKDLVSHEKNYDLSQVYLSKEALNTISHKWTGETELFEGQLYEVLRKSKEDSVKPKKKDRGYSFPDFIPLCYIQEALQKISAKKFWKERYYNEISGFSEENIWKQFLAILDFEFSSLFKRKVTNSETGEVMQLGYDVFKNDFKPLLQNFKNDQKAKVIIKNFADEVLRIYQMAKYFALEKKRKWERKWVGDDHKPGNFYDDPDFGFKINFYDNAYEEIVQPYNKLRNYVTKKPYSEEKWKLNFENPTLADGWDKNKESDNSAVILKKGEKYFLGLMAKGYNKIFDDRFSEEFSENITQEKYEKMNYKLLPGANKMLPKVFFGKSNIDFYNPSEKVLEIRNHSSHTKSGAPQKGFEKKEFNLNDCHILIDFFKKSIAKHPDWKVFDFHFSETSKYSDISDFYREVEEGGYKISFQDISGAYINQKNEAGELYLFQIKNKDWNEGSTGRKNLHTLYFESLFSKENIQQNFPFKLNGQAEIFYRPKTDVQKLGTKKDKRGKEVINHKRYNENKIFFHVPLTLNRTQGDARQFNSKINQFLANNPQINIIGVDRGEKHLAYYSVINQKGGILDSGSLNKITGVNYAEKLEEKAKSREQARKDWQTVEGIKDLKKGYISQVVRKLADLAIEHNAIIVFEDLNMRFKQIRGGIEKSVYQQLEKALIEKLNFLVNKGEKDPNQAGHLLKAYQLAAPFTTFKEMGKQTGILFYTQAAYTSKIDPITGWRPHLYLKYASAEKAKKDIDKFSKIEFKQGRFEFTYDIKKFRELKKSPKNTIWTVCSNVERFRWNRHLNNNKGDYDHFKGVTDKLMKLFNEYKIDFQRGDILGQVDSLETKGNEKFFKDFIFLFNLICQIRNTDDSEKAKREGKDDFILSPVEPFFDSRKENGANLPKNGDDNGAYNIARKGVILLNKLSEHLKKDPDFKKYPELYISNTEWDDFARK

SEQ ID NO: 140 - protein, 1302 aa, unidentified
  REGION 1..1302: note = Category: MG26 effectors
  REGION 1..1302: note = Description: MG26-19 effector
  source 1..1302: note = uncultivated organism sequence
MKKEKQFSPFEKFTNLYSLSKTLRFELRPTEETKTMLEEAQVFAKDEVIQKKYEATKPYFNRLHREFVDEALLNVKINGLSYYFQTLQEWQKDKKNKDSKKIYEKKTQELRKQIVKFFDDKANEWASYYDKRQIEYADKKAIKIKFVDDSGKKISGTKIFSSKGVLGILLDKFPEAKNDLYVFCDGFFGYYDKFKKTRENFYKDDGTSTALATRMIDQNLKRFCDNLALFENIKEKVDFSEVEQNFGVVLTQVFSLEYYNQCLLQNGIDGYNDILGGKPLKNGKKKKGLNECINLYKQKTGEKLSFFKTLDKQILSEKERFLDEIKSDEKLLEVLKNFEKTAEEKIPLLKNLFADFVENNENYDLSQIYIEKKQFDPNSCKWIDKSSIDNFQQSLYEVMKKEKLAKYDKKEESYKFPDFIALSYIKTALENGKSEGNFWKEKYYEISGFSEKTFWEQFLAIFSFEFSSLLGREITNQETGEKKMTGYNPFKRTFEALLQNFKVDQNAKIVIKDFADSVLTVYQMAKYFAVEKKRAWLAEYDLDSFYTHPEMGHLKFYDNAYEDIVQVYNDLRNYLTKKPYSEEKWKLNFENPTLANGWDKNKESDNSAIILRKNGEYYWGLMVKGYNKIFDDRYQEKFTDGLNEGKYEKIVYKFFPDQAKMFPKVCFSAKGLEFFKPSEEIWNIYQNDEFKNGDTFSVQSMQKFIDFYKDCLAKYEGWECYDFCHLKSTKSYQDNIGEFFRDVAEDGYKITFQDISEKYINEKNQKGELYLFEIRNKDWNLDKAREGKIKTTQKNLHTLYFESLFSAENIARNFPMKLNGQAEIFYRPKTEQGKLGIKKDKQGKEVTNHKRYNENKIFFHIPLTFNRTKNDPYRFNAQVNNFLAQNPSINIIGVDRGEKHLAYYSVITQNGEILDSGSLNSIGGVNYAEKLEEKAKNQEQAQKDWQAVEGIKDLKKGYISQVVRKLADLAIKHNAIIVFEDLNMRFKQIRGGIEKSVYQQLEKALIEKLSFLVNKGETNATKAGHLLKAYQLSAPFTTFQDVGKQTGIIFYTQAAYTSRIDPISGWRPHLYLKYSSADKAKEDILKFSKIEFINNRFEFTYDIKKFQQAKEYPKNTVWTVCSNIERFRWDKNLNNNKGGYTHYPNITDGKSENRNPKSTKPNNFKELFEKYVIDIARDIKEQIRLLEPKGNEKFFEHFIFFFNLICQIRNTDDSEQAKKTGKDDFIFSPIVPFFDSRKENEKNLPKNGDDNGAYNIARKGILILQKISEFYKEKGGCEKMNWGNLYVSNNDWDDFIKIKPHN

SEQ ID NO: 141 - protein, 1293 aa, unidentified
  REGION 1..1293: note = Category: MG28 effectors
  REGION 1..1293: note = Description: MG28-1 effector
  source 1..1293: note = uncultivated organism sequence
MKAFENFTGLYSLTKTLRFELKPIGKTLEYIEKNGLLDRDRHRANSYVEVKKIIDRYHKQFIEDSLRNFKLTYENEGKKDSLEEYFYHYKLRNRDDKQKKDFDEIQKNLRKQIASQFKKQDRFKRIDKKELIKEDLLEFVDNNEKKFIDEFRDFTTYFTGFHENRQNMYSEEEKSTAIAYRLIHENLPKFIDNISVFERVAVTDVANCFVQIYSDFEEYLNVNDISEIFRLDYYTEILTQAQIDVYNLIIGGCSQGDVKIKGLNEYINLYNQQQKDKSQRLPKLKPLFKQILSDRNAISWLPESFKSDNELLENLENCYQSYNEANVDKKSIFLRLKELLVSMSNYEIDKIFVRNDSQLTDISQKMFGNYNVISKSLLEDLKRSEPRKSKKETDESFEERLRNIIKNEESFKIERINSSLQKMDIDEYKKSVCDYYAGLAVDDKGNDIFDRIEKAYSEVKDLLNSPYPSDKNLIQEDKDIDKIKNLMESIKELHRFVKPLCGKGNEPDKDDRFYGEFTILYEELDKITPLYNMVRNYLTRKPYSTEKVKLFFENNGAMLNGWVDSKTENSDNGTQYGGYLFRRKNGIEEYDYYLGISSDVKLFRKDTIIAEHDKSDFERLDYYQLKSQTFYGSAYKGDYELETQNVIKAIDNFISKNGETDISEKIISDRANKNSKTGTAKGYLNFIKNTSIYDDLLNDDIFKNANDQLINSLKKTLMSFERLSTARKIANDNFNLFSDLMDAVDVLMQEKVFTYNAVSINEFESTINRDKKPLLLFKITNKDLSFADTFLSGKRKSRGVENLHTLYFKALMSGKQNVFDIGTGSVYFREKSIRYSEEKMKYGHHYDMLKDKFQYPIISNKRYVYDKFQFHLSMVQNYNGNKNLDINTIANDYIKKSDDLHVIGIDRGERHLLYLTVIDMKGNIKKQFSLNEIVNNYNGNTYRTNYRDLLDDREKKRDEERKSWRTIETIKELKEGYLSQVIHKISELMIEYNAIIVLEDLNLEFMRGRQKVEKSVYQKFEKMLIEKLNYLADKKKDPEDLGGILKAYQLTNELKKDGKQSGFLFYTQAWNTSKIDPVTGFVNLFDTRYENIAKSKTFFEKFDSIRFNTEKNWFEFSFDYNEFTTKAEGTKTKWTICTYGKRIESYRNPDKNLQWDGKEINLTEEFKLFFEKYGININSNLQSEIVKQDKKDFFEGLLHLLKLTLQMRNSKTGTDIDYMQSPVADENGIFYNSDECGKSMPENADANGAYNIARKGLMIIDKIKKSKDIKKIDLKISNKEWLSFAQNKPYLND

SEQ ID NO: 142 - protein, 846 aa, unidentified
  REGION 1..846: note = Category: MG28 effectors
  REGION 1..846: note = Description: MG28-2 effector
  source 1..846: note = uncultivated organism sequence
DSFSMAQINNWLTDYMGDTYKSIESYFIALGAEDDGNTQKPNLFIRIENAYTEAKSLLTKVYPKDRKLSQDKINVEKIKNLLDAIKNLQHFVKPLLGRGTESEKDSRFYGDFTPLWETLEQITPLYNMVRNRMTEKPYSDEKIKLYFDNNGSFLNGWVDSKTESDNATQYGGYLFRKLNSIGEYDYYLGVSAATKLFRSFNPVADNDKSCFERLDYYQLKGKTFYGALYKGDYETESANIRHSIDDVVCRSGSTLIKEKINIERQKKQPKISTAIGYLKFIRQQDGELYSTLLKDDIFEEANQAIMVSMKATLSSLDRIPFAKEYALRHYILFADMMDDIEVLLQGKVFSYFPISQNELDEAVTRISKPLYLFKITNKDLSFAETHEKGLRKSRGIENLHTMYFKALMSGCQDVFDIGSGSVFFREHKISYTDEQMKRGHHYEMLKDKFNYPIISNKRYAIDKFQFHISITMNYNADKSKDINYITNAYLKKSNDTHIIGIDRGERHLLYLSLIDLQGNIIDQFSLNEIVKEYNGKTYCTNYHALLDAKENQRDEARRSWQTIENIKELKEGYMSQVIHKIVDLMIKYNAIVVLEDLNLGFKRGRQKVEKQVYQKFEKMLIDKLNYLVDKKLDANEAGGVLRAFQLTNKFESFQKLGKQSGFLFYIPAWNTSKMDPTTGFVNLLDTRYENMAKAKAFFGKFKSIRFNNSKNWFEFSFDYNDFTTKAEGTKTQWTICTYGTRIENKRDPMQNNNFVSEEFELTNRFKDLFANTKYNIDLNGNLIEQICSQSDASFFKELLHLMNLTLQMRNSVVGTLIDYMISPVSNANGEFYDSRKCGKNLPENAD

SEQ ID NO: 143 - protein, 898 aa, unidentified
  REGION 1..898: note = Category: MG28 effectors
  REGION 1..898: note = Description: MG28-3 effector
  source 1..898: note = uncultivated organism sequence
LKSRIFEGDDSLRNLLKNLGEYDLEHVFIPVDIHLTEISQKYYGNWSLIKKAMEDDVKAKNPQKRNETTEKYEERIEKLLKTNESCSLAQINRLMKFYLGDEFKPIELYFVGLGAEDNENGQKPNVFVLIENAYAEASSLLTSPYPTDRKLSQDKISVDKIKTLLDAIKDLQHFVKPLLGKGGESEKDNRFYGEFTPLWEILDQITPLYNMVRNRMTQKPYSEEKVKLNFDNSTLLAGWDLNKEADNTCTILRKDGNYYLAIMDKKYNKVFRQECLVASGDCYEKMEYKLLPGANKMLPKVFFSKSRINEFNPSDKLMQNYEKETHKKGENFNVDDCRALIDFFKKSIDKHEDWSKFDFHFSDTKKYDDLSGFYREVEQQGYKISFRNVSVAYINRLVDEGKIYLFQIYNKDFSTYSKGTPNLHTMYWKMLFDERNLADVVYKLNGEAEVFFRKHSIDVDKPTHPANVPIDNKNKLNAKKSSVFEYDLIKDRRYTVDKFQFHVPITLNHKAAGYSSINSLVNTYLKESKATHIIGIDRGERHLLYLSLIDMNGNILEQYSLNEIVNEYKGNTYRTNYHDLLDAKEKQRDEARRSWQTIENIKELKEGYMSQVIHKVAELMVKYNAIVVLENLNTGFMRGRQKVEKQVYQKFEKMLIDKLNYLVDKKCDPNELGGVLNAYQLTNKFESFQKVGKQSGFLYYIPAWNTSKMDPTTGFVNLLDTRYENLPKAKSFMGKFKSIRFNPTKNWFEFAFDYNDFTTKAAGTRTQWTLCTYGTRIETKRDPKQNNMFVSEEFDLTNRFKQLFADMDLNGNLMEQISSQNDVAFYKELLHLLHLTLQMRNSITGTEVDYMISPVMNDQGEFYDSRNCGKSLPENADANGAYNIARKGLWIIDQIKRA

SEQ ID NO: 144 - protein, 779 aa, unidentified
  REGION 1..779: note = Category: MG28 effectors
  REGION 1..779: note = Description: MG28-4 effector
  source 1..779: note = uncultivated organism sequence
LWETLEQITPLYNMVRNRMTEKPYSDEKIRLYFDNNGSFLNGWVDSKTDSDNANQYGGFLFRKLNSIGEYDYYLGVSAATKLFRSFNPIDDSDKSCFERLDYYQLKGKTFYGALYKGDYETESANIRHSIDDVVCRSGSTLIKEKINIERQKKQPKISTAIGYLKFIRQQDDELYNILLKDDIFEEANQAIMVSMKATLSSLDRIPFAKEYALRHYILFADMMDDIEVLLQGKVFSYFPISQNELDEAVTRISKPLYLFKITNKDLSFAETHEKGLRKSRGIENLHTMYFKALMSGCQDVFDIGSGSVFFREHKISYTDEQMKRGHHYEMLKDKFNYPIISNKRYAFDKFQFHISITMNYNADKSKDINYITNAYLKESNATHIIGIDRGERHLLYLSLIDLQGNIVEQFSLNEIVKEYNGNTYCTNYHALLEAKENQRDYARRSWQTIENIKELKEGYMSQVIHKIVDLMIKYNAIVVLEDLNLGFKRGRQKVEKQVYQKFEKMLIDKLNYLVDKKLDANEAGGVLRAFQLTNKFESFQKLGKQSGFLFYIPAWNTSKMDPTTGFVNLLDTRYENMAKAKAFFGKFKSIRFNNSKNWFEFAFDYNDFTTKAEGTKTQWTICTYGTRIENKRDPMQNNNFVSEEFELTNRFKDLFANTKYNIDLNGNLIEQICSQSDASFFKELLHLMNLTLQMRNSVVGTTIDYIISPVANANGEFYDSRNCGKNLPENADANGAYNIARKGLWIINQIKQTEDLTKVKLSISNKEWLQYAQKQINNT

SEQ ID NO: 145 - protein, 1303 aa, unidentified
  REGION 1..1303: note = Category: MG28 effectors
  REGION 1..1303: note = Description: MG28-5 effector
  source 1..1303: note = uncultivated organism sequence
MHTYSEFTGLYQLSKTLRFELKPIGKTKENIERNGILERDKERDVAYKKVKKVIDEYHKAFIEQMLDDFELNLKNEGNMDSLEEFYFLYHLPTTDPKRKDDLNNVQEALRKQISERFTKSEQYKRLFGKELIREDLINEFVNTTKGSAYIRAQNGNETLGDDEVLQKQEELATEVARFKDFTGYFDGLKKNRENMYVADDETTSIAHRMITENLPKFIDNMDVFEKIVASEVATHFDEVYKVFEPYMNVYSINEMFRLDYFSMVLTQKQIDVYNAIIGELNKHTNLYNQQQKNNNLPKLKPLFKQILSERNAISWLPDEFGSDNEMLQSIGKCYQDLKERVFGSLKTLLENIKDYELEQIYLPNDLQLTDIAQKHFGSWEVIKNAVREETKKLNPQKNRESTEKYEERIGKLLKANESYSIGFINSLLKNRIDDFKPLEEYFTEMGAEDNGNEQKLNHFSRIENAYTEVKTLLNVDYPEGKTLSQDKANVEKIKNLLDAIKDLQHFVKPLLGKGTESEKDPLFYGEFVPLWESLDQITPLYNMVRNRMTQKPYSDEKIRLYFDNNGYFLRGWVDSKTESDKATQYGGYLFRRRNSIGEYDYYLGVSSATKLFRSFNLVTEEDKSSFERLDYYQLKGNTFYGSLYKGNYEQESSNIKHALDVFVSKHGCAFVKQKINVEKGKKQPKVSTASGYLKFIEQLDIELYDSLLKDEVFKKSNQEIMSSLRATLLSLDRIPSAKEYAHKKFTVFSEMMDDIDIMLRGKVFSYFPISRKELDEAVNRKTKPLYLFKITNKDLSFAETYEKGLRKSRGAENLHTMYFKALMSGNQNVFDIGSGSVYFREHKIDYSEEQLKKGHHYEMLKDKFAYPIISNKRYAYDKFQFHLSVTMNYNADKNKDINPLVNAYLKESKATHIIGIDRGERHLLYLSLIDLKGNIVEQYSLNEIVNEYNGGFYRTNYHDLLDSKEKQRDEARRSWQTIENIKELKEGYMSQVIHKIAQLMVKYNAIVVLEDLNPGFMRGRQKVEKQVYQKFEKMLIDKLNFLVDKKLDAEEIGGVLNAYQLTNKFESFQKQGKQSGFLFYIPAWNTSKMDPTTGFVNLLDTRYENMEKTKVFFGKFDSIKYNSAKDWFEFAFDYDNFTTKAEGTKTKWTLCTYGTRIETKRDPKQNNSFVSKELDLTSRFKELFADNHIDLNSNLKEHICSQSDAAFFKGLLNLVHLTLQMRNSITGTETDFLISPVMNAKGEFYDSRKCGKNLPENADANGAYNIARKGLWIIEQIKQTEDLSKLKLAISNKEWMRYTQGLE

SEQ ID NO: 146 - protein, 780 aa, unidentified
  REGION 1..780: note = Category: MG28 effectors
  REGION 1..780: note = Description: MG28-6 effector
  source 1..780: note = uncultivated organism sequence
MKEFTKLYPLSKTLRFELKPIGKTKDNIEKNGILERDSERAVAYKAVKKVIDEYHKSFIELKLADFELMQSQLEEFYLLYLLPTSEQKRKTDLPKVQESLRKQISDRFTKDDYYKRLFGKELIREDLTEFVNTPYYENIIRSIPGNEQLTDEEVKEIQENTQREISQFNDFTTYFVGFYDNRRNMYVAEDKATSIAHRMIDENLPKFVDNMDVFEKIAASDVAQHFGELYKAMEPYLNVCEIADLFKLNYFSMVLTQTQIDVYNAIIGGKTLDDGTKIQGLNEYVNLFNQQQKDKANRLPKLKPLFKQILSERNAISWLPDEFENDNEMLQSIEKCYQDLKAQVFEGEHSLKILLGSIGDYDLEHIYLPNDLQLTDISQKHFGSWSAIKNAVVEDIQSANPKKKTESGEKYDERISKLLKENDSFSIAYINRLMHSALDDSKPIESYFAQMGAEDNENCQKLNHFARIENAYTEIKSLLNTEYPSGKSLSQDKANVEKIKNLLDAIKDLQHFVKPLLGSGRESEKDNRFYGEFVPLWETLDQITPLYNMVRNRMTKKPYSEEKIKINFDNSTLLAGWDLNKESDNTCTLLRKDGNYYLAIIDKRHNKVLKPENLISDGECYEKMEYKLLPGANKMLPKVFFSKSRIAEFNPSETLVKNYENETHKKGDKFNLDDCHALIDFFKESIKKHEDWSKFGFKFSDTSSYEDLSGFYREVEQQGYKITFRNVSARYIDQLVDEGKIYLFQIYNKDFSPFSKGTPNMHTLYWKALFDERNLTDVVY

SEQ ID NO: 147 - protein, 1339 aa, unidentified
  REGION 1..1339: note = Category: MG28 effectors
  REGION 1..1339: note = Description: MG28-7 effector
  source 1..1339: note = uncultivated organism sequence
MKNLKQFVGLYPVSKTLRFELKPVGNTKENIERNGILEKDNQRAVGYKAIKKVIDEYHKAFIEQMLNEFELNLSNDGNLDSLEEFFLLYHLSSNDPTRDNITKVQESLRKKISERFTKSEQYKRLFGKELIREDLAQFVETPRYESFIRSQKGNENLSDDEVRQIQNEIIQEIGQFRDFTTYFSGFYENRKNLYVADDKATSIANRMINENLPKFIDNMDVFEKIAASEVAIHFDTLYKEMEAYLNVKSIEEMFQLDYFSIVLTQKQIDVYNSIIGGKTLEDGTKILGLNEYVNLYNQQQNNKDNRLPKLKPLFKQILSERNAISWLPDEFASDNEMLESIERCYQDLRKQVFEGENSLKELLKGIVDYDLEHIYLPDDLQLTNISQKHYGNWSVIKKAHEEYLRKEMQENLMVNKPQRRNESDENYQERIQELLKTKKYEESIEKQLKVNDSFSLAQINRLMSIYQGEDSKPIELYFATMGAEEIGNEKKPNLFIRIENAYTEVKTLLTTAYPKDRKLSQDKANVEKIKNLLDAIKNLQHFVKPLLGKGTEGEKDNHFYGEFTPLWEALDQITPLYNMVRNRMTQKPYSDEKIKLYFDNNGSFLNGWVDSKTESDNATQYGGYLFRKRNSIGEYDYFLGVSAATKLFRSFNSVEASDRSSYERLDYYQLKGKTFYGTLYKGNYETESANIRHAIDNLVYHAGSISIKEKINAERMKKQPKVSTAIGYLKYIMQQDCELYDILLKDDTFEKSNQAIMASMKATLLSLDRIPSAKEYAQRNYKLFSEMMDDIDMLLQGKVFSYFPVSQRELDETVNRTTKPLYLFKITNKDLSYAETHEKGLRKSRGSDNLHTMYFKALMSGCQDVFDIGSGSMFFREHKLVYTEDQLKKGHHYDMLKDKFNYPIVSKKRYAFDKFQFHLSVTMNYNSNKSKDINPMVNDYLKESNATHIIGIDRGERHLLYLSLIDLNGNIIEQYSLNKIANEYKGNIYRTDYHELLDAKEKQRDEARRSWMSIENIKELKEGYMSQVIHKIAELMVKYNAIVVLEDLNLGFMRGRQKVEKQVYQKFEKMLIDKLNYLVDKKIDANVLGGVQKAYQLANKFESFQKLGKQSGFLFYIPAWNTSKMDPTTGFVNLLDTRYENMAKAKAFFAKFKSIQFNAIKGWFEFAFDYDDFTTKAVGTKTQWTLCTYGTRVETKRDAKQNNMFVSEEFNLTSKFKELFVLYKIDLNENLREQICSQSEAIFFQKLLHLLRLTLQMRNSITGTEVDYLISPVMNASGGFYDSRKCGKNLPENADANGAYNIARKGLWIIEQIKQSNDLSKLKLAISNKEWLRYAQGVD

SEQ ID NO: 148 - protein, 1339 aa, unidentified
  REGION 1..1339: note = Category: MG28 effectors
  REGION 1..1339: note = Description: MG28-8 effector
  source 1..1339: note = uncultivated organism sequence
MKNLKQFVGLYPVSKTLRFELKPVGNTKENIERNGILEKDNQRAVGYKAIKKVIDEYHKAFIEQMLNEFELNLSNDGNLDSLEEFFLLYHLSSNDPTRDNITKVQESLRKKISERFTKSEQYKRLFGKELIREDLAQFVETPRYESFIRSQKGNENLSDDEVRQIQNEIIQEIGQFRDFTTYFSGFYENRKNLYVADDKATSIANRMINENLPKFIDNMDVFEKIAASEVAIHFDTLYKEMEAYLNVKSIEEMFQLDYFSIVLTQKQIDVYNSIIGGKTLEDGTKILGLNEYVNLYNQQQNNKDNRLPKLKPLFKQILSERNAISWLPDEFASDNEMLESIERCYQDLRKQVFEGENSLKELLKGIVDYDLEHIYLPDDLQLTNISQKHYGNWSVIKKAHEEYLRKEMQENLMVNKPQRRNESDENYQERIQELLKTKKYEESIEKQLKVNDSFSLAQINRLMSIYQGEDSKPIELYFATMGAEEIGNEKKPNLFIRIENAYTEVKTLLTTAYPKDRKLSQDKANVEKIKNLLDAIKNLQHFVKPLLGKGTEGEKDNHFYGEFTPLWEALDQITPLYNMVRNRMTQKPYSDEKIKLYFDNNGSFLYGWVDSKTESDNATQYGGYLFRKRNSIGEYDYFLGVSAATKLFRSFNSVEASDRSSYERLDYYQLKGKTFYGTLYKGNYETESANIRHAIDNLVYHAGSISIKEKINAERMKKQPKVSTAIGYLKYIMQQDCELYDILLKDDTFEKSNQAIMASMKATLLSLDRIPSAKEYAQRNYKLFSEMMDDIDMLLQGKVFSYFPVSQRELDETVNRTTKPLYLFKITNKDLSYAETHEKGLRKSRGSDNLHTMYFKALMSGCQDVFDIGSGSMFFREHKLVYTEDQLKKGHHYDMLKDKFNYPIVSKKRYAFDKFQFHLSVTMNYNSNKSKDINPMVNDYLKESNATHIIGIDRGERHLLYLSLIDLNGNIIEQYSLNKIANEYKGNIYRTDYHELLDAKEKQRDEARRSWMSIENIKELKEGYMSQVIHKIAELMVKYNAIVVLEDLNLGFMRGRQKVEKQVYQKFEKMLIDKLNYLVDKKIDANVLGGVQKAYQLANKFESFQKLGKQSGFLFYIPAWNTSKMDPTTGFVNLLDTRYENMAKAKAFFAKFKSIQFNAIKGWFEFAFDYDDFTTKAVGTKTQWTLCTYGTRVETKRDAKQNNMFVSEEFNLTSKFKELFVLYKIDLNENLREQICSQSEAIFFQKLLHLLRLTLQMRNSITGTEVDYLISPVMNASGGFYDSRKCGKNLPENADANGAYNIARKGLWIIEQIKQSNDLSKLKLAISNKEWLRYAQGVD

SEQ ID NO: 149 - protein, 756 aa, unidentified
  REGION 1..756: note = Category: MG28 effectors
  REGION 1..756: note = Description: MG28-9 effector
  source 1..756: note = uncultivated organism sequence
MKQFTNLYQVQKTLRFELRPVGRTKENIEKNGILERDNLRAIGYKSIKKVIDEYHKAFIEMMLNDFKLNMADSGQFNSLEELYMLYHLPSNDPARKEKMVKVQEALRKSISDLFTKSEQYKRLFGKELIREDLEPFVRTLQFEEYIRSQKGNENLSDEEVHQIQDEVVQDIAQFRDFTTYFAGFYENRKNMYVADDKATSIANRMINENLPKFIDNMDIFEKIAASDVAKNFDVLYKEMEAYLNVNSIAEMFRLDYFSMVLTQRQIDVYNAIIGGKTEKDGRKIQGLNEYINLYNQQQKDKANRLPKLKPLFKQILSERNAISWLPDEFSSDNEMLESIGKCYQDLKAQVFDGESSLKALLKKINEYDLEHIYLPNDLQLTNVAQRWYGSWSVIQNAYTESLKTANPPKRNETTEKYEARIEKLQKAIDSLSLAQINRLMNGYLGEEYKPVEQYFSTMGAEDDGDVQKPNLFIRIENAYTEVQSLLRTSYPEGRSLSQDKANVEKIKNLLDAIKDLQRFVKPLMGRGTESEKDNRFYGDFAPLWETLDQITPLYNMVRNRMTQKPYSDEKIKLNFDNSTLLAGWDLNKETDNTCTLLRKDGLYYLVIINKQHNRVLMAENLSADGDCYEKMVYKQLGQISQQLPRIAFSNSWQQRISIPADVLRIKKTESFKTNNEDLQKLIAFYKYFISQHEEWNTFFKIKFTDKADYKNLPEFYSEVDSLFYSLNFSKVSVAYINQLVDEGKIYLFQIYNKDFS

SEQ ID NO: 150 - protein, 1271 aa, unidentified
  REGION 1..1271: note = Category: MG28 effectors
  REGION 1..1271: note = Description: MG28-10 effector
  source 1..1271: note = uncultivated organism sequence
MKSYSDFTGLYLLSKTLRFELKPIGKTKENIERNGILERDNQRAVGYKAIKKVIDEYHKTFIEQMFDSFELKLEDEGRMNSLEEFYFLYHLPITDTKRKDNLSKVQEALRKQISERFTKSEQYKRLFGKELIREDLAEFVKTPKYEEIIRSQQGNENLTEEEIRKIQEEVEKTIDQFYDFTTYFVGFYDNRKNMYVADDKATSIAHRMIGENLPKFIDNMDVFEKIAASDVATHFEALYKAMEPYLNVNSISEMFQLGYFSMVLTQKQIDVYNAIIGGMVLDDGAKIQGLNEYVNLYNQQQKDKSNRLPKLKPLFKQILSECNAISWLPDEFESDNNMLESIEKCYQDLKNQVFEGENSLKNLLKNIGEYDLEHIYLPDDLQLTDIAQKHYGNWSMIKKALEEDVKAKNPQKRNETVEKYEERIEKLLKANECYSLAQINRLMKVYLGDEYKPIETYFAALGAEDNENGQKPNLSIRIENAHTEASNLLISTYPVDRKLSQDKANVERIKNLLDAIKDLQHFVKPLLGKGTESEKDNRFYGEFVPLWERLDQITPLYNMVRNRMTQKPYSEEKIKINFDNSTLLAGWDLNKEADNTCIILRKDGNYYLAIMDKRNNKVFETKNLVSEGDCYEKMEYKLLPGANKMLPKVFFSKSRMDEFKPSAQLLRNYERGTHKKGDNFSLDDCHALIDFFKESIEKHEDWSKFGFKFSDTKTYEDLSGFYREVEQQGYKISFRNVSVEYINRLVDEGKIYLFQIYNKDFSTYSKGTPNLHTLYWKMLFDERNLADVVYKLNGEAEVFFRKHSIEAEKPTHLANKPIENKNKLNEKKTSVFEYDLVKDRRYTVDKFQFHVPITMNFKAAGLNNINPLVNVYLKESNVTHIIGIDRGERHLLYLSLIDLQGNIVEQYSLNEIVNEYKGNTYRTNYHDLLDAKERQRDEARRSWQTIENIKELKEGYMSQVIHKIAELMVKYNAIVVLEDLNFGFMRGRQKVEKQVYQKFEKMLIDKLNYLVDKKCEADEMGGVFNAYQLTNKFESFQKLGKQSGFLFYIPAWNTSKMDPTTGFVNLLDTRYENMAKAKAFFGKFRSIRYNAAKGWFEFAFDNDDFNTKATGTRTQWTLCTYGTRIETKRDPKQNSNFVSEEFDLASRFKDLFDQYDIDLKGNLMEQICSQNDAAFFKELLHLLHLTLQMRNSITGTEVDYLISPVMNDNGEFYDSRKCGKNLPLNADANGAYNIARKGLWIIEQIKQTEDLSKLKLAISNKEWMRYAQGLE

SEQ ID NO: 151 - protein, 1271 aa, unidentified
  REGION 1..1271: note = Category: MG28 effectors
  REGION 1..1271: note = Description: MG28-11 effector
  source 1..1271: note = uncultivated organism sequence
MKSYSDFTGLYLLSKTLRFELKPIGKTKENIERNGILERDNQRAVGYKAIKKVIDEYHKTFIEQMFDSFELKLEDEGRMNSLEEFYFLYHLPITDTKRKDNLSKVQEALRKQISERFTKSEQYKRLFGKELIREDLAEFVKTPKYEEIIRSQQGNENLTEEEIRKIQEEVEKTIDQFYDFTTYFVGFYDNRKNMYVADDKATSIAHRMIGENLPKFIDNMDVFEKIAASDVATHFEALYKAMEPYLNVNSISEMFQLGYFSMVLTQKQIDVYNAIIGGMVLDDGAKIQGLNEYVNLYNQQQKDKSNRLPKLKPLFKQILSECNAISWLPDEFESDNNMLESIEKCYQDLKNQVFEGENSLKNLLKNIGEYDLEHIYLPDDLQLTDIAQKHYGNWSMIKKALEEDVKAKNPQKRNETVEKYEERIEKLLKANECYSLAQINRLMKVYLGDEYKPIETYFAALGAEDNENGQKPNLSIRIENAHTEASNLLISTYPVDRKLSQDKANVERIKNLLDAIKDLQHFVKPLLGKGTESEKDNRFYGEFVPMWETLDQITPLYNMVRNRMTQKPYSEEKIKINFDNSTLLAGWDLNKEADNTCIILRKDGNYYLAIMDKRNNKVFETKNLVSEGDCYEKMEYKLLPGANKMLPKVFFSKSRMDEFKPSAQLLRNYERGTHKKGDNFSLDDCHALIDFFKESIEKHEDWSKFGFKFSDTKTYEDLSGFYREVEQQGYKISFRNVSVEYINRLVDEGKIYLFQIYNKDFSTYSKGTPNLHTLYWKMLFDERNLADVVYKLNGEAEVFFRKHSIEAEKPTHLANKPIENKNKLNEKKTSVFEYDLVKDRRYTVDKFQFHVPITMNFKAAGLNNINPLVNVYLKESNVTHIIGIDRGERHLLYLSLIDLQGNIVEQYSLNEIVNEYKGNTYRTNYHDLLDAKERQRDEARRSWQTIENIKELKEGYMSQVIHKIAELMVKYNAIVVLEDLNFGFMRGRQKVEKQVYQKFEKMLIDKLNYLVDKKCEADEMGGVFNAYQLTNKFESFQKLGKQSGFLFYIPAWNTSKMDPTTGFVNLLDTRYENMAKAKAFFGKFRSIRYNAAKGWFEFAFDNDDFNTKATGTRTQWTLCTYGTRIETKRDPKQNSNFVSEEFDLASRFKDLFDQYDIDLKGNLMEQICSQNDAAFFKELLHLLHLTLQMRNSITGTEVDYLISPVMNDNGEFYDSRKCGKNLPLNADANGAYNIARKGLWIIEQIKQTEDLSKLKLAISNKEWMRYAQGLE

SEQ ID NO: 152 - protein, 1270 aa, unidentified
  REGION 1..1270: note = Category: MG28 effectors
  REGION 1..1270: note = Description: MG28-12 effector
  source 1..1270: note = uncultivated organism sequence
MNDLTQFTNLYSLSKTLRFELKPVGKTQENIEKNGILERDNQRAVGYKSVKKVIDEYHKAFIERILNDYERKLDDLQRSVWEDSLNEFYRLYHLPTSTPKRKDDLSKVQETLRKQISDCFKKDRQYGRLFGKELIREDLAEFVTTPLFEDYIISQKDNENLSADEIRKIQEGIIQDLSQFNDFTVYFSGFHENRRNMYVPDSKTTSIAHRMIDENLPKFIDNMDVFEKIAASEVAQHFGVLYKEMEPYLNVNEIPELFKLPYFSMVLTQNQIDVYNAIIGGMVLDDGTKIQGLNEYVNLYNQQQKDKTKRLPKLKPLFKQILSERNAISWLPDEFNSDNEMLQGIEKCYQDLREHVFEGDHSLKALLHNIGDYDLAHIYIPNDLQLTDISQKHFGSWSLIKAAIEEDLKSRTPVKRNESGEKYDERVAKTLKGIDSFSIADINRMMQAKVDDFKPVEAYFAQMGAEDNGNGQKLNHFARIENAYTDVKALLNTEYPKGKALSQDKKNVEKIKNLLDAIKDLQHFVKPLLGSGSESEKDSQFYGEFTPLWEMLNDITPLYNMVRNRMTSKPYSEEKIKVNFDNSTLLAGWDLNKEVDNTCTLLRKEGNYYLAIINKRHSRVLLPEYLVAEGDCYEKMVYKQLGQISQQLPRIAFSNSWQQKIKIPEEILKIKKTESFKTDKDDLQKLIAFYKFFLSQHEEWNSFFNIHFSNKTYYNNLAEFYSEVDSLFYSLSFTNVSVSYINQLVEEGKLYLFQIYNKDFSPYSKGTPNMHTLYWKMLFDERNLADVVYKLNGGAEVFFRKHSIKVDKPTHPANHPIANKNTQNKKKESVFAYDLIKDRRYTVDKFQLHVPITVNYKAIGLNNINPVVNAYLKDSKATHIIGIDRGERHLLYLSLIDLKGNIVEQYSLNEIVNEYNGNTYRTNYHDLLDAKEGKREEARRSWMEIENIKELKEGYMSQVIHKIAQLMVKYNAIVVLEDLNMGFMRGRQKVEKQVYQKFEKMLIDKLNYLVDKQCDAAELGGVLNAYQFTNKFESFQKMGKQSGFLFYIPAWNTSKMDPTTGFVNLLDTRYENMAKAKAFFGKFKSIRYNAKKVLFEFTFDYDDFTTKAADTRTQWTLCTYGTRIETKRDPKQNNNFVSEEFDLTDKFKELLAKHNIGIDGNLLEKICSQSDAAFFKELLHLLHLTLQMRNSITGTDTDYLISPVMNANGEFFDSRKCGKNLPENADANGAYNIARKGLWIIDQIKHSDDLSRLKLAISNKEWLQYAQKMV

SEQ ID NO: 153 - protein, 1280 aa, unidentified
  REGION 1..1280: note = Category: MG28 effectors
  REGION 1..1280: note = Description: MG28-13 effector
  source 1..1280: note = uncultivated organism sequence
MNNFTNLYPVDLTLRNSLIPIGETFKNMTMHSYIEHDEQRAEAYKLVKGIIDDYHRAFIDSRLASFEFRIESHGTLDSIEEFTTLYNIKRDEKRDKEFTTVKQNLRKAISQRLTKCDAFARINKRELIREDLPYFIDSLDISEEEKAEKKKLVEQFAKFATYFSNFHTNRANMYVADEKSTSIAYRLINQNLPVFLDNMKVFAMLKALGFEDALSIIYSDMKEKLNVLSLDELFQQDYYSMLLTQRQITVYNEVIGGRSTKDGEKIKGLNEYINQYNQEHPIARIPFLRPLYKQILSDRVSMSWLPDSFINDEEMIRAINIFYQNIHPLLWGPMEDAGEPLKNILSQIDTFDTEHIFITNDSALTNISQRLFGQYNVITDALLSRLSQEMPRKRGRKPESDEAYNERLRKTFKAIKSFSISEINESLKSYMDEGTYIDISSYFRAMDERNDEYIQQANMFIRIENAYTEAKPFLNELRASNSSYNQDDDAIKYIKVLLDAYKSLQRFINPLVGSGEESSKDDMFYGEFMPIVEELKNLTPLYNKVRNWLTRKPYSDEKFKVNFDNSSFLSGWPQDYETKGGYIVEHNGLYYLFINEVKLDEAQVKFLCDHPDADNATRILLDFQKPDNKNIPRLFIRSKGENFAPAVEKYALPIASVLDIYDQGKFKTEYRSVNPDDYYRSLHKLIDYFKLGFTRHESYKHYSFQWKPTNEYKDISQFYHDVEVSCYQLKRVPINWNHLQELVIQGSVYLFQIYNKDFSTRSKGKGTPNLHTLYWRMLFDERNTKDLVYKLNGQAEIFFRRASIKPENQVIHQANQPIENKNPLRKAIKPNSTFSYKITKNRRFTLDHFEFHAPITMNFKAPGITNINPLVIDKIRKSEITHVIGIDRGERHLLYLSLIDLKGNIIKQMTLNTITNKWAGGEIATDYQALLDQKEGDRLEARRNWKTIENIKELKEGYLSQAIHLIAQLIVENKAILVLEDLNTHFMHGRQKVEKQVYQRFERQLITKLNYYVDKKKDADAAGGLLHALQLTNKFESFEKLGKQSGFLFYVPAWNTSKIDPVTGFVNLLNLHYETREKASLFFSKFKCISFNTEKNWFEFVMDYNEFTKKADGTRTNWTLCTFGERIETFRNPQANLQWDNRTINLTQAFKDLFQDYGIDIYGNLKNQICSQQKAKFFEQLLHLMKLMLQMRNSKKNSTSAEDDYILSPVADDNGVFYDSRFCSESLPRDADANGAYNIARKGLWIIKKIQASSADERLNLTITNKEWLNFVQIKQYLND

SEQ ID NO: 154 - protein, 1280 aa, unidentified
  REGION 1..1280: note = Category: MG28 effectors
  REGION 1..1280: note = Description: MG28-14 effector
  source 1..1280: note = uncultivated organism sequence
MNNFTNLYPVDLTLRNSLIPIGETLKNMTMHSYIEHDEQRAEAYKLVKGIIDDYHRAFIDSRLASFEFRIESHGTLDSIEEFTTLYNIKRDEKRDKEFTTVKQNLRKAISQRLTKCDAFARINKRELIREDLPYFIDSLDISEEEKAEKKKLVEQFAKFATYFSNFHTNRANMYVADEKSTSIAYRLINQNLPVFLDNMKVFAMLKALGFEDALSVIYSDMKEKLNVLSLDELFQQDYYSMLLTQRQITVYNEVIGGRSTKDGEKIKGLNEYINQHNQEHPTARIPFLRPLFKQILSDRVSMSWLPDSFINDEEMIRAINIFHQNIYPLLWGPMEDAGEPLKNILSQIDTFDTEHIFITNDSALTNISQRLFGQYNVITDALLSRLSQEMPRKRGRKPESDEAYNERLRKSFKAIKSFSISEINESLKSYMNEGTYIDISSYFRAMDERNDEYIQQANMFIRIENAYTEAKPFLNELRASNSSYNQDDDAIKYIKVLLDAYKSLQRFINPLVGSGEESSKDDMFYGEFMPIVEELKNLTPLYNKVRNWLTRKPYSDEKFKVNFDNSSFLSGWPQDYETKGGYIVEHNGLYYLFINEVKLDEAQVKFLCDHPDADNATRILLDFQKPDNKNIPRLFIRSKGENFAPAVEKYALPIASVLDIYDQGKFKTEYRSVNPDDYYRSLHKLIDYFKLGFTRHESYKHYSFQWKPTNEYKDISQFYHDVEVSCYQLKRVPINWNHLQELVRQGSVYLFQIYNKDFSTRSKGKGTPNLHTLYWRMLFDERNTKDLVYKLNGQAEIFFRRASIKTENQVIHQANQPIENKNPLRKAIKPNSTFSYKITKNRRFTLDHFEFHAPITMNFKAPGITNINPLVIDKIRKSEITHVIGIDRGERHLLYLSLIDLKGNIIKQMTLNTITDKWAGGEIATDYQALLDQKEGDRLEARRNWKTIENIKELKEGYLSQAIHLIAQLIVENKAILVLEDLNTHFMHGRQKVEKQVYQQFEKQLITKLNYYVDKKKDADTAGGLLHALQLTNKFESFEKLGKQSGFLFYVPAWNTSKIDPVTGFVNLLNLHYETREKASLFFSKFKCISFNTEKNWFEFVMDYNEFTKKADGTRTNWTLCTFGERIETFRNPQANLQWDNRTINLTQAFNDLFQDYGIDIYGNLKNQICSQQKAKFFEQLLHLMKLMLQMRNSKKNSTSAEDDYILSPVADDNGVFYDSRSCSESLPRDADANGAYNIARKGLWIIKKIQASSADERLNLTITNKEWLNFVQTKQYLND

SEQ ID NO: 155 - protein, 1280 aa, unidentified
  REGION 1..1280: note = Category: MG28 effectors
  REGION 1..1280: note = Description: MG28-15 effector
  source 1..1280: note = uncultivated organism sequence
MNNFTNLYPVDLTLRNSLIPIGETLKNMTMHSYIEHDEQRAEAYKLVKGIIDDYHRAFIDSRLASFEFRIESHGTLDSIEEFTTLYNIKRDEKRDKEFTTVKQNLRKAISQRLTKCDAFARINKRELIREDLPYFIDSLDISEEEKAEKKKLVEQFAKFATYFSNFHTNRANMYVADEKSTSIAYRLINQNLPVFLDNMKVFAMLKALGFEDALSVIYSDMKEKLNVLSLDELFQQDYYSMLLTQRQITVYNEVIGGRSTKDGEKIKGLNEYINQHNQEHPTARIPFLRPLYKQILSDRVSMSWLPDSFINDEEMIRAINIFHQNIHPLLWGPMEDAGEPLKNILSQIDTFDTEHIFITNDSALTNISQRLFGQYNVITDALLSRLSQEMPRKRGRKPESDEAYNERLRKTFKAIKSFSISEINESLKSYMDEGTYIDISSYFRAMDERNDEYIQQANLFIRIENAYTEAKPFLNELRASNSSYNQDDDAIKYIKVLLDAYKSLQRFINPLVGSGEESSKDDMFYGEFMPIVEELKNLTPLYNKVRNWLTRKPYSDEKFKVNFDNSSFLSGWPQDYETKGGYIVEHNGLYYLFINEVKLDEAQVKFLCDHPDADNATRILLDFQKPDNKNIPRLFIRSKGENFAPAVEKYALPIASVLDIYDQGKFKTEYRSVNPDDYYRSLHKLIDYFKLGFTRHESYKHYSFQWKPTNEYKDISQFYHDVEVSCYQLKRVPINWNHLQELVIQGSVYLFQIYNKDFSTRSKGKGTPNLHTLYWRMLFDERNTKDLVYKLNGQAEIFFRRASIKPENQVIHQANQPIENKNPLRKAIKPNSTFSYKITKNRRFTLDHFEFHAPITMNFKAPGITNINPLVIDKIRKSEITHVIGIDRGERHLLYLSLIDLKGNIIKQMTLNTITDKWAGGEIATDYQTLLDQKEGDRLEARRNWKTIENIKELKEGYLSQAIHLIAQLIVENKAILVLEDLNTHFMHGRQKVEKQVYQQFEKQLITKLNYYVDKKKDADTAGGLLHALQLTNKFESFEKLGKQSGFLFYVPAWNTSKIDPVTGFVNLLNLHYETREKASLFFSKFKCISFNTEKNWFEFVMDYNEFTKKADGTRTNWTLCTFGERIETFRNPQANLQWDNRTINLTQAFNDLFQDYGIDIYGNLKNQICSQQKAKFFEQLLHLMKLMLQMRNSKKNSTSAEDDYILSPVADDNGVFYDSRSCSESLPRDADANGAYNIARKGLWIIKTIQASSADERLNLTITNKEWLNFVQTKQYLND

SEQ ID NO: 156 - protein, 1259 aa, unidentified
  REGION 1..1259: note = Category: MG28 effectors
  REGION 1..1259: note = Description: MG28-16 effector
  source 1..1259: note = uncultivated organism sequence
MNYSDFTGLYPLSKTLRFELKPIGKTKENIEKHGILERDSERAIAYKAVKKVMDEYHKVFIDSMLNDFELDMSTLDEFYYLYHLPSADQKRKTDLSKIQETLRKQISERFTKSEQYKRLFGKELIREDLAEFVKTPQYENVIREMPGNENLTDEAVKRFQESLQKDIAQFDDFTTYFVGFYDNRKNMYVADDKATSIAHRMIDENLPKFVDNMDVFDKIAASDVAMHFEELYKAMEPYLNVNEIAEMFRLDYFSTVLTQKQIDVYNAIIGGKVLNDGTKVQGLNEYVNLFNQSQKDKSKRLPKLKPLFKQILSERNAISWLPDEFESDNEMLHSIEKCYQDLKEHVFDLLKTLLGSVKDYNLEHIYLPNDLQLTDIAQKHFGSWSVIRNAVVEDLKANNPQKRKEDVEEYEKRMAKLHDSYSIAYLNGIMQGKVEDFKPIEDYFEGMGAEDNDNGQKLNHFARIWNAYTEIKSLLNTDYPKDKNLSQDKANVEKIKNLLDAIKDLQHFVKPLLGSGTESEKDSQFYGEFVPLWETLDQITPLYNMVRNRMTQKPYSNEKIKLNFDNSTLLAGWDLNKEADNTCTLLRKDDNYYLVIIDKRNNKVLKPENLVSEGDCYEKMEYKLLPGANKMLSKVFFSKSRIDEFKPSESVLRNYKNETHKKGDNFNLDDCHALIDFFKKSINKHEDWSKFGFRFSDTSSYEDLSGFYREVEHQGYKISFCNVSVDYINHLVEEGKIYLFQIYNKDFSPYSKGTPNMHTLYWRMLFDERNLADVVYKLNGKAEVFFRKRSIKVDQPTHPANKPIANKNFQNEKKESVFSYDLVKDRRYSVDKFQFHVPITMNFKAVGLNSINPLVNDYLKGSNATHIIGIDRGERHLLYLSLIDMKGNIVEQYSLNEIVNEYKGNTYRTNYHDLLDAKEKQRDEARRSWQTIENIKELKEGYMSQVIHKIAELMVRYNAIVVLEDLNMGFMRGRQKVEKQVYQKFEKMLIDKLNYLVDKKLDADEMGGVLNAYQLTNKFESFQKLGKQSGFLFYIPAWNTSKMDPTTGFVNLLDTRYENMEKSRVFFGKFDSIQYNSVKGWFEFVLDYNRFTTKAEGTRTRWTLCTYGTRIETRRNSEKNNEFDSVEFDLTTRFKELFSKYQIDLNGNLKEHICNQRDAAFFKEMLHLLHLTLQMRNSRINSDVDYLLSPVMNASGEFYDSRTCGKNLPENADANGAFNIARKGLWIIEQIKKTRDVDLAKIKLAISNKEWLRYAQGQD

SEQ ID NO: 157 - protein, 1256 aa, unidentified
  REGION 1..1256: note = Category: MG28 effectors
  REGION 1..1256: note = Description: MG28-17 effector
  source 1..1256: note = uncultivated organism sequence
MSDFKEFIGLYPLSKTLRFELIPQGKTLQNFKASGILERDEHRAESYKKMKDIIDEYHRFVIDESMNCFKLKLDNVGKYDSLEDYYTYYVIGKKSETEKKKFTDIQSNLRKQIVDQLKSNPHFGNLFKKELIKNDLIEYLGEDNENLPTVKEFADFTTYFSGFNQNRANMYSSEEKSTSIAYRLINQNLPRFVDNIGVYDRIKTTSIAEELNKVYSSFVEYLNVNKLDELFQLSYYNTLLTQRQIDVYNAVVGGRVTQDGEKILGLNELINLYNQKKEKKDRVPKFKILYKQILSEREAISFLPQVFSSDQETLAAVKDFYNAVKVVVIDKIKDMLSNIDSYDMSHVFIKNDNMFLSEISQKLYSDWGYINKSIIAYYKSVNAQKGKESFEKYESRISKLIKVRDSFSLRELDEYIHKLNPSYPKVESYFSSLGAINNVEQQKEDIFLQIENAYSESETLLNNPYPAENNLASDKKNVELLKDLLDRIKALQWFVKPLLGNGDEFGKDATFYGEFDPLYKELNDITPVYDKVRNRMTRKPYSDEKIKLNFDNSMLLGGWDQNKEKDYMSIILEKDGLFYLGIMNKIHNKVFLQSEIKTEGPCYKKMVYKLIPGPNKELPHVFLSAKGINIYKPSQEMLENYEKGTHKKNSDNFNINDCRKLIDYFKASIEKNNDWNKFEFCFSDTSSYKDISEFYKEVHDQAYKMSFCDVAVSYVDKLVNEGKLFLFKIYNKDFSTYSKGTPNMHTLYWKSVFSPDNLKSIVYQLNGQAELFYRKSSIKGNDMIIHPSGKGIANKNISNEKRESKFNYDIIKDKRYTVDKFQFHVPITINYKGRDQLINESANQYIKDNNIKHIIGIDRGERNLLYLSLIDMNGHIVKQFSLNEIINDYADNKYIVDYHNLLDVKEGDREEARRNWQTIEGIKELKEGYLSQVIHRICNLMIDYNAIVVLENLNIGFMRGRQKVEKQVYEKFEKMLIDKLNYLVDKKVSPISDGGVLKGYQLTNKFVSFKAMGDQNGFLFYIPAWNTSKMDPVTGFVNLFDTHYENIDKTRSFFSKFDVILYNKEKNYFEFKFDYKNFTDRAEGTKSNWTLCTQGKRVETFRNPEKNSKWDSKNVNLTEQFKTLFGQYKIDYTGNLKESISLQSEKLFFEELLHLFRLTVQMRNSVSNSDIDYLISPVTNSNGNFFNSEVERKKGKDSKGDWISKLPVDADANGAYNIARKGLWVINQIKQANSGDKIKLAISNKEWLSFAQHFNG

SEQ ID NO: 158 - protein, 1256 aa, unidentified
  REGION 1..1256: note = Category: MG28 effectors
  REGION 1..1256: note = Description: MG28-18 effector
  source 1..1256: note = uncultivated organism sequence
MSNFKEFIGLYPLSKTLRFELIPQGKTLQNFKASGILERDEHRAESYKKMKDIIDEYHRFVIDESMNCFKLKLDNVGKYDSLEDYYTYYVIGKKSETEKKKFTDIQSNLRKQIVDQLKSNPHFGNLFKKELIKNDLIEYLGEDNENLPTVKEFADFTTYFSGFNQNRANMYSSEEKSTSIAYRLINQNLPRFVDNIGVYDRIKTTSIAEELNKVYSSFVEYLNVNKLDELFQLSYYNTLLTQRQIDVYNAVVGGRVTQDGEKILGLNELINLYNQKKEKKDRVPKFKILYKQILSEREAISFLPQVFSSDQETLAAVKDFYNAVKVVVIDKIKDMLSNIDSYDMSHVFIKNDNMFLSEISQKLYSDWGYINKSIIAYYKSVNAQKGKESFEKYESRISKLIKVRDSFSLRELDEYIHKLNPSYPKVESYFSSLGAINNVEQQKEDIFLQIENAYSESETLLNNPYPAENNLASDKKNVELLKDLLDRIKALQWFVKPLLGNGDEFGKDATFYGEFDPLYKELNDITPVYDKVRNRMTRKPYSDEKIKLNFDNSMLLGGWDQNKEKDYMSIILEKDGLFYLGIMNKIHNKVFLQSEIKTEGPCYKKMVYKLIPGPNKELPHVFLSAKGINIYKPSQEMLENYEKGTHKKNSDNFNINDCRKLIDYFKASIEKNNDWNKFEFCFSDTSSYKDISEFYKEVHDQAYKMSFCDVAVSYVDKLVNEGKLFLFKIYNKDFSTYSKGTPNMHTLYWKSVFSPDNLKSIVYQLNGQAELFYRKSSIKGNDMIIHPSGKGIANKNISNEKRESKFNYDIIKDKRYTVDKFQFHVPITINYKGRDQLINESANQYIKDNNIKHIIGIDRGERNLLYLSLIDMNGHIVKQFSLNEIINDYADNKYIVDYHNLLDVKEGDREEARRNWQTIEGIKELKEGYLSQVIHRICNLMIDYNAIVVLENLNIGFMRGRQKVEKQVYEKFEKMLIDKLNYLVDKKVSPISDGGVLKGYQLTNKFVSFKAMGDQNGFLFYIPAWNTSKMDPVTGFVNLFDTHYENIDKTRSFFSKFDVILYNKEKNYFEFKFDYKNFTDRAEGTKSNWTLCTQGKRVETFRNPEKNSKWDSKNVNLTEQFKTLFGQYKIDYTGNLKESISLQSEKLFFEELLHLFRLTVQMRNSVSNSDIDYLISPVTNSNGNFFNSEVERKKGKDSKGDWISKLPVDADANGAYNIARKGLWVINQIKQANSGDKIKLAISNKEWLSFAQHFNG

SEQ ID NO: 159 - protein, 1261 aa, unidentified
  REGION 1..1261: note = Category: MG28 effectors
  REGION 1..1261: note = Description: MG28-19 effector
  source 1..1261: note = uncultivated organism sequence
MSNLGQFTGLYPLSKTLRFELKPIGKTQENIEKHGVLERDNERAIAYESVKKVIDEFHKSYIETKLSRLQLELSLLEEFYELYHHQIFDQNRKNKILNVQDSLRKQISDCFTKDDYYKRLFGKELIREDLTEFVNTPYYENVIRSVPGNEHLTDKEIKQIQENKQKEIDQFGAFTTYFVGYYDNRKNMYVPEDKATSIAHRMINENLPKFVDNMDVFEKISKSEVAANFETLYKAMESYLNVNSIEEMFKLDYYSMVLTQKQIDVYNSIIGGMVLEDGTKIKGLNEYVNLFNQQQKDKTRRLPKLKPLFKQILSERNAISWLPEEFENDNEMLQSIEKCYRELKTKVFDGENSLKTLLNNLEDYDLRHIYLPYDLQLTDIAQKHYGNWSLIKKALEDNLKKENPIKRLESNENYEERIARLLKANESVSLAQINSMMGDGNKSIESYFTTMGAEDNEDGKKPNLFVRIETAYLEAEKLLNSTYPIDKSLSQDKDNVDKIKNLLDAIKDLQHFVKPLLGQGTESEKDPRFYGEFVPLWETLDQITPLYNMVRNRMTKKPYSEKKIKINFDNSTLLAGWDLNKEADNTCSILRKEGLYYLVIMDKQHNRVLKPENLPADGECYEKMEYKLLPGANKMLPKVFFSKSRIGEFKPSERIVRNYKNDTHKKGSNFNLDDCHALIDFFKESINKHEDWSKFGFKFSDTETYKDLSDFYHEVEQQGYKISFRKVSVDYINQLVEEGKIYLFQIYNKDFSPYSKGTPNLHTLYWRALFDEKNLADVVYKLNGEAEVFFRKHSLVAKKPTHPANQPIANKNAKNEKKESTFAYDIIKDRRYTVDKFQFHVPITMNFKAAGISNINPLVNAYLKESDAIHIIGIDRGERHLLYLSIIDLEGNIVDQFSLNEIVNEYKGNAYRTNYHDLLDTKEKQRDEARKSWQTIESIKELKEGYVSQVIHKIAELMVKYNAIVVLEDLNFGFIRGRQKVEKQVYQKFENMLIDKLNYLVDKKLDVTEAGGVLNAYQLTNKFESFQKLGKQSGFLFYIPAWNTSKMDPTTGFVNFFDTRYENVEKARLFFGKFKDICYNAKDNWFEFAFDYEDFTTKAAGTKTQWTLCTQGTRVETRRDPTQNNKFVSKELDLTSKFNELFAKYNIDFNGDLKGQICSQNEAQFFRDLLHLLHLTLQMRNSIAGTEEDYLISPVKNANGEFYDSRKCCDNLPINADANGAYNIARKGLWIVDQIKQSDDITKIRLAISNKEWLRYVQGVK

SEQ ID NO: 160 - protein, 1309 aa, unidentified
  REGION 1..1309: note = Category: MG28 effectors
  REGION 1..1309: note = Description: MG28-20 effector
  source 1..1309: note = uncultivated organism sequence
MSNLNQFIGLYPLSKTLRFELKPIGKTKENIEKNGILERDTQRAVGYKVVKKVIDEYHKAFIERILNDFENKLGDDERNDWKNSLQEFYSLYLSPVSDNGRKDKLAKTQERLWKQIANAFKKDWQYNKLFADELIRKDLAEFVSTPFFENYIRSQKGNEDIPDSEVRAIQETITQDINCFRDFTTYFTGFNKNRENMYMADGKATSIAHRMINENLPKFIDNVEVFKKIADCDEIKIHFATLYKAMEQYLNVLTINEMFLLEYFPMVLTQKQIDVYNAVIGGLNEYINLYNQQQKDKSKRLPKLKPLFKQILSERNAISWLPDEFESDNEMLESIEKCYQDLTIQVFCGENSLKSLLINIRDYDLDHIYLPNDSSISTISQKLYGGWSIVGNAITEDIKVSNPQKKKESDEEYEERISKIRKGIECYSVGYLNGVLRDKIKIDNFKPIEDYFLLMGATDDKSDQKPNLFVRIEDAYAEARAILTSPYPEERNLSQDEESIEKIKNLLDTIKELQHFIKPLLGSGSESDRDNNFYGEFIPLWESLDQITALYNMVRNRMTQKPYTDEKIKLYFDNNATFLRGWVDSKTESSDNGTQYGGYLFRRQNAIGEYDYYLGVSKDIKLFRRFKEVEESDKSTYERLDYYQLKSKTFYGTLYKGNYEIESANIKRAIDNVVYLIGSAATKEKVNNEKGKRQPKINTAIGYLKFLQQQDKELYNILLKDKSFQECNKAIIASMKSTLLSLNRIPSAKDYAQKNYVLFSVMMDDIDTLLQEKIFTYFSVSKCELDNAVGRDLRPLYLFKITNKDLSFAETYENGLRKNRGTENLHTMYFKALMSGTQNVFDIGSGAIYFREHKISYTEEQLKRGHHYEMLKGKFSYPIISNKRYAFDKFQFHLSVNLNYNADKNVNINTLVNSYLKESNSTHIIGIDRGERNLLYLSLIDLHGNIVEQYSLNEIGDEYNRTNYHELLDKKENQRKEARLSWQTIESIKELKEGYMSQVIHKIVELMVKYNAIVVLEDLNGGFKRGRQKVEKQVYQKFEKMLIDKLNYLVDKKLAVTEPGGVLKAYQLANKFESSQKRDKQNGFLFYVPAWNTSKMDPTTGFVDLFDTRYVNIAKAKAFFGKFKSIRYDAEKGWIEFAFDYNDFTTKASGTRTQWTLCTQGTRIETKRDPSQNNQFISEEFDLTSRFIELFSQFKIDPDGNLMEQICSQTEATFYKSILHLLHVTLQMRNSKTGTDVDYLISPVMNSHGEFYDSRHCGKDLPNNADANGAYNIARKGLWIIEQIKQSEDFAHLKLAISNKEWLQYAQKE

SEQ ID NO: 161 - protein, 886 aa, unidentified
  REGION 1..886: note = Category: MG28 effectors
  REGION 1..886: note = Description: MG28-21 effector
  source 1..886: note = uncultivated organism sequence
MSNLNQFIGLYPLSKTLSFELKPIGKTKENIEKNGILERDTQRAVGYKVVKKVIDEYHKAFIERILNDFENKLGDDERNDWKNSLQEFYSLYLSPVSDNGRKDKLAKTQERLWKQIANAFKKDWQYNKLFADELIRIDLAEFVSTPFFENYIRSQKGNEDIPDSEVRAIQETITQDINCFRDFTTYFTGFNKNRENMYMADGKATSIAHRMINENLPKFIDNVEVFKKIADCDEIKIYFVTLYKAMEQYLNVLTINEMFLLEYFPMVLTQKQIDVYNAVIGGLNEYINLYNQQQKDKSKRLPKLKPLFKQILSERNAISWLPDEFESDNEMLESIEKCYQDLRSTVFDGNHSLQSLLSSINDYDLNHIYISNDSSISLISQKQYGGWGVIGNAIMENAKAANPQKRNESNEKYEERISKIQKGIDSYSIGYLNDVLRNKLDDFKPIEDYFLKMGGAVDNETEQKPTFFTRIENAYTEAHTLLTSPYPESRQLSQDKKNVEKIKNLLDAIKELQHFVKPLLGQGAESEKDNNFYGEFIPFWELLDQITVLYNMVRNRMTQKPYTDEKIKLYFDNNATFLRGWVDSKTESSDNGTQYGGYLFRRQNAIGEYDYYLGVSKDIKLFRRFKEVEESDKSTYERLDYYQLKSKTFYGTLYKGNYEIESSNIKRAIDNVVNSVGSTSIKGKLYNEKSKRQPKTATAIGYLKFIKQQDEELYNILLKDKSFQECNKAIIASMKSTLLSLNRIPSAKDYAQKNYVLFSAMMDDIDILLQEKIFSYFPVSQRELDEVVERNLRPLYLFKITNKDLSFAENYENGLRKNRGTDNLHTMYFKALMSGAQSVFDIGSGAIYFREHKISYTEEQLKRGHHYEILKDRFSYPIISNKRYAF

SEQ ID NO: 162 - protein, 1261 aa, unidentified
  REGION 1..1261: note = Category: MG28 effectors
  REGION 1..1261: note = Description: MG28-22 effector
  source 1..1261: note = uncultivated organism sequence
MSNLVQFTGLYPLSKTLRFELKPIGKTQENIEKHGVLERDNERAIAYESVKKVIDEFHKSYIETKLSRLQLDLSLLEEFYELYHHQIFDQNRKNKILNVQDSLRKQISDCFTKDDYYKRLFGKELIREDLTEFVNTPYYENVIRSVPGNEHLTDKEIKQIQENKQKEIDQFRDFTTYFVGYYDNRKNMYVPEDKATSIAHRMINENLPKFVDNMDVFEKISKSEVAANFETVYKAMESYLNVNSIEEMFKLDYYSMVLTQKQIDVNNSIIGGMVLEDGTKIKGLNEYVNHFNQQQKDKTCRLPKLKPLFKQILSERNAISWLPEEFENDNEMLQSIEKCYRELKTKVFDGENSLMTLLNNLEDYDLRHIYLPYDLQLTDIAQKHYGNWSLIKKALEDNLKKENPIKRFESNEKYEERIAILLKANESVSLAQINSMMGDGNKPIESYFTTMGAEDNEDGKKPNLFVRIETAYLEAEKLLNSTYPIDKSLSQDKDNVDKIKNLLDAIKDLQHFVKPLLGQGTESEKDPRFYGEFVPLWETLDQITPLYNMVRNRMTKKPYSEKKIKINFDNSTLLAGWDLNKEADNTCSILRKDGLYYLVIMDKQHNRVLKPENLPADGECYEKMEYKLLPGANKMLPKVFFSKSRIGEFKPSERIVRNYKNDTHKKGSNFNLDDCHALIDFFKESINKHEDWSKFGFKFSDTETYKDLSDFYREVEQQGYKISFRKVSVDYINQLVEEGKIYLFQIYNKDFSPYSKGTPNLHTLYWRALFDEKNLADVVYKLNGEAEVFFRKHSLVAKKPTHPANQPIANKNAKNEKKESTFAYDIIKDRRYTVDKFQFHVPITMNFKAAGISNINPLVNAYLKESDAIHIIGIDRGERHLLYLSIIDLEGNIVDQFSLNEIVNEYKGNAYRTNYHDLLDTKEKQRDEARKSWQTIESIKELKEGYVSQVIHKIAKLMVKYNAIVVLEDLNFGFIRGRQKVEKQVYQKFENMLIDKLNYLVDKKLDVTEAGGVLNAYQLTNKFESFQKQGKQSGFLFYIPAWNTSKMDPTTGFVNFFDTRYENVEKARSFFGKFKDICYNAKDNWFEFAFDYEDFTTKAAGTKTQWTLCTQGTRIETRRDPTQNNKFVSEELDLTSKFNELFAKFNIDFNGDLKGQICSQNEAQFFRDLLHLLHLTLQMRNSITGTEEDYLISPVKNANGEFYDSRKCCDNLPINADANGAYNIARKGLWIVEQIKQSDDITKIRLAISNKEWLRYVQGVK

SEQ ID NO: 163 - protein, 1265 aa, unidentified
  REGION 1..1265: note = Category: MG28 effectors
  REGION 1..1265: note = Description: MG28-23 effector
  source 1..1265: note = uncultivated organism sequence
MTMYTNFTRLYSLSKTLRFELKPIGKTKENIEKNGILKRDNERAVAYKAVKKVIDEYHKAFIEMMLNDFELQYEMLEEYNRLYQISNSSEPKKKEKLQKIQENLRKQISDRFTTSEQYKRLFGQELIKEDLSEFVNTSQFEHYIRTQKGNDLSDEEVRQIQKRTLEDIDQFKDFTTYFSGFHQNRKNMYVADDKATAIAHRVVMENLPKFIDNMNTFAEIAESDVAGHFADLYKEMEAYLNVNDIQEMFQLDYFSMVLTQKQIDVYNAIIGGKTLDDGTKIKGLNEYVNLYNQQQTRKEDRLPKLKPLFKQILSERNAISWLPEEFENDNEMLQSIEKCYQDLNAQVFGPLKDLLKNIKDSDLEHIYLPNDLQLTDISQKHFGSWAVINKAVEEDLKTANPQKNRESGEKYEERIAKLLKNTDSYSIGYINGLLKDRIEDFEPLEVYFSNIGAEDDGKQQKLNHFSRIENAYTEAKSLLTAEYPDDKRLSQDKGNVEKIKNLLDAIKDLQHFVKPLLGSGSESDKDSQFYGEFTSLWETLDQITPLYNMVRNRMTQKPYSIEKVKLNFDNSTLLSGWDLNKETDNTCTLLRKGGNYYLAIIDKRNNKVLKPENLVSSGDCFEKMEYKQIALPMGVGAFVRKCYGTAQNYGWRCPKNCLNKEGKIIIKDAEAQPNLIDIIDCYKDFFEKYEKDGFKYKDFRFKFSESSKYERLSDFFGDVESQGYIIRFKNVSVDYINQLVEEGKIYLFQIYNKDFSPYSKGTPNMHTLYWKMLFDEKNLADVVYKLNGEAEVFFRKSSVKENRPTHPANKPIANKNKQNEKKESTFAYDLIKDRRYTVDKFQFHVPITMNFKAKGMNDINLLVNQCLKESVETHIIGIDRGERHLLYLSLIDLQGNIVEQYSLNEIVNEYNGNIYRTNYHDLLDAKEKQRDEARSSWQTIENIKELKEGYMSQVIHKIAQLMLKYNAIVVLEDLNFGFMRGRQKVEKQVYQKFEKMLIDKLNYLVDKKRATNELGGVLNALQLTNKFESFQKLGKQSGFLFYIPAWNTSKMDPTTGFVNLLDTRYENMEKAKAFFGKFDSIRYNPQQDWFEFAFDYNSFHNKAEGTRTQWTLCTYGTRIETKRDAAQNNNFVSTEVDLTQKFKELFTEHQIDINGNLKDQICSQTDVAFFKSLLNLLRLTLQMRNSITGTETDYLISPVQNAKGEFYDSRKCGKNLPENADANGAYNIARKGLWVIEQIKQADDLSNIKLAITNKEWLWFAQRLK

SEQ ID NO: 164 - protein, 1266 aa, unidentified
  REGION 1..1266: note = Category: MG28 effectors
  REGION 1..1266: note = Description: MG28-24 effector
  source 1..1266: note = uncultivated organism sequence
MTSFSKFCGLYPLSKTLRFELKPIGKTKENIEKNGILERDSERATAYKAVKKVIDEFHKSFIELQLNDFELEQSKLEEFYHLYHLPTSDQKRKNDLPKVQESLRKLISERFTKNDYYKRLFGKELIREDLTDFVNTPYYENIIRNVPGNEQLSDEKVKQIQENTIREISQFNDFTTYFVGFYDNRKNMYVAEDKATAIAYRMINENLPKFIDNMDVFEKIAASDVAQHFGELYKEMEPYLNVSEIAEMFHLNYFSTVLTQTQIDVYNAIIGGKTLDDGTKIQGLNEYVNLYNQQQKDKSKRLPKLKPLFKQILSERNAISWLPDEFKNDNEMLQSIEKCYQDLKEQVFGALKQLLTTIKDYNLQHIYLPNDLQLTDISQKQYGSWSVIKNAIIEDLKKTNQPKKKEDAEDFENRLSKLADSYSIAYINQVTGSNIENFKPIEDYFAKMGAEDNENGQKLNHFARIENAYTEIKQLLNSEYPTGKSLSQDKANVEKIKNLLDAIKDLQHFVKPLLGSGTESEKDNSFYGEFTPLWENLDQITPLYNMVRNRMTKKPYSEEKIKINFDNSTLLAGWDLNKEADNTCTLLRKDGNYYLAIIDKRHNKVLKAENLSSDGECYEKMEYKLLPGANKMLPKVFFSKSRIAEFKPSEKIIRNYENETHKKGDKFNLADCHALIDFFKESIKKHEDWSKFGFNFSPTNSYEDLSGFYREVEQQGYKISFRNISVNYINKLVDEGKIYLFQIYNKDFSPFSKGTPNMHTLYWKALFDEKNLADVVYKLNGEAEVFFRKHSLNGAKPTHPANQPIANKNAQNEKKQSTFAYDLIKDRRYTVDKFQFHVPITMNFKAAGINNINPLVNEYLKESNATHIIGIDRGERHLLYLSLIDLKGNIVEQYSLNEIVNEYNGNTYRTNYHNLLDAKEKQRDEARRSWQTIENIKELKEGYMSQVIHKIAELMVKYNAIVVLEDLNLGFMRGRQKVEKQVYQKFEKMLIDKLNYLVDKKLDADATGGVLNAYQLTNTYKVFHDQYKKQQNTIGKQCGFLFYIPAWNTSKMDPTTGFVNLFDTRYENMEKAKAFFGKFDSIRFNSVKGWFEWAFDYDKFTTKAEGTQTKWTLCTYGTRIETKRNPEKNNEFDSVEFDLTERIKELFAKYQIDANGNLKEQICSQTDATFFKELLHLLHLTLQMRNSITGTETDYLISPVMNAKGEFYDSRVCGKDLPENADANGAYNIARKGLWVIEQIKHADDLTKPKLAISNKEWMRYAQGLK

SEQ ID NO: 165 - protein, 1262 aa, unidentified
  REGION 1..1262: note = Category: MG28 effectors
  REGION 1..1262: note = Description: MG28-25 effector
  source 1..1262: note = uncultivated organism sequence
MVKYSDFTGLYPLSKTLRFELKPIGKTKENIERNGILERDNKRAVGYKAVKKVIDEYHKAFIDMMLDDFKLNLTDKGKLDSLEEFYAIYHLSSNDTLRKVNITKVQDSLRKQISDRFTKSEQYKRLFGKELIREDLIEFVQTPQYNAFIRAQQGNDNLSDNDIQQIKEEIIQDISRFKDFTTYFIGFYENRRNMYVADDKATSIGHRMITENLPKFVDNIDVFEKIAASDVASSFKVLYKDMEPYLNVNSLDEMFRLDYYSMVLTQKQIDVYNAIIGGMVLDDGTKIKGLNEYVNLYNQQQKDKANKLPKLKLLFKQILSERNAISWLPEEFESDNDMLKSISQCYQDLKSQVFEGEGSLRVLLQNLNDYDLEHIYLPDDLKLTDIAQKLYGNWSVVKRALEEDFKTKNPQKKNETNEKFEERIDKLLKSNESFSIAQINNLVRASLGEDYKPLESYFMSLGEPNLFVRIQDAYTEVKSLLKTSYPEDKKLSQDKANVERIKNLLDAIKDLQHFVKPLLGKGNESEKDNRFYGEFTPLWEALDQITPLYNMVRNRMTQKPYSEEKVKLNFDNSTLLAGWDLNKEADNTCTILRKDDNYYLAIMDKKNNKVFMQENIVATGDCYEKMEYKLLPGANKMLPKVFFSKSRIGEFKPSDVLMQNYKKETHKKGENFNIDDCHALIDFFKKSIDIHEDWSKFDFHFSDTKKYEDLSGFYREVEQQGYKITFRNVSVDYVNSLVDEGKIYLFQIYNKDFSTYSKGTPNLHTMYWKMLFDERNLADVVYKLNGEAEVFFRKHSIEAVKPTHPANKPIENKNKLNAKKTSVFDYDLIKDRRYTVDKFQFHVPITMNFKASGLNNINPLVNAYLKESNVTHIIGIDRGERHLLYLSLIDMKGNIVEQYSLNEIVNEYKGNTYRTNYHDLLDAKERQRDEARRSWQTIENIKELKEGYMSQVIHKIAELMVKYNAIVVLEDLNLGFMRGRQKVEKQVYQKFEKMLIDKLNYLVDKKRDARETGGVLKAYQLTNKFESFQKLGKQSGCLFYIPAWNTSKMDPTTGFVNLFDTRYENMAKAKAFFSKFKSIRYNAAKDWFEFAFDYDDFTTKAAGTKTKWTLCTYGTRIETKRDPKQNNMFVSEEFKLTDRFKDLFAQYRIDLNENMMEQISLQNDATFFKELLHLLHLTLQMRNSITSTEIDYLVSPVMNAAGEFYDSRRCGKNLPENADANGAYNIARKGLWIIDQIKQADDLSKLKLAISNKEWMRYAQGV

SEQ ID NO: 166 - protein, 957 aa, unidentified
  REGION 1..957: note = Category: MG28 effectors
  REGION 1..957: note = Description: MG28-26 effector
  source 1..957: note = uncultivated organism sequence
NMDVFEKIAASEVAIHFDTLYKEMEAYLNVKSIEEMFQLDYFSIVLTQKQIDVYNSIIGGKTLEDGTKILGLNEYVNLYNQQQNNKDNRLPKLKPLFKQILSERNAISWLPDEFASDNEMLESIERCYQDLRKQVFEGENSLKELLKGIVDYDLEHIYLPDDLQLTNISQKHYGNWSVIKKAHEEYLRKEMQENLMVNKPQRRNESDENYQERIQELLKTKKYEESIEKQLKVNDSFSLAQINRLMSIYQGEDSKPIELYFATMGAEEIGNEKKPNLFIRIENAYTEVKTLLTTAYPKDRKLSQDKANVEKIKNLLDAIKNLQHFVKPLLGKGTEGEKDNHFYGEFTPLWEALDQITPLYNMVRNRMTQKPYSDEKIKLYFDNNGSFLNGWVDSKTESDNATQYGGYLFRKRNSIGEYDYFLGVSAATKLFRSFNSVEASDRSSYERLDYYQLKGKTFYGTLYKGNYETESANIRHAIDNLVYHAGSISIKEKINAERMKKQPKVSTAIGYLKYIMQQDCELYDILLKDDTFEKSNQAIMASMKATLLSLDRIPSAKEYAQRNYKLFSEMMDDIDMLLQGKVFSYFPVSQRELDETVNRTTKPLYLFKITNKDLSYAETHEKGLRKSRGSDNLHTMYFKALMSGCQDVFDIGSGSMFFREHKLVYTEDQLKKGHHYDMLKDKFNYPIVSKKRYAFDKFQFHLSVTMNYNSNKSKDINPMVNDYLKESNATHIIGIDRGERHLLYLSLIDLNGNIIEQYSLNKIANEYKGNIYRTDYHELLDAKEKQRDEARRSWMSIENIKELKEGYMSQVIHKIAELMVKYNAIVVLEDLNLGFMRGRQKVEKQVYQKFEKMLIDKLNYLVDKKIDANVLGGVQKAYQLANKFESFQKLGKQSGFLFYIPAWNTSKMDPTTGFVNLLDTRYENMAKAKAFFAKFKSIQFNAIKGWFEFAFDYDDFT

SEQ ID NO: 167 - protein, 1102 aa, unidentified
  REGION 1..1102: note = Category: MG28 effectors
  REGION 1..1102: note = Description: MG28-27 effector
  source 1..1102: note = uncultivated organism sequence
QYKILFRKQLIRQDLAEFLKTPRCDAYIRSKNSKEILSEDEMKQIQDNIIQEIAQFRDFTTYFSGFYENRRNMYVPDAKATSIANRMINENLPKFVDNIDEFEKIASSEVATHFDTLYKEMEAYLNVNSIAEMFQLDYFSMVLTQKQIDVYNAIIGGKTLEDGTKIQGLNEYVNLFNQQQNEKANRLPKLKLLFKQILSERSAISWLPDVFESDTQMLDSIKKCYQDLRENVFEGRNSLKELLRGISDYDLEHIYLPNDVQLTNIAQKQYGDWSVIKRAFEKITKAQNPQRRNESNEKYEARIVKLQKTYDSFSMAQINNWLTDYMGDTYKSIESYFIALGAEDDGNTQKPNLFIRIENAYTEAKSLLTKVYPKDRKLSQDKINVEKIKNLLDAIKNLQHFVKPLLGRGTESEKDSRFYGDFTPLWETLEQITPLYNMVRNRMTEKPYSDEKIKLYFDNNGSFLNGWVDSKTESDNATQYGGYLFRKLNSIGEYDYYLGVSAATKLFRSFNPVADNDKSCFERLDYYQLKGKTFYGALYKGDYETESANIRHSIDDVVCRSGSALIKEKINFERQKKQPKISTAIGYLKFIRQQDGELYSTLLKDDIFEEANQAIMVSMKATLSSLDRIPFAKEYALRHYILFADMMDDIEVLLQGKVFSYFPISQNELDEAVTRISKPLYLFKITNKDLSFAETHEKGLRKSRGIENLHTMYFKALMSGCQDVFDIGSGSVFFREHKISYTDEQMKRGHHYEMLKDKFNYPIISNKRYAFDKFQFHISITMNYNADKSKDINYITNAYLKESNATHIIGIDRGERHLLYLSLIDLQGNIVDQFSLNEIVKEYNGNTYCTNYHALLEAKENQRDEARRSWQTIENIKELKEGYMSQVIHKIVDLMIKYNAIVVLEDLNLGFKRGRQKVEKQVYQKFEKMLIDKLNYLVDKKLDVKEAGGVLRAFQLTNKFESFQKLGKQSGFLFYIPAWNTSKMDPTTGFVNLLDTRYENMAKAKAFFGKFKSIRFNNSKNWFEFAFDYNDFTTKAEGTKTQWTLCTYSTRIETKRDPMQNNKYVSEEFELTNRFKDLFANTKYNIDLNGNLIEQICSQSDA

SEQ ID NO: 168 - protein, 829 aa, unidentified
  REGION 1..829: note = Category: MG28 effectors
  REGION 1..829: note = Description: MG28-28 effector
  source 1..829: note = uncultivated organism sequence
SFYHLPSSDLTRKANLTKIQDALRKEISDHFIKSEQYKRLFGKDLIREDLAEFVLTPRFEAYIRSKKSKEILSKDEVKRIQDNFIQEIAQFRDFTTYFSGFYENRRNMYVPDAKATSIANRMINENLPKFVDNIDVFERIASSEVATHFDTLYKEMEAYLNVNSIAEMFQLDYFSMVLTQKQIDVYNAIIGGKTLEDGTKIQGLNEYVNLFNQQQNEKTNRLPKLKILFKQILSERSAISWLPDVFESDTQMLESIKMCYQDLKENVLEGRNSLKELLSGISEYDLEHIYLPNDVQLTNIAQNQYGDWSVIKKAFENITKAQNPQRRNESNEKYETRIEKLQKTHDSFSMAQINNWLIDYMGDTYKSIESYFIALGAEDDGNTQKPNLFIRIENAYTEAESLLTKVYPKDRKLSQDKVNVEKIKNLLDAIKNLQHFVKPLLGRGTESEKDSRFYGDFTPLWETLEQITPLYNMVRNRMTEKPYSDEKIRLYFDNNGSFLNGWVDSKTDSDNATQYGGYLFRKLNSIGEYDYYLGVSAATKLFRSFNPVADNDKSCFERLDYYQLKGKTFYGALYKGDYETESANIRHTIDNVVRHSGSALIKEKINFERQKKQPKISTAIGYLKFIRQQDGELYSTLLKDDIFEEANQAIMVSMKATLSSLDRIPFAKEYALRHYILFADMMDDIEVLLQGKVFSYFPISQSELDEAVTRISKPLYLFKITNKDLSFAETHEKGLRKSRGIENLHTMYFKALMSGCQDVYDIGSGSVFFREHKISYTDEQMKRGHHYEMLKDKFNYPIISNKRYAFDKFQFHISITMNYNADKSKDINY

SEQ ID NO: 169 - protein, 881 aa, unidentified
  REGION 1..881: note = Category: MG28 effectors
  REGION 1..881: note = Description: MG28-29 effector
  source 1..881: note = uncultivated organism sequence
TDYMGDTYKSIESYFIALGAEDDGNTQKPNLFIRIENAYIEAKSLLTKVYPKDRKLSQDKINVEKIKNLLDAIKNLQHFVKPLLGRGTESEKDSRFYGDFTPLWETLEQITPLYNMVRNRMTEKPYSDEKIKLYFDNNGSFLNGWVDSKTESDNATQYGGYLFRKLNSIGEYDYYLGVSAATKLFRSFNPIADSDKSCFERLDYYQLKGKTFYGALYKGDYETESANIRHTIDNVVRHTGSTLNKEKIKIERQKKQPKISTAIGYLKFIRQQDDELYNILLKDDIFEEANQTIMVSMKATLSSLDRIPLAKEYAIRQYTLFADMMDDIEVLLQGKVFSYFPISQSELDEAVTRISKPLYLFKITNKDLSFAETHEKGLRKSRGIENLHTMYFKALMSGCQEVFDIGSGSVFFREHKISYTDEQMKRGHHYEMLKDKFNYPIISNKRYAFDKFQFHISITMNYNADKSKDINYITNAYLKESNATHIIGIDRGERHLLYLSLIDLQGNIVDQFSLNEIVKEYNGNTYCTNYHALLEAKENQRDEARRSWQTIENIKELKEGYMSQVIHKIVDLMIKYNAIVVLEDLNLGFKRGRQKVEKQVYQKFEKMLIDKLNYLVDKKLDANEAGGVLRAFQLTNKFESFQKLGKQSGFLFYIPAWNTSKMDPTTGFVNLLDTRYENMAKAKAFFGKFKSIRFNNSKNWFEFSFDYNDFTTKAEGTKTQWTLCTYSTRIETKRDPMQNNKYVSEEFELTNRFKDLFANTKYNIDLNGNLIEQICSQSDASFFKELLHLMHLTLQMRNSVVGTLIDYMISPVANANGEFYDSRNCGKNLPENADANGAYNIARKGLWIINQIKQTEDLTKVKLSISNKEWLQYAQKQINNT

SEQ ID NO: 170 - protein, 1060 aa, unidentified
  REGION 1..1060: note = Category: MG28 effectors
  REGION 1..1060: note = Description: MG28-30 effector
  source 1..1060: note = uncultivated organism sequence
VIDEYHKAFIELMLDNFELELKDSGKLDSLEEFYMLYHLPSNDSTRKDRITKVQDALRKKISECFTKTEQYKRLFGKELIREDLEPFVGTLQFEEYIRSQKGNENLNDDELRQIQVEVVQEIAQFRDFTTYFSGFYENRKNMYVADNKATSIANRMINENLPKFIDNMDVFDRIAVSGVSKHFDTLYKEMEPYLNVNSIAEMFRLDYFSTVLTQKQIDVYNTIIGGRTEKDGRKIQGLNEYINLFNQQQKDKENRLPKLKPLFKQILSDRNAISWLPDEFASDNEMLESIEKCYQDLREHVFEGENNLKVLLKGIGEYDLEHIYLCDDAQLTNIAQKQFGNWNVIKNAFEESIKAENPARGNESIEKYEARIEKLMKTNDSFSLAQINRLMSAYLGDEYKPIESYFTAMGAEDDGAVQKPNLFIRIENAYTEVKNLLRTSYPNDRKLSQDKVNVEKIKNLLDAIKDIQHFVKPLMGKFTESVKDNRFYGEFTPLWETLDQITPLYNMVRNHMTQKPYSDEKIKLNFDNSTLLAGWDLNKEVDNTCTLLRKDGLYYLVIINKQYNRILTAENISNDGECYEKMVYKQLGQISQQLPRIAFSNSWQQRISIPAEVLRIKKTESFKTNNEDLLKLIAFYKYFISQHEEWNTFFNIKFTDKSDYKNLPEFYSEVDSLFYSLSFSKVSVANINQLVDEGKIYLFQIYNKDFSTYSKGTPNLHTMYWKMLFDERNLADVVYKLNGEAEVFFRKHSIEAGKPTHPANKPVVNKNKLNENRTSVFEYDLIKDRRYTVDKFQFHVPITMNYKAEGLNNINPMVNAYLKESNATHIIGIDRGERHLLYLSLIDLKGNIVEQCSLNEIVNEYKGKTYRINYHDLLDTKEKQRDEARRSWQAIENIKELKEGYMSQVIHKIAELIVKYNAIVVLEDLNLGFMRGRQKVEKQVYQKFEKMLIDKLNYLVDKKLDATEQGGVLKAYQLANKFESFQKMGKQSGILFYIPAWNTSKMDPTTGFVNLFDTRYKNIAKAKAFFAKFKSIRYNATKDWMEFAFDYDDFTTKALGTKTQ

SEQ ID NO: 171 - protein, 872 aa, unidentified
  REGION 1..872: note = Category: MG28 effectors
  REGION 1..872: note = Description: MG28-31 effector
  source 1..872: note = uncultivated organism sequence
VIRNAVVEDLKVGNPQKKKEDAEEYEKRLAKLHDSYSIAYLNGIMQGKTEDFKPIEDYFAGMGAEDNEKGQKVNHFARIENAYTEIKALLNTDYHKGKNLSQDKVNVEKIKDLLDAIKDLQHFVKPLLGNGTESEKDSQFYGEFTPLWEALDQITPLYNMVRNRMTQKPYSNEKIKLNFDNSTLLAGWDLNKEADNTCTLLRKDGNYYLVIIDKRNNKVLKPENLVSKGDCYEKMEYKLLPGANKMLPKVFFSKSRIDEFKPSESVLKNYKNETHKKGGNFNLDDCHALIDFFKKSINKHEDWSKFGFHFSDTNSYEDLSGFYREVEQQGYKITFRNVSVDYINQLVDEGKIYLFQIYNKDFSPFSKGTPNMHTLYWRMLFDERNLADVVYKLNGEAEVFFRKHSIRVDKPTHPANQPIANKNAQNEKKESTFAYDLIKERRYTVDKFQFHVPITMNFKAAGLNNINPLVNAYLKESNDTHIIGIDRGERHLLYLSLIDMKGNIVEQYSLNEIVNEYNGNTYRTNYHDLLDAKEKQRDEARRSWQTIENIKELKEGYMSQVIHKIAELMVKYNAIVVLEDLNMGFMRGRQKVEKQVYQKFEKMLIDKLNYLVDKKLDAEKMGGVLNAYQLTNKFESFQKLGKQSGFMFYIPAWNTSKMDPTTGFVNLFDTRYENMEKSKVFFGKFDSIRYNAAKGWLEFAFDYDNFTAKAEGTRTRWTLCSYGARIETKRNPEKNNEFDSVEIELTERFKALFAKHQIDLNGNLKEQICNQSDASFFKEMLHLLHLMLQMRNSVTNSEIDYLLSPVMNASGEFYDSRTCGKNLPENADANGAYNIARKGLWIIEQIKQSDDLSRPKLAISNKQWLRYAQGLD

SEQ ID NO: 172 - protein, 944 aa, unidentified
  REGION 1..944: note = Category: MG28 effectors
  REGION 1..944: note = Description: MG28-32 effector
  source 1..944: note = uncultivated organism sequence
VQLTNIAQKQYGDWSVIKKAFDNITKAQNPQRRNESNEKYEARILKLQKTYDSFSMAQINNWLTDYMGDTYKSIESYFTALGAEDDGNTQKPNLFIRIENAYTEAKSLLTKVYPKDRKLSQDKINVEKIKNLLDAIKNLQHFVKPLLGRGTESEKDSRFYGDFTPLWETLEQITPLYNMVRNRMTEKPYSDEKIKLYFDNNGSFLNGWVDSKTESDNATQYGGYLFRKLNSIGEYDYYLGVSAATKLFRSFNPVADNDKSCFERLDYYQLKGKTFYGALYKGDYETESANIRHSIDDVVCRSGSTLIKEKINFERQKKQPKISTAIGYLKFIRQQDDELYNILLKDDIFEEANQAIMVSMKATLSSLDRIPFAKEYALRHYTLFADMMDDIEVLLQGKVFSYFPISQSELDEAVTRISKPLYLFKITNKDLSFAETHEKGLRKSRGIENLHTMYFKALMSGCQDVYDIGSGSVFFREHKISYTDEQMKRGHHYEMLKDKFNYPIISNKRYAFDKFQFHISITMNYNADKSKDINYITNAYLKESNATHIIGIDRGERHLLYLSLIDLQGNIVDQFSLNEIVKEYNGKTYCTNYHALLDAKENQRDEARRSWQTIENIKELKEGYMSQVIHKIVDLMIKYNAIVVLEDLNLGFKRGRQKVEKQVYQKFEKMLIDKLNYLVDKKLDANEAGGVLRAFQLTNKFESFQKLGKQSGFLFYIPAWNTSKMDPVTGFVNLLDTRYENMAKAKAFFGKFKSIRFNNSKNWFEFSFDYNDFTTKAEGTKTQWTLCTYSTRIETKRDPMQNNKYVSEEFELTNRFKDLFANTKYNIDLNGNLIEQICSQSDASFFKELLHLMNLTLQMRNSVVGTTIDYMISPVANANGEFYDSRNCGKNLPENADANGAYNIARKGLWIINQIKQTEDLTKVKLSISNKEWLQYAQKQIKNT

SEQ ID NO: 173 - protein, 1280 aa, unidentified
  REGION 1..1280: note = Category: MG28 effectors
  REGION 1..1280: note = Description: MG28-33 effector
  source 1..1280: note = uncultivated organism sequence
MKAFTNLYQVAKTLRFELIPDERTKEFLEHSKLIDKDEHRAESYVAVKGIIDRYHKAFIERVLSELKLQYAKEDKLNSLEELYSLYMKTQKSDADKKMLEQVQSNLRKQIANALTKDSQYKRMSGKELIREDLFKITTPEERTLVEEFADFTTYFSGFYENRKNMYSAEAQSTAISYRLINENLPKFIDNIATFHKILNSPVAEQLPTLYKEMKEYLNVNSIEEMFMLDYYDVVLTQTQIEVYNGVIGGRTTDDGQKIQGINEYVNLFNQKQSSRETRLPKLKPLFKQILSDRQTVSWLTEEFKTDRDMLDAIKERYDSLSSDVFPLLKELLQNLFSYNLNQIFIPNNLALTDISQSLYGDWGVIKREIMIRLKHDFPQTKKEKAEKYEERIEKTYKSFDSFSIAYLNEVLSEKSLDVCSYFATLGAVNNKDRQTENLFLQIKNAYHNAAELFEKDYPETKNLAQDKQSVDKLKVLMDALKALQHFVKPLMETGEEPEKDERFYGDLSVLMEELNLVTPLYNKVRNRMTRKPYSNEKFKLTFNIKGNFLGGWVDSKTEKSDNGTQYGGYLFRKKNSIGEYDYYLGVSANTKLFRKVEGASGQYERLDYYQPKSQTVYGNSYVGKDGYESDKQTLMHSIISYVGTTNDMNVKQQVESKDTPSSMITVIKDASPLLYQGLLDDPYFSDVNRRVTNNFHQTILSMTRIPRSKDYQGAKFTLFTEPQQVIEDICKEKVFGYFAVDDQEIADAMADTSKPFLLFKISNKDLSFAEKFEKGMRHSRGTDNLHTMYFKALMNGEQSVLDIGSGEVFFRRASIKANITHPARIAIKNKNNANEKKESCFDYDLIKDKRYTVDKFGFHLSIIQNYQSPNRYDVNALTREYIRNNPDVHFIGIDRGERHLLYVSVINSRGQIVEQFSMNKIENEYNQTDYHQLLEQRSDIRQKERQSWRTIEGIKELKQGYLSQVVHRIATLMVKYKAVVVLEDLNMGFKRGRQMVESSVYQQFEKALIDKLNYLVDKQVDANEPGGLLRGLQLTNKFTSFREMGKQNGFLFYIPAWNTSKMDPVTGFVDLLHPRYENVDKARAFFCKFKSIQYNDEKGWYEFRLDYNDFNAKAEGTKTLWSVCSNGTRIETFRNVEKNSSWDNREVCLTEEFDKLFADYHISRTGNLKEQIAQQTEKSFFERLTHLLNLTLQMRNSMTGTTIDYLVSPVADEDGVFYDSRTCSKELPENADANGAYNIARKGLWVACQIREAQDANKVKLNISNKQWLLFAQTKPYLSD

SEQ ID NO: 174 - protein, 1280 aa, unidentified
  REGION 1..1280: note = Category: MG28 effectors
  REGION 1..1280: note = Description: MG28-34 effector
  source 1..1280: note = uncultivated organism sequence
MKAFTNLYQVAKTLRFELIPDERTKEFLEHSKLIDKDEHRAESYVAVKGIIDRYHKAFIERVLSELKLQYAKEDKLNSLEELYSLYMKTQKSDADKKMFEQVQSNLRKQIANALTKDSQYKRMSGKELIREDLFKITTPEERTLVEEFADFTTYFSGFYENRKNMYSAEAQSTAISYRLINENLPKFIDNIATFHKILNSPVAEQLPTLYKEMEEYLNVNSIEEMFMLDYYDVVLTQTQIEVYNGVIGGRTTDDGQKIQGINEYVNLFNQKQSSRETRLPKLKPLFKQILSDRQTVSWLTEEFKTDREMLAAIKERYDLLSSDVFPLLTELLQNLSSYDLNQIFIPNNLALTDISQSLYGDWGVIKREIMIRLKHDFPQTKKEKAEKYEERIEKTYKSFDSFSIAYLNEVLSEKSLDVCSYFATLGAVNNKDRQTENLFLQIKNAYYDAAGLFEKDYPETKNLAQDKQSVDKLKVLMDALKALQHFVKPLMETGEEPEKDERFYGDLSVLMEELNLVTPLYNKVRNRMTRKPYSNEKFKLTFNIKGNFLGGWVDSKTEKSDNGTQYGGYLFRKKNSIGEYDYYLGVSANTKLFRKVEGASGQYERLDYYQPKSQTVYGNSYVGKDGYESDKQTLMHSIISYVGTTNDMNVKQQVESKDTPSAMITVIKDASPLLYQGLLDDPYFSDVNRRVTNNLHQTILSMTRIPRSKDYQDAKFTLFTEPQQVIEDICKEKVFGYFAVDDQEIADAMADTSKPFLLFKISNKDLSFAEKFEKGMRHSRGTDNLHTMYFKALMNGEQSVLDIGSGEVFFRRASIKANITHPARIVIKNKNNANEKKESCFDYDLIKDKRYTVDKFGFHLSIIQNYQSPNRYDVNALTREYIRNNPDVHFIGIDRGERHLLYVSVINRRGQIVEQFSMNKIENEYNQTDYHQLLEQRSDIRQKERQSWRTIEGIKELKQGYLSQVVHRIATLMVKYKAVVVLEDLNMGFKRGRQMVESSVYQQFEKALIDKLNYLVDKQVDANEPGGLLRGLQFTNKFTSFREMGKQNGFLFYIPAWNTSKMDPVTGFVDLLHPRYENVDKARAFFCKFKSIQYNDEKGWYEFHLDYNDFNAKAEGTKTLWSVCSNGTRIETFRNVEKNSSWDNREVCLTEEFDKLFADYHISRTGNLKEQIAQQTEKSFFERLTHLLNLTLQMRNSMTGTTIDYLVSPVADEDGVFYDSRTCSKELPENADANGAYNIARKGLWVARQIREAQDANKVKLNISNKQWLLFAQTKPYLSD

SEQ ID NO: 175 - protein, 1277 aa, unidentified
  REGION 1..1277: note = Category: MG28 effectors
  REGION 1..1277: note = Description: MG28-35 effector
  source 1..1277: note = uncultivated organism sequence
MDRFTNLYPVSKTLRFELIPDKRTKAILEKTDLISQDEHRAKSYKLVKKIIDRYHKAFIESVLGSFKLPNDDVNLLHELYSKSQKSDADKKAMEKVQDKLRKVIADALTKDDRFKRIDKKELIREDILSVITPDERALIDEFRDFTTYFTGFHENRRNMYSAEAQSTAIAYRLIHENLPKFIDNMATFEKIAASPVADHFPQLYQEMSECRLNVRDIQEMFSLDYYTELLTQSQIEVYNAVIGGRTVEDGGKKIQGINEYVNLYNQQQPSRDTRLPKLKPLFKQILSDREAVSWLDEEFDSDKSMLEAVRDIYHALDDHVFDPLRELLTNLPSYNLDGIFIPNDLAITDISQAMFKDWSVIKRAIADDVKAHCPLKRKETAENYEERISKLIKREGSFSIGYLNACMPGKDICEHFAGLGAVDDGEEQTENIFLQIRNAYADAQSLIENDYPESRNLAQDKEYVAKLKALLDAVKALQRFVKPLLGNGDEPDKDERFYGELAVLWEELDRVTPLYNKVRNRMNRKPYSIEKFKLNFNIKGNFLGGWVDSKTEKSDNGTQYGGYLFRKKNVIGEYDYYLGVSAKTKLFRRKEGAEGQYERLDYYQPKSQTVYGNSYVGPDGYDHDKRELMDAIVSFVGALGESELYQSLVSMGTPSAMLKALREQPLIYQQLLADRRFASINSKVTKYLHETILSLVRIPRSQDYVNAEFSLFTEPQEVIDNLCKEKVFTYFVVDDAEIEQAMNDENKPFLLFKISNKDLSYADTYSKGLRKSRGTDNLHTMYFKALMSGNQSVIDIGTGEMFYRKASISVDKPTHKANVPIKKKNPNNQGTESSFSYDLYKDRRFTVDKFGFHLSFIYNYLAKEQDMNKMAREYIHDHDDLHFIGIDRGERHLLYVTVIDSRGRIKEQFSLNEIVNEYQGNKYKTNYRGLLDKREEERQRERQSWNTIEGIKELKQGYLSQVIHKIVTLMVKYHAVVVLEDLNMGFKRGRQKVESSVYQQFEKALIDKLNLLIDKKADADQPGGLLHAYQLTNMFTSFREMGRQNGFLFYIPAWNTSKIDPVTGFVDLLHPRYESVEKSRSFFCKFKSVRYNQEKGWYEFSLDYNAFTTKAEGTRTCWTLCSHGTRVETYRNPDKNSSWDSREIDLTAELNALFEAYGINRQGNLKEAIAERDEKDFFERLMRLMALTLQMRNSITGTEVDYMISPVADENGNFYDSRSCGRELPENADANGAYNIARKGLWVARQIQASPVDERINMAVSNKEWLNFAQSKPYLDD

SEQ ID NO: 176 - protein, 1284 aa, unidentified
  REGION 1..1284: note = Category: MG28 effectors
  REGION 1..1284: note = Description: MG28-36 effector
  source 1..1284: note = uncultivated organism sequence
MKQFTNLYPVTKTLRFELIPDSRTKKYLENSDFINRDEHRAEYYKIVKKIIDRYHKVFIEEVLSSTKLQYAKTGRLDSLEELYSLLVKSQKTESDKKSIAKVQDKLRKQIVDAFKNDSRFKRIDKKELIREDIFKLVELTPEERALVEEFRDFTTYFNGFHENRKNMYSSEAQSTAIAFRLIHENLPKFIDNIAIFHRILRSPVAENFQQLYKDMEEYLNVNSLEEMFMLDYYNDVLTQTQIDVYNAIIGGRTLEDGKKIQGINEYVNLFNQQQSSRETCLPKLKPLYKQILSDKVAVSWLPEEFATDNELLEAVRDCYTSLSNNVFVKLEEMLTNLSEYNLNGVFIPNDLSLTNISQWLYGDWSFIKKAITKDLMENCPSKKNEKPEKYEERLEKHVKSEGYFSIAYLNSCLNNVQKNVCSYFNELGAVNTESKQIENLFSKIQNAYTDAKDLLESDYPKNKNLAQEKSEVAKIKLLLDALKELQHFVKPLTNAGDKAEKDEQFYSEMTIIWDELSRVTPLYNKVRNRMTRKPYSLEKFKLTFNIKGNFLGGWVDSKTEKSDNGTQYGGYLFRRKNAINEYDYYLGVSANTKLFRRQSGVVGEYERLDYYQPKSQTIYGNSYVGNNSYETDKEELKIAILEFVSKLGNDELLQQVGAKDTPSAMLTVIKESSNVIFNQLLIDEEFAKKNREVTDNLHQTILGMSRIPRAKEYRDASFTIFTEPQQVIDDICKDKVFSYFPVSDVEMNNAISDINKPFLLFKISNKDLSFAEMYSKGLRKSRGIENLHTMYFKALMEGNQSVLDIGTGEMFYRRASIKVAKPTHPSNQPIQKKSQSGESMFAYDLIKDRRFTVDKFGFHLSIIQNYQAAGKVDVNSMVRSYIHDNPDMHFIGIDRGERHLLYVSVIDSKGNIKEQFSMNQITKDYNGVEYKTNYRNLLDIRDDVRKQERQSWRTIEGIKELKQGYLSQVIHKIVTLMVKYRAIVVLEDLNMGFKRGRQKVESSVYQQFEKALIDKLSYLVDKQQDANKCGGLLKGFQLTNKFTSFRDMKKQNGFLFYISAWNTSKIDPVTGFVDLLHPKYENVDKARSFFCKFKSIRYNKQKGWYEFTFDYNDFTTQAEGTRTLWTICTRGSRIETFRNKDKNSEWDSHEINLTDEFNSLFCQYNISSNDNLKEVIARQTDKKFFESLIHLLCLTLQMRNSKTGTDIDYLISPVANEHGLFYDSRNCDSSLPENADANGAYNIARKGLWMARQIQGAERNEKIDFVITNKEWLNFAQTKPYLTD

SEQ ID NO: 177 - protein, 1276 aa, unidentified
  REGION 1..1276: note = Category: MG28 effectors
  REGION 1..1276: note = Description: MG28-37 effector
  source 1..1276: note = uncultivated organism sequence
MDRFTNLYPVSKTLRFELIPDKRTKAILEKTDLISQDEHRAESYKLVKKIIDRYHKAFIESVLGSFKLPNDDVNLLHELYSKSQKSDADKKAMEKVQDKLRKVIADALTKDDRFKRIDKKELIREDILRVITPDERALIDEFRDFTTYFTGFHENRRNMYSAEAQSTAIAYRLIHENLPKFIDNMATFEKIAASPVADHFPQLYQEMSECLNVRDIQEMFSLDYYTELLTQSQIEVYNAVIGGRTVENGGKKIQGINEYVNLYNQQQPSRDTRLPKLKPLFKQILSDREAVSWLDEEFDSDKSMLEAVRDCYHALDDRVFDPLRELLTNLPSYNLDGIFIPNDLAITDISQAMFKDWSVIKRTIADDVKAHCPLKRKETAENYEERISKLIKREGSFSIGYLNACMPGKDICEHFAGLGAVDDDEEQTENIFLQIRNAYADAQSLIENAYPEGRNLAQDKENVAKLKALLDAVKALQRFVKPLLGNGDEPDKDERFYGELAVMWEELDRVTPLYNKVRNRMTRKPYSIEKFKLNFNIKGNFLGGWVDSKTEKSDNGTQYGGYLFRKKNEIGEYDYYLGVSAKTKLFRRKEGAKGQYERLDYYQPKSQTVYGNSYVGPDGYDHDKRELMDAIVSFVGALGESELYQSLVSMGTPSAMLKALREQPLIYQQLLADRRFASINSKVTKYLHETILSLVRIPRSQDYVNAEFSLFTEPQEVIDNLCKEKVFTYFVVDDAEIEQAMNAENKPFLLFKISNKDLSYADTYSKGLRKSRGTDNLHTMYFKALMSGNQSVIDIGTGEMFYRKSSISVDKPTHKANVPIKKKNPNNQGTLSSFCYDLYKDRRFTVDKFGFHLSFIYNYLAKEQDMNKMAREYIHDHDDLHFIGIDRGERHLLYVTVIDSRGRIKEQFSLNEIVNEYQGNKYKTNYRGLLDKREEERQRERQSWNTIEGIKELKQGYLSQVIHKIVTLMVKYHAVVVLEDLNMGFKRGRQKVESSVYQQFEKALIDKLNLLIDKKADADQPGGLLHAYQLTNKFTSFREIGRQNGFLFYIPAWNTSKIDPVTGFVDLLHPRYESVEKSRSFFCKFKSIRYNQEKGWYEFSLDYNAFTTKAEGTRTCWTLCSHGTRVETYRNPEKNSSWDNREIDLTAELNALFEAYGINRQGNLKEAIAERDEKDFFERLMRLMALTLQMRNSITGTEVDYMISPVADENGNFYDSRSCGRELPENADANGAYNIARKGLWVARQIQASPVDERINMAVSNKEWLNFAQSKPYLDD

SEQ ID NO: 178 - protein, 1280 aa, unidentified
  REGION 1..1280: note = Category: MG28 effectors
  REGION 1..1280: note = Description: MG28-38 effector
  source 1..1280: note = uncultivated organism sequence
MKAFTNLYQVAKTLRFELIPDERTKEFLEHSKLIDKDEHRAESYVAVKGIIDRYHKAFIERVLSELKLQYAKEDKLNSLEELYSLYMKTQKSDADKKMLEQVQSNLRKQIANALTKDNQYKRMSGKELIREDLFKITTPEERTLVEEFADFTTYFSGFYENRKNMYSAEAQSTAISYRLINENLPKFIDNIATFHKILNSPVAEQLPTLYKEMEEYLNVNSIEEMFMLDYYDVVLTQTQIEVYNGVIGGRTTDDGQKIQGINEYVNLFNQKQSSRETRLPKLKPLFKQILSDRQTVSWLTEEFKTDRDMLDAIKERYDSLSSDVFPLLKELLQNLFSYNLNQIFIPNNLALTDISQSLYGDWGVIKREIMIRLKHDFPQTKKEKAEKYEERIEKTYKSFDSFSIAYLNEVLSEKSLDVCSYFATLGAVNNKDRQTENLFLQIKNAYHDAAGLFEKDYPETKNLAQDKQSVDKLKVLMDALKALQHFVKPLMETGEEPEKDERFYGDLSVLMEELNLVTPLYNKVRNRMTRKPYSNEKFKLTFNIKGNFLGGWVDSKTEKSDNGTQYGGYLFRKKNSIGEYDYYLGVSANTKLFRKVEGASGQYERLDYYQPKSQTVYGNSYVGKDGYESDKQTLMHSIISYVGTTNDMNVKQQVESKDTPSSMITVIKDASPLLYQGLLDDPYFSDVNRRVTNNLHQTILSMTRIPRSKDYQDAKFTLFTEPQQVIEDICKEKVFGYFAVDDQEIADAMADTSKPFLLFKISNKDLSFAEKFEKGMRNSRGTDNLHTMYFKALMNGEQSVLDIGSGEVFFRRASIKANITHPARIVIKNKNNANEKKESCFDYDLIKDKRYTVDKFGFHLSIIQNYQSPNRYDVNALTREYIRNNPDVHFIGIDRGERHLLYVSVINRRGQIVEQFSMNKIENEYNQTDYHQLLEQRSDIRQKERQSWRTIEGIKELKQGYLSQVVHRIATLMVKYKAVVVLEDLNMGFKRGRQMVESSVYQQFEKALIDKLNYLVDKQVDANEPGGLLRGLQFTNKFTSFREMGKQNGFLFYIPAWNTSKMDPVTGFVDLLHPRYENVDKARAFFCKFKSIQYNDEKGWYEFHLDYNDFNAKAEGTKTLWSVCSNGTRIETFRNVEKNSSWDNREVCLTEEFDKLFADYHISRTGNLKEQIAQQTEKSFFERLTHLLNLTLQMRNSMTGTTIDYLVSPVADEDGVFYDSRTCSKELPENADANGAYNIARKGLWVACQIREAQDANKVKLNISNKQWLLFAQTKPYLSD

SEQ ID NO: 179 - protein, 1277 aa, unidentified
  REGION 1..1277: note = Category: MG28 effectors
  REGION 1..1277: note = Description: MG28-39 effector
  source 1..1277: note = uncultivated organism sequence
MERFTNLYQVSKTLRFELIPDKRTKEILEHTDLIAQDEHRAESYKTVKKIIDRYHKNYIDSVLGTLKLPESDIDELYELYNKQQKTDAEKNALEKVQGKLRKLIADALSKDSRFKRIDKKELIREDILDIIIPEERSLIDEFRDFTTYFTGFHENRRNMYSAKAQSTAIAYRLIHENLPKFIDNMATFCKIAASPVAERFNDLYQEMAEYLNVREIGEMFKLDYFTEILTQKQIEIYNAVIGGRTLDDGTKIQGLNEYVNLYNQQQTTRETRLPKLKPLFKQILSDREGVSRLPEEFATDQEMLNAVKEYYKVLNDHVLSPLKELLVNLSSYNPNGVYITNDLSLSNISQSLYGDWSLIKKSMTEDIKRQCPRKKKETAENYDERIHQLIKREKSFSIDYLNDCIKSLGKDICTHFAALGATDDGDTQTVNLISQIRNAYTDAQSLLESNYPANRNLAQEKDNVDKLKGLLDAIKALQHFVKPLLGNGDEPKKDERFYGELAVLWEELDRITPLYNKVRNRMTRKPYSTEKFKLNFNIKGNFLGGWVDSKTEKSDNGTQYGGYLFRKKNSLNEYDYYLGVSANKKLFRRKNGAVGQYERLEYYQPKSQTVYGNSYVGPDGYDHDKKELMEAIVSFVGSLGDRELYEELTSKDTPSAMLMILKETPSFYQQLLVDQKFASINSKVTKYLHDTILSLYRIPRSQDYVNAVFTLFTEPQKVIDDLCQEKVFTYFVVDDAEIEQAMKDEVKPFLLFKISNKDLSFADTYCKGLRKSRGTENLHTMYFKALMSGNQATIDIGTGEMFYRKSSISYDKPTHTANVPIKKKNPTNQAAESIFCYDLFKNRRFSVDKFGFHLSIIYNYLCQDKDVNKMMREYIHDHNDLHFIGIDRGERHLLYVTVIDSHGRIKEQFSLNEIKNEYKGNTYSTDYRGLLSKREADRQHERQSWNTIESIKELKQGYLSQVIHKIVTLMVKYNAVVVLEDLNMGFKRGRQKVESSVYQQFEKALIDKLNLLVDKKTDPEQLGGLLHAYQLTNKFTSFRDMRLQNGFLFYIPAWNTSKIDPVTGFVDLLHPRYESVEKAQAFLCKFKSIRYNQDKGWYEFTLNYNDFTTKAEGTRTEWTLCTHGTRVETFRNADKNSSWDSREVDLTKAYHELFEEFAISSNGNLKEAITQQDSKAFFERLMYLLNLTLQMRNSIIGTEVDYMISPVADENGNFYDSRTCGDELPQNADANGAYNIARKGLWVARQIQAAPVDAKVDLAITNKEWLNFAQSKPYLDD

SEQ ID NO: 180 - protein, 1296 aa, unidentified
  REGION 1..1296: note = Category: MG28 effectors
  REGION 1..1296: note = Description: MG28-40 effector
  source 1..1296: note = uncultivated organism sequence
MKAFENFTGLYPLSKTLRFELKPIGKTLEYIEKNGLLDRDRHRANSYVEVKKIIDRYHKQFIEDSLSDSEFELKYEDKGKKDSLEEYFYYYKLRNRDEKQKKDFDEIQKNLRKQIASQFKKQDRFKRIDKKELIKEDLLEFVDNNEKKLIDEFRDFTTYFTGFHENRQNMYSDEAKSTAIAYRLIHENLPKFIDNISVFERVAATDIADCFAQIYSDFEEYLNVNNISEIFRLDYYTEILTQTQIDVYNLIIGGRSEGDVKIKGLNEYINLYNQQQKDKSQRLPKLKPLFKQILSDRNAISWLPESFENDNALLESLENCYRSYNETSADKKSIFARFKELLLAMSDYETDKIFVRNDLQLTDISQKMFGNYNVISKALYEDLKSNTHRKSNKETDESFEERLRDIAKKQDSFSIGKIDSSLKEMYVEECKKSVCDYFANLSVDDKGHDIFDRIEKAYSEVKDLLNSPYPLDKNLAQEDTDIDKIKNLLESIKDLQKFVKPLCGKGNESGKDENFYGEFTVLYEELDKITPLYNMVRNYLTRKPYSTEKVKLFFENNGAVLNGWVDSKTENSDNGTQYGGYLFRRKNGIGEYDYYLGISSDVKLFRKDSVIAECDKSEFERLDYYQLKSQTFYGSAYKGNYELETQNVIKAIDNFISKNGDADISEKIISDRANKNSKTGTAKGYLNFIKNTSIYDDLLNDDIFKKANDQLINSLKKTLISFERLSTARKIANYNYYLFSDLMDAVDVLMQEKVFTYNAVSINEFENTINRDKKPLLLFKITNKDLSFADTFLSGKRKSRGVENLHTLYFKALMSGKQNVFDIGTGSVYFREKSIRYSEEKMKYGHHYDMLKDKFQYPIISNKRYVYDKFQFHLSMVQNYNGNKNLDINPLANDYIKKSDDLHVIGIDRGERHLLYLTVIDMKGNIKKQFSLNEIVNEYKGNTYRTNYHDLLDAREKKRDVERKSWKTIETIKELKEGYLSQVIHKITELMVEYNAIIVLEDLNLGFMRGRQKVEKSVYQKFEKMLIDKLNYLADKKKDPEELGGVLKAYQLSNNPKYKVIKQSAFLFYTQAWNTSKIDPVTGFVNLFDTHYENILKSKNFFSKFDLIKYNSDKDWFEFSFDYNNFTTKAEGTKTKWTLCTFGNRIISFRNPDNNMQWDGKEINLTEEFKLFFEKFGININSDLHTEILKQDKKDFFEGLLHLLKLTLQMRNSKTRTDIDYMQSPVADENGAFYNSDECGESLPENADANGAYNIARKGLMIIDKIKKSDNLNKIDLTISNKEWLVFAQNKPYLKN

SEQ ID NO: 181 - protein, 1303 aa, unidentified
  REGION 1..1303: note = Category: MG28 effectors
  REGION 1..1303: note = Description: MG28-41 effector
  source 1..1303: note = uncultivated organism sequence
MGKLKDFKRIYTLSKTLRFELRPIGKTLEHIEKSGILSQDQHRAESYVEVKKIIDEYHKAFIENVLKDFRFSENRGEKNSLEEFLVYYMCKSKDETQKRQFADIQDKLRKQITQRFSDDDRFKRIDKKELIKEDLLSFVEDVEKRQLIEEFKDFTTYFTGFHENRKNMYTDEAQSTAIAYRLIHENLPKFIDNIMVFDKVAASPIAEHFAKLYSDFEEYLNVSELGEMFRLDYYNIVLTQTQIDVYNAIVGGKTLEDGRKIQGLNEYINLYNQQQKDKSARLPKLKPLYKQILSDRNAISWLPEQFQSDEKVLEAIQKAYQDLEEQVFNRKKEGEHSLKDLLLSLSDYDLSKIYIRNDAQMNDLSQKAFGHWDVIHKALLEQLKEYVQKKPKKESDEAYEERLNKIIKSQGSIPIALINQGVQKQNSEEQNTLQTYFATLGAAETESVKKENLFTQIENAYAEVKDLLNTPYSGMNLAQDEESVKKIKSLLDAIKALQHFVKPLLGDGTESEKDEKFYGEFSMLWEELDKITPLYNMVRNYMTRKPYSTEKFKLHFENNGSLLNGWVDSKTEKSDNGTQYGGYLFRKQNIIGEYDYYLGISSDTNLFRRDAVINDTDKSEFERLDYYQLKSQTVYGKSYQGDYNQESAQIISAIDSFVERTTNTNLKEKINQDRETKNPKTSTAKGYLNFLRKNSEIYDSIINDSAFVKANLQLIKSIKKTLCAFKRIPQAQKLAQKEFVLFVDLMNEIDEMVKEKVFTYVPISLKEFENSMERDKKPLFLFKISNKDISFAESYEKGLIKSRGTDNLHTMYFKALMNGNQNVFDIGTGVVYFRKHSIQYSDEKMKTGHHHNVLKDKFKYPIISNKRYVYDQFQFHLSIEQNYLAGKIGDFEMNRRVNEYIRQSDDLHIIGIDRGERHLLYLTVIDLQGRIKEQYSLNEIVNTYNGNEYRTNYHDLLSKREDERMKARQSWQTIENIKELKEGYLSQVIHKISELIVKYNAIVVLEDLNMGFMRGRQKVESSVYQKFEKMLIDKLNYLVDKKKNPEEDGGVLNAYQLTNKFESFQKLGKQSGFLFYTQAWNTSKIDPVTGFVNLFDTRYETREKAKTFFGKFDAIRYNTAKDWFEFAFDYSEFTSKAEGSRTNWTLCTYGERIETFRDEKQNSNWATRKINLTDKFKELFEKHKIDIQADLKEAISQQDSADFFKGLLYLLKLTLQMRNSEIGTEIDYMQSPVADANGNFYNSDTCDDSLPKNADANGAYNIARKGLWIVQQIKAADDLKNVKLSISNKEWLKFAQEKPYLNE

SEQ ID NO: 182 - protein, 1261 aa, unidentified
  REGION 1..1261: note = Category: MG28 effectors
  REGION 1..1261: note = Description: MG28-42 effector
  source 1..1261: note = uncultivated organism sequence
MSNFNEFTHLYQLSKTLRFELKPIGETLKHFNESGILDQDEHRAESYKKVKKLIDRYHKEFMEEALRDFVFQMDDEGKNNSLSEYFFLYSLGKRTEAQDNDFKEIKKNLREQIAKYFKASPKYKNLFKQELIKEDLCNNMQCNEEEQKLVEEFHNFTTYFTGFHENRKNMYSNEEKSTAIAFRLVHQNLPKFIDNIGAFDRARNIDEIKAGIKNLQKHFETKGLLKQGEKIEDFFALDYYSRLAVQSRIDIYNAILGGRATEKGEKIQGLNEYINLYNQQHKEARLPKMKALFKQILSDRQAISWIEESFKSDNEVLSSVNDFYENLKQNEIFDRTKELLTSVGSYDLSKVYITNDQQLTSISQQLYGSWAVIENAILADMQKDIPRKKKEDSEKYNERLKKAYSNKGSFSIAYIDQCLEAVFGEKHIPVEQHFTKRGEAEIETEAECGKIKIPDVFTQIEQTYSAAKTLLCNPYPKGKHLSQSDEDIEKVKNLLDALKRFQHFIKPLTGSGDEAEKDEMFYSDLTELWAEIDQLNSLYNRVRNHLTGKPYSEEKLKLNFENASLLTGWDKNMERANTAVILRKGKLYYLAIMKKEHNSIFASDNLPDKGECYEKMVYKQIALPLGFGGFARKCFGSATKLGWTYPTNLLNKEGKIIIKDEEAKDVLPELIDCYKDFLNIYEKDGFKYSSYNFKFKPSNQYEKLSQFFAEIQQQGYKITFQNISSDYIDQLVNEGKLYLFQIYNKDFSPSSKGTPNMHTLYWQMLFDERNLNDGVYQLNGQAEVFFRKKSLNYTKPTHPANQAIANKNPFKKKDKSEFTYDLIKDKRFTMDKFLFHVPITINFKSSKTYDIDAKVRQWLQKADDVHIIGIDRGERHLLYLTVIDCKGNIKEQMSLNTIENEYKGNTYAFDYHKRLDEKEKERDEARKNWKTVENIKELKEGYLSQAIHKITQLMLKYNAIIVLEDLNMGFMSGRQKVEKQVYQKFEKMLIDKLNYLADKKKDPSEVGGVLNAYQLTSKFESFTKLGRQSGFLFYIPAWNTSKIDPVTGFVNLFDTRYKNIDEAKKFFGSFKSISYNKDKNWFEFSFDYNDFTNKAEGTKTQWTVCTNGERIENFRSGENLNQWSGRKIVLSQEFKTLFDRYGIDFTKDLQNDICSQSDTGFFEQLLRLFKLTLQMRNSISNTETDYLISPVYDRNGNFYDSRNNRKDLPNNADANGAYNIARKGLMILNQIKQTSDLKKPKYDLTNKAWLNFIQKGYANKD

SEQ ID NO: 183 - protein, 1244 aa, unidentified
  REGION 1..1244: note = Category: MG28 effectors
  REGION 1..1244: note = Description: MG28-43 effector
  source 1..1244: note = uncultivated organism sequence
MKTFNDLTGLYSLSKTLRFELKPVGKTKDNIETKGIIAQDEKRAEEYKKVKDIIDRYHKSFIDMCLAGLVLKTTSDGNNDSLKDYVALASKSNRDEKEDKDFDDVKTVLRKHIVDAFKKGNSYGDLFKKELIQNHLPDFVTDEQEKLMVENFSKFTTYFTGFNENRKNMYSDEKKSTAIAYRLIHENLPMFIDNIKSFAKITEQEDIDFIADVEHSFKEELKGKSITQMFCLENFTETLTQGQIELYNKIVGGRVEDSGVKKQGINEYVNLYNQQHKDARLPLLKPLYKMILSDRVALSWLPEEFATDEEMLAAINETHGNLKDVLADVRELLQNINNYDTKHIYIANDKGLTDISQQIFGQYDVYTSAIKAELRNNTNHSAKEKKNPELLEKRINDIFKASKSFSIEYLNSHVDSDKTIQSYYKELGAYDRNGEQRINLLSQIELAYVDAHDVLLGKHTNLNQSEDSIKKIKALLDAYKALQHFIKPLLGNGDEADKDNEFDAKLRAIWDELDIVTPLYDKVRNRLTRKPYSTEKIKLNFDNAQLLNGWDMNKEPDCTSVLLRKDGQYYLAIMDKKSNHAFDADELPCDGECYEKMEYKQMALPMGMGAFVRKCFGTAKALGWQCPRHLMTSDGKIIIKDEEAQKVLPELIDCYKSFLDIYEKDGFKYKTFNFKFKPSSEYEKLSHFFAEVPSQGYKCSFRNVSVSFINQLVDEGKLYLFQIWNKDFSEYSKGTPNMHTLYWKMLFDERNLANVVYKLNGQAEVFYRKRSLDLDKTTIHRANQPIANKNMQNEKRESTFCYDIVKNRRYTVDKFQFHVPITINFKATGSDNINASVLDVIRNNGIEHIIGIDRGERHLLYLSLIDMKGNIVKQMTLNDIINEYKGNTYTTNYKELLQAREGDRKEARQNWQKIENIKELKEGYLSQVVHVITKMMVEYKAIVVLEDLNGGFMRGRQKIERQVYEKFEKMLIDKLNYYVDKQKDVNDNGGLLHAYQLASKFDTFKKLGKQSGCLFYIPAWNSSKIDPVTGFVNMLDTRYENADKARNFFSKFKSISYNADKDWFEFVIDDYSKFTDKAKDTRTDWVLCTYGTRIKTFRNPEKLNQWDNKEIVLTDEFKKVFMEAGIDINGNLKEAICTLTEKKHLESLMQLMKLLVQMRNSETNSEVDYLLSPVADTEGHFYDSRNCDDNLPKDADANGAYNIARKGLWAVMKIKASKPQENLKLGISNKEWLQFAQEKPYLND

SEQ ID NO: 184 - protein, 1264 aa, unidentified
  REGION 1..1264: note = Category: MG28 effectors
  REGION 1..1264: note = Description: MG28-44 effector
  source 1..1264: note = uncultivated organism sequence
MFKLLPDITGIVFFYRDSWRGYEEVITVDVVFYIGGNVMANSLSGFTGLYSLSKTLRFELRPVGKTKENMKIKGLLSEDEHRAKSYKQVKKIADDYHRKFIENALKNVHLEGVEEYAELYCKRNKTEKERKEIDKAADNLRKQVIKLMTTRDEFKKLGKKDFIEEMLPEFVDSEEKKKLIKEFKGFTTYFGGFFENRNNMYSAEKKSTSIGYRVIDQNLPKYIDNVNALKKILEVNPGNMIENIENDFMDMLEGKALNEFISLDNYSYFITQSGIDKYNTVIGGKSCDERTRIKGINEYVNLYNQKADKKIGILKPLYKQILSDKDSKSFLPESFERDNELLNAIELFNAGQKENIESIKGLFEQLSEYEADHIYVKDIFLSEISNELFSEWGYIKGRLEDKYDEEYTGKKKANTEKYIEERKKYFKNKRSYSLSELDAVLENNAVTSYFSGEQLKQAIINMADSYKDIEDLVNTDYPSDRKLQKDKESTKLIKGYLDACKDFGRFIQPLLGDGKESEKDAAFYGKFTPAWEAFDSITPLYNKVRNYMTKKPYSTEKVKLNFENQTLLAGWDLNKEEGNKSLIFIKDNNYYLGIMDKQHNKIFRDVEEAKSEPYYRKMEYKLLPGANKMLPKVFFAKSNIDFFNPSNKILEDYNAGRHKKGDNFDIKACHALIDFFKEAIEKHQEWRQFEFEFSPTETYKDISDFYREVEAQGYKISFKNISEKYIDELVDEGKLYLFKIWNKDFSPHSKGTPNLHTLYWKMIFDEKNLQDVVYKLNGEAEVFFRKASIDEKDIIKHEANKPIENKNKLNDKKKSVFNYDLIKDRRYTVDKFQFHVPITLNFKALGRDNIDRYAREYIKEAKDLHIIGIDRGERHLLYLTVIDMDGNIKEQYSLNEIVNEYNGKEHHINYHDLLDKREKEMERAKKEWQTIESIKELKEGYISQVIYKISQLMIKYNAILVLENLNEGFINGRKKVGKQVYQKFEKMMIDKLNYLVDKNLEEGEAGGLLKAYQLASKFESFKKLGKQSGMMFYIPAWNTSNIDPCTGFVNLFERKHLKYSSVNAAVDFWSKFESIAYDDKGEYFKFSFDYSRFTGRAEGTKTDWTVCSVGERIVNFRNPDNNSQWDSKTVDPTAEIIELCRGYDIDYKSEDLKTEFVSVKDRRFHEELLRLFRLVLQMRNSVTGTEIDYMISPVANAEGVFYDSRNCKKNLPENADANGAYNIARKGLWIINRIKETKEAELNKVNLNISNKEWLNFAQKNILR

SEQ ID NO: 185 - protein, 1228 aa, unidentified
  REGION 1..1228: note = Category: MG28 effectors
  REGION 1..1228: note = Description: MG28-45 effector
  source 1..1228: note = uncultivated organism sequence
MRQKYDGFESCYGISKVIRTGLIPQGATLEHIEKKGLLLLEAKRAEDYTKVKKIIDRYHRKYIDNQLKDAELSGVEESYSLYCKTNRTEKENTDLKKDLEKLRKQVSNFLTSSAEFKRIDKKELIEKDLLNFVQGDEEEEELVKSFKGFTTYFKGFHENRKNMYSHEEKSTAIAYRVINQNMFRYFDNIRSISKFILANSEKNIAELESIYSDKLNGKTLKEFFSVDNYSFFISQSGIDTYNMIIGGYSVDERTKVKGINEYINLFNQENHEKFGTLKPLYKQILAERTTESFLPEKFENDKEVIESLAAFSHNMSDTLLEIMEVFGKIGEYDASGIYLKYDSLKDISTCVFSDWSAITNALWERYDVQYIGKKKKETKAYIEEKRKHFKNLKSVSADEINTAMGENVLIPYSDAAKSLFEKICVAEENIRELINLDYPDDKELSKDKAAVKDIKAYLDSVKALQHHMKPLLGNQDESGKNEFFYGDFSGLWDELDALTPLYNKVRNYVTKKPYSTEKIKLNFDNSTLLNGWDLNKEEANTAILMQREGFLYLGIMDKKHNKIFRNIENTGCEDCYQKMEYKLLPGANKMLPKVFFSKKGIESFKPPLEILEIYKNETFKKGDAFNIDDCHTIIDFYKKALNEHEDWKKFEFKFSKTKDYRDISEFYREVEAQGYKISFKAIPKKIIDEYVEKGWLYLFKIWNKDFSEYSKGTPNLHTLYLKMLFDPRNLENVVYKLNGEAEIFYRKASIQPKDIIKHPANEAIKNKNPLNKKQSSIFKYDLIKDRRYTVDKFEFHVPITLNFKARGKENINTEVREYIKRSKNLYVIGVDRGERNLLYVSVVDADGSIVEQYSLNDIVNEYKGVQYRTDYHALLDTKEKNRDKARKEWTEIQNIKELKEGYISQVVHKICELMMKYEAIIALEDLNGGFKNSRKKVEKQVYQKFEKMLIEKLNYLVDKKADVNEPSGLLHALQLTSKFEGFNKLFGQSGFVFYVPAWNTSNIDPCTGFTNLFFSKDLRYASVENSLEFWKKFDSVAYDDTKDIFSFTFDYNNFNQRAEEIKSKSKWTVYSYGDRLETFRNADLNQQYDSREVKLTEAFKELFKKYEIPHENCEIKENILNCKERDFHDKLLHLFKLTLQLRNSKTGTMIDYMTSPVMDIDGNFFDSRTASSSLPQDADANGAYNIARKGLWLIEKLKNTKDADLPKAKLAIKNAEWLAYAQRNENNG

SEQ ID NO: 186 - protein, 1242 aa, unidentified
  REGION 1..1242: note = Category: MG28 effectors
  REGION 1..1242: note = Description: MG28-46 effector
  source 1..1242: note = uncultivated organism sequence
MNTYEELTGSYSLTKTISLALNPIGETLRHIEEKGFIAQDEQRAEDYKKVKDIIDRYHKYFITMCLDGFKFSTDKLMKYVALAENAKRDEDAFDEVKTQLRKEIVAAFEKGETYKDLFKKELILEHLPNFVTDENEKRLVASFNKFTTYFTGFHENRENMYSDEAKSTAIAHRLIHENLPMFYDNMKSFKKIAACEDCIDFAEFEAAFSEEFKEFKVEHLTDIFQLEYFNNTLTQRKIDFYKLVIGGKVLEDGTKLKGVNEYVNLYNQQHKDARLPLLKPLYKMILSDKVALSWLPEEFKSDEEMVEAIQEMHKNLKGALTDNAENNLRDLLLNMDKYDLAHIYIANDLGLTDISQNIFGQYDVYTSALKQALRNEYAPTPKERRNPELYDERINKLFKSRTSFSIAELNSLADSDHTIENHFKQLGAAERNGKQEIDLFSQIETAYAKASDILSGKHGNIGQSEAETALVKNLLDAYKSLQHFIKPLLGHGDEAEKDNEFDAKLRAAWDALDIINPLYNKVRNWLTRKPYSTEKIKLNFENAQLLNGWDKNKETDCTSVLLRKDGMYYLAIMNKKANHAFACDELPADGDCYEKIDYKQIALPMGLGAFVRKCGKTAEKLGWSCPEKLKNKDKKIITNDAEAEGVLPDLIDCYKAFLNTYEKDGFKYKDFNFKFKPSSEYSSLVEFFAEVPSQGYKIAFRKVSVAYINQLVESGKLYLFQIWNKDFSKFSKGTPNMHTLYWKQLFDERNLADVVYKLNGQAEVFYRKRSLKLEETTVHQAHQPIPNKNKQNEKRQSQFNYDIVKNRRFTVDKFQFHVPITLNFKATGRGNINDKVLEIIRNNGIKHVIGIDRGERHLLYLSLIDLKGNIIKQMTLNDIVNEYRGHTYATNYKDLLAEREDNRTEARRNWKKIDNIKEIKQGYLAQVVHIISKMMVEYKAIVILEDLNMGFMRGRQKIERSVYEQFEKSLIEKLNYYVDKQKDEEEVGGLLHALQLTSKFKSFKELGKQSGCLFYVPAWNTSKIDPVTGFVNLFDTKYVNVEKARAFFSNFDAIRYNAEKDWFEFAFNYSNFTDKAKDTREKWTLCTHGTSIRTFRNPSKLNQWDSEEVVLTDEFKKVFEKAGIDICGNLKNAICALKEKAHLEKLMQLMKLLLQMRNSKPNTEVDYMISPVADEQGNFYDSRCGNSALPDNADANGAYNIARKGLWVIKQIRETPAGKRPKLAIKNKEWLKFAQQKPYLDD

SEQ ID NO: 187 - protein, 1242 aa, unidentified
  REGION 1..1242: note = Category: MG28 effectors
  REGION 1..1242: note = Description: MG28-47 effector
  source 1..1242: note = uncultivated organism sequence
MNTYEELTGSYPLIKTINFALNPIGETLRHIEEKGFIAQDEQRAEDYKKVKDIIDRYHKYFITMCLDGFKFSTDNLMKYVALAEDAKRDKKAFDEVKAQLRKEIVGAFSKNKIYGDLFGEKLIKQHLPNFVTDENEKRLVASFNKFTTYFTGFHENRENMYSDEAKSTAIAYRLIHENLPMFYDNMKSFKKIAACEDCIDFAEFEAAFSEEFKAFKVEHLADIFQLEYFNNTLTQRKIDFYKLVIGGKVLEDGTKLKGVNEYVNLYNQQHKDARLPLLKPLYKMILSDKVALSWLPEEFESDEEMVEAIQEMHKNLKGALTDNAENNLRDLLLNMDKYDLAHIYIANDLGLTDISQNIFGQYDVYTSALKQALRNEYAPTPKERRNPELYDERINKLFKSRTSFSIAELNSLADCDHTIENHFKQLGAAERNGKQEIDLFSQIETAYAKASDILSGKYGNIGQSEAETALVKNLLDAYKSLQHFIKPLLGHGDEAEKDNEFDAKLRAAWDALDIINPLYNKVRNWLTRKPYSTEKIKLNFENAQLLNGWDKNKETDCTSVLLRKDGMYYLAIMNKKANHAFACDELPSDGDCYEKIDYKQIALRMGLGAFVRRCGKTAEKLGWSCPERLKNKDKKIITNDAEAEGVLPDLIDCYKAFLNTYEKDGFKYKDFNFKFKPSSEYSSLVEFFAEVPSQGYKIAFRKVSVAYINQLVESGKLYLFQIWNKDFSKFSKGTPNMHTLYWKQLFDERNLADVVYKLNGKAEVFYRKRSLKLEETTVHQAHQPISNKNKQNEKRQSQFNYDIVKNRRFTVDKFQFHVPITLNFKATGRGDINDKVLEIIRNNGIKHVIGIDRGERHLLYLSLIDLKGNIIKQMTLNDIVNEYRGHTYTTNYKDLLAEREDNRTEARRNWKKIDNIKEIKQGYLAQVVHIISKMMVEYKAIVILEDLNMGFMRRWQKIERSVYEQFEKSLIEKLNYYVDKQKDENEVGGLLHAFQLTSKFKSFKELGKQSGCLFYVPAWNTSKIDPVTGFVNLFDTKNVKGEKVRAFFSNFDAIRYNAERDWFEFAFNYSNFTNKARDTREEWTLCTHGTSIRTFRNPSKINHRDSEEVVLTDEFKKVFEKAGIDICGNLKNAICALKEKAHLEKLMQLMKLLLQMRNSKPNTEVDYMISPVADEQGNFYDSRCGNSALPDNADANGAYNIARKGLWVIKQIRETPAGKRPDWAIKNKEWLKFAQQKPYLDD

SEQ ID NO: 188 - protein, 1242 aa, unidentified
  REGION 1..1242: note = Category: MG28 effectors
  REGION 1..1242: note = Description: MG28-48 effector
  source 1..1242: note = uncultivated organism sequence
MNTYEELTGSYPLIKTINLALNPIGETLRHIEEKGFIAQDEQRAEDYKKVKDIIDRYHKYFITMCLDGFKFSTDKLMKYVALAENAKRDEDAFDEVKPQLRKEIVAAFEKGETYKDLFKKELILEHLPNFVTDENEKRLVASFNKFTTYFMGLHENRENMYSDEAKSTAIAHRLIHENLPMFYDNMKSFKKIAACEDCIDLAEFEAAFSEEFKEFKVEHLADIFQLEYFNNTLTQRKIDFYKLVIGGKVLEDGTKLKGVNEYVNLYNQQHKDARLPLLKPLYKMILSDKVALSWLPEEFKSDEEMMEAILEMHKNLKGALTDNAENNLRDLLLNMDKYDLAHIYIANDLGLTDISQNIFGQYDFYTSALKQALRNEYAPIPKERRNPELYDERINKLFKSRTSFSIAELNSLADCDHTIENHFKQLGAAERNGKQKIDLFSQIETAYAKASDILSGKHGNIGQSEAETALVKNLLDAYKSLQHFIKPLLGHGDEAEKDNEFDAKLRAAWDALDIINPLYNKVRNWLTRKPYSTEKIKLNFENAELLKGWDKNKETVNTSVLLRKDGMYYLAIMNEKAKNAFACDELPSDGDCYEKIDYKQIALRMGLGAFVRRCGKTAEKLGWSCPENLKNKDKKIITNDAEAEGVLPDLIDCYKAFLNTYEKDGFKYKDFNFKFKPSSEYSSLVEFFAEVPSQGYKIAFRKVSIAYINQLVESGNLYLFQIWNKDFSKFSKGTPNMHTLYWKQLFDERNLADVVYKLNGKAEVFYRKRSLKLEETTVHQAHQPISNKNKQNEKRQSQFNYDIVKNRRFTVDKFQFHVPITLNFKATGRGDINDKVLEIIRNNGIKHVIGIDRGERHLLYLSLIDLKGNIIKQMTLNDIVNEYRGHTYTTNYKDLLAEREDNRTEARRNWKKIDNIKEIKQGYLAQVVHIISKMMVEYKAIVILEDLNMGFMRRWQKIERSVYEQFEKSLIEKLNYYVDKQKDENEVGGLLHAFQLTSKFKSFKELGKQSGCLFYVPAWNTSKIDPVTGFVNLFDTKNVKGEKVRAFFSNFDAIRYNAERDWFEFAFNYSNFTNKARDTREEWTLCTHGTSIRTFRNPSKINHRDSEEVVLTDEFKKVFEKAGIDICGNLKNAICALKEKAHLEKLMQLMKLLLQMRNSKPNTEVDYMISPVADEQGNFYDSRCGNSALPDNADANGAYNIARKGLWVIKQIRETPAGKRPDWAIKNKEWLKFAQQKPYLDD

SEQ ID NO: 189 - protein, 1242 aa, unidentified
  REGION 1..1242: note = Category: MG28 effectors
  REGION 1..1242: note = Description: MG28-49 effector
  source 1..1242: note = uncultivated organism sequence
MNTYEELTGLYSFKKTISLALNPIGETLRHIEEKGFIAQDEQRAEDYKKVKDIIDRYHKYFITMCLDVFKFSTDKLMKYVALAENAKRDEDAFDEVKTQLRKEIVGAFSKNKTYGDLFGEKLIKQHLPNFVTDENEKRLVASFNEFTTYFEKFHKCRENMYSDEAKSTAIAHRLIHENLPMFYDNMKSFKKIAACEDCIDFAEFEAAFSEEFKEFKVEHLADIFQLEYFNNTLTQRKIDFYKLVIGGKVLEDGTKLKGVNEYVNLYNQQHKDARLPLLKPLYKMILSDKVALSWLPEKFESDEEMVEAIQEMHKNLKGTLIDNAENNLRDLLLNMGKYDLAHIYIANDLGLRDISQSIFGQYDVYTSAIKQALRNEYAPIPKERRNPELYDERINKLFKLRTSFSIAELNSLADSDHTIENHFKQLGAAERNGKQEIDLFSQIETAYAKASDILSGKHGNIGQSEAETALVKNLLDAYKSLQHFIKPLLGHGDEAEKDNEFDAKLRAAWDALDIINPLYNKVRNWLTRKPYSTEKIKLNFENAQLLNGWDKNKETDCTSVLLRKDGMYYLAIMNKKANHAFACDELPADGDCYEKIDYKQIALPMGLGAFVRKCGKTAEKLGWSCPEKLKNKDKKIITNDAEAEGVLPDLIDCYKAFLNTYEKDGFKYKDFNFKFKPSSEYSSLVEFFAEVPSQGYKIAFRKVSLAYINQLVESGKLYLFQIWNKDFSKFSKGTPNMHTLYWKQLFDERNLADVVYKLNGQAEVFYRKRSLKLEETTVHQAHQPILNKNKQNEKRQSQFNYDIVKNRRFTVDKFQFHVPITLNFKATGRGNINDKVLEIIRNNGIKHVIGIDRGERHLLYLSLIDLKGNIIKQMTLNDIVNEYRGHTYATNYKDLLAEREDNRTEARRNWKKIDNIKEIKQGYLAQVVHIISKMMVEYKAIVILEDLNMGFMRGRQKIERSVYEQFEKSLIEKLNYYVDKQKDEEEVGGLLHALQLTSKFKSFKELGKQSGCLFYVPAWNTSKIDPVTGFVNLFDTKYVNVEKARAFFSNFDAIRYNAEKDWFEFAFNYSNFTDKAKDTREEWTLCTHGTSIRTFRNPSKLNQWDSEEVVLTDEFKKVFEKAGIDICGNLKNAICALKEKAHLEKLMQLMKLLLQMRNSKPNTEVDYMISPVADEQGNFYDSRCGNSALPDNADANGAYNIARKGLWVIKQIRETPAGKRPKLAIKNKEWLKFAQQKPYLDD

SEQ ID NO: 190 - protein, 1244 aa, unidentified
  REGION 1..1244: note = Category: MG28 effectors
  REGION 1..1244: note = Description: MG28-50 effector
  source 1..1244: note = uncultivated organism sequence
MKTFNDLTGLYSLSKTLRFELKPVGKTKDNIETKGIIAQDEKRAEEYKKVKDIIDRYHKSFIDMCLAGLVLKTTSDGNNDSLKDYVALASKSNRDEKEDKDFDDVKTVLRKHIVDAFKKGNSYGDLFKKELIQNHLPDFVTDEQEKLMVENFSKFTTYFTGFNENRKNMYSDEKKSTAIAYRLIHENLPMFIDNIKSFAKITEQEDIDFIADVEHSFKEELKGKSITQMFCLENFTETLTQGQIELYNKIVGGRVEDSGVKKQGINEYVNLYNQQHKDARLPLLKPLYKMILSDRVALSWLPEELATDEEMLAAINETHGNLKDVLADVRELLQNINNYDTKHIYIANDKGLTDISQQIFGQYDVYTSAIKAELRNNTNHSAKEKKNPELLEKRINDIFKASKSFSIEYLNSHVDSDKTIQSYYKELGAYDRNGEQRINLLSQIELAYVDAHDVLLGKHTNLNQSEDSIKKIKALLDAYKALQHFIKPLLGNGDEADKDNEFDAKLRAIWDDLDIVTPLYDKVRNRLTRKPYSTEKIKLNFDNAQLLNGWDMNKEPDCTSVLLRKDGQYYLAIMDKKSNHAFDADELPCDGECYEKMEYKQMALPMGMGAFVRKCFGTAKALGWQCPRHLMTSDGKIIIKDEEAQKVLPELIDCYKSFLDIYEKDGFKYKTFNFKFKPSSEYEKLSHFFAEVPSQGYKCSFRNVSVSFINQLVDEGKLYLFQIWNKDFSEYSKGTPNMHTLYWKMLFDERNLANVVYKLNGQAEVFYRKRSLDLDKTTIHRANQPIANKNMQNEKRESTFCYDIVKNRRYTVDKFQFHVPITINFKATGSDNINASVLDVIRNNGIEHIIGIDRGERHLLYLSLIDMKGNIVKQMTLNDIINEYKGNTYTTNYKELLQAREGDRKEARQNWQKIENIKELKEGYLSQVVHVITKMMVEYKAIVVLEDLNGGFMRGRQKIERQVYEKFEKMLIDKLNYYVDKQRDANENGGLLHAYQLASKFDTFKKLGKQSGCLFYIPAWNTSKIDPVTGFVNMFDTRYENADKTRNFFSKFKSISYNADKDWFEFVIGDYSKFTDKAKDTRTDWVLCTYGTRIKTFRNPEKLNQWDNKEIVLTDEFKKVFMEAGIDINGNLKEAICTLTEKKHLESLMQLMKLLVQMRNSETNSEVDYLLSPVADTEGHFYDSRNCGDNLPKDADANGAYNIARKGLWAVMKIKASKPQENLKLGISNKEWLQFAQEKPYLND

SEQ ID NO: 191 - protein, 1226 aa, unidentified
  REGION 1..1226: note = Category: MG28 effectors
  REGION 1..1226: note = Description: MG28-51 effector
  source 1..1226: note = uncultivated organism sequence
MRQKYDGFESCYGISKVIRTGLIPQGATLEHIEKKGLLLSEEKRAEDYTKVKKIIDRYHRKYIDNQLKDAELSGVEESYSLYCKTNRTEKENTDLKKFLEKLRKQVSNFLTSSDEFKRIDKKELIEKDLLNFVQGDEEEEELVKSFKGFTTYFKGFHENRKNMYSHEEKSTAIAYRVINQNMFRYFDNIRSISKFILANSENNIAELESIYSDKLKGKTLEEFFSVDNYSFFISQSGIDTYNMIIGGYSVDERTKVKGINEYINLFNQENHEKFGTLKPLYKQILAERTTESFLPEKFENDKEVIESLAAFSHNMSDTLLEIMEVFGKIGEYDASGIYLKYDSLKDISTCVFSDWSAITNALWERYDVQYIGKKKKETKAYIEEKRKHFKNLKSVSADEINTAMGENVLIPYSDAAKSLFEKICVAEENIRELINLDYPDDKELSKDKAAVKDIKAYLDSVKALQHHMKPLLGNQDESGKNEFFYGDFSGLWDELDALTPLYNKVRNYVTKKPYSTEKIKLNFDNSTLLNGWDLNKEEANTAILMQREGFLYLGIMDKKHNKIFRNIENTGCEDCYQKMEYKLLPGANKMLPKVFFSKKGIESFKPPLEILEIYKNETFKKGDAFNIDDCHTIIDFYKKALNEHEDWKKFEFKFSKTKDYRDISEFYREVEAQGYKISFKAIPKKIIDEYVEKGWLYLFKIWNKDFSEYSKGTPNLHTLYLKMLFDPRNLENVVYKLNGEAEIFYRKASIQPKDIIKHPANEAIKNKNPLNKKQSSIFKYDLIKDRRYTVDKFEFHVPITLNFKARGKENINTEVREYIKRSKNLYVIGVDRGERNLLYVSVVDADGSIVEQYSLNDIVNEYKGVQYRTDYHALLDTKEKNRDKARKEWTEIQNIKELKEGYISQVVHKICELMMKYEAIIALEDLNGGFKNSRKKVEKQVYQKFEKMLIEKLNYLVDKKADVNEPSGLLHALQLTSKFEGFNKLFGQSGFVFYVPAWNTSNIDPCTGFTNLFFSKDLRYSGVENSLEFWKRFDSVAYDDRKDMFAFAFDYNNFNQRAEGSKSKWTVYSYGDRLETFRNPDLNQQYDSREVKLTEAFKELFKKYGISYKSCEIKENILNCKERGFHEKLLHLFKLTLQLRNSKTGTMIDYMTSSVMSVDGNFFDSRTASSKLPQDADANGAYNIARKGLWLIEKLKNTKDADLPKAKLAIKNAEWLAYAQRNENNG

SEQ ID NO: 192 - protein, 1242 aa, unidentified
  REGION 1..1242: note = Category: MG28 effectors
  REGION 1..1242: note = Description: MG28-52 effector
  source 1..1242: note = uncultivated organism sequence
MNTYEELTGSYSLIKTINFALNPIGETLRHIEEKGFIAQDEQRAEDYKKVKDIIDRYHKYFITMCLDGFKFSTDNLMKYVALAENAKRDEGAFNEVKTQLRKEIVAAFEKGETYKDLFKKELILEHLPNFVTDENEKRLVASFNKFTTYFMGLHENRENMYSDEAKSTAIAHRLIHENLPMFYDNMKSFKKIAACEDCIDLAEFEAAFSEEFKEFKVEHLADIFQLEYFNNTLTQRKIDFYKLVIGGKVLEDGTKLKGVNEYVNLYNQQHKDARLPLLKPLYKMILSDKVALSWLPEEFKSDEEMVEAILEMHKNLKGALTDNAENNLRDLLLNMDKYDLAHIYIANDLGLTDISQNIFGQYDFYTSALKQALRNEYAPIPKERRNPELYDERINKLFKSRTSFSIAELNSLADCDHTIENHFKQLGAAERNGKQEIDLFSQIETAYAKASDILSGKHGNIGQSEAETALVKNLLDAYKSLQHFIKPLLGHGDEAEKDNEFDAKLRAAWDALDIINPLYNKVRNWLTRKPYSTEKIKLNFENAELLKGWDKNKETVNTSVLLRKDGMYYLAIMNEKAKNAFACDELPSDGDCYEKIDYKQIALRMGLGAFVRRCGKTAEKLGWSCPENLKNKDKKIITNDAEAEGVLPDLIDCYKAFLNTYEKDGFKYKDFNFKFKPSSEYSSLVEFFAEVPSQGYKIAFRKVSVAYINQLVESGNLYLFQIWNKDFSKFSKGTPNMHTLYWKQLFDERNLADVVYKLNGKAEVFYRKRSLKLEETTVHQAHQPISNKNKQNEKRQSQFNYDIVKNRRFTVDKFQFHVPITLNFKATGRGDINDKVLEIIRNNGIKHVIGIDRGERHLLYLSLIDLKGNIIKQMTLNDIVNEYRGHTYTTNYKDLLAEREDNRTEARRNWKKIDNIKEIKQGYLAQVVHIISKMMVEYKAIVILEDLNMGFMRRWQKIERSVYEQFEKSLIEKLNYYVDKQKDENEVGGLLHAFQLTSKFKSFKELGKQSGCLFYVPAWNTSKIDPVTGFVNLFDTKNVKGEKVRAFFSNFDAIRYNAEKDWFEFAFNYSNFTDKAKDTREEWTLCTHGTSIRTFRNPSKLDHWDSEEVVLTDEFKKVFEKAGIDICGNLKNAICALKEKAHLEKLMQLMKLLLQMRNSKPKTEVDYMISPVADEQGNFYDSRCGNSALPDNADANGAYNIARKGLWVIKQIRETPAGKRPDWAIKNKEWLKFAQQKPYLDD

SEQ ID NO: 193 - protein, 1275 aa, unidentified
  REGION 1..1275: note = Category: MG28 effectors
  REGION 1..1275: note = Description: MG28-53 effector
  source 1..1275: note = uncultivated organism sequence
MEQFTNLYPVSKTLRFELIPDERTKDFLEHSDLINQDEHRAESYKAVKKIIDRYHKAFIDDVLSSLKLQYAKTGHLDSLEELYSLYISSQKIEKVQEQLRKQIVKALTQDSRFKRMGKKELIREDIFKAISLTSEEQKLVEEFHDFTTYFNGFHENRKNMYSAEAQSTAIAYRLIHENLPKFIDNIAIFQKILHSPVAENFPQLYKEMEEHLNVNSIEEMFMLDYYNEVLTQTQIEVYNAIIGGRTMQDGSKIQGINEYVNLYNQKQSARENRLPKLKPLFKQILSDRETMSWLPEEFSSDAELLEAVNDCYASLNDHVFTPLQDMLSCLSDFSLEGVFVPNDLSITDISQKLYGDWSVIKQTVISDLKTKNPPKRNEKPEKYEERISKLLKSTDSFSVAYLNGCLADKKGDICSYFCNLGAVNTTTEQKENLFLQIQNAYAEASELLSKEYPREKNLSQDKPNVEKLKALLDAIKSLQHFVKPLLGAGDEAGKDERFYGEMAILWEELSKVTQLYNKVRNRMTRKPYSTEKFKLTFNIKGNFLGGWVDSKTDRSDNGTQYGGYLFRRKNAINEYDYYLGMSANTKLFRRQANVEGTYERLDYYQPKSQTVYGNSYVGKNGYEADKQALLKSILTFVANTGNEELMQQVNSKDTPSAMLTVMKEASETFYEQLLEDTDFSAINKEVTDNLHKTILSMNRIPRVNDYKDVEFEVFTEPQQVIDDICKDKVFSYFPVSDDEMNQAMADANRPLLLFKISNKDLSYAEKHSKGLRQSRGAENLHTMYFKALMSGSQSVFDIGTGEVFFRRSSLNVSKPTHPQSTPIQNKNLEGCSSFNYDLIKDKRYTVDKFVFHLSMIQNYQTSGKADVNAMTRDFIHDHFDEMHFIGIDRGERHLLYVSVIDSKGNIKEQFSLNQIANEYRGNSYKTDYHSLLGKREETRQRERQSWRTIEGIKELKQGYLSQVVHKIVTLMVKYQAIVVLEDLNMGFKRGRQKVESSVYQQFEKALIDKLNYLVDKQQAPNDYGGLLKGYQLTNKFTSFRDMKRQNGFLFYIPAWNTSKIDPVTGFVDLLHPKYENVEKARTFFCKFKSIRYNSEKDRYEFTFDYNDFTTQADGTRTLWTICTHGERIETYRNPEKNSQWDSREVDLTESMTLLFSKYNISQHENLKEAIARQTEKQFFEKLIHLLRLMLQMRNSKTGTDVDYLISPVADENGCFFDSRSCDKTLPENADANGAYNIARKGLWIARQIQRTGVDAKSDLSITNKEWLKFAQFKDV

SEQ ID NO: 194 - protein, 1242 aa, unidentified
  REGION 1..1242: note = Category: MG28 effectors
  REGION 1..1242: note = Description: MG28-54 effector
  source 1..1242: note = uncultivated organism sequence
MNTYEELTGSYSLIKTINFALNPIGETLRHIEEKGFIAQDEQRAEDYKKVKDIIDRYHKYFITMCLDGFKFSTDKLMKYVALAENAKRDEGAFNEVKTQLRKEIVAAFEKGETYKDLFKKELILEHLPNFVTDENEKRLVASFNKFTTYFTGFHENRENMYSDEAKSTAIAYRLIHENLPMFYDNMKSFKKIAACEDCIDFAEFEAAFSEEFKEFKVEHLADIFQLEYFNNTLTQRKIDFYKLVIGGKVLEDGTKLKGVNEYVNLYNQQHKDARLPLLKPLYKMILSDKVALSWLPEEFKSDEEMVEAIQEMHKNLKGALTDNAENNLRDLLLNMDKYDLAHIYIANDLGLTDISQNIFGQYDVYTSAIKQALRNEYAPTPKERRNLELYDERINKLFKSRTSFSIAELNSLADCDHTIENHFKQLGAAERNGKQEIDLFSQIETAYAKASDILSGKHGNIGQSEAETALVKNLLDAYKSLQQFIKPLLGHGDEAEKDNEFDAKLRAAWDALDIINPLYNKVRNWLTRKPYSTEKIKLNFENAQLLNGWDKNKETDCTSVLLRKDGMYYLAIMNKKANHAFACDELPADGDCYEKIDYKQIALPMGLGAFVRKCGKTAEKLGWSCPEKLKNKDKKIITNDAEAEGVLPDLIDCYKAFLNTYEKDGFKYKDFNFKFKPSSEYSSLVEFFAEVPSQGYKIAFRKVSVAYINQLVESGKLYLFQIWNKDFSKFSKGTPNMHTLYWKQLFDERNLADVVCKLNGQAEVFYRKRSLKLEETTVHQAHQPIPNKNKQNEKRQSQFNYDIVKNRRFTVDKFQFHVPITLNFKATGRGNINDKVLEIIRNNGIKHVIGIDRGERHLLYLSLIDLKGNIIKQMTLNDIVNEYRGHTYATNYKDLLAEREDNRTEARRNWKKIDNIKEIKQGYLAQVVHIISKMMVEYKAIVILEDLNMGFMRGRQKIERSVYEQFEKSLIEKLNYYVDKQKDEEEVGGLLHALQLTSKFKSFKELGKQSGCLFYVPAWNTSKIDPVTGFVNLFDTKYVNVEKARAFFSNFDAIRYNAEKDWFEFAFNYSNFTDKAKDTREKWTLCTHGTSIRTFRNPSKLNQWDSEEVVLTDKFKKVFEKAGIDICGNLKNAICALKEKAHLEKLMQLMKLLLQMRNSKPNTEVDYMISPVADEQGNFYDSRCGNSALPDNADANGAYNIARKGLWVIKQIRETPAGKRPKLAIKNKEWLKFAQQKPYLDD

SEQ ID NO: 195 - protein, 1242 aa, unidentified
  REGION 1..1242: note = Category: MG28 effectors
  REGION 1..1242: note = Description: MG28-55 effector
  source 1..1242: note = uncultivated organism sequence
MNTYEELTGSYSLTKTISLALNPIGETLRHIEEKGFIAQDEQRAEDYKKVKDIIDRYHKYFITMCLDGFKFSTDKLMKYVALAENAKRDEDAFDEVKTQLRKEIVAAFEKGETYKDLFKKELILEHLPNFVTDENEKRLVASFNKFTTYFTGFHENRENMYSDEAKSTAIAHRLIHENLPMFYDNMKSFKKIAACEDCIDFAEFEAAFSEEFKEFKVEHLTDIFQLEYFNNTLTQRKIDFYKLVIGGKVLEDGTKLKGVNEYVNLYNQQHKDARLPLLKPLYKMILSDKVALSWLPEEFKSDEEMVEAIQEMHKNLKGALTDNAENNLRDLLLNMDKYDLAHIYIANDLGLTDISQNIFGQYDVYTSALKQALRNEYAPIPKERRNPELYDERINKLFKSRTSFSIAELNSLADCDHTIENHFKQLGAAERNGKQEIDLFSQIETAYAKASDILSGKHGNIGQSEAETALVKNLLDAYKSLQHFIKPLLGHGDEAEKDNEFDAKLRAAWDALDIINPLYNKVRNWLTRKPYSTEKIKLNFENAQLLNGWDKNKETDCTSVLLRKDGMYYLAIMNKKANHAFACDELPADGDCYEKIDYKQIALPMGLGAFVRKCGKTAEKLGWSCPERLKNKDKKIITNDAEAEGVLPDLIDCYKAFLNTYEKDGFKYKDFNFKFKPSSEYSSLVEFFAEVPSQGYKIAFRKVSVAYINQLVESGKLYLFQIWNKDFSKFSKGTPNMHTLYWKQLFDERNLADVVYKLNGQAEVFYRKRSLKLEETTVHQAHQPIPNKNKQNEKRQSQFNYDIVKNRRFTVDKFQFHVPITLNFKATGRGNINDKVLEIIRNNGIKHVIGIDRGERHLLYLSLIDLKGNIIKQMTLNDIVNEYRGHTYATNYKDLLAEREDNRTEARRNWKKIDNIKEIKQGYLAQVVHIISKMMVEYKAIVILEDLNMGFMRGRQKIERSVYEQFEKSLIEKLNYYVDKQKDEEEVGGLLHALQLTSKFKSFKELGKQSGCLFYVPVWNTSKIDPVTGFVNLFDTKYVNVEKARAFFSNFDAIRYNAEKDWFEFAFNYSNFTDKAKDTREKWTLCTHGTSIRTFRNPSKLNQWDSEEVVLTDEFKKVFEKAGIDICGNLKNAICALKEKAHLEKLMQLMKLLLQMRNSKPNTEVDYMISPVADEQGNFYDSRCGNSALPDNADANGAYNIARKGLWVIKQIRETPAGKRPKLAIKNKEWLKFAQQKPYLDD

SEQ ID NO: 196 - protein, 1240 aa, unidentified
  REGION 1..1240: note = Category: MG28 effectors
  REGION 1..1240: note = Description: MG28-56 effector
  source 1..1240: note = uncultivated organism sequence
MNTYEELTGSYSLTKTISLALNPIGETLRHIEEKGFIAQDEQRAEDYKKVKDIIDRYHKYFITMCLDRFKFSTDKLMKYVALAENAKRDEDAFDEVKTQLRKEIVVAFEKGETYKDLFKKELILEHLPNFVTDENEKRLVASFNKFTTYFTGFYENRENMYSDEVKSTAIAHRLIHENLPMFYDNMKSFKKIAACEDCIDFTEFEAAFSEEFKEFKVEHLADIFQLEYFNNTLTQRKIDFYKLVIGGKVLEDGTKLKGVNEYVNLYNQQHKDARLPLLKPLYKMILSDKVALSWLPEEFKSDEEMVEAIQEMHKNLKGALTDNAENNLRDLLLNMDKYDLAHIYIANDLDLTDISQNIFGQYDVYTSALKQALRNEYAPTPKERRNPELYDERINKLFKSRTSFSIAELNSLADSDHTIENHFKQLGAAERNGKQEIDLFSQIETAYAKASDILSGKHGNIGQSEAETALVKNLLDAYKSLQHFIKPLLGHGDEAEKDNEFDAKLRAAWDALDIINPLYNKVRNWLTRKPYSTEKIKLNFENAQLLNGWDKNKETDCTSVLLRKDGMYYLAIMNKKANHAFACDELPADGDCYEKIDYKQIALPMGLGAFVRKCGKTAEKLGWSCPEKLKNKDKKIITNDAEAEGVLPDLIDCYKAFLNTYEKDGFKYKDFKFKPSSEYSSLVEFFAEVPSQGYKIAFRKVSVAYINQLVESGKLYLFQIWNKDFSKFSKGTPNMHTLYWKQLFDERNLADVVYKLNGQAEVFYRKRSLKLEETTVHQAHQPIPNKNKQNEKRQSQFNYDIVKNRRFTVDKFQFHVPITLNFKATGRGNINDKVLEIIRNNGIKHVIGIDRGERHLLYLSLIDLKGNIIKQMTLNDIVNEYRGHTYATNYKDLLAEREDNRTEARRNWKKIDNIKEIKQGYLAQVVHIISKMMVEYKAIVILEDLNMGFMRGRQKIERSVYEQFEKSLIEKLNYYVDKQKDEEEVGGLLHALQLTSKFKSFKELGKQSGCLFYVPAWNTSKIDPVTGFVNLFDTKYVNVEKARAFFSNFDAIRYNAEKDWFEFAFNYSNFTDKAKDTREKWTLCTHGTSIRTFRNPSKLNQWDSEEVVLTDEFKKVFEKAGIDICGNLKNAICALKEKAHLEKLMQLMKLLLQMRNSKPNTEVDYMISPVADEQGNFYDSRCGNSALPDNADANGAYNIARKGLWVIKQIRETPAGKRPKLAIKNKEWLKFAQQKPYLDD

SEQ ID NO: 197 - protein, 1271 aa, unidentified
  REGION 1..1271: note = Category: MG28 effectors
  REGION 1..1271: note = Description: MG28-57 effector
  source 1..1271: note = uncultivated organism sequence
MEQFTNLYPVSKTLRFELIPDERTKDFLEHSDLINQDEHRAESYKAVKKIIDRYHKAFIDDVLSSLKLQYAKTGHLDSLEELYSLYISSQKIEKVQEQLRKQIVKALTQDSRFKRMGKKELIREDIFKAISLTSEEQKLVEEFHDFTTYFNGFHENRKNMYSADAQSTAIAYRLIHENLPKFIDNIAIFQKILHSPVAENLPQLYKEMEEYLNVNSIEEMFMLDYYNEVLTQAQIEVYNAIIGGRTLEDGTKIQGINEYVQKQTSRGNRLPKLKPLFKQILSDREAVSWLPEEFSSDAELLEAVNDCYASLNDHVFTPLQDMLSCLSDFSLEGVFVPNDLSITDISQKLYGDWSVIKQTVISDLKTKNPPKRNEKPEKYEERISKLLKSTDSFSVAYLNGCLADKKGDICSYFCNLGAVNTTTEQKENLFLQIQNAYAEASELLSKEYPREKNLSQDKPNVEKLKALLDAIKSLQHFVKPLLGAGDEAGKDERFYGEMAILWEELSKVTQLYNKVRNRMTRKPYSTEKFKLTFNIKGNFLGGWVDSKTDRSDNGTQYGGYLFRRKNAINEYDYYLGMSANTKLFRRQANVEGTYERLDYYQPKSQTVYGNSYVGKNGYEADKQALLKSILTFVANTGNEELMQQVNSKDTPSAMLTVMKEASETFYEQLLEDTDFSAINKEVTDNLHKTILSMNRIPKVNDYKDVEFKVFTEPQQVIDDICKDKVFSYFPVSDDEMNQAMADANRPLLLFKISNKDLSYAEKHSKGLRQSRGTENLHTMYFKALMSGSQSVFDIGTGEVFFRRSSLNVSKPTHPQNTPIQNKNLEGCSSFNYDLIKDKRYTVDKFGFHLSMIQNYQASGKADVNAMTREFIHDHFDEMHFIGIDRGERHLLYVSVIDSKGNIKEQFSLNQIDNEYRGNSYKTDYHSLLGKREETRQRERQSWRTIEGIKELKQGYLSQVVHKIVTLMVKYQAIVVLEDLNMGFKRGRQKVESSVYQQFEKALIDKLNYLVDKQQAPNDYGGLLKGYQLTNKFTSFRDMKRQNGFLFYIPAWNTSKIDPVTGFVDLLHPKYENVEKARAFFCKFKSIRYNSEKDRYEFTFDYNDFTTQADGTRTLWTICTHGERIETYRNPEKNSQWDSREVDLTESMTLLFSKYNISQHENLKEAIARQTEKQFFEKLIHLLRLMLQMRNSKTGTDVDYLISPIADENGCFFDSRSCDKILPENADANGAYNIARKGLWIARQIQKTGVDAKADISITNKEWLKFAQFKDV

SEQ ID NO: 198 - protein, 1625 aa, unidentified
  REGION 1..1625: note = Category: MG28 effectors
  REGION 1..1625: note = Description: MG28-58 effector
  source 1..1625: note = uncultivated organism sequence
MSTEFSPDRLKTARTTLKLSMEDLSILTDRIVSRQSIHGYETERMKPKAAVLNKLAQVLGVSPHYLEGKGVMIDIPALRYTGSKALTREEIHEIENILAFRAERYIDLEEKNGMLKQFSNPLKSFIISNQKEADDASKFLREQWGMGTASITSVYRLLERKGIKLIETTLPQGVLGLSTWCEKKYPLIVMNADKSDTTTERTRFTAIHELGHLLLNIATECDKERICNQFAGCFLLPKEVMYEELGSKRDFITLEEVLDFHLEYGVSVAAIIHQAWDLRIITSEHYNHWFDNIISKNRTEKGWGSYSIKETLGREKRMQTISERANNNKTSSNNTKSIKYSNNKIVSNMSNFKDFTHLYQLSKTLRFELRPIGETLKHFNESGILDHDETRAESYKKVKKLIDRYHKEFMEEALRNFEFQMDDEKQKNSLSEYFFLYSLGKRTEAQDNDFKEIKKNLREQIAKYFKASPKYKNLFKQELIKEDLCNNMQCNEEEQKLVEEFHNFTTYFTGFHENRKNMYSNEEKSTAIAFRLVHQNLPKFIDNIGAFDRARNIDEIKAGIKNLQKHFETKGLLNQGEKIEDFFALDYYSRLAVQSRIDIYNAILGGRTTEKGEKIQGLNEYINLYNQQHKEARLPKMKALFKQILSDRQAISWIEESFKSDNEVLSSVNDFYENLKQNEIFDRTKELLTSVGSYDLSKVYITNDQQLTSISQQLYGSWAVIENAILAEMQNETPRKKKEDAEKYNERLKKAYSNRSSFSIAYIDQCLEAVFDENLIPVEQHFTKLGEAEIETEAECGKIKIPDVFTQIEQTYSAAKSLLCNPYPKDKHLSQSDEDIEKVKNLLDALKRFQHFIKPLTGCGDEAEKDEMFYSDLTELLAEIDQLNSLYNRVRNHLTGKPYSEEKLKLNFENASLLTGWDKNMERANTAVILRKGKLYYLAIMKKEHNSIFASDNLPDKGECYEKMVYKQIALPLGFGGFARKCFGSATKLGWTYPTNLLNKEGKIIIKDEEAKDVLPELIDCYKDFLNIYEKDGFKYSSYNFKFKPSNQYEKLSQFFAEIQQQGYKITFQNISSDYIDQLVNEGKLYLFQIYNKDFSPSSKGTPNMHTLYWQMLFDERNLNDGVYQLNGQAEVFFRKKSLNYTKPTHPANQPIAKKNPHSKNETSQFTYDLIKDKRFTMDKFLFHVPITINFKSSGMDNIDLKVRQWLQKADDVHIIGIDRGERHLLYLTVIDCKGNIKEQMSLNTIENEYKGNTYAFDYHKRLDEKEKERGKAKKNWKTIENIKELKEGYLSQAIHKITQIMLKYNAIIVLEDLNMGFMRGRQKVEKQVYQKFEKMLIDKLNYLADKKKDPSEVGGVLNAYQLTSKFESFTKLGRQSGFLFYIPAWNTSKIDPVTGFVNLFDTQYKSDDKAKMFFSKFKSISYNKDKNWFEFSFDYNDFTNKAEGTKTQWTVCTNGERIENFRSGQKPNQWDGRTINLSQKFKSLFDEYGIDFTKDLQNSICSQSKKGFFKQLLHLFKLTVQMRNSNTETEEEKGKKDFIISPVCVDDKYYNSDIEAEKGKDEEGNWKSELPVNADANGAYNIARKGLMILNHIKQSSDPSKKQEYDLTNKAWLNFVQKGSVEGK

SEQ ID NO: 199 - protein, 1246 aa, unidentified
  REGION 1..1246: note = Category: MG28 effectors
  REGION 1..1246: note = Description: MG28-59 effector
  source 1..1246: note = uncultivated organism sequence
MEQFTNLFNVQKTICFELQPIGKTKENIEINGILTQDEKRAKDYQTVKGFIDEYHKQFIKDRLWNFKLPLVSKGNLDSLEEYQTLYELPKRNDAQEADFSELKDNLRSIIAKRLTESGSAFDRIFKKELIREDLVEFLSNEEDKDLVRQFADFTTYFSGFHENRKNMYSAEEKSTAIAYRLIHQNLPKFMDNMKAFAKIANTSVAEYFADIYAGWKEYLNVNSVEELFSLDYFSETLTQPHIEVYNYIIGKKVLEDGTEIKGINEFVNLYNQQQKDKSKRLPFLVPLYKQILSDREKLSWMAEEFDSDEKMLAAINELYTHLHELLMGEENESLRSLLLNMKDYDLSQINITNDLSLTDISQHLFNRYDVYTNGVKEQLKGITPRKKKESDEDFEDRISKIFKTQKSFSISQLNSLPHPEIDGNKPRSIEEYFMAMGAVNTETTQRESFFSKIETAYEDARAILQMKDTDDSLSQNKPAVSKIKALLDAFKDLQHFIKPLLGSGEEVEKDELFYGSFQLIWDELDSVTPLYNKVRNWLTRKPYSTEKIKLNFDNSQLLGGWDVNKEPDCTGVLLRKDGYYYLGIMDKKFNRVFEENVIHTDGDCYEKMVYKQLGQISQQLPRIAFSKTWQQKLSIPEEIISIKKSESFKKNCGDLQKLISYYKSFISQHEEWNSYFDINFTDRCDYKNLPDFYSEVDSQFYALSFSKVSSSYINVLVDEGKLYLFRIWNKDFSEYSKGTPNLHTLYWKMLFDERNLSDVVYKLNGQAEVFYRKASIKPDNRVVHKANESITNKNALNKKTTSTFKYDIIKDRRYTVDKFQFHVPITINFKASGQTNINPIVQETIRQGGFKHIIGLDRGERHLLYLSLIDLKGKIVKQMTLNEIVNEYNGKPYKTNYHDLLAKREGERTDARRSWDTIETIKELKEGYLSQVVHIISNMMVKYNAIVVLEDLNTGFMRGRQKIERQVYEKFEKMLIVKLNCYIDKKADVMETTGLLHPLQLTCEAKKWKRSHQCGCLFYIPAWNTSKIDPVTGFVNLLDTRYETCEKAHLFFSKFQRISFNQKKGWFEFAFDYNDFTTKAEGTRTQWTLCTYGERIRTFRNPQKNNQWDNERIVLTDEFKKIFDEKGIDIYGNLKDAICNQRDAKFFKDLLGLMKLLLQMRNSITNSEEDYILSPVADEKGHFFDSREGKCNLPIDADANGAYNIARKGLWVICKIKKSLKGEKPTLSITNKEWLKFAQDKPYLND

SEQ ID NO: 200 - protein, 1249 aa, unidentified
  REGION 1..1249: note = Category: MG28 effectors
  REGION 1..1249: note = Description: MG28-60 effector
  source 1..1249: note = uncultivated organism sequence
MERLTNLYPVSKTLRFELQPIGKTRENIEKGGILQQDEERAENYKLVKSFIDEYHKQYIKSRLWNFELPLADEGRHNSLAEYRALYELPKRDAEQEAAFTEVKDNLRAIIARRLTEKGSAYDRIFKKELIREDLIEFLEDAKDKEIVRQFADFTTYFTGFHENRANMYSSEEQSTAIAYRLIHQNLPKFMDNMKSFAKIAETSVADHFADIYAGWEEYLNVGSINDMFRLDYFSQTLTQEHIEVYNYIIGKRILDDGTEIKGINEYVNLYNQQQKDKKQRLPLLVPLYKQILSDREKLSWLSEEFDSDQKMQQAIKETYDQLYDLLMGDENESLKSLLMHLSDFDLSQINITNDLSLTDISQHLFGKYDVFTNGIKDKLRIITPRKKKDTDEDFEERITKLFKSQKSFSIAELNSLPHPVVEGNQPNSIEDYYMTLGAVNTETVQKENLFAQIENAYTDALPILLLTDTDDKLSQNKAAVAKIKKLLDAFKDLQHFVKPLLGSGEEVEKDERFYGTFQTIWDELDTVTPLYNKVRNWLTRKPYSTEKIKLNFDNSQLLGGWDVNKEPDCTGVLLRKGNYYYLGIMNKKNNRIFEKDLTPSDGDCYDKIDYKLLPGANKMLPKVFFSKSRIDEFSPSASLVEKYKAGTHKKGANFSLKDCHNLIDFFKQSIAKHEDWSKFGFHFSDTKTYEDISGFYREVEHQGYSLSSHKVSAEYIHRMVDEGKLFLFRLWNKDFSEFSKGTPNLHTLYWKMLFDERNLQDVVYKLNGQAEVFYRKASIKEENRIIHPAKKDISNKNALNDKHTSRFDYDIIKDRRFTVDKFQFHVPITINFKATGQTNINPVVHDIIRQGGIKHIIGIDRGERHLLYLSLIDLQGRIVKQMTLNEIINEYAGRQYKTNYHDLLAKREGERTDARRSWDTIENIKELKEGYLSQVVHVITKMMVEYKAIIVLEDLNMGFMRGRQKIERQVYEKFEHMLIDKLNCYIDKLEDPSKPGGMLQALQLSNKFESFARLGKQSGCLFYIPAWNTSKIDPVTGFVNLLDTHYDTMKAAKSFFSKFERISYNGEKNWFEFTFDYNEFNKKAEGTRTHWTLCTYGTRIRNFRNPQKNNQWDDEEIVLTDMFKRLFDNYGIDYRGNLKEALQQPTEAKFYQELMSLMKLLLQMRNSKINSEVDYLLSPVADENGYFFDSRQGDTTLPDNADANGAYNIARKGLWVIHKIQETPDGEKASLAISNKEWLHFAQTKPYLE

SEQ ID NO: 201 - protein, 1242 aa, unidentified
  REGION 1..1242: note = Category: MG28 effectors
  REGION 1..1242: note = Description: MG28-61 effector
  source 1..1242: note = uncultivated organism sequence
MNTYEELTGLYSFKKTISLALNPIGETLRHIEEKGFIAQDEQRAEDYKKVKDIIDRYHKYFITMCLDGFKFSTDKLMKYVALAENAKRDEDAFDEVKTQLRKEIVGAFSKNKTYGDLFGEKLIKQHLPNFVTDENEKRLVASFNEFTTYFEKFHKCRENMYSDEAKSTAIAHRLIHENLPMFYDNMKSFKKIAACEDCIDFTEFEAAFSEEFKEFKVEHLADIFQLEYFNNTLTQRKIDFYKLVIGGKVLEDGTKLKGVNEYVNLYNQQHKDARLPLLKPLYKMILSDKVALSWLPEEFKSDEEMVEAIQEMHKNLKGALTDNAENNLRDLLLNMDKYDLAHIYIANDLGLTDISQNIFGQYDVYTSAIKQALRNEYAPIPKERRNPELYDERINKLFKSRTSFSIAELNSLADSDHTIENHFKQLGAAERNGKQEIDLFSQIETAYAKASDILSGKHGNIGQSEAETALVKNLLDAYKSLQHFIKPLLGHGDEAEKDNEFDAKLRAAWDALDIINPLYNKVRNWLTRKPYSTEKIKLNFENAQLLNGWDKNKETDCTSVLLRKDGMYYLAIMNKKANHAFACDELPADGDCYEKIDYKQIALPMGLGAFVRKCGKTAEKLGWSCPERLKNKDKKIITNDAEAEGVLPDLIDCYKAFLNTYEKDGFKYKDFNFKFKPSSEYSSLVEFFAEVPSQGYKIAFRKVSVAYINQLVESGKLYLFQIWNKDFSKFSKGTPNMHTLYWKQLFDERNLADVVYKLNGQAEVFYRKRSLKLEETTVHQAHQPIPNKNKQNEKRQSQFNYDIVKNRRFTVDKFQFHVPITLNFKATGRGNINDKVLEIIRNNGIKHVIGIDRGERHLLYLSLIDLKGNIIKQMTLNDIVNEYRGHTYATNYKDLLAEREDNRTEARRNWKKIDNIKEIKQGYLAQVVHIISKMMVEYKAIVILEDLNMGFMRGRQKIERSVYEQFEKSLIEKLNYYVDKQKDEEEVGGLLHALQLTSKFKSFKELGKQSGCLFYVPAWNTSKIDPVTGFVNLFDTKSVKGEKVRAFFSNFDAIRYNAEKDWFEFAFNYSNFTDKAKDTREKWTLCTHGTSIRTFRNPSKLNQWDSEEVVLTDEFKKVFEKAGIDICGNLKNAICALKEKAHLEKLMQLMKLLLQMRNSKPNTEVDYMISPVADEQGNFYDSRCGNSALPDNADANGAYNIARKGLWVIKQIRETPAGKRPKLAIKNKEWLKFAQQKPYLDD

SEQ ID NO: 202 - protein, 1252 aa, unidentified
  REGION 1..1252: note = Category: MG28 effectors
  REGION 1..1252: note = Description: MG28-62 effector
  source 1..1252: note = uncultivated organism sequence
MKDLKQFTNQYSVSKTLRFELQPIGKTKENIEKNGILQRDEKRAEDYKIVKEFIDEYHKQFIKERLWDFKLPLHSKGRLDTLEEYQALYELSKRDDAQEAEFSEVKDNLRSIIAKRLTESGSAYERIFKKELIREDLIDFLESEEDKDIVRQFADFTTYFSGFHENRRNMYVADEKSTAIAYRLIHQNLPKFMDNMKAFAKIAETPVAEHFADIYEGWKECLNVGSIEEIFRLDYFSETLTQTHIEVYNYIIGKKILEDGTEIKGINEYVNLYNQQQKDKSKRLPFLVPLYKQILSDREKLSWLAEEFDSDEKMLAAINESYNHLHDLLMGNENESLRSLLLHIKDFNLSQINITNDLSLTDISQHLFGRYDVFANGIKDELRNITPRKKKEGEEDFEDRISKIFKTQKSFSIDFLDKLPQPVMDDGKPRSIEDYFMTLGAVNTETTQKENLFAQIENAYADAHAILQMKDTGDTLSQNKPAVAKIKALLDVLKDLQRFIKPLLGSGEENEKDELFYGSFQMMWDELDTVTPLYNKVRNWLTRKPFSTEKIKLNFDNSQLLGGWDVNKEPDCTGVILRKDGYYYLGIMDKKSNRIFEADVTPSDGDCYDKIDYKLLPGANKMLPKVFFSKSRIDEFAPSEAIVSSYKRGTHKKGADFNLAECHRLIDFFKQSINKHEDWSKFNFHFSDTKTYEDISGFYREVEQQGYMLSSHPVSSSYINQLVDEGKLYLFRIWNKDFSEFSKGTPNLHTLYWRMLFDERNLADVVYKLNGQAEVFYRKASIKPENRIIHKANLPIANKNELNEKRASVFEYDIIKDKRYTVDKFQFHVPITINFKATGQTNINPIVQDVIKQGGFSHIIGIDRGERHLLYLSLIDLKGNIVKQMTLNDIVNEYKGQAYKTNYHDLLAKREGDRTDARRSWEAIETIKELKEGYLSQVVHIISKMMVKYNAIVVLEDLNTGFMRGRQKIERQVYEKFEKMLIEKLNCYIDKQLSPTDEGGLLHPLQLTCDAQKWKRSHQCGCLFYIPAWNTSKIDPVTGFVNLLDTHYDTREKARVFFSKFQRISFNAQKNWFEFALDYNDFTAKAEGTRTQWTLCTQGERIRTFRNPQKNHQWDDERIVLTDAFKQLFDKYDIDINGNLKEAISAQTDAQFFKELLGLMKLLLQMRNSITNSEEDYLLSPVADDAGHFFDSREGISSLPIDADANGAYNIARKGLWVIRKIQETPEGEKPSLTITNREWLQFAQTKPYLND

SEQ ID NO: 203 - protein, 1246 aa, unidentified
  REGION 1..1246: note = Category: MG28 effectors
  REGION 1..1246: note = Description: MG28-63 effector
  source 1..1246: note = uncultivated organism sequence
MKEFANLFPVSKTLRFELQPIGKTKENIEKNGILQRDEKRAEDYKIVKGFIDEYHKQFIKDRLWSFKLPLHSEGHLDSLEEYQELYELSKRNDAQEAEFTEVKDNLRSIIAKRLTESGTKYDTIFKKELIREDLIDSLENNEDKDIVRQFADFTTYFSGFHENRRNMYVADEKSTAIAYRLIHQNLPKFMDNMKAFAKIAETSVAEHFSDIYEGWKEYLNVGSIEEIFRLDYFSETLTQPHIEVYNYIIGKKILEDGTEIKGINEYVNLYNQQQKDKSKRLPFLVPLYKQILSDREKLSWLAEEFDSDEKMLAAINESYEHLHDLLMGNENESLRSLLLHIKDFNLSQINITNNLSLTDISQHLFSRYDVFTNGIKDELRLITPRKKKESEEDFEDRISKIFKTQKSFSIDFLDKLPQPVMEDEKHRAIEDYFMTLGAVNTETTQKENLFAQIENAYEDARTILQLKDTGDMLLQNKPAVAKIKALLDALKDLQHFIKPLLGSGEENEKDELFYGSFQMMWDELDTVTPLYNKVRNWLKRKPFSTEKIKLNFDNSQLLGGWDVNKEPDCTGVILRKDGFYYLGIMDKKSNHIFEADVTPSDGECYEKMVYKQLGQISQQLPRIAFSKSWQQKITIPEDVIIIKKTESFKKNNEDLQKLISYYKSFISQHEEWNSYFNISFSNRNNYKNLPDFYSEVDTQFYNLSISKVSVSYIDQLVNEGKLYLFRIWNKDFSEFSKGIPNLHTLYWKMLFDERNLADVVYKLNGQAEVFYRKASIKPENRIIHKANQPIANKNELNKKRTSAFEYDIIKDRRYTVDKFQFHVPITINFKAAGQTNINPIVQDTIRQGGFSHIIGIDRGERHLLYLSLIDLKGNIVKQMTLNDIINEYKGQTYKTNYHDLLAKREGDRTDARRSWEIIETIKELKEGYLSQVVHIISKMMVEYNAIVVLEDLNTGFMRGRQKIERQVYEKFEKMLIEKLNCYIDKQAEPSDNTGLLHPLQLTCDAQKWKRSHQCGCLFYIPAWNTSKIDPVTGFVNLLDTRYETREKARVFFSKFQRISFNAQKGWFEFSFDYNDFTSKAEGTRTQWTLCTQGERIRTFRNPQKNHQWDDEKIMLTDAYKQLFDKYDIDINSNIKEAISAQTDAQFFKELLGLMKLLLQMRNSITNSEEDYLLSPVADDAGHFFDSREGISSLPIDADANGAYNIARKGLWIIRKIQETASGEKASLSITNKEWLQFAQTKPYLND

SEQ ID NO: 204 - protein, 1249 aa, unidentified
  REGION 1..1249: note = Category: MG28 effectors
  REGION 1..1249: note = Description: MG28-64 effector
  source 1..1249: note = uncultivated organism sequence
MKQFTNLYPVSKTLRFELQPIGKTKENIEKNGILMRDEKRAKDYKIVKEFIDDYHKQFIKERLWDFKLPLNSEGKLNSLEEYQALYELSKRDEVQEAGFTEVKDNLRSIIAKRLTESGSAYERIFKKELIREDLVDFLENEEDKDIVRQFADFTTYFSGFHENRHNMYVAEEKSTAIAYRLIHQNLPKFMDNMKAFAKIAETSVAEHFADIYEGWKEYLNIESIEEVFRLDYFSETLTQPHIEVYNYIIGKKILEDGTEIKGINEYVNLYNQQQKDKSKRLPFLVPLYKQILSDREKLSWLAEEFDSDEKMLSAINESYSHLHDLLMSNENESLRSLLLHIKEFNLSHINIANDLSLTDISQHLFSRYDVFTNGIKDELRIITPRKKKESDEDFEERITKIFKTIKSFSIDFLDNLPQPIMEDGKRRSIEDYFMTLGAVNTETTQKENLFAQIENAYEDARNILQLKDTGDTLSQNKPAVAKIKALLDALKDLQHFIKPLLGSGEENEKDELFYGSFMMMWDELDTITPLYNKVRNWLTRKPFSTEKIKLNFDNAQLLGGWDVNKEPDCTGVLLRKDGFYYLGIMNKKSNRIFESEVTPSDGECYDKIDYKLLPGANKMLPKVFFSKSRIDEFAPSEAVVSSYKRGTHKKGANFNLSECHRLIDFFKQSINKHEDWSKFGFHFSPTDTYEDISGFYREVELQGYMLSSHPVSSSYINQLVDEGKLYLFRIWNKDFSEFSKGTPNLHTLYWKMLFDERNLADVVYKLNGQAEVFYRKASIKPENRIIHKANQPIANKNELNEKRTSTFEYDIIKDRRYTVDKFQFHVPITINFKAAGQTNINPIVQDVIRQGGFSHIIGIDRGERHLLYLSLIDLKGNIIKQMTLNEIINEYKGQTYKTNYHTLLAKREGDRTDARRSWETIETIKELKEGYLSQVVHIISKMMVEYNAIVVLEDLNPGFMRGRQKIERQVYEKFEKMLIEKLNCYIDKHADPSENAGLLHPLQLTSDIQKWKRSHQCGCLFYIPAWNTSKIDPVTGFVNLLDTRYDTREKARVFFSKFQRISFNAQKGWFEFAFDYNDFTTKAEGTRTQWTLCTQGERIRTFRNPQKNNQWDDERIVLTDAYKQLFDKYNIDINGNIKEAISAQTDAQFFKELLGLMKLLLQMRNSITNSEEDYLLSPVADNTGHFFDSREGIYSLPIDADANGAYNIARKGLWVIRKIQETPNGEKTSLSITNKEWLQFAQTKPYLND

SEQ ID NO: 205 - protein, 1249 aa, unidentified
  REGION 1..1249: note = Category: MG28 effectors
  REGION 1..1249: note = Description: MG28-65 effector
  source 1..1249: note = uncultivated organism sequence
MKEFTNLYPVSKTLRFELQPIGKTKENIEKNGILQRDEKRAEDYKIVKGFIDEYHKQFIKERLWSFKLPLNCEGHLNSLEEYQALYELPKRNDAQEAEFTEIKDNLRSIIAKRLTESGSAYERIFKKELIREDLIDFLENNEDKDIVRQFADFTTYFSGFHENRRNMYVAEEKSTAIAYRLIHQNLPKFMDNMKAFAKIADTPVAEHFADIYDGWKEYLNVGSIDEIFRLDYFTETLTQPHIEVYNYIIGKKILEDGTEIKGINEYVNLYNQQQKDKSKRLPFLVPLYKQILSDREKLSWLGEEFDSDEKMLAAINESYTHLHDLLMGDENESLRALLLHIKEFDLTKINITNDLSLTDISQHLFGRYDVFTNGIKDELRNITPRKRKESDEELEDRISKIFKTQKSFSIDFLDKLPQPVIDDGKPRSIEDYFMTLGAVNTETTQKENLFAQIENAYEDARTILQLTDTGDTLSQNKSAVAKIKALLDALKDLQHFIKPLLGSGEENEKDELFFGSFQMMWDELDTVTPLYNKVRNWLTRKPFSTEKIKLNFDNSQLLGGWDVNKEPDCTGVILRKEGFYYLGIMDKKSNHIFEADITPSVGECYDKIDYKLLPGANKMLPKVFFSKSRIDEFAPSEAIISSYKRGTHKKGADFNLAECHRLIDFFKQSINKHEDWSKFNFHFSDTKSYEDISGFYREVEQQGYMLSSHPVSSSYINQLVDEGKLYLFRIWSKDFSEFSKGTPNLHTLYWKMLFDERNLADVVYKLNGQAEVFYRKASIKPENRIIHKANHSIANKNELNSKRTSTFEYDIIKDRRYTVDKFQFHVPITINFKAAGQTNINPIVQDVIRQGGFSHIIGIDRGERHLLYLSLIDLKGNIIKQMTLNEIINEYKGQTYKTNYHDLLAKREGDRTDARRSWETIETIKELKEGYLSQVVHVISKMMVEYNAIVVLEDLNTGFMRGRQKIERQVYEKFEKMLIEKLNCYIDKHAAPSENTGLLHPLQLTCDAQKWKRSHQCGCLFYIPAWNTSKIDPVTGFTNLLDTRYDTREKARVFFSKFQRISYNAEKGWFEFALDYNDFTAKAEGTRTQWTLCTYGERIRTFRNPKKNHQWDDERIVLTDAFKQLFDTYDIDINGNLKETISAQTDAQFFKELLGLMKLLLQMRNSITNSEEDFLLSPVADDAGHFFDSREGNSSLPIDADANGAYNIARKGLWVIRKIQETANEEKPSLSITNKEWLHFAQTKPYLKD

SEQ ID NO: 206 - protein, 1247 aa, unidentified
  REGION 1..1247: note = Category: MG28 effectors
  REGION 1..1247: note = Description: MG28-66 effector
  source 1..1247: note = uncultivated organism sequence
MKEFTNLYPVSKTLRFELQPIGKTKENIEKNGILQRDEKRAEDYKIVKGFIDEYHKQFIKDRLWSFKLPLNCEGHLNSLEEYQALYELPKRNDAQEAEFTEIKDNLRSIIAKRLTESGSAYERIFKKELIREDLIDFLENNEDKDIVRQFADFTTYFSGFHENRRNMYVAEEKSTAIAYRLIHQNLPKFMDNMKAFAKIADTPVAEHFADIYDGWKEYLNVGSIDEIFRLDYFTETLTQPHIEVYNYIIGKKILEDGTEIKGINEYVNLYNQQQKDKSKRLPFLVPLYKQILSDREKLSWLGEEFDSDEKMLAAINESYIHLHDLLMGDENESLRALLLHIKDFDLAKINITNDLSLTDISQHLFGRYDVFTNGIKDKLRDITPRKKKDSDEDFEDRISKIFKTQKSFSIDFLDKLPQPVMDDGKPRSIEDYFMTLGAVNTETTQKVNLFAQIENAYEDARTILQLTDTGDTLSQNKSAVAKIKALLDALKDLQHFIKPLLGSGEENEKDELFYGSFQMMWDELDTVTPLYNKVRNWLTRKPFSTEKIKLNFDNSQLLGGWDVNKEPDCTGVILRKEGFYYLGIMDKKSNHIFEADITPSVGECYDKIDYKLLPGANKMLPKVFFSKSRIDEFAPSEAIISSYKRGTHKKGADFNLAECHRLIDFFKQSINKHEDWSKFNFHFSDTKSYEDISGFYREVEQQGYMLSSHPVSSSYINQLVDEGKLYLFRIWSKDFSEFSKGTPNLHTLYWKMLFDERNLADVVYKLNGQAEVFYRKASIKPENRIIHKANHSIANKNELNSKRTSTFEYDIIKDRRYTVDKFQFHVPITINFKAAGQTNINPIVQDVIRQGGFSHIIGIDRGERHLLYLSLIDQKGNIIKQMTLNEIINEYKGQTYKTNYHDLLAKREGDRTDARRSWETIETIKELKEGYLSQVVHVISKMMVEYNAIVVLEDLNTGFMRGRQKIERQVYEKFEKMLIEKLNCYIDKHAAPSENTGLLHPLQLTCDAQKWKRSHQCGCLFYIPAWNTSKIDPVTGFTNLLDTRYDTREKARVFFSKFQRISYNAEKGWFEFALDYNDFTAKAEGTRTQWTLCTYGERIRTFRNPKKNHQWDDERIVLTDAFKQLFDTYAIDINGNLKETISAQTDAQFFKELLGLMKLLLQMRNSITNSEEDFLLSPVADDAGHFFDSREGNSSLPIDADANGAYNIARKGLWVIRKIQETANEEKPSMSITNKEWLQFAQTKPYL

SEQ ID NO: 207 - protein, 1201 aa, unidentified
  REGION 1..1201: note = Category: MG28 effectors
  REGION 1..1201: note = Description: MG28-67 effector
  source 1..1201: note = uncultivated organism sequence
MEEALRDFVFQMDDEGKNNSLSEYFFLYSLGKRTEAQDNDFKDVKKNLREQIAKYFKASPKYKNLFKQELIKEDLCNNMQCNEEEQKLVEEFHNFTTYFTGFHENRKNMYSDEEKSTAIAFRLVHQNLPKFIDNIGVFDRVRNIDEIKAGIENLQKHFETEGLFKQGEKIEDFFTLDYYSRLAVQSRIEIYNAILGGKTTEKGEKIQGLNELINLYNQQHKETHLPKMKALFKQILSDRQAVSWIEESFKSDNEVLSSVNDFYENLKQNEIFERTKELLTSVGSYDLSKVYITNDQQLTSISQQLYGSWAVIENAILAEMQNETPRKKKEDAEKYNERLKKAYSNRSSFSIAYIDQCLEAVFGENRIPVEQHFANIGKAEIETEAECGKIKIPDVFTQIEQTYSAAKTLLCNPYPKGKHLSQSDEDIEKVKNLLDALKRFQHFIKPLTGSGDEAEKDEMFYSDLTELWAEIDQLNSLYNRVRNHLTGKPYSEEKLKLNFENASLLTGWDKNMERANTAVILRKGKLYYLAIMKKEHNSIFASDNLPDKGECYEKMVYKQIALPLGFGGFARKCFGSATKLGWTYPTNLLNKEGKIIIKDEEAKDVLPELIDCYKDFLNIYEKDGFKYSSYNFKFKPSNQYEKLSQFFAEIQQQGYKITFQNISSDYIDQLVNEGKLYLFQIYNKDFSPSSKGTPNMHTLYWQMLFDERNLNDGVYQLNGQAEVFFRKKSLNYTKPTHPANQAIANKNPFSKKDKSEFTYDLIKDKRFTMDKFLFHVPITINFKSSKTYDIDAKVRQWLQKADDVHIIGIDRGERHLLYLTVIDCKGNIKEQMSLNTIENEYNGNTYAFDYHKRLDEKEKERDAAKKSWKTVENIKELKEGYLSQAIHKITQLMLKYNAIIVLEDLNMGFMRGRQKVEKQVYQKFEKMLIDKLNYLADKKKDPSEMGGVLNAYQLTSKFESFTKLGRQSGFLFYIPAWNTSKIDPVTGFVNLFDTKYKSIDETKKFFDKFKSISYNKNKDWFEFSFDYNDFTSKAEGTKTQWTVCTNGERIENFRNGETSNQWSGRTINLSQELKTLFDGYGIDFTKDLQNSICSQSEKGFFEQLLRLFKLTVQMRNSISNTEIDYLISPVCDKKGVFYDSREDRKDLPNNADANGAYNIARKGLMILNHIKQSSDPSKKQEYNLTNKAWLNFVQKGSVEGK

SEQ ID NO: 208 - protein, 1248 aa, unidentified
  REGION 1..1248: note = Category: MG28 effectors
  REGION 1..1248: note = Description: MG28-68 effector
  source 1..1248: note = uncultivated organism sequence
MNNLKQFTGLYPVNKTLRFELKPVGKTKENIENKGILERDSQRTVDYKVVKGFIDEYHKQFIKDRLWSFKLPLFSEGRLDSLEEYMALYELSKRDEAQEAEFSEVKDNLRSIIAKRLTESGSAYERIFKKELIREDLIAFLEKDEEKEIVRQFADFTTYFDDFHKNRKNMYSAEEKSTAIAYRLIHQNLPKFMDNMKAFAKIAETSVTEHFADIYEGWKEYLNVGSIEEVFRLDYFSETLTQTHIEVYNYIIGKKPLDDGTEINGINVYVNLYNQQQKDKSQRLPLLVPLYKQILSDREKLWQVEEFDSDEKMLAAINESYEHLHDLLMGNENESLRSLLIHMKDFNLAQINITNELSLTDISQHLFSRYDVFTNGIKDKLRIITPRKKKESDEDFEDRISKIFKTQKSFSIDFLDKLPQPVMEDGKPRSVEDYYMSLGAVNTETTQKENLFAQIENAYEDVRPILQMKDTGDALSQNKPAVAKIKSLLDALKDLQHFIKPLLGSGEENEKDELFYGSFQMMWDELDTVTPLYNKVRNWLTRKPYSTEKIKLNFDNSQLLGGWDVNKEQDYTGVLLRKDGFYYLGIMDKKSNRIFEADGTPTDGECYEKMVYKQLGQISRQLPRIAFSKSWQQKITIPDDVIRIKKTESFKKNNEDLQKLISYYKSFISKHEEWNSYFNISFSNRNNYKNLPDFYSEVDTQFYNLSISKVSSSYINQLVDEGKLYLFRIWNKDFSEFSKGTPNLHTLYWKMLFDERNLADVVYKLNGQAEVFYRKASIKPENRVVHQANKPIDNKNGLNKKRTSTFEYDIIKDKRYTVDKFQFHVPITINFKATGQNNINPVVQETIRQGGFSHIIGIDRGERHLLYLSLIDLKGNIVKQMTLNDIVNEYKGQTYKTNYHDLLAKREGERTDARRSWETIETIKELKEGYLSQVVHIISKMMVEYNAIVVLEDLNTGFMRGRQKIERQVYEKFEKMLIEKLNCYIDKLADPTENTGLLHPLQLTCDTQKWKRSHQCGCLFYIPAWNTSKIDPVTGFVNLLDTRYDTREKARAFFSKFQRISFNSEKGWFEFVFDYNDFTTKAEGTRTQWTLCTYGERIRTFRNPQKNHQWDDERIMLTDAFTQLFDKYDIDINGNLKETISAQSDAQFFKDLLSLMKLLLQMRNSITNSEEDYLLSPVSDESGHFFDSREGISCLPIDADANGAYNIARKGLWVIRKIQETPDGEKPSLTITNKEWLQFAQTKPYLKE

SEQ ID NO: 209 - protein, 1166 aa, unidentified
  REGION 1..1166: note = Category: MG28 effectors
  REGION 1..1166: note = Description: MG28-69 effector
  source 1..1166: note = uncultivated organism sequence
MKYVALAENAKRDEDAFDEVKTQLRKEIVGAFSKNKTYGDLFGEKLIKQHLPNFVTDENEKRLVASFNEFTTYFEKFHKCRENMYSDEAKSTAIAHRLIHENLPMFYDNMKSFKKIAACEDCIDFTEFEAAFSEEFKEFKVEHLADIFQLEYFNNTLTQRKIDFYKLVIGGKVLEDGTKLKGVNEYVNLYNQQHKDARLPLLKPLYKMILSDKVALSWLPEEFKSDEEMVEAIQEMHKNLKGALTDNAENNLRDLLLNMDKYDLAHIYIANDLGLTDISQNIFGQYDVYTSAIKQALRNEYAPIPKERRNPELYDERINKLFKLRTSFSIAELNSLADSDHTIENHFKQLGAAERNGKQEIDLFSQIETAYAKASDILSGKHGNIGQSEAETALVKNLLDAYKSLQHFIKPLLGHGDEAEKDNEFDAKLRAAWDALDIINPLYNKVRNWLTRKPYSTEKIKLNFENAQLLNGWDKNKETDCTSVLLRKDGMYYLAIMNKKANHAFACDELPADGDCYEKIDYKQIALPMGLGAFVRKCGKTAEKLGWSCPEKLKNKDKKIITNDAEAEGVLPDLIDCYKAFLNTYEKDGFKYKDFNFKFKPSSEYSSLVEFFAEVPSQGYKIAFRKVSVAYINQLVESGKLYLFQIWNKNFSKFSKGTPNMHTLYWKQLFDERNLADIVYKLNGQAEVFYRKRSLKLEETTVHQAHQPIPNKNKQNEKRQSQFNYDIVKNRRFTVDKFQFHVPITLNFKATGRGNINDKVLEIIRNNGIKHVIGIDRGERHLLYLSLIDLKGNIIKQMTLNDIVNEYRGHTYATNYKDLLAEREDNRTEARRNWKKIDNIKEIKQGYLAQVVHIISKMMVEYKAIVILEDLNMGFMRGRQKIERSVYEQFEKSLIEKLNYYVDKQKDEEEVGGLLHALQLTSKFKSFKELGKQSGCLFYVPAWNTSKIDPVTGFVNLFDTKYVNVEKARAFFSNFDAIRYNAEKDWFEFAFNYSNFTDKAKDTREKWTLCTHGTSIRTFRNPSKLNQWDSEEVVLTDEFKKVFEKAGIDICGNLKNAICALKEKAHLEKLMQLMKLLLQMRNSKPNTEVDYMISPVADEQGNFYDSRCGNSALPDNADANGAYNIARKGLWVIRQIRETPAGKRPKLAIKNKEWLKFAQQKPYLDD

SEQ ID NO: 210 - protein, 1228 aa, unidentified
  REGION 1..1228: note = Category: MG28 effectors
  REGION 1..1228: note = Description: MG28-70 effector
  source 1..1228: note = uncultivated organism sequence
MRQKYDGFESCYGISKVIRTGLIPQGATLEHIEKKGLLLSEEKRAEDYTKVKKIIDRYHRKYIDNQLKDAELSGVEESYSLYCKTNRTEKENTDLKKFLEKLRKQVSNFLTSSDEFKRIDKKELIEKDLLNFVQGDEEEEELVKSFKGFTTYFKGFHENRKNMYSHEEKSTAIAYRVINQNMFRYFDNIRSISKFILANSENNIAELESIYSDKLKGKTLEEFFSVDNYSFFISQSGIDTYNMIIGGYSVDERTKVKGINEYINLFNQENHEKFGTLKPLYKQILAERTTESFLPEKFENDKEVIESLAAFSHNMSDTLLEIMEVFGKIGEYDASGIYLKYDSLKDISTCVFSDWSAITNALWERYDVQYIGKKKKETKAYIEEKRKHFKNLKSVSADEINTAMGENVLIPYSDAAKSLFEKICVAEENIRELINLDYPDDKELSKDKAAVKDIKAYLDSVKALQHHMKPLLGNQDESGKNEFFYGDFSGLWDELDALTPLYNKVRNYVTKKPYSTEKIKLNFDNSTLLNGWDLNKEEANTAILMQREGFLYLGIMDKKHNKIFRNIENTGCEDCYQKMEYKLLPGANKMLPKVFFSKKGIESFKPPLEILEIYKNETFKKGEAFNIDDCHTIIDFYKKALNEHEDWKKFEFKFSKTKDYRDISEFYREVEAQGYKISFKAIPKKIIDEYVEKGWLYLFKIWNKDFSEYSKGTPNLHTLYLKMLFDPRNLENVVYKLNGEAEIFYRKASIQPKDIIKHPANEAIKNKNPLNKKQSSIFKYDLIKDRRYTVDKFEFHVPITLNFKARGKENINTEVREYIKRSKNLYVIGVDRGERNLLYVSVVDADGSIVEQYSLNDIVNEYKGVQYRTDYHALLDTKEKNRDKARKEWTEIQNIKELKEGYISQVVHKICELMMKYEAIIALEDLNGGFKNSRKKVEKQVYQKFEKMLIEKLNYLVDKKADVNEPSGLLHALQLTSKFEGFNKLFGQSGFVFYVPAWNTSNIDPCTGFTNLFFSKDLRYASVENSLEFWKKFDSVAYDDTKDIFSFTFDYNNFNQRAEEIKSKSKWTVYSYGDRLETFRNADLNQQYDSREVKLTEAFKELFKKYEIPHENCEIKENILNCKERDFHDKLLHLFKLTLQLRNSKTGTMIDYMTSPVMDIDGNFFDSRTASSSLPQDADANGAYNIARKGLWLIEKLKNTKDADLPKAKLAIKNAEWLAYAQRNENNG

SEQ ID NO: 211 - protein, 1008 aa, unidentified
  REGION 1..1008: note = Category: MG28 effectors
  REGION 1..1008: note = Description: MG28-71 effector
  source 1..1008: note = uncultivated organism sequence
MNTYEELTGSVYLTKTISLALNPIGETLRHIEEKGFIAQDEQRAEDYKKVKDIIDRYHKYFITMCLDGFKFSTDKLMKYVALAENAKRDEDAFDEVKTQLRKEIVAAFEKGETYKDLFKKELILEHLPNFVTDENEKRLVASFNKFTTYFTGFHENRENMYSDEAKSTAIAHRLIHENLPMFYDNMKSFKKIAACEDCIDFAEFEAAFSEEFKEFKVEHLTDIFQLEYFNNTLTQRKIDFYKLVIGGKVLEDGTKLKGVNEYVNLYNQQHKDARLPLLKPLYKMILSDKVALSWLPEEFKSDEEMVEAIQEMHKNLKGALTDNAENNLRDLLLNMDKYDLAHIYIANDLGLTDISQNIFGQYDVYTSALKQALRNEYAPIPKERRNPELYDERINKLFKSRTSFSIAELNSLADCDHTIENHFKQLGAAERNGKQEIDLFSQIETAYAKASDILSGKHGNIGQSEAETALVKNLLDAYKSLQHFIKPLLGHGDEAEKDNEFDAKLRAAWDALDIINPLYNKVRNWLTRKPYSTEKIKLNFENAQLLNGWDKNKETDCTSVLLRKDGMYYLAIMNKKANHAFACDELPADGDCYEKIDYKQIALPMGLGAFVRKCGKTAEKLGWSCPERLKNKDKKIITNDAEAEGVLPDLIDCYKAFLNTYEKDGFKYKDFNFKFKPSSEYSSLVEFFAEVPSQGYKIAFRKVSVAYINQLVESGKLYLFQIWNKDFSKFSKGTPNMHTLYWKQLFDERNLADVVYKLNGQAEVFYRKRSLKLEETTVHQAHQPIPNKNKQNEKRQSQFNYDIVKNRRFTVDKFQFHVPITLNFKATGRGNINDKVLEIIRNNGIKHVIGIDRGERHLLYLSLIDLKGNIIKQMTLNDIVNEYRGHTYATNYKDLLAEREDNRTEARRNWKKIDNIKEIKQGYLAQVVHIISKMMVEYKAIVILEDLNMGFMRGRQKIERSVYEQFEKSLIEKLNYYVDKQKDEEEVGGLLHALQLTSKFKSFKELGK

SEQ ID NO: 212 - protein, 1242 aa, unidentified
  REGION 1..1242: note = Category: MG28 effectors
  REGION 1..1242: note = Description: MG28-72 effector
  source 1..1242: note = uncultivated organism sequence
MNTYEELTGLYSFKKTISLALNPIGETLRHIEEKGFIAQDEQRAEDYKKVKDIIDRYHKYFITMCLDGFKFSTDKLMKYVALAENAKRDEDAFDEVKTQLRKEIVGAFSKNKTYGDLFGEKLIKQHLPNFVTDENEKRLVASFNEFTTYFEKFHKCRENMYSDEAKSTAIAHRLIHENLPMFYDNMKSFKKIAACEDCIDFTEFEAAFSEEFKEFKVEHLADIFQLEYFNNTLTQRKIDFYKLVIGGKVLEDGTKLKGVNEYVNLYNQQHKDARLPLLKPLYKMILSDKVALSWLPEEFKSDEEMVEAIQEMHKNLKGALTDNAENNLRDLLLNMDKYDLAHIYIANDLGLTDISQNIFGQYDVYTSAIKQALRNEYAPIPKERRNPELYDERINKLFKSRTSFSIAELNSLADSDHTIENHFKQLGAAERNGKQEIDLFSQIETAYAKASDILSGKHGNIGQSEAETALVKNLLDAYKSLQHFIKPLLGHGDEAEKDNEFDAKLRAAWDALDIINPLYNKVRNWLTRKPYSTEKIKLNFENAQLLNGWDKNKETDCTSVLLRKDGMYYLAIMNKKANHAFACDELPADGDCYEKIDYKQIALPMGLGAFVRKCGKTAEKLGWSCPERLKNKDKKIITNDAEAEGVLPDLIDCYKAFLNTYEKDGFKYKDFNFKFKPSSEYSSLVEFFAEVPSQGYKIAFRKVSVAYINQLVESGKLYLFQIWNKDFSKFSKGTPNMHTLYWKQLFDERNLADVVYKLNGQAEVFYRKRSLKLEETTVHQAHQPIPNKNKQNEKRQSQFNYDIVKNRRFTVDKFQFHVPITLNFKATGRGNINDKVLEIIRNNGIKHVIGIDRGERHLLYLSLIDLKGNIIKQMTLNDIVNEYRGHTYATNYKDLLAEREDNRTEARRNWKKIDNIKEIKQGYLAQVVHIISKMMVEYKAIVILEDLNMGFMRGRQKIERSVYEQFEKSLIEKLNYYVDKQKDEEEVGGLLHVLQLTSKFKSFKELGKQSGCLFYVPAWNTSKIDPVTGFVNLFDTKSVKGEKVRAFFSNFDAIRYNAEKDWFEFAFNYSNFTDKAKDTREKWTLCTHGTSIRTFRNPSKLNQWDSEEVVLTDEFKKVFEKAGIDICGNLKNAICALKEKAHLEKLMQLMKLLLQMRNSKPNTEVDYMISPVADEQGNFYDSRCGNSALPDNADANGAYNIARKGLWVIKQIRETPAGKRPKLAIKNKEWLKFAQQKPYLDD

SEQ ID NO: 213 - protein, 1262 aa, unidentified
  REGION 1..1262: note = Category: MG28 effectors
  REGION 1..1262: note = Description: MG28-73 effector
  source 1..1262: note = uncultivated organism sequence
MSNFNEFTHLYQLSKTLRFELKPIGETLKHFNESGILDQDEHRAESYKKVKKLIDRYHKEFMEEALRDFVFQMDDEGKNNSLSEYFFLYSLGKRTEAQDNDFKDVKKNLREQIAKYFKASPKYKNLFKQELIKEDLCNNMQCNEEEQKLVEEFHNFTTYFTGFHENRKNMYSDEEKSTAIAFRLVHQNLPKFIDNIGVFDRVRNIDEIKAGIENLQKHFETEGLFKQGEKIEDFFTLDYYSRLAVQSRIEIYNAILGGKTTEKGEKIQGLNELINLYNQQHKETHLPKMKALFKQILSDRQAVSWIEESFKSDNEVLSSVNDFYENLKQNEIFERTKELLTSVGSYDLSKVYITNDQQLTSISQQLYGSWAVIENAILAEMQNETPRKKKEDAEKYNERLKKAYSNRSSFSIAYIDQCLEAVFGENRIPVEQHFANLGKAEIETEAECRKIKIPDVFTQIEQTYSAAKTLLYNPYPKGKHLSQSDEDIEKVKNLLDALKRFQHFIKPLTGSGDEAEKDEMFYSDLTELWAEIDQLNSLYNRVRNHLTGKPYSEEKLKLNFENTSLLTGWDKNMERANTAVILRKGKLYYLAIMKKEHNSIFASDNLPDKGECYEKMVYKQIALPLGFGGFARKCFGSATKLGWTYPTNLLNKEGKIIIKDEEAKDVLPELIDCYKDFLNIYEKDGFKYSSYNFKFKPSNQYEKLSQFFAEIQQQGYKITFQNISSDYIDQLVNDGKLYLFQIYNKDFSPSSKGTPNMHTLYWQMLFDERNLNDGVYQLNGQAEVFFRKKSLNYTKPTHPANQAIANKNPFKKKDKSEFTYDLIKDKRFTMDKFLFHVPITINFKSSKTYDIDAKVRQWLQKADDVHIIGIDRGERHLLYLTVIDCKGNIKEQMSLNTIENEYNGNTYAFDYHKRLDEKEKERDAAKKSWKTVENIKELKEGYLSQAIHKITQLMLKYNAIIVLEDLNMGFMRGRQKVEKQVYQKFEKMLIDKLNYLADKKKDPSEMGGVLNAYQLTSKFESFTKLGRQSGFLFYIPAWNTSKIDPVTGFVNLFDTQYKSDDKAKMFFSKFKSISYNKDKNWFEFSFDYNDFTNKAEGTKTQWTVCTNGERIENFRSGQKPNQWGGRTINLSQKFKSLFDEYGIDFTKDLQNAICSQSKKGFFKQLLYLFKLTVQMRNSNTETDYLISPVCDRNGNFYDNGNNNYDNDLPENADANGAYNIARKGLMILNHIKQSSDPSKKQEYNLTNKAWLNFVQKGSVEGK

SEQ ID NO: 214 - protein, 1250 aa, unidentified
  REGION 1..1250: note = Category: MG28 effectors
  REGION 1..1250: note = Description: MG28-74 effector
  source 1..1250: note = uncultivated organism sequence
MNTFNEFTNLYSLSKTLRFELQPIGKTKENIEKNGILSRDEKRAEDYQMVKGIIDEYHKQFITDRLWSFKLPLESEGRNDSLEEYHTLYEMSKRDERQEAAFTEVKDNLRGIIAKRLTEKGSAYERIFKKELIREDLIDFLKNEEKKELVRQFADFTTYFTGFHENRKNMYSAEEKSTAIAYRLIHQNLPKFMENMKAFAKIAETSVSEHFADIYEGWKEYLNVRSLEEIFRLDYFSETLTQPHIEVYNYIIGKKVLEDGTEIKGINEYVNLYNQKHKDKIPLLVPLYKQILSDREKLSWLAEEFDSDEKLLVAINETYNQLYNFLMGMENESLRSLLTHIKDFDLNHINITNDLSLTDISHQLFGRYDVFTSGIKDKLREKTRRKKGESDEDFEDRVSKIFKTHKSFSIAYLNKLPQPDMEDGKRRRVEEYFMELGAVNTETTQKENLFAQIENAYEDAKAVLQMKDTGDTLSQNKSAVAKIKNLLDVIKDLQHFIKPLLGSGEENEKDELFYGSFQMMWEELDAVTPLYNKVRNWLTRKPYSTEKIKLNFDNSQLLGGWDVNKEPDCTGVLLRKDEFYYLGIMDKKSNRIFDAEVTPSDGKCYEKIDYKLLPGANKMLPKVFFSKSRIDEFAPSEAIVSSYKRGTHKKGADFSLSDCHRLIDFFKQSINKHEDWSKFGFRFSDTKSYEDISGFYREVEQQGYMLSSHQVSESYIHQLVDEGKLYLFRIWNKDFSEFSKGTPNLHTLYWKMLFDERNLADVVYKLNGQAEVFYRKASIKPENRIVHLAKHPIANKNEFNKEPTSTFEYDIIKDRRYTVDKFQFHVPITINFKAAGQTNINPIVQDTIRKGNFSHIIGIDRGERHLLYLSLIDLRGNIVKQMTLNDIINEYKGTTYKTNYHDLLAKREGERTEARRSWDTIENIKELKEGYLSQVIHIISKMMVEYNAIVVLEDLNMGFMRGRQKIERQVYEKFEKMLIDKLNCYIDKQKEPMAEGGMLRALQLTNKFESFRKLGKQCGCLFYIPAWNTSKIDPVTGFVNLFDTRYENMAKAKVFFSKFKSIRYNSIKDWFEFSLDYNDFTTKAESTRTEWTLCTYGERIRTFRNPQKNHQWDDEELVLTAEFKQLFDRYGIDIQSNLKEAINAQTDAQFFKEMLGLMKLLLQMRNSITNSDTDYLLSPVADENGHFFDSREDITVLPDNADANGAYNIARKGLWVIRKIQETAEDEKPSLAITNKEWLQFAQTKPYLDD

SEQ ID NO: 215 - protein, 1280 aa, unidentified
  REGION 1..1280: note = Category: MG29 active effectors
  REGION 1..1280: note = Description: MG29-1 effector
  source 1..1280: note = uncultivated organism sequence
MFNNFIKKYSLQKTLRFELKPVGETADYIEDFKSEYLKDTVLKDEQRAKDYQEIKTLIDDYHREYIEECLREPVDKKTGEILDFTQDLEDAFSYYQKLKENPTENRVGWEKEQESLRKKLVTSFVGNDGLFKKEFITRDLPEWLQKKGLWGEYKDTVENFKKFTTYFSGFHENRKNMYTAEAQSTAIANRLMNDNLPKFFNNYLAYQTIKEKHPDLVFRLDDALLQAAGVEHLDEAFQPRYFSRLFAQSGITAFNELIGGRTTENGEKIQGLNEQINLYRQQNPEKAKGFPRFMPLFKQILSDRETHSFLPDAFENDKELLQALRDYVDAATSEEGMISQLNKAMNQFVTADLKRVYIKSAALTSLSQELFHFFGVISDAIAWYAEKRLSPKKAQESFLKQEVYAIEELNQAVVGYIDQLEDQSELQQLLVDLPDPQKPVSSFILTHWQKSQEPLQAVIAKVEPLFELEELSKNKRAPKHDKDQGGEGFQQVDAIKNMLDAFMEVSHAIKPLYLVKGRKAIDMPDVDTGFYADFAEAYSAYEQVTVSLYNKTRNHLSKKPFSKDKIKINFDAPTLLNGWDLNKESDNKSIILRKDGNFYLAIMHPKHTKVFDCYSASEAAGKCYEKMNYKLLSGANKMLPKVFFSKKGIETFSPPQEILDLYKNNEHKKGATFKLESCHKLIDFFKRNIPKYKVHPTDNFGWDVFGFHFSPTSSYGDLSGFYREVEAQGYKLWFSDVSEAYINKCVEEGKLFLFQIYNKDFSPNSTGKPNLHTLYWKGLFEPENLKDVVLKLNGEAEIFYRKHSIKHEDKTIHRAKDPIANKNADNPKKQSVFDYDIIKDKRYTQDKFFFHVPISLNFKSQGVVRFNDKINGLLAAQDDVHVIGIDRGERHLLYYTVVNGKGEVVEQGSLNQVATDQGYVVDYQQKLHAKEKERDQARKNWSTIENIKELKAGYLSQVVHKLAQLIVKHNAIVCLEDLNFGFKRGRFKVEKQVYQKFEKALIDKLNYLVFKERGATQAGGYLNAYQLAAPFESFEKLGKQTGILYYVRSDYTSKIDPATGFVDFLKPKYESMAKSKVFFESFERIQWNQAKGYFEFEFDYKKMCPSRKFGDYRTRWVVCTFGDTRYQNRRNKSSGQWETETIDVTAQLKALFAAYGITYNQEDNIKDAIAAVKYTKFYKQLYWLLRLTLSLRHSVTGTDEDFILSPVADENGVFFDSRKATDKQPKDADANGAYHIALKGLWNLQQIRQHDWNVEKPKKLNLAMKNEEWFGFAQKKKFRA

SEQ ID NO: 216 - protein, 753 aa, unidentified
  REGION 1..753: note = Category: MG29 effectors
  REGION 1..753: note = Description: MG29-2 effector
  source 1..753: note = uncultivated organism sequence
DTGFYADFVEAYKNYEQITVSLYNKARNHLSKKPFSKDKIKINFDSPTLLNGWDLNKESDNKSVILRKGGNYYLAIMHPKHTKVFSDYSESEHDGATFEKVNYKLLSGANKMLPKVFFSKKGAETFSPPQEILDLYKNDEHKKGKTFKLESCHKLINFFKFNISKYKVHPNDQFGWDVFGFDFSPTSTYKDLSDFYREVEAQGYKLWFSDISENYVNKCVEEGKLFLFQIYNKDFSPYSKGSPNLHTLYWKGLFEPENLKDVVLKLNGEAEIFYRKHSMKRDESVVHPAHVAIKNKNDLNPKKESTFDYDIVKDRRYTQDKFFFHVPITLNFKSQGFAKFNDKINALLAEQDDVHVIGIDRGERHLLYYTVVNSEGKIIEQGSLNQMDTDQGYSVDYQQKLDAKEKERDNSRKTWSSVENIKELKAGYLSHVVHKLAKLVIKHNAVVCLEDLNFGFKRGRFKVEKQVYQKFEKALIDKLSYLVFKDKVATEAGGYLNAYQLAAPFESFEKLGKQTGILYYVRADYTSKIDPVTGFIDFLKPKYESLLKSKTFFETFESICFNVEKNYFEFSLDYKRFMPSRKFGDYQTTWTICTYGDTRYHNRRNKAGKWETETINVTAQLKDIFKVYGIGFEHEADIKEAIAAIKDTKFYKKLYWILRVTLSLRHSVTGTDEDFILSPVADEKGVFFDSRNEVVEYPKDADANGAYHIALKGLWNLQQIQQHDWDEEKPKKLNLAMKNEEWFGFAQQKKFRQ

SEQ ID NO: 217 - protein, 1287 aa, unidentified
  REGION 1..1287: note = Category: MG29 effectors
  REGION 1..1287: note = Description: MG29-3 effector
  source 1..1287: note = uncultivated organism sequence
MDYSKFTKKYSISKTLRFELRPVGETAEYIEDFKSQYLRDVVAQDEKRAEEYLKIKELIDDYHRDYIEDKLSNPVNPDTGEYWFSDELFDTAYKEFIAFKKDTKNEKLRQIWMSRQELFRKMLVKAFVDKKDLFSKELITRDLPAWLSQKGIWEEHKATVESFSKFTTYFSGFHENRKNMYSDEDQSTAIAYRLMNENLPKFFNNCEAYRKNKEKYPSLDFGVLDLDDKFKPIYFRSLFTQSAIDEYAELLGGKTEESREKSIGLNEKINLYRQKSGLIRRDISEFTMLYKQILSDRESHSFIPDAFESDKEMFTSLAQYIEKANRLTSKLNKTLQKLQSANTDKIYLVSTELTNISQSMFSSYGMIESALKSDMEQNVYPAPKNGKVSSVLEAKRKKYMEEKVFSLAFLEEKLKPYLLETEQEEKSILSHLLEALKNAKLDNKLDEKVKTVLPLLKLEALDKKRIVPNSSNPNGSEGFLQVQNIQKMLDAFMSLSHALRPLHLVKGRKVIDMPDADAGFYADFSVQYEEYSQITISLYNKVRDYLTKKPYSKDKVKINFEVPTLLNGWAVNKETANASILFEKDGLYYMGIMHPKHKHLFEYSKNIDDMKNGKKSKVKDELYTKIQGGKNNSYRKIVYKLLPGANKMLPKVFFANSRLEFFSPSQDILDIRNRASDSKNGKAQKGYTKVDFSLSDCHKMIDFYKKSIDKHPEWREFEFDFSVTNSYKDLSGFYREVESQGYKIEFHDIKTKYIDQCIEEGKLFLFQIYNKDFSPHSKGSPNLHTMYWRGLFESENSKNVVLKLNGDAEMFYRKHSMKRKDTVVHRANETIDNKNKNNPKKTSTFAYDIVKDRRYTKDKFIFHVPITLNFKALNTFRFNDTINKELSKSIDTCVIGIDRGERHLLYYTVVDSKGNIIEQDTLNEISTDQGYKVNYQQKLHDKEQERDKARKSWGSVENIKELKDGYLSHVVHKLANLIIKHNAIVCLEDLNSGFKRGRFKVEKQVYQKFEKRLIDKLNYLVFKDAKEGEAGHYLNAYQLTAPFESFQKLGKQTGILFYVNADYTSKIDPATGFMDFLKPKYENLGKAKTFFESLESFIYNVEKDYFEFTFDYKKVTNKSLGSYKTVWTACTYGDVRYQNKKDEQGIWQTNSINVTQELKELCDDAQIEYKDGKELKDILALEKDTKFYKTLFWIMRLTLTLRHSRTGTDDDFILSPIANSNGEFFDSRKAPKTLPKDADANGAYNIALKGLWNLQKIREHDWEAEKPKNLNLYMKNEEWFSFIQSRV

SEQ ID NO: 218 - protein, 991 aa, unidentified
  REGION 1..991: note = Category: MG29 effectors
  REGION 1..991: note = Description: MG29-4 effector
  source 1..991: note = uncultivated organism sequence
MFEQFTKQFALQKTLRFELKPVGETADFLDDFKSQYLKDTVLKDEKRASDYQEIKELIDDYHREYIESCLHEPVDKKTGEILDFSVDLEEAWLYYQQLKDDPSKRGEWEKAQENLRKRLVTSFVDSGNLFKKEFITRDLPEWLKNKGLWEKHNDAVESFKGFTTYFTGFYDNRKNMYSSEAQSTAIANRLMNENLPRFFNNCVAFHTIQEKHPGFMLDVEDELLDCLGVQSLNDVFTPSFFVHLFSQSGITLFNELLGGKTRENGEKVQGLNEQINLYRQQHPDIARGFPRFTKLHKQILSDIESRSFIPDAFDDDKHLLESLEKYISEANKKLIPALQESMDKLSQADLSRVYLMGSSLTYLSQDIFHFFGTIPDAIRWHAENNISTKKEREHFIKQDVYALADLESIIISYVNQLDDSDEAHQLLNALPEPKRPVTSFIQQTLQQAIEAVSPLLSLDELSKNRRLPRDEKEKGGEGFQQTETIREMLDAFKVVSDAVKPLHLVKGRKPIDVPDVDTGFYADFAEAFEAYTQPTTALYNKARNHLTKKPFSKHKIKINFDAPTLLNGWDLNKESDNKSVILRKDGNYYLAIMHPKHTKVFANAPAVEERGEMYEKMNYKLLSGANKMLPKVFFSKKGIETFNPPQEILDLYKNNEHKKGSTFKLESCHRLIDFFKVNIPKYKVHPNDEFGWDVFGFNFSPTSSYKDLSGFYREVENQGYKVWFSDVSESYIQKCVEEGKLFLFQIYNKDFSPYSKGKPNLHTLYWKGLFEPANLKDVVLKLNGEAEIFYRKHSIKHGDKIIHRANEPIDNKNDSNPKKQSCFEYDITKDKRYTQDKFFFHVPISLNFKAQSPARFNDNINKMLSESEDICVIGIDRGERHLLYYTVVNSKGDIIEQGSLNHIETDQGYTVDYQQKLDAKEKQRDKARKTWSTIENIKELKAGYLSQVVHKLAQLIIKHNAIVCLEDLNFGFKRGRFKVEKQVYQKFEKAL

SEQ ID NO: 219 - protein, 1270 aa, unidentified
  REGION 1..1270: note = Category: MG29 effectors
  REGION 1..1270: note = Description: MG29-5 effector
  source 1..1270: note = uncultivated organism sequence
MFETFTKHFSLSKTLRFELRPVFGGAEMKEDFESEFLRKTVERDERRAKEYKELKRVIDDYFRDYIDATLAIPNHPNGFMEADALKQAYECYRLFRSAKGNAYSKAKKEWNNIQKELRESVASLFKKSDYEVKGSFFKNVLMPHVEGDPKKTELIKSFDKFTTYFTGFNENRKNIFSKDDKATTIGYRLIHENLPKFFDNCILYERIRNKFDDLVLSSEDELTQALGVTGLDEIFRPEVFAHVLTQPHITAYNELLGGYVDDQKVKHQGLNEQINLYRQQKKLSNRQLPIFAPLFKQILAESQSQSFAPEPFENDKEMLTAINVFLYSVDKHIEQLEASVKELHADEIEHIYFKAQSLTQLSQELFGRYDVIQSALQGYTDHHRDLFRTKAQREKFLDKTDFYSLYDLERAILEYVESLDADHPDRNAISNDTPVQSHLKNKFKKLKQKIEEEKKTITPLLSKEKLSKDRKLPKGENAPGGEGYRQVQQIKELLESYKTLAQTLRDLYPAKGRKRVEVGSPNMAFYNAFEEPFVEYDNECMALYNKARNYLSKKPYKRDKIKLNFEAPTLLNGWDLNKERANRSVLLLKNGNYYLAIMHPNHTDIFKKYMEMDNSDNYEKINYKLISDANRMLPRVFFSKKGIKTYDPPKSILELYKKGEHIKGPSFKLESLHRLIDYFKSVVSKYKADPGDQYGWEVFDFKFSPTSQYEDIGQFYKELEKQAYRVWFTPISSTYIEEAAKHGKLFLFQIYNKDFSPYAKGRPNLHTLYWKSLFEKENLQDVITKLNGEAEIFFRHHSIKKADTVIHKAGETIKNKNENNPKQESTFKHDIIKDRRYTVDKILFHVPITINFKNDKPGNFNDTVNRLLAKHPDTHIIGIDRGERHLLYLTVIDSDGNIVEQRSLNTIPTDRDYEVDYRQKLDAKEKERDKARKEWSTIENIKELKSGYLSQVVHELAKLIIQHNAIVVLEDLNFGFKRGRFRVEKQVYQKFEKALIDKLNYLVFKDRQAKEPGGYLNGYQLTAPFESFQKLGKQSGILFYVPAAYTSKIDPATGFIDFLKPKYESVEKAKAFFANFDAIRYNKEEEYFEFVFDYKNFESKNALSGYKTDWTVCTYGKRLRNKRNDQGYWESVSVDVTDDLKRLFERYGILYHNGDNLISQILEYDEKQLFELLIFAMRTTLAMRYSRTGEEEDYILSPVKDCNGDFFDSRKADPSLPQDADANGAYHIALKGAMLLERMREHDFNGKSKLDLLIKNEQWFEYISERLWGE

SEQ ID NO: 220 - protein, 1008 aa, unidentified
  REGION 1..1008: note = Category: MG29 effectors
  REGION 1..1008: note = Description: MG29-6 effector
  source 1..1008: note = uncultivated organism sequence
MFNHFTHKYSLSKTLRFELKPVGETADYLEDFKSQYLKDFIVKDQQRAEDYKIIKELIDDYHRQYIEEKLSAPVDPKTGELWLNPEYFEEAYSYYQKLKADQSDPKNRKQWEDTQTELRKKLVETFTNKADLFKKELITRDLPEFLKKKGQWEENKKVVEHFSRFTTYFSGFHENRKNMYTHEDHSTAIAYRLMNENLPRFFNNCLAYKHIKDKYNDLPLKINSELQSQLGVTNINDFFQPRYFINLFSQTGIDNYELLIGGKTEENGTKIQGLNEQINLYRQQLQHKMKDEAKADDKKSKRIYDLSGFTHLYKQILSDREKISFIPEAYEDDKQLLASLEEYIATVTDEKEGAIQKLEQSLQKLANADLSKVYIKGAGLTALSQNMFSAYGMITASLSYYADQKLSTKKKREDYLKQKVYSLDELNHHLIAYIDSKEKDDVLHEQLAKLPNPQQPISSYLISIIKQTQQDIELQATIDAVKPLLQLESLSKDRKAPELDNENDKGAVGFQQVQKIQKMLDGFMSVSHAVKLLHLVDGRKPIDMPDKDDSFYNGFAEVYKAYTDLTVTLYNKARNHLTTKLYSNDKIKINFDVPTLLNGWDANKESDNASILFEREGLYYLGIMHPKHKHLFNYTKGIDDIGNEKKTTAKDELYEKVAEKGDSGYRKIVYKLLPGVNKMLPKVFFSASRKDFFAPSEEVNRIRNTASHTKNGNPQKGHKKENFNLEDCHAIIDFFKVSLNKHPEWKDFNFSFSPTSSYEDLSGFYREVEHQGYRMDFQSIKESYIKDCVSEGKLFLFQIYNKDFSRYSKGKPNLHTLYWKGLFEPENLKDVVLKLNGEAEIFYRKHSIKREDRIIHKSGDTLDNKNTNNPKKTSKFEYDIVKDRRYTQDKFQFHVPITLNFKALGVNRFNDQINKELAQQKETCVIGIDRGERHLLYYTVVNSKGDIIEQDTLNTINTDKGYNVDYQQKLHTKEKEREKARKSWSSVENIKELKAGYLSHVVHKLAHL

SEQ ID NO: 221 - protein, 1324 aa, unidentified
  REGION 1..1324: note = Category: MG29 effectors
  REGION 1..1324: note = Description: MG29-7 effector
  source 1..1324: note = uncultivated organism sequence
MLNKFTNQYSLSKTLRFELKPVGETAGYLDDFKSQHLKEFVATDKQRADDYLIIKELIDDYHRAYIEEKLSAPVDPKTGELFLNSQDFEDAYSYYQQLKVDSKDPKHRETWEKTQAELRKKLVKAFVGKADLFGEKLIKQHLPEQLKKEGRWKENKKAVENFNKFTTYFSGFHENRKNMYTDKDQSTAIAFRLMNENLPRFFNNCDKYKKLKEKYPELLFENNKDILAKLGVDSLNDVFTPSFFINLFTQTGIDNYQLLLGGKSEDTGEKLKGLNEQINLFRQQKQKEAREQAQKENKKAKKITDLTGFTGLYKQILSDRQSASFILDEFENDRELLTKLNEFITLATKPEGTLEKLENALNHLNEIDPQKVFIKTAGLTDISQTLFHSYQIITTALHEFAENNLKTKKERENYLKQKAFSLAELDERLVDYIQDLEDSDPLHQQLQALNDPLQPIKGYLQEAITRAQQETDERPNLEQTIKEVEPLLTLKELSKNRQAPKKEGDKGGKGFQQIQKIQKMLDAFMAVSHALKPLHLVDGRKPIDMPEMDSGFYGEFSEAYEEYNQSCITLYNKSRNHLTKKPFKTDKIKINFDSPTLLKGWDANKESDNASLLFEKDGLYYLGIMHPKHKRLFDYIIGIDDIGNENKTKAKTDLYNQITTNKSGYRKIVYKLLPGANKMLPKVFFSRSRIAFFAPSDEVQRIRNTASHSKNGKPQKGFKKADFNLKDCHTMIDFFKDSINKHPEWKQFGFKFSPTESYEDLSGFYREVEQQGYRIDFHTIKESYIDECIKQGKLFLFQIYNKDFSTYSKGKPNLHTLYWKGLFEAENLKDTVLKLNGEAEIFYRKHSIKPNDIITHRANETIENKSKNYDKKTSTFAYDIIKDKRYTQDKFQFHVPITLNFKAPKAPGVSHFNNQINKAVAKSKDTHIIGIDRGERHLLYYTVINQKGEIIEQDTLNKIKAHKDYEVDYQQKLHDKETERQKARRSWSSVENIKELKAGYLSHVVHKLAVLIKEHNAIVCLEDLNFGFKRGRFKVEKQVYQKFEKTLIDKLNYLVFKDAEENEAGHYLKAYQLTAPFESFEKMGKQSGILYYVQAAYTSKIDPATGFINFLYTRYQSLSRSKEFFESFDFIRYNQAQDYFEFSFDYKNFPIRQNLKNYQTRWLACTYGDERYANKRNKQNQWESEIVNVTQELKTLFNKASIDFQNGKDLKDAIAQTKDTKFYKKLYWLLGLTLSLRHSKTGTEIDFILSPIQGKDGKFFDSREASNKHPKDADANGAYNIALKGLWNLQQIKQHDWNTEKPKKLNLNMKNEDWFGFIAERASL

SEQ ID NO: 222 - protein, 1324 aa, unidentified
  REGION 1..1324: note = Category: MG29 effectors
  REGION 1..1324: note = Description: MG29-8 effector
  source 1..1324: note = uncultivated organism sequence
MLNKFTNQYSLSKTLRFELKPVGETAGYLDDFKSQHLKEFVATDKQRADDYLIIKELIDDYHRAYIEEKLSAPVDPKTGELFLNSQDFEDAYSYYQQLKVDSKDPKHRETWEKTQAELRKKLVKAFVGKADLFGEKLIKQHLPEQLKKEGRWKENKKAVENFNKFTTYFSGFHENRKNMYTDKDQSTAIAFRLMNENLPRFFNNCDKYKKLKEKYPELLFENNKDILAKLGVDSLNDVFTPSFFINLFTQTGIDNYQLLLGGKSEDTGEKLKGLNEQINLFRQQKQKEAREQAQKENKKAKKITDLTGFTGLYKQILSDRQSASFILDEFENDRELLTKLNEFITLATKPEGTLEKLENALNHLNEIDPQKVFIKTAGLTDISQTLFHSYQIITTALHEFTENNLETKKERENYLKQKAFSLAELDERLVDYIQDLEDSDPLHQQLQALNDPLQPIKGYLQEAITRAQQETDERPNLEQTIKEVEPLLTLKELSKNRQAPKKEGDKGGKGFQQIQKIQKMLDAFMAVSHALKPLHLVDGRKPIDMPEMDSGFYGEFSEAYEEYNQSCITLYNKSRNHLTKKPFKTDKIKINFDSPTLLKGWDANKESDNASLLFEKDGLYYLGIMHPKHKRLFDYIIGIDDIGNENKTKAKTDLYNQITTNKSGYRKIVYKLLPGANKMLPKVFFSRSRIAFFAPSDEVQRIRNTASHSKNGKPQKGFKKADFNLKDCHTMIDFFKDSINKHPEWKQFGFKFSPTESYEDLSGFYREVEQQGYRIDFHTIKESYIDECIKQGKLFLFQIYNKDFSTYSKGKPNLHTLYWKGLFEAENLKDTVLKLNGEAEIFYRKHSIKPNDIITHRANETIENKSKNYDKKTSTFAYDIIKDKRYTQDKFQFHVPITLNFKAPKAPGVSHFNNQINKAVAKSKDTHIIGIDRGERHLLYYTVINQKGEIIEQDTLNKIKAHKDYEVDYQQKLHDKETERQKARRSWSSVENIKELKAGYLSHVVHKLAVLIKEHNAIVCLEDLNFGFKRGRFKVEKQVYQKFEKTLIDKLNYLVFKDAEENEAGHYLKAYQLTAPFESFEKMGKQSGILYYVQAAYTSKIDPATGFINFLYTRYQSLSRSKEFFESFDFIRYNQAQDYFEFSFDYKNFPIRQNLKNYQTRWLACTYGDERYANKRNKQNQWESEIVNVTQELKTLFNKASIDFQNGKDLKDAIAQTKDTKFYKKLYWLLGLTLSLRHSKTGTEIDFILSPIQGKDGKFFDSREASNKHPKDADANGAYNIALKGLWNLQQIKQHDWNTEKPKKLNLNMKNEDWFGFIAERASL

SEQ ID NO: 223 - protein, 1083 aa, unidentified
  REGION 1..1083: note = Category: MG29 effectors
  REGION 1..1083: note = Description: MG29-9 effector
  source 1..1083: note = uncultivated organism sequence
TGFNENRNNIFTKEAKATAIGYRLIHDNLPKFFDSCMLYDRIISTYEDLRFQVEDELITQLGVTTLNELFQPVAFAHLLTQANIESFNALLGGLNTQINQFKQEQKLNSRQLPTFAPLFKQILAKTESHSFIPEAFANDKELLDAIAIYRERSQEHLQKLEESFEALHSDEDEHIYYKAQSLTQLSQEMFGHYSVINDMLNLYVENHQERFRTKAQREKFLKKPNLYSLYDLESAINEYIEILDADHFYRKKIENDTPVQSYLKQKFNDLKEDIDKQEKIIAPLLSLNELSKNRNLPKNDDDQGGEGYRQVQQIKEFLDRYNDTVRILSNLYPAKGRERIEVEAPNMAFYNMFEEPFVEFESETFALYNKTRNYLSKKPYSKDKFKLNFESSKLLGGFVESKTEKSNNGTQHNAYLFRQKLDNGNYRYFLGISNNVKLFSRDKLIHDPHPEYERIHYYQGKINSLYGSSYDGNYNKDKETLSEKDLIKKIKMALSQYKNKILGVESILQTEYNNINNLRDDIEDAFKNKSFFHQAISKSEFEQAVNDPEKPLLVFEIYNKDFSLNKRNKNSKDNLHTMYFKGLMNENGYSIDIGSGELFFRKHSLKRKEAVIHTAKQPIKNKNSNNKKQTSTFDYDIVKDKRFTVDKFFLHLSIELNYKAPKISNNQKSKFKKDFNDKINQLLSQYPDTHIIGIDRGERHLLYYTLIDPKGNIVEQKSFNTIPTDRGYDVDYHQKLHKKEKERDRARKEWGTIENIKELKAGYLSQIVHQLAKLIIKHNAIVVLEDLNRGFKRGRFKVEKQVYQKFEKALIDKLNYLVFKDRDAKEAGGYLNGYQLTAPFESFQKLGKQSGILYYVPAAYTSKIDPASGFIDFLKPKYESIEKAKAFFANFDSIRYNSSDDYFEFSFRYSQFDINHPDYKDAWVVCTHGMRLRNKRNTQGHWETTTVDVSDDLKRLFDKYSFFYHDGDNLIDQIIEYDEKQLFEQMIFALRTTLAMRYSRVGEEEDYILSPVKGPDGIFYDSRKVDGSLPKDADANGAYHIALKGAMLLDRMRQHDFDSHSKPDMFIKNGQWFAFASKRLWEK

SEQ ID NO: 224 - protein, 881 aa, unidentified
  REGION 1..881: note = Category: MG29 effectors
  REGION 1..881: note = Description: MG29-10 effector
  source 1..881: note = uncultivated organism sequence
VLHEQLKKLPNPQQPISSYLVSIIKQTQQDVELQKIIDGVKPLLQLESLSKARKAPELGNENDKGAVGFQQVQKIQRMLDGFMSVSHAVKLLHLVDGRKPIDMPDKDDSFYNGFAEVYEAYTDLTVTLYNKARNHLTKKLYTNDKIKINFDAPTLLNGWDANKESDNASILFEREGLYYLGIMHPKHKHLFNYTKGIDDIGNEKKTTAKDELYEKVAEKGDSGYRKIVYKLLPGVNKMLPKVFFSASRKDFFAPSEEVNRIRNTASHTKNGNPQKGHKKENFNLEDCHAIIDFFKVSLNKHPEWKDFNFSFSPTSSYEDLSGFYREVEHQGYRMDFQSIKESYIKDCVSEGKLFLFQIYNKDFSRYSKGKPNLHTLYWKGLFEPENLKDVVLKLNGEAEIFYRKHSIKREDRIIHKSGDTLDNKNTNNPKKTSKFEYDIVKDRRYTQDKFQFHVPITLNFKALGVNRFNDQINKALAQQKETCVIGIDRGERHLLYYTVVNSKGEIIEQDTLNTINTDKGYNVDYQQKLHTKEKEREKARKSWSSVENIKELKAGYLSHVVHKLAHLIIKHNAIVCLEDLNSGFKRGRFKVEKQVYQKFEKALIDKLNYLVFKENKANDAGGYLNAYQLTAPFESFEKLFKQTGILYYVRADYTSKIDPATGFIDFLRPRYESLAKSKTFFENIESFKFNQAKDYFEMEFDYKKMKPSQKLGRYQSKWKVCTFGDVRYQNRRNDKGVWESEVINVTKKLKALLDDHDIEYQQEQDLKEALILKKDTKFYKELFWLLKLTLSLRHSKSGTEEDFILSPVANEQGVFFDSRNASDTQPKDADANGAYNIALKGLWNLQQIKKHDWDAEKPKKLNLAMKNEEWFGFAQNKEYKN

SEQ ID NO: 225 - protein, 1316 aa, unidentified
  REGION 1..1316: note = Category: MG29 effectors
  REGION 1..1316: note = Description: MG29-12 effector
  source 1..1316: note = uncultivated organism sequence
MSKIYDQFTHLYKIQKTLRFELKPVGETAIYINDFKSQYLQDVVHQDEQRAEYYKVVKDIIDDYHRDYIEKKLSQSVDTATGVIWVTPEDLEEAYCDYQNLKDNPRDRETRDAWVKRQESLRKQLVEAFSNNNDLFKKELITRDLPALLKHQGKWEENKEAVESFNKFTTYFTGFNENRKNMYSDKDQSTAIAHRVMNENLPRFFNNYLSYQKIKDKQASLEFSVETPLLTQMGVSSIDDIFQPRYFINLFTQSGLDSYQELLGGKTDEHGKKTQGLNEQINLYNQQQLDTKDKLPRFTSLYKQILSDRETNSFIPDAFKDDKELLKTLQDYIDHATKKEGFLERLEKSIELLSVVDNEKVYVKKAGLTDISSAIFNSYGIIGAALWHHAENTLYPNSTRRPATETLIKRRKSFCEQDVFSVAELNRIITSYIAQLEAIDPLHQQLKELTDPRQPIRAYFLDVFQQSKQDSELDTCIKNVSPLLSLESLSKKRQAPTLEGDQGDKGYQQLHSIQKMLDAFMTISYKLKPLHLVKGRKAIDMPDMDMGFYAGFSEAYETYSDTIISLYNKTRNHLTKVPFSKEKIKLNFGNPTLLNGWDSNKEAANSSLIFEKDGLYYLGIMHPKHKYLFDYITGIDDIGNDKKIKKKELLRGEIEVDENQGYRKIVYKLLPGANKMLPKVFFSNKRQAYFSPSSEILHIRNTASHSKNGKPQKSHIKAAFNINDCHKIIDFFKASINKHPEWKAFDFQFSPTKKYQDLSEFYREVEQQGYKVDFHPIKQSYIDECVEQGKLFLFQIYNKDFSPYSKGKSNLHTLYWKGLFEPENLNDVVLKLNGEAEVFYRRHSIKVADRTIHRANEAISNKNKEFHKKEESTFNYDIIKDRRYTQDKFQFHVPITLNFNAQGVSHFEDKVNLALQKAEDTHVIGIDRGERHLLYYTIVNSKGEIIEQDTLNKISTDQGYVIDYQNKLHKKEKERDKARKSWSSIENIKELKAGYLSHVVHKLAELIIKYDAIVCLEDLNFGFKRGRFSVEKQVYQKFEKALIDKLNYLVFKTSETTSPGHYLNAYQLTAPFKSFEKLGKQSGVLFYVQAAYTSKIDPSTGFIDFLKPKYKSLSASKVFFETMSSIIFNAEKDYFEFSFDYKKFNPSQKFGQYTTQWKACSFGELRYHNKRNNKGIWETRPINVTKELKQLFDDAGIQYQIGQELKESIILVKDTKFYKTLFWLLRLLLSLRHSRTGTDDDFILSPIENEHGVFFDSRNATDKQPKDADANGAYNIALKGLWNLQQIKQWDGEKHLNLSMKNEDWLSFITVKPYKR

SEQ ID NO: 226 - protein, 1259 aa, unidentified
  REGION 1..1259: note = Category: MG30 active effectors
  REGION 1..1259: note = Description: MG30-1 effector
  source 1..1259: note = uncultivated organism sequence
MHLSQTFTNKYQVSKTLRFELRPQGKTKETFERWIAELRTEKPSANNLIAEDEQRAEDYKEVKGIIDRFHRKVIEESLESLKLEGLSAYEELYFKREKEDIDLKEIENLQIQMRKQIREAFVEHPVFKDLFKKELIQVHLKEWLTDKQEIDLVAKFQKFTTYFGGFHENRQNVYSPDAKATAVGYRMIHENLPKFLDNRRIFNKIIKAHNELDFSSINTELEELLQGTTVNDVFSLEFFNETLTQTGIDIYNHVLGGYSSETGQKIQGVNEKINLYRQKNGLKARELPNLKPLFKQILSESQTASFVIEQIESNSDLLDRLDNFHSLLTNFEFQGRNEVNVMTELKNMLAALDSYEHEQVYFKNGPSLTQLSQKMFGQWGVIHKALEYYYEQVLNPLQGKKLTKKYESDKQKWLKSKQFNLSLIQKALDGYVPTIDTLESVNLIETLAKLEDKDGADLCIEVDKAYEHVAKLIEQGALSESYAQKKKEKQVIKEYLDGLMSLLHSVKPFYTTEVDIEKDAGFYGLFEPLYEQLNLVIPIYNLVRNYLTQKPYSTEKFKLNFENNTLLDGWDQNKEKANTCVLLRKEGNYFLAVMHKQHNKVFEELPQSEEDTYKKVVYKLLPRANNMLPKVFFSKKNIDYYKPEKELLAKYKLGTHKKGSNFSLNDCHALIDFFKDSISKHPDWAQFNFEFSPTKTYEDLSHFYKEVEHQGYKVNYAKVDVSYINQLVDDGKIFLFQIYNKDFSPYSKGKPNLHTLYWKAVFDERNLADTVYILNGKAEIFFREKSLNYSKEIMAKGHHRDELKDKFTYPIIKNKRFALDKFQFHVPLTMNFKAGSNPNINDRALDFLKNNPDIKIIGLDRGERHLLYLSLIDQKGNIIEQYTLNEIVSKYQGQTFKKDYHKLLDEKEKERDDARKNWDVIETIKELKEGYLSQVVHKITQMMIEHNAIVVLEDLNAGFKRGRHKVEKQVYQKFEKMLIDKLNYLVFKDHDKEKPGGLLNALQLTNKFESFQKLGKQSGLLFYVPAALTSKIDPATGFTNFLRPKHESILKSKSFIEGFTGIHFNSEKEYFEFKFDLKNIPNTRFPDDTKTEWTVCTTNVPRYWWNKSLNEGKGGQEKVLVTQRLQDLLARYDLGYAKGKDLKEDILTIEDASFYKELLWLLNVTVSLRHNNGKHGEQEEDAIISPVANDKGEFFNSSKANPSEPKDADANGAYHIALKGLWALRTINAYDKKEWRGIKLAISNKEWLQFVQQKPFLKT

SEQ ID NO: 227 - protein, 834 aa, unidentified
  REGION 1..834: note = Category: MG30 effectors
  REGION 1..834: note = Description: MG30-2 effector
  source 1..834: note = uncultivated organism sequence
KALDGYVPTIDTLESVNLIETLAKLEDKDGADLCIEVDKAYEHVAKLIEQGALSESYAQKKKEKQVIKEYLDGLMSLLHSVKPFYTTEVDIEKDAGFYGLFEPLYEQLNLVIPIYNLVRNYLTQKPYSTEKFKLNFENNTLLDGWDQNKEKANTCVLLRKEGNYFLAVMHKQHNKVFEELPQSEEDTYKKVVYKLLPRANNMLPKVFFSKKNIDYYKPEKELLAKYKLGTHKKGSNFSLNDCHALIDFFKDSISKHPDWAQFNFEFSPTKTYEDLSHFYKEVEHQGYKVNYAKVDVSYINQLVDDGKIFLFQIYNKDFSPYSKGKPNLHTLYWKAVFDERNLADTVYILNGKAEIFFREKSLNYSKEIMAKGHHRDELKDKFTYPIIKNKRFALDKFQFHVPLTMNFKAGSNPNINDRALDFLKNNPDIKIIGLDRGERHLLYLSLIDQKGNIIEQYTLNEIVSKYQGQTFKKDYHKLLDEKEKERDDARKNWDVIETIKELKEGYLSQVVHKITQMMIEHNAIVVLEDLNAGFKRGRHKVEKQVYQKFEKMLIDKLNYLVFKDHDKEKPGGLLNALQLTNKFESFQKLGKQSGLLFYVPAALTSKIDPATGFTNFLRPKHESILKSKSFIEGFTGIHFNSEKEYFEFKFDLKNIPNTRFPDDTKTEWTVCTTNVPRYWWNKSLNEGKGGQEKVLVTQRLQDLLARYDLGYAKGKDLKEDILTIEDASFYKELLWLLNVTVSLRHNNGKHGEQEEDAIISPVANDKGEFFNSSKANPSEPKDADANGAYHIALKGLWALRTINAYDKKEWRGIKLAISNKEWLQFVQQKPFLKT

SEQ ID NO: 228 - protein, 879 aa, unidentified
  REGION 1..879: note = Category: MG30 effectors
  REGION 1..879: note = Description: MG30-3 effector
  source 1..879: note = uncultivated organism sequence
VIHKALEYYYEQVLNPLQGKKLTKKYESDKQKWLKSKQFNLSLIQKALDGYVPTIDTLESVNLIETLAKLEDKDGADLCIEVDKAYEHVAKLIEQGALSESYAQKKKEKQVIKEYLDGLMSLLHSVKPFYTTEVDIEKDAGFYGLFEPLYEQLNLVIPIYNLVRNYLTQKPYSTEKFKLNFENNTLLDGWDQNKEKANTCVLLRKEGNYFLAVMHKQHNKVFEELPQSEEDTYKKVVYKLLPRANNMLPKVFFSKKNIDYYKPEKELLAKYKLGTHKKGSNFSLNDCHALIDFFKDSISKHPDWAQFNFEFSPTKTYEDLSHFYKEVEHQGYKVNYAKVDVSYINQLVDDGKIFLFQIYNKDFSPYSKGKPNLHTLYWKAVFDERNLADTVYILNGKAEIFFREKSLNYSKEIMAKGHHRDELKDKFTYPIIKNKRFALDKFQFHVPLTMNFKAGSNPNINDRALDFLKNNPDIKIIGLDRGERHLLYLSKNKKKGNIIEQYTLNEIVSKYQGQTFKKDYHKLLDEKEKERDDARKNWDVIETIKELKEGYLSQVVHKITQMMIEHNAIVVLEDLNAGFKRGRHKVEKQVYQKFEKMLIDKLNYLVFKDHDKEKPGGLLNALQLTNKFESFQKLGKQSGLLFYVPAALTSKIDPATGFTNFLRPKHESILKSKSFIEGFTGIHFNSEKEYFEFKFDLKNIPNTRFPDDTKTEWTVCTTNVPRYWWNKSLNEGKGGQEKVLVTQRLQDLLARYDLGYAKGKDLKEDILTIEDASFYKELLWLLNVTVSLRHNNGKHGEQEEDAIISPVANDKGEFFNSSKANPSEPKDADANGAYHIALKGLWALRTINAYDKKEWRGIKLAISNKEWLQFVQQKPFLKT

SEQ ID NO: 229 - protein, 1307 aa, unidentified
  REGION 1..1307: note = Category: MG31 active effectors
  REGION 1..1307: note = Description: MG31-1 effector
  source 1..1307: note = uncultivated organism sequence
MKTVEQFCGQKNGYSRSITLRNRLIPVGKTEENLQKANMLEADFNRAKAYSEVKNLIDDFHRSFIEDVLSNTKLGWKNLYDVFDLCQLEKDKIKKEKQKKDLQSIQAAMRKAIVKKFKDDERFSKLFKKELLSDLLPSIIKNDESGTITDKNEALKVFKGFSTYFSGFHQNRENLYSDEAKATAISNRIVNENFPKFHANVKVFEYLQKNFPEIISDTEESLKAFLNGKKLSEIFNPEKFNAVLCQSGIDFYNTVIGGISDENGKQKIQGLNEKINLASQQLPPEEKSKLKKKMTVLYKQILSDKKTASFIPIGFEKSEEVYKSIKQLKEEYFDKAYKLIERTFSAPDYDLSEIFVPAKELTAFSLAIFGNWSILNDGLFLLEKDNSKKELTEKQVENLHKEISKKDYSLADLQKAYERWANENGVPADKTVKSYFSLSELRANEKTKEKEPVDIVEKIKITYEKIDFENIENLQAEKEAATPIKNFLDEVQCLFHHLKLVDYRGEEQKDSAFYSKLDEILIPLSEIISLYNKVRNFVTKKPGEVKKIKLNFECPTLANGWDLNKESSNDAIILRKNGKYFLGIFNPEDKPKFSNDSICKNQQESHYEKMIYKLLPGPNKMLPKVFFSTKGQETFLPPKDLLLGYEQGKHKKGESFDKSFMHKLIDWFKYAINQHEDWKNFNFKFSPTESYEDMSGFYKEVELQGYKITFQNISENYIDSLIDSGKLYLFQIYNKDFAEKADGKKNLHTLYWENLFSPENLKDICLKLNGDAELFYRPASENLKVIKHEKDSILVNRTTTDGETIRDETYQEIYKFKNPAKQKKGFKLSNEAKSLLDSGKVVFKKARFEITKDKHFLQNTYLFHCPITMNFKAPEITGKKFNERVLEYLRNNPDVKIIGLDRGERHLIYLSLINQNGEIELQKTLNIVEQIRGDKENPVSVNYQEKLVQKEGDRNKARKNWQTIGNIKELKEGYLSNIVHEIAKLMVEQNAIVVMEDLNFGFKRGRFAVERQVYQKFENMLIEKLNYFAFKDRPATEPGGILNAYQLTDKSANISDVGKQCGWIFYIPASYTSKIDPKTGFANLFNTKGLTNVEKKKEVFSKFDSIRYDSKENCFVFSVNYSKLGDNADFKKNWEIYTHGERIVYSRKENKTFSVNPTENLEKAFDGQFAQSGINWKNKENLIDLIENISAEKSNAKFFDELLRSFTTTLQMRNSVPNTEEDYLISPVKAADGTFFDSRNEIAKGKDSGGKWISKFPVDADANGAYHIALKGLYLLQNNFNLNPKGYIENISNADWFKFVQKKEYLK

SEQ ID NO: 230 - protein, 759 aa, unidentified
  REGION 1..759: note = Category: MG31 effectors
  REGION 1..759: note = Description: MG31-2 effector
  source 1..759: note = uncultivated organism sequence
GSKAAHIFKSDSCFYLGIINKKLDKTDIDSIYQNGNTMIEKIVYDFQKPDNKNTPRLFIRSKGNAYAPAVSTYDLPIESVIDIYDKGLFKTEYREKNLEVYKKSLIKLIDYFKLGFSRHDSYKHYNFCWKETKDYADISEFYADTMRSCYQLKTERINFDNLMTLVDEGKLFLFQIYNKDFSTGKDGGNGSTGRKNMHTLYWENLFSKENLDDVVLQLSGGAELFFRQKSLEEENATIHEKNSFIVNRTYLKEVKGNKEIYETIPEEIYQEIYQKLNGKADTISDEAQELLSSGKVKYRAAPHRIIKDRHFTQDTYLFHCPISLNFKAQEITGKKFNDRVLEKIKNNSEIKIIGLDRGERNLIYLSLINQKGEIELQKTLNLVEQQKRLIDYQGKLVQKEGDRDKARKNWQTISNIKELKEGYLSAVVHELATLMVDNNAIVVMEDLNFGFKRGRFAVERQVYQKFEHMFIDKLNYLVFKDRKVTEPGGVLNAYQLTDKLEAFKDLGKQSGFLFYVPAGYTSKIDPATGFANLLDMTNLTNVQKKRDFFAKFDSICFDEEKQMFAFTFDYKNFNRKDAQEMSRTKWTVYSNGKRIQFCGKGKASKHIENLTEEFKTLFREFDYQNGNNILDSILEVGAALKAGEKPTKEIADFWDKLLVLFKLVLQMRNSDAKTGDDYIISPVMSESGNFFDSREQEKLGNNAKLPKDADANGAYHIALKGLYLLKAFDKTPEDQLKKVDMKISNADWFRFAQEKEYNK

SEQ ID NO: 231 - protein, 753 aa, unidentified
  REGION 1..753: note = Category: MG31 effectors
  REGION 1..753: note = Description: MG31-3 effector
  source 1..753: note = uncultivated organism sequence
IFKSDSCFYLGIINKKLDKTDIDSIYQNGNTMIEKIVYDFQKPDNKNTPRLFIRSKGNAYAPAVSTYDLPIESVIDIYDKGLFKTEYREKNLEVYKKSLIKLIDYFKLGFSRHDSYKHYNFCWKETKDYADISEFYADTMRSCYQLKTERINFDNLMTLVDEGKLFLFQIYNKDFSTGKDGGNGSTGRKNMHTLYWENLFSKENLDDVVLQLSGGAELFFRQKSLEEENATIHEKNSFIVNRTYLKEVKGNKEIYETIPEEIYQEIYQKLNGKADTISDEAQELLSSGKVKYRAAPHRIIKDRHFTQDTYLFHCPISLNFKAQEITGKKFNDRVLEKIKNNSEIKIIGLDRGERNLIYLSLINQKGEIELQKTLNLVEQQKRLIDYQGKLVQKEGDRDKARKNWQTISNIKELKEGYLSAVVHELATLMVDNNAIVVMEDLNFGFKRGRFAVERQVYQKFEHMFIDKLNYLVFKDRKVTEPGGVLNAYQLTDKLEAFKDLGKQSGFLFYVPAGYTSKIDPATGFANLLDMTNLTNVQKKRDFFAKFDSICFDEEKQMFAFTFDYKNFNRKDAQEMSRTKWTVYSNGKRIQFCGKGKASKHIENLTEEFKTLFREFDYQNGNNILDSILEVGAALKAGEKPTKEIADFWDKLLVLFKLVLQMRNSDAKTGDDYIISPVMSESGNFFDSREQEKLGNNAKLPKDADANGAYHIALKGLYLLKAFDKTPEDQLKKVDMKISNADWFRFAQEKEYNK

SEQ ID NO: 232 - protein, 1016 aa, unidentified
  REGION 1..1016: note = Category: MG31 effectors
  REGION 1..1016: note = Description: MG31-4 effector
  source 1..1016: note = uncultivated organism sequence
KKMTVLYKQILSDKKTASFIPIGFEKSEEVYKSIKQFKEEYFDKVYKLIEKTFSVPDYELSEIFVPAKELTAFSLAIFGNWSILNYGLFLLEKDNSKKELTEKQVENLHKEISKKDYSLADLQNAYERWANENGVPADKTVKSYFSLSELRANEKTKEKEPVDIVEKIKTAYEKIDFENIENLQAEKEAAVPIKNFLDEVQCLFHHLKLVDYRGEEQKDSAFYSKLDEILIPLSEIISLYNKVRNFVTKKPGEVKKIKLNFECPTLANGWDLNKESSNDAIILRKNGKYFLGIFNPEDKPKFSNDSICKNQEESHYEKMIYKLLPGPNKMLPKVFFSTKGQETFLPPKDLLLGYEQGKHKKGDAFDKSFMHKLIDWFKYAINQHEDWKNFNFKFSPTESYEDMSGFYKEAELQGYKITFQNISENYTDSLIDSGKLYLFQIYNKDFAEKADGKKNLHTLYWENLFSPENLKDICLKLNGEAELFYRPASENLKVIKHEKDSILVNRTTTDGETIRDEIYKEIYKFKNPAKQEKGFKLSDEAKSLLDSGKVVFKKARFEITKDKHFLQNTYLFHCPITMNFKAPEITGKKFNERVLEYLRNNPDVKIIGLDRGERHLIYLSLINQNGEIELQKTLNIVEQIRGDKEKPVPVNYQEKLVQKECDRDKARKNWQTIGNIKELKEGYLSNIVHEIARLMVEQNAIVVMEDLNFGFKRGRFAVERQVYQKFENMLIEKLNYFAFKDRPATESGGILNAYQLTDKSANISDVGKQCGWIFYIPASYTSKIDPKTGFANLFNTKGLTNVEKKKEFFSKFDSIRYDSKENCFVFSVNYSKLGDNADFKKNWEIYTHGERIVYSRKENKTFSVNPTENLEKTFDEQFVQSGINWKNKENLIDLIENISAEKSNAKFFDELLRSFTTTLQMRNSVPNTEEDYLISPVKAADGTFFDSRNEIVKGKNSSGKWISKFPVDADANGAYHIALKGLYLLQNNFNLNEKDYIENISNADWFKFVQEKEYLK

SEQ ID NO: 233 - skipped

SEQ ID NO: 234 - protein, 1306 aa, unidentified
  REGION 1..1306: note = Category: MG31 effectors
  REGION 1..1306: note = Description: MG31-6 effector
  source 1..1306: note = uncultivated organism sequence
MKAVEKFCGQKNGYSRSITLRNRLIPIGKTEENIQKLKLLDKDMERAKAYDEVKKLIDEFHRTFIEEVLSKASFEWAPLYDQFDLFQTEKDKLKKNKIKKELEVLQGVMRKKIVESFKKDKRFEKLFKKELLTEFVPAVIKNDESGTITDKQAALNVFKGFATYFTGFHQNRQNMYSEEAQSTAISNRIVNENFPKFYANVKVFEYLKNNYPEIINETEKSLAEFLKGKKLADIFSPESFNAVMSQRGIDFYNTVIGGISDESGSKKIQGLNEKINLASQQLPSEEKYKLKKKMTILYKQILSDRNTASFIPVGFEKSEEVYESVKHFKEEILDKVITNTKKLFDSVDYDLGQIYVPAKEVTEFSLKVFGNWSISHNGLFLLEQDMAKKALTEKQIEALKKEISKRDLSLSDLQNAYERWTKENDVKAEKNVRNYFKLTELRVDEKSKEKDSIEILKNLDVLYSKIDFKKQENLIKEKTSATPIKDYLDEIQNLYHYLKLVDYRGEEQKDTDFYSKYDEIIQALSEIIPLYNKVRNFVTKKPNEIKKVKLNFDCPTLANGWDLNKESSNDAIILRKNGNYYLGIFNPKDKPKFEYNNEDSGYEKMIYKLLPGPNKMLPKVFFSAKGLETFRPPKDLVLGYEEGKHKKGDNFDKVFMHKLIDWFKYAINQHEDWKNFNFKFSPTEFYEDMSGFYKEVELQGYKITFSKVSDNCINSLIDSGKLFLFQIYNKDYSTGEEGGNGSTGKKNQHTLYWENLFSEENLRDVCFKLNGEAEFFWRDANPNVKAVCHKKDSVLVNRTTSDGKSIPEEIYQEIYKYKNPEKQEKEFTLSKDAKELLESGTVVCKKAKFTITKDRHFTQQTYLFHCPITMNFKASEITGRKFNEHVQEILRNNPEVKVIGLDRGERHLIYLSLINQKGEIELQKTLNLVEQVRNDKTVSVNYQEKLVQKEVERDKARKSWQSISNIKELKEGYLSNIVHEIAKLMVENNAIVVMEDLNFGFKRGRFPVERQVYQKFENMLIEKLNYLVFKDKNVTEPGGVLNAYQLADKAVNVSDVGKQCGWIFYIPASYTSKIDPKTGFANLFYTAGLTNIEKKKDFFDKFDSIRYDRKLDSFVFGFDYSNFSDNADYNKKWELYSRGERLVYSKAEKSTISVNPTENLKVLFDKQGIVWDSEDNFIDQIHAVQAERDNVPFYDGLYRSFTAILQMRNSVPNSSKQEDDYLISPVMADDGNFYDSRLEAAKGKDEKGNWISKLPVDADANGAYHIALKGLYLLKNDFNLNEKGYIENISNADWFKFVQNKEYQDC

SEQ ID NO: 235 - protein, 789 aa, unidentified
  REGION 1..789: note = Category: MG31 effectors
  REGION 1..789: note = Description: MG31-7 effector
  source 1..789: note = uncultivated organism sequence
MKSIEIFCGQSNGYSRSITLRNRLIPIGKTEENIKKLKLLDNDINRSKAYVEVKKLIDDFHRSFIEDVLSKVKLEWGPLYVQFDLFQNEKDKQKKNKIKKELETLQGVMRKKIIKKFKDDDRFDKLFKKELLTEFVPTVIKNDESGTISDKQAALDEFKGFATYFTGFHQNRQNMYSAEAQSTAISNRIVNENFPKFYANIKVFEYLQKEYPAIITETEESLSEILKGKKLADIFCADGFNSVLSQSGIDFYNTIIGGVAGEAGTKKLQGINEKINLTRQQLPVEEKSKLKRKMTVLYKQILSDRRTASFIPVGFESSDEVYESVKQFKEDSLNKILSEMKILFEKSDYELSQIYVPAKEVTEFSLKLFGNWSILHDGLFLIEKDNAKKSLSENQIDILRKEIAKRDCSLADLQSAYKRWAKENDVKVEKTVMNYFRIAELRAEEKSKEKASVEILKELESAFDKIDFEKRENLIKEKESATPIKEFLDEVQNLYHYLKLVDYRGEEQKDTDFYSKYDEILQTLSEIIPLYNKVRNFVTKKPNEVKKVKLNFDNVSLAKGWDVNKESDYTCILLRRNGLYYLGVLNPKDKPKFDSENNGETSINKNDCYEKLVYKYFKDVTTMIPKCSTQLNDVKQHFKNSNEDYILENDNFIKPLVISKRIFDLNNKTFDEKKMFQIDYYRNTGDLKGYTEAVKDWISFCITFVHSYKSTCIYDFSSLGDCSQFKQVDQFYKEINLLLYKIWFVNVTAEKINSLVDSGKLFLFQIYNKDYSTGKDGGNGSTGKKNLHT

SEQ ID NO: 236 - protein, 1307 aa, unidentified
  REGION 1..1307: note = Category: MG31 effectors
  REGION 1..1307: note = Description: MG31-8 effector
  source 1..1307: note = uncultivated organism sequence
MKSIEQFCGQKNGYSRSITLRNRLIPVGKTEENLQKANMLEADFERAKAYAEVKNLIDDFHRSLIEDVLSNAKLDWKKLYVQFDLYQSEKDKLKKTKQKKDLQSVQGAMRKAIVKKFKDDERFSKLFKKDLLSDLLPSIIKNDESGTITDKNEALKVFKGFATYFSGFHQNRENLYSDEAKATAISNRIVNENFPKFHANVKVFEYLQKNFPKIISDTEESLKEFLNGKKLSEIFSPENFNAVLCQSGIDFYNTVIGGISDENKKQKIQGLNEKINLASQQLPPEEKSKLKKKMTVLYKQILSDKKTASFIPVGFEKSEEVYKSIKQFKEEYFDKAYKLIEKTFSAPDYDLSEIFVPAKELTAFSLAIFGNWSILNDGLFLLEKDKAKNELTEKQVENLHKEISKKDYSLADLQIAYERWANENGVQSDKTVKSYFTLSELRANEKTKKKEPIDIIEKIRIAYENIDFENIENLQAEKDAATPIKNFLDEVQCLFHHLKLVDYRGEEQKDSAFYSKFDEILIPLSEIIPLYNKVRNFVTKKPGEVKKIKLNFECPTLANGWDLNKESSNDAIILRNDGKYFLGIFNPENKPKFSNDSICKNQEEPHYEKMIYKLLPGPNKMLPKVFFSTKGQETFLPPKDLLLGYEQGKHKKGETFDKSFMYKLIDWFKYAIDQHEDWKNFNFQFSPTESYEDMSGFYKEVELQGYKITFQNISENYIDSLVDSGKLYLFQIYNKDFAEKADGKKNLHTLYWENLFSPENLKDICLKLNGEAELFYRPASENLKIIKHEKDSILVNRTTTDGETIRDEIYQEIYKFKNPAKQEKGFKLSDEAKSLLDSGKVVLKKARFEITKDKHFLQNTYLFHCPITMNFKAPEITGKKFNERVLEYLRNNPDVKIIGLDRGERHLIYLSLINQNGEIELQKTLNIVEQIRGDKENPVSVNYQEKLVQKEGDRDKARKNWQTIGNIKELKEGYLSNIVHEIAKLMVEQNAIVVMEDLNFGFKRGRFAVERQVYQKFENMLIEKLNYFAFKDRTATEPGGILNAYQLTDKSANVSDVGKQCGWIFYIPASYTSKIDPKTGFANLFNTKGLTNVEKKKEFFAKFDSIRYDSKEDCFVFNVNYSKLGDNADFRKNWEIYTHGERIVYSKKENKTFSVNPTENLKKAFDGQFAQSGIEWKNKENLIDLIENICAEKSNAKFFDELLRSFTTTLQMRNSVPNTEEDYLISPVKAADGTFFDSRNEIAKGKDSSGKWISKFPVDADANGAYHIALKGLYLLQNNFNLNEKGYIENISNADWFKFVQKKEYLK

SEQ ID NO: 237 - protein, 1335 aa, unidentified
  REGION 1..1335: note = Category: MG31 effectors
  REGION 1..1335: note = Description: MG31-9 effector
  source 1..1335: note = uncultivated organism sequence
MKTIDDFCGQKNGYSRSITLRNALIPIGKTEENIQKLKLLDKDVERSKAYVEVKKLIDDFHRTFIEEVLSKTKLEWGLLYKQFELYQNEKDKQKKNKIKKQLEQLQSGMRKDIVKQFKKDERFDKLFKKELLSDFVPTVIKNDESGTISDKQAALDAFKGFATYFTGFHQNRQNMYSEEAQSTAISNRIVNENFPKFYANVKLFEYLQKEFPEIIKETEDSLSNFLNGKRLAEIFSENGFNAVLSQNGIDFYNTVIGGISDEAGSKKLQGLNEKINLASQQLPKEEKYKLKRKMTVLYKQILSDRSTASFIPVGFETSEEVYESVKQFKEQNFDKVVSLVKKLSSKTDYDLNQIYVPAKEVTEFSLKLFGNWSILHDGLFLLEKDNAKKNFSEKQMETLRKEIAKRDCSLAELQKVYEELCSYNGEQLGINEKGYLVKKTYNDKDKIELNVRDNFFRFTELRLDENTKEKSFVEILKEVNKNYLKIDFDKQENLIKEKESSTPIKNFLDEVQNLYHYLKLVDYRGEEQKDSDFYSELDKILLELSEIVPLYNKVRNFVTKKPNEIKKVKVMFDCSSLLNGWGTDYGTKEAHIFIDSGKYYLGIVNNKLDKEDVESLKVVGEHMISKVIYDFQKPDNKNTPRLFIRSKGDSYAPAVSKYNLPITDIIDIYDKGLFKTEYRKINPEEYKKSLEKIIDYFKLGFSRHDSYKHYNFSWKKTTDYADIADFYSDTIKSCYQLKFEKVNYGNLVSLVDSGKLFLFQIYNKDYSTGKDGGNGSTGNKNLHTLYWENLFSEENLRDVCLKLNGEAELFWRDANQNVKDVCHKKGSVLVNRTMTDGSTIPEDIYQEIYKFKNKKSESLSDKAKELLDSGKVVCKEARFDITKDRHFTKQTYLFHCPITMNFKASEISNKDFNSKVQTLLKNNSDVKIIGLDRGERHLIYLSLINQKGEIELQKTLNLVEQVRNDKTVKVNYQEKLVQKEGDRDKARKNWQTIGNIKELKEGYLSNIVHEIAKLMVENNAIVVMEDLNFGFKRGRFAVERQVYQKFENMLIEKLNYLVFKDKKLTESGGVLNAYQLTNKSANVSDVGKQCGWIFYIHAAYTSKIDPKTGFANLFYTAGLTNVEKKKEFFDKFDSIRFDSKTDSFVFSFDYSNFSDNADFKKNWDVYSRGERLVYSKAERTAVCVNPTENLKALFEKQGINWNTEDNFIDQIQAVQAERENCSFYDGLYRSFMAILQMRNSKPNSSNQEDDYLISPVKAEDGTFYDSRVEAAKGKDSNGRLISKLPVDADANGAYHIALKGLYLLKNDFNLNDKGYIENISNADWFKFAQEKDYAE

SEQ ID NO: 238 - protein, 1306 aa, unidentified
  REGION 1..1306: note = Category: MG31 effectors
  REGION 1..1306: note = Description: MG31-10 effector
  source 1..1306: note = uncultivated organism sequence
MKTIENFCGQKNGYSRSITLRNRLIPIGKTEENIEKLQLLDNDIKRSKAYVEVKTMIDDFHRSFIEDVLSKAKLEWGPLYDLFDLFQNEKDKQKKSKIKKELETIQGVMRKQIVKKFKEDDRFDKLFKKELLTEFVPTVIKADESGTISDKRAALDVFKGFATYFTGFHQNRQNMYSEEAKATAISNRIVNENFPKFYANVKVFECLQKEYPEIITETEASLSEILNGKKLADIFSADGFNSVLSQSGIDFYNTIIGGIAGEAGTQKLQGVNEKINLARQQLPEEEKSKLKRKMTVLYKQILSDRSTASFIPVGFESSDEVYESVKQFKEDSLNKILSEIKTLFEKSDYDLSQIYVPAKEVTDFSLKLFGNWSILHDGLFLIEKDNAKKTFTEKQIENIRKDIAKRDCSLADLQNAYERWEKENDVKAEKTVKNYFKIAELRADEKSREKTSVEILNKIESAFEKIDFEKRDNLIKEKETAAPIKDFLDEVQNLYHYLKLVDYRGEEQKDTDFYSKYDQILQTLSEIVPLYNKVRNFVTKKPNEVKKVKLNFDCPTLASGWDLNKESSNDAILLRKDGNYYLGIFNSKDKPKFENCSTDGECYEKMIYKLLPGPNKMLPKVFFSTKGQETYLPSKEILLGYEEGKHKKGDNFDKDFMHKLIDWFKTAINQHEDWKNFNFKFSQTESYEDLSGFYKEVESQGYKIIFKKVSESYINSLVDSGKLFLFQIYNKDYSTGKDGGNGSTGKKNLHTMYWENLFSEENLRDVCLKLNGEAELFWRDANPDVKAVCHKKGSVLVNRTTSDGETIPEEIYQEVYKFKNPDKQENGFKLSDAAKELLDSGKVVCKEAKFDITKDRHFTQKTYLFHCPITMNFKASEITGRKFNEKVQQALKNNPDVKIIGLDRGERHLIYLSLINQKGEIELQKTLNLVEQVRNDKTVSVNYQEKLVQKEGERDKARKNWQSINNIKELKEGYLSNIVHEIAELMVENNAIVVMEDLNFGFKRGRFAVERQVYQKFENMLIEKLNYLVFKDKKVTEPGGVLNAYQLTDKSANISDVGKQCGWIFYIPAGYTSKIDPKTGFANLFYTAGLTNIEKKKDFFDRFDSIRYDRKTDSFVFSFDYSGVSDNADFNKKWEMYSRGERLVFSKAEKSIVRVNPTENLKALFDKQGISWSSEDNIIDQIQAVQAERENCAFYDGLYRSFTAILQMRNSVPNSSKEEDDYLISPVMAEDGTFYDSREEAAKGKTTDGKWISKLPVDADANGAYHIALKGLYLLKNNFNLNEKGYIENISNADWFKFVQEKKYAK

SEQ ID NO: 239 - protein, 1305 aa, unidentified
  REGION 1..1305: note = Category: MG31 effectors
  REGION 1..1305: note = Description: MG31-11 effector
  source 1..1305: note = uncultivated organism sequence
MKTIENFCGQKNGYSRSITLRNRLIPIGKTEENIEKLQLRDKDIKRSKAYVEVKTMIDDFHRAFIEEVLSKAKLEWGPLYDLFDLFQNEKDKQKKSKIKKELETIQGVMRKQIVKKFKDDDRFDKLFKKELLTEFVPTVIKADESGTISDKRAALDVFKGFATYFTGFHQNRQNMYSEEAKATAISNRIVNENFPKFYANVKVFECLQKEYPAIITETEEALSEILNGKKLADIFSADGFNSVLSQSGIDFYNTIIGGVAGEAGTQKLQGINEKINLARQQLPTEEKNKLKRKMSVLYKQILSDRSTASFIPIGFESSDEVYESVKQFKEQSLDNVISAAKELFEKSDYDLSQIYVPAKEVTDFSLKLFGNWSILHDGLFLIEKDNAKKSFTEKQIENLRKDIAKRDCSLADLQNAYERWAKENDVKAEKTVKNYFKIAELRADEKSREKTSVEILNKIESAFEKIDFEKRDNLIKEKETAAPIKDFLDEVQNLYHYLKLVDYRGEEQKDTDFYSKYDEIAQTLSEIVPLYNKVRNFVTKKPNEVKKVKLNFDCPTLASGWDLNKESSNDAILLRKDGNYYLGIFNSKDKPKFDNCSTEGECYEKMIYKLLPGPNKMLPKVFFSIKGQETYLPPEEILLGYEEGKHKKGDNFDKDFMYKLIDWFKTAINQHEDWKNFNFKFSQTESYEDLSGFYKEVESQGYKITFQKVAESYINSLVDSGKLFLFQIYNKDYSTGNDGGNGSTGKKNLHTLYWENLFSEENLRDVCLKLNGDAELFWRDANPDVKAVCHKKGSVLVNRTTSDGETIPEEIYQEVYKFKNPDKQEKSFKLSDAAKKLLDSGKIVCKEAKFDITKDRRFTKPTYLFHCPITMNFKAPEISNKDFNAKVQKILKDNPDVKIIGLDRGERHLIYLSLINQKGEIELQKTLNLVEQVRNDKTVSVNYQEKLVQKEGGRDKARKNWQTIGNIKELKEGYLSNIVHEIAELMVENNAIVVMEDLNFGFKRGRFAVERQVYQKFENMLIEKLNYLVFKDRKVGEPGGVLNAYQLANKSANVSDVGKQCGWIFYIPAAYTSKIDPKTGFANLFYTAGLTNVEKKKEFFDKFDSVRFDRKTNSFVFAFDYGNFSDNADFKKKWEVYSCGERLVYSKADKTAICASPTEDLKTLFDKQSINWNSEENFIDQIHAVQAERENCAFYDGLYRSFMTILQMRNSKPNSSNQEDDYLISPVMAADGTFYDSRVEAAKGKDAEGKWISKLPVDADANGAYHIALKGLYLLKNDFNLNDKGYIENISNADWFRFAQSRFEN

SEQ ID NO: 240 - protein, 1237 aa, unidentified
  REGION 1..1237: note = Category: MG31 effectors
  REGION 1..1237: note = Description: MG31-12 effector
  source 1..1237: note = uncultivated organism sequence
MKTVEQFCGQKNGYSRSITLRNRLILVGKTEENLQKANMLEADFNRAKAYSEVKNLIDDFHRSFIEDVLSNTKLGWKNLYDVFDLCQLEKDKIKKEKQKKDLQSIQAAMRKAIVKKFKDDERFSKLFKKELLSDLLPSIIKNDESGTITDKNEALKVFKGFSTYFSGFHQNRENLYSDEAKATAISNRIVNENFPKFHANVKVFEYLQKNFPEIISDTEESLKAFLNGKKLSEIFNPEKFNAVLCQSGIDFYNTVIGGISDENGKQKIQGLNEKINLASQQLPPEEKSKLKKKMTVLYKQILSDKKTASFIPIGFEKSEEVYKSIKQLKEEYFDKAYKLIERTFSAPDYDLSEIFVPAKELTAFSLAIFGNWSILNDGLFLLEKDNSKKELTEKQVENLHKEISKKDYSLADLQKAYERWANENGVPADKTVKSYFSLSELRANEKTKEKEPVDIVEKIKITYEKIDFENIENLQAEKEAATPIKNFLDEVQCLFHHLKLVDYRGEEQKDSAFYSKLDEILIPLSEIISLYNKVRNFVTKKPGEVKKIKLNFECPTLANGWDLNKESSNDAIILRKNGKYFLGIFNPEDKPKFSNDSICKNQQESHYEKMIYKLLPGPNKMLPKVFFSTKGQETFLPPKDLLLGYEQGKHKKGESFDKSFMHKLIDWFKYAINQHEDWKNFNFKFSPTESYEDMSGFYKEVELQGYKITFQNISENYIDSLIDSGKLYLFQIYNKDFAEKADGKKNLHTLYWENLFSPENLKDICLKLNGDAELFYRPASENLKVIKHEKDSILVNRTTTDGETIRDETYQEIYKFKNPAKQKKGFKLSNEAKSLLDSGKVVFKKARFEITKDKHFLQNTYLFHCPITMNFKAPEITGKKFNERVLEYLRNNPDVKIIGLDRGERHLIYLSLINQNGEIELQKTLNIVEQIRGDKENPVSVNYQEKLVQKEGDRNKARKNWQTIGNIKELKEGYLSNIVHEIAKLMVEQNAIVVMEDLNFGFKRGRFAVERQVYQKFENMLIEKLNYFAFKDRPATESGGILNAYQLTDKSANISDVGKQCGWIFYIPASYTSKIDPKTGFANLFNTKGLTNVEKKKEVFSKFDSIRYDSKENCFVFSVNYSKLGDNADFKKNWEIYTHGERIVYSRKENKTFSVNPTENLEKAFDGQFAQSGINWKNKENLIDLIENISAEKSNAKFFDELLRSFTTTLQMRNSVPNTEEDYLISPVKAADGTFFD

SEQ ID NO: 241 - protein, 779 aa, unidentified
  REGION 1..779: note = Category: MG31 effectors
  REGION 1..779: note = Description: MG31-13 effector
  source 1..779: note = uncultivated organism sequence
MKTVEQFCGQKNGYSRSITLRNRLIPVGKTEENLQKANMLEADFNRAKAYSEVKNLIDDFHRSFIEDVLSNTKLGWKNLYDVFDLCQLEKDKIKKEKQKKDLQSIQAAMRKAIVKKFKDDERFSKLFKKELLSDLLPSIIKNDESGTITDKNEALKVFKGFSTYFSGFHQNRENLYSDEAKATAISNRIVNENFPKFHANVKVFEYLQKNFPEIISDTEESLKAFLNGKKLSEIFNPEKFNAVLCQSGIDFYNTVIGGISDENGKQKIQGLNEKINLASQQLPPEEKSKLKKKMTVLYKQILSDKKTASFIPIGFEKSEEVYKSIKQLKEEYFDKAYKLIERTFSAPDYDLSEIFVPAKELTAFSLAIFGNWSILNDGLFLLEKDNSKKELTEKQVENLHKEISKKDYSLADLQKAYERWANENGVPADKTVKSYFSLSELRANEKTKEKEPVDIVEKIKITYEKIDFENIENLQAEKEAATPIKNFLDEVQCLFHHLKLVDYRGEEQKDSAFYSKLDEILIPLSEIISLYNKVRNFVTKKPGEVKKIKLNFECPTLANGWDLNKESSNDAIILRKNGKYFLGIFNPEDKPKFSNDSICKNQQESHYEKMIYKLLPGPNKMLPKVFFSTKGQETFLPPKDLLLGYEQGKHKKGESFDKSFMHKLIDWFKYAINQHEDWKNFNFKFSPTESYEDMSGFYKEVELQGYKITFQNISENYIDSLIDSGKLYLFQIYNKDFAEKADGKKNLHTLYWENLFSPENLKDICLKLNGDAELFYRPA

SEQ ID NO: 242 - protein, 874 aa, unidentified
  REGION 1..874: note = Category: MG31 effectors
  REGION 1..874: note = Description: MG31-14 effector
  source 1..874: note = uncultivated organism sequence
MKTVEQFCGQKNGYSRSITLRNRLIPVGKTEENLQKANMLEADFNRAKAYSEVKNLIDDFHRSFIEDVLSNTKLGWKNLYDVFDLCQLEKDKIKKEKQKKDLQSIQAAMRKAIVKKFKDDERFSKLFKKELLSDLLPSIIKNDESGTITDKNEALKVFKGFSTYFSGFHQNRENLYSDEAKATAISNRIVNENFPKFHANVKVFEYLQKNFPEIISDTEESLKAFLNGKKLSEIFNPEKFNAVLCQSGIDFYNTVIGGISDENGKQKIQGLNEKINLASQQLPPEEKSKLKKKMTVLYKQILSDKKTASFIPIGFEKSEEVYKSIKQLKEEYFDKAYKLIERTFSAPDYDLSEIFVPAKELTAFSLAIFGNWSILNDGLFLLEKDNSKKELTEKQVENLHKEISKKDYSLADLQKAYERWANENGVPADKTVKSYFSLSELRANEKTKEKEPVDIVEKIKITYEKIDFENIENLQAEKEAATPIKNFLDEVQCLFHHLKLVDYRGEEQKDSAFYSKLDEILIPLSEIISLYNKVRNFVTKKPGEVKKIKLNFECPTLANGWDLNKESSNDAIILRKNGKYFLGIFNPEDKPKFSNDSICKNQQESHYEKMIYKLLPGPNKMLPKVFFSTKGQETFLPPKDLLLGYEQGKHKKGESFDKSFMHKLIDWFKYAINQHEDWKNFNFKFSPTESYEDMSGFYKEVELQGYKITFQNISENYIDSLIDSGKLYLFQIYNKDFAEKADGKKNLHTLYWENLFSPENLKDICLKLNGDAELFYRPASENLKVIKHEKDSILVNRTTTDGETIRDETYQEIYKFKNPAKQKKGFKLSNEAKSLLDSGKVVFKKARFEITKDKHFLQNTYLFHCPITMNFKAP

SEQ ID NO: 243 - protein, 1328 aa, unidentified
  REGION 1..1328: note = Category: MG31 effectors
  REGION 1..1328: note = Description: MG31-15 effector
  source 1..1328: note = uncultivated organism sequence
MNIIFGGIFMKTIDDFCGQTSGYSRSITLRNRLIPIGKTEEIIQKQHLLDNDIKRARAYLEVKKMIDDFHRIFIEEVLSKAKLEWGPLYDQFDLFQNEKDKQKKNKIKKELESLQGVMRKQIVKKFKADGRFDKLFKKELLTEFVPTVIKADESGTISDKQAALDVFKGFATYFTGFHQNRQNMYSEEAQSTAISNRIVNENFPKFYANVKVFEYLQNECPAIITETEESLSDFLKGKRLADIFTEEAFNAVLSQGGIDFYNTIIGGVAGEAGTQKIQGVNEKINLARQQLPEEEKSKLKRKMTVLYKQILSDRSTASFIPVGFESSDEVYESVKQFKEDSLNKILSEMKILFEKSDYELSQIYVPAKEVTEFSLKLFGNWSILHDGLFLIEKDNAKKSLTEKQIDILRKDIAKRDCSLSDLQSAYERWTKENDVKVEKTVKNYFGIAELRVDEKSKEKTSVEILKELESAFDKIDFEKRDNLIKEKETAAPIKNFLDEVQNLYHYLKLVDYRGEEQKDTDFYSKYDEILQTLSEIIPLYNKVRNFVTKKPNEVKKVKLNFDCSSFLNGWGTDYGTKEAHIFIDSGKYYLGIVNEKLAKEDEDELKTPTSKVIKKVVYDFQKPDNKNTPRLFIRSKGTAFAPAVSQYNLPIESVIEIYDKGLFKKEYRKINPQVYKESLIKMIDYFKLGFTRHDSYKHYSFNWKDSSEYNDISEFYADVMSSCYQLKFEDTNFEKLLSLVDSGKLFLFQIYNKDYSTGKDGGNGSTGKKNLHTLYWKNLFSEENLRDVCLKLNGEAELFWRDANPNVKNVCHKKGSVLVNRTTSDGDTIPEKIYQEIYKFKNPDKQEKGFKLSDVAKEFLDSGKVVCKEAKFDITKDRHFTQKTYLFHCPITMNFKASEIPGKKFNEKVQQVLKNNPDVKIIGLDRGERNLIYLSLINQKGEIELQKTLNLVDQVRNDKTVSVNYQEKLVQKEGERDKARKNWQTISNIKELKEGYLSNIVHEIAELMVDNNAIVVMEDLNFGFKRGRFAVERQVYQKFENMLIEKLNYLVFKDKISTEPGGVLNAYQLTVKAANVSDVGKQCGWIFYIPASYTSKIDPKTGFANLFYTAGLTNIEKKKDFFDKFDSIRYDEKTDSFVFSFDYREFGDNADFKKKWEVYSRGERLIFSKAEKSVIRVNPTENLKALFDNQGINWASENNFMAQIHAVRAERENCAFYDGLYRSFTAILQMRNSVSNSSKQEDDYLISPVMAEDGSFYDSREEAEKGKTPDGKWISKFPVDADANGAYHIALKGLYLLKNNFNQNERGGIENISNADWFEFVQEKKYAK

SEQ ID NO: 244 - protein, 1302 aa, unidentified
  REGION 1..1302: note = Category: MG31 effectors
  REGION 1..1302: note = Description: MG31-16 effector
  source 1..1302: note = uncultivated organism sequence
MNVINKFCGQENGYSRSITLRNALIPIGKTEENIQKLKLLDKDIVRSKAYIEVKKLIDDFHRAFIEEVLSKIKLDWGPLFDQFELYQNERDKQKKNRIKNDLKKLQEGMRKDLVKKFKEDKRFDKLFKKELLSDFVPTVIKTDETGTISDKQAALDAFKGFATYFTGFHQNRQNMYSDEEQSTAISNRIVNENFPKFYANVKFFEYLQKDFPAIIKDTEESLAVFLKGKKLADIFSENGFNAVLSQSGIDFYNTVIGGISEEAGSKKIQGLNEKINLASQQLQAEEKHKLKKKMSVLYKQILSDRSTVSFIPVGFEASDEVYESVKQFKEQRLDKAISLVKKLTDKTDYDISQIYVPAKEVTEFSLKLFGNWSILYDGLFLLEKDGSKKNFTEKQVETLRKEIAKKDFSLEDLQNAYERWTKEYNSPVDKTTKNYFRIAELRLDENTKEKSFVEILKKLDESYSKIDFDKQKNLIKEKEAATPIKNFLDEVQNLYHYMKVVDYRGEEQKDSDFYSGLDEILQILSEIIPLYNKVRNFVTKKPNDVKKVKLNFDCPTLANGWDLNKESSNDAIILRKNGNYYLGIYNPKDKPKFETCTNGEECYEKMIYKLLPGPNKMLPKVFFSTKGKETFLPPEDILIGYEDGKHKKGGNFDKQFMYKLIDWFKAAINRHEDWKNFNFKFSPTESYEDLSGFYKEVELQGYKITFQNIAESYINSLVDSGKLFLFQIYNKDFSTGKDCGNGSTGKKNLHTLYWENLFSEENLRDVCLKLNGEAELFWRDANPNVKDVCHKKGSVLVNRTTSDGKSIPEDVYQEIYQFKNKLTDKISDKAKELLDSGKVVCKVAKFDITKDKHFTKSTYLFHCPITMNFRAPGISDKDFNVKVQSILKDNPDVKIIGLDRGERHLIYLSLINQKGEIELQKTLNLVEQVRNDKTVSVNYQEKLVQKEGDRDKARKNWQTIGNIKELKEGYLSNIVHEIAKLMVENNAIVVMEDLNFGFKRGRFAVERQVYQKFENMLIEKLNYLVFKDKKVTEPGGVLNAYQLANKSANVSDVGKQCGWIFYIPAAYTSKIDPKTGFANLFYTAGITNIEKKKDFFDKFDSIRYDRKTDSFVFSFDYSNFSDNADFKKKWEVYSCEDRLVFSKAEKTTVSVNPTENLKALFDKQEINWNTEDNFIDQIHAVQAERDNCAFYDGLYRSFMAILQMRNSKPNSSNQEDDYLISPVMADDGTFYDSRVEAAKGKDENGRWISKLPVDADANGAYHIALKGLYLLKNDFNLNDKGYIDNISNAEWFKFAQEKDYAE

SEQ ID NO: 245 - protein, 1334 aa, unidentified
  REGION 1..1334: note = Category: MG31 effectors
  REGION 1..1334: note = Description: MG31-17 effector
  source 1..1334: note = uncultivated organism sequence
MRTIDEFCGQKNGYSLSKTLRNKLIPVGKTEDKIKEYHLMENDYGRAEAYVEVKNLIDDFHRSFIAERLDKVSLDWTNLFNALNEYQKNQKDKLLKAKCKKVLEAQQKEMRKKIVQLFTGDKDNKDPVYEKLFKKELIEDLLPEAIKKDTSGIITQKEEALAKFHQFCTYFTNFHENRKTIYSAEDKSTAISNRIVNENFPKYVANIKVFEYLSKNFPKIIDDTENQLKNDLSGKKLKDIFTINGFNNVLSQKGIDFYNIIIGGIPEKEGIPRKQGINEAINLLRQGLPPERKNELKQRMTFLYKQILSDKEKVSFIPEVFNDSKEVYLAVQAFNAKCISSIIDKIADLYKQHNAYNLEKIFVPAKSLTAFSQSVYGNWSLLSECIFEKEKGEKTLSEKKLEDLTKKIAKNDYSLIDLQSAYDIWADKNNIEFNKRISINSYFNLNEIRQQKRPDGTYEKVVSNLIEDVKSTYIRIDFDNIKDLQQEKNASIPIKEYLDAVQNLFHYLKLVDYKGDALKDEMFYSSYDEYLQILSEIMSLYNKTRNFVTKKVGEIKKIKLNFDCSSLLSGWGTDYGSKAAHIFKSDSCFYLGIINKKLDKTDIDSIYQNGNTMIEKIVYDFQKPDNKNTPRLFIRSKGNAYAPAVSTYDLPIESVIDIYDKGLFKTEYREKNLEVYKKSLIKLIDYFKLGFSRHDSYKHYNFCWKETKDYADISEFYADTMRSCYQLKTERINFDNLMTLVDEGKLFLFQIYNKDFSTGKDGGNGSTGRKNMHTLYWENLFSKENLDDVVLQLSGGAELFFRPKSLEEENATIHEKNSFIVNRTYLKEVKGNKEIYETIPEEIYQEIYQKLNGKTDTISDEAQELLSSGKVKYRAAPHRIIKDRHFTQDTYLFHCPISLNFKAQEITGKKFNDRVLEKIKNNSEIKIIGLDRGERNLIYLSLINQKGEIELQKTLNLVEQQKRLIDYQGKLVQKEGDRDKARKNWQTIGNIKELKEGYLSAVVHEIATLMVDNNAIVVMEDLNFGFKRGRFAVERQVYQKFEHMFIDKLNYLVFKDRKVTEPGGVLNAYQLTDKLEAFKDLGKQSGFLFYVPAGYTSKIDPATGFANLLDMTNLTNVQKKRDFFAKFDSICFDEEKQMFAFTFDYKNFPGKGSQEMSRTKWTVYSNGERIQFCGKGKASKHIENLTEEFKTLFREFDYQNGNNILDSILEVGAALKAGEKPAKEIADFWDKLLVLFKLVLQMRNSDAKTGDDYIISPVMSESGNFFDSREQEKLGNNAKLPKDADANGAYHIALKGLYLLKAFDKTPEDQLKKVDMKISNADWFRFAQEKEYNK

SEQ ID NO: 246 - protein, 1334 aa, unidentified
  REGION 1..1334: note = Category: MG31 effectors
  REGION 1..1334: note = Description: MG31-18 effector
  source 1..1334: note = uncultivated organism sequence
MRTIDEFCGQKNGYSLSKTLRNKLIPVGKTEDKIKEYHLMENDYGRAEAYVEVKNLIDDFHRSFIAERLDKVSLDWTNLFNALNEYQKNQKDKLLKAKCKKVLEAQQKEMRKKIVQLFTGDKDNKDPVYEKLFKKELIEELLPEAIKEDTSGIITQKEEALAKFHQFCTYFTNFHENRKTIYSAEDKSTAISNRIVNENFPKYVANIKVFEYLSKNFPKIIDDTENQLKNDLSGKKLKDIFTVNGFNNVLSQKGIDFYNIIIGGIPEKEGIPRKQGINEAINLLRQGLPPERKNELKQRMTFLYKQILSDKEKVSFIPEVFNDSKEVYLAVQAFNAKCISSIIDKIADLYKQHNAYNLEKIFVPAKSLTAFSQSVYGNWSLLSECIFEKEKGEKTLSEKKLEDLTKKIAKNDYSLIDLQSAYDIWADKNNIEFNKRISINSYFNLNEIRQQKKPDGTYEKVVSNLIEDVKSTYIRIDFDNIKDLQQEKNASIPIKEYLDAVQNLFHYLKLVDYKGDALKDEMFYSSYDEYLQILSEIMSLYNKTRNFVTKKVGEIKKIKLNFDCSSLLSGWGTDYGSKAAHIFKSDSCFYLGIINKKLDKTDIDSIYQNGNTMIEKIVYDFQKPDNKNTPRLFIRSKGTAYAPAVSTYDLPIESVIDIYDKGLFKTEYREKNLEVYKKSLIKLIDYFKLGFSRHDSYKHYNFCWKETKDYADISEFYADTMRSCYQLKTERINFDNLMTLVDEGKLFLFQIYNKDFSTGKDGGNGSTGRKNMHTLYWENLFSKENLDDVVLQLSGGAELFFRPKSLEEENATIHEKNSFIVNRTYLKEVKGNKEIYETIPEEIYQEIYQKLNGKTDTISDEAQELLSSGKVKYRAAPHRIIKDRHFTQDTYLFHCPISLNFKAQEITGKKFNDRVLEKIKNNSEIKIIGLDRGERNLIYLSLINQKGEIELQKTLNLVEQQKRLIDYQGKLVQKEGDRDKARKNWQTIGNIKELKEGYLSAVVHELATLMVDNNAIVVMEDLNFGFKRGRFAVERQVYQKFEHMFIDKLNYLVFKDRKVTEPGGVLNAYQLTDKLEAFKDLGKQSGFLFYVPAGYTSKIDPATGFANLLDMTNLTNVQKKRDFFAKFDSICFDEEKQMFAFTFDYKNFPGKGSQEMSRTKWTVYSNGERIQFCGKGKASKHIENLTEEFKTLFREFDYQNGNNILDSILEVGAALKAGEKPAKEIADFWDKLLVLFKLVLQMRNSDAKTGDDYIISPVMSESGNFFDSREQEKLGNSAKLPKDADANGAYHIALKGLYLLKAFDKTPEDQLKKVDMKISNADWFRFAQEKEYNK

SEQ ID NO: 247 - protein, 1334 aa, unidentified
  REGION 1..1334: note = Category: MG31 effectors
  REGION 1..1334: note = Description: MG31-19 effector
  source 1..1334: note = uncultivated organism sequence
MRTIDEFCGQKNGYSLSKTLRNKLIPVGKTEDKIKEYHLMENDYGRAEAYVEVKNLIDDFHRSFIAERLDKVSLDWTNLFNALNEYQKNQKDKLLKAKCKKVLEAQQKEMRKKIVQLFTGDKDNKDPVYEKLFKKELIEELLPEAIKKDTSGIITQKEEALAKFHQFCTYFTNFHENRKTIYSAEDKSTAISNRIVNENFPKYVANIKVFEYLSKNFPKIIDDTENQLKNDLSGKKLKDIFTVNGFNNVLSQKGIDFYNIIIGGIPEKEGIPRKQGINEAINLLRQGLPPERKNELKQRMTFLYKQILSDKEKVSFIPEVFNDSKEVYLAVQVFNAKCISSIIDKIADLYKQHNAYNLEKIFVPAKSLTAFSQSVYGNWSLLSECIFEKEKGEKTLSEKKLEDLTKKIAKNDYSLIDLQSAYDIWADKNNIEFNKRISINSYFNLNEIRQQKRLDGTYEKVVSNLIEDVKSTYIRIDFDNIKDLQQEKNASIPIKEYLDAVQNLFHYLKLVDYKGDALKDEMFYSSYDEYLQILSEIMSLYNKTRNFVTKKVGEIKKIKLNFDCSSLLSGWGTDYGSKAAHIFKSDSCFYLGIINKKLDKTDIDSIYQNGNTMIEKIVYDFQKPDNKNTPRLFIRSKGNAYAPAVSTYDLPIESVIDIYDKGLFKTEYREKNLEVYKKSLIKLIDYFKLGFSRHDSYKHYNFCWKETKDYADISEFYADTMRSCYQLKTERINFDNLMTLVDEGKLFLFQIYNKDFSTGKDGGNGSTGRKNMHTLYWENLFSKENLDDVVLQLSGGAELFFRPKSLEEENATIHEKNSFIVNRTYLKEVKGNKEIYETIPEEIYQEIYQKLNGKTDTISDEAQELLSSGKVKYRAAPHRIIKDRHFTQDTYLFHCPISLNFKAQEITGKKFNDRVLEKIKNNSEIKIIGLDRGERNLIYLSLINQKGEIELQKTLNLVEQQKRLIDYQGKLVQKEGDRDKARKNWQTIGNIKELKEGYLSAVVHEIATLMVDNNAIVVMEDLNFGFKRGRFAVERQVYQKFEHMFIDKLNYLVFKDRKVTEPGGVLNAYQLTDKLEAFKDLGKQSGFLFYVPAGYTSKIDPATGFANLLDMTNLTNVQKKRDFFAKFDSICFDEEKQMFAFTFDYKNFNRKDAQEMSRTKWTVYSNGKRIQFCGKGKASKHIENLTEEFKTLFREFDYQNGNNILDSILEVGAALKAGEKPAKEIADFWDKLLVLFKLVLQIRNSDAKTGDDYIISPVMSEDGIFFDSREQEKLGNNAKLPKDADANGAYHIALKGLYLLKAFDKTPEDQLKKVDMKISNADWFRFAQEKEYNK

SEQ ID NO: 248 - protein, 1334 aa, unidentified
  REGION 1..1334: note = Category: MG31 effectors
  REGION 1..1334: note = Description: MG31-21 effector
  source 1..1334: note = uncultivated organism sequence
MRTIDEFCGQKNGYSLSKTLRNKLIPVGKTEDKIKEYHLMENDYGRAEAYVEVKNLIDDFHRSFIAERLDKVSLDWTNLFNALNEYQKNQKDKLLKAKCKKVLEAQQKEMRKKIVQLFTGDKDNKDPVYEKLFKKELIEELLPEAIKEDTSGIITQKEEALAKFHQFCTYFTNFHENRKTIYSAEDKSTAISNRIVNENFPKYVANIKVFEYLSKNFPKIIDDTENQLKNDLSGKKLKDIFTVNGFNNVLSQKGIDFYNIIIGGIPEKEGIPRKQGINEAINLLRQGLPPERKNELKQRMTFLYKQILSDKEKVSFIPEVFNDSKEVYLAVQAFNAKCISSIIDKIADLYKQHNAYNLEKIFVPAKSLTAFSQSVYGNWSLLSECIFEKEKGEKTLSEKKLEDLTKKIAKNDYSLIDLQSAYDIWADKNNIEFNKRISINSYFNLNEIRQQKKPDGTYEKVVSNLIEDVKSTYIRIDFDNIKDLQQEKNASIPIKEYLDAVQNLFHYLKLVDYKGDALKDEMFYSSYDEYLQILSEIMSLYNKTRNFVTKKVGEIKKIKLNFDCSSLLSGWGTDYGSKAAHIFKSDSCFYLGIINKKLDKTDIDSIYQNGNTMIEKIVYDFQKPDNKNTPRLFIRSKGNAYAPAVSTYDLPIESVIDIYDKGLFKTEYREKNLEVYKKSLIKLIDYFKLGFSRHDSYKHYNFCWKETKDYADISEFYADTMRSCYQLKTERINFDNLMTLVDEGKLFLFQIYNKDFSTGKDGGNGSTGRKNMHTLYWENLFSKENLDDVVLQLSGGAELFFRPKSLEEENATIHEKNSFIVNRTYLKEVKGNKEIYETIPEEIYQEIYQKLNGKTDTISDEAQELLSSGKVKYRAAPHRIIKDRHFTQDTYLFHCPISLNFKAQEITGKKFNDRVLEKIKNNSEIKIIGLDRGERNLIYLSLINQKGEIELQKTLNLVEQQKRLIDYQGKLVQKEGDRDKARKNWQTIGNIKELKEGYLSAVVHELATLMVDNNAIVVMEDLNFGFKRGRFAVERQVYQKFEHMFIDKLNYLVFKDRKVTEPGGVLNAYQLTDKLEAFKDLGKQSGFLFYVPAGYTSKIDPATGFANLLDMTNLTNVQKKRDFFAKFDSICFDEEKQMFAFTFDYKNFPRKGSQEMSRTKWTVYSNGKRIQFCGKGKAYKHIENLTEEFKTLFREFDYQNGNNILDSILEVGVDLKIGEKPTKEISDFWDKLLVLFKLVLQMRNSDAKTGDDYIISPVMAEDGFFFDSREQEKLGNSAKLPKDADANGAYHIALKGLYLLKAFDKTPEDQLKKVDMKISNADWFRFAQEKEYNK

SEQ ID NO: 249 - protein, 1332 aa, unidentified
  REGION 1..1332: note = Category: MG31 effectors
  REGION 1..1332: note = Description: MG31-22 effector
  source 1..1332: note = uncultivated organism sequence
MRTIDEFCGQKNGYSLSKTLRFELKPQGKTLENINKAGLVKVDEQRAKDYQDVKKLLDNYHKYFIDDILKNASEKDLDWKPLKDAVEEYQKDKTKDEQLKKEQDKMRSSIVKCFSADKKRFDHLTAATPYDLFKTELPEWLSKNSFPNLNNKAVETFKKFSTYFTGYQETRKNIYSAEAISTAVPFRIVHDNFPKFLQNLSIYKWINEKCPEVIKNAQNEIGSILAGKKLEDFFTLNSFNIFLTQTGANEQRGIDFYNQLIGGVKQQNIQIKGINQCINEYWQQHPEFAKENRRVKMVPLYKQILSDRSTLSFVIESIENDKELFDAVTKFNESITLIKDTETEKTSVLENISTLIKNISDFDANHVFVNAKDLAGISLVLFGKWDALQIRMNEFAKATFSTKQERSRWVKNLEENSTTKRKGVFSFAELDRVLAFSSEEINATEISIKDYFDTQYKKFFDAEKNEVVVTKEVTVLSVDDLLISIQSKWNSLQKVVNNSTTENQLKENTENVAILKDYLDCVNELFTRLKVLNVDKSEARDTSFYSVYDEVMETLSEIMPLYNKVRNYITKKSFDIGKYKLNFDNPTLASGWDLNKEDANTCVILEKDGNYYLGVMNAKNKPKFSAIQPDDSVPCYKKMVYKLLPGPNKMLPKVFFSTKGIATFNPPKEILEGYNAGKHKKGDTFDLNFCHKLIDYFKSAINQHPDWKNFNFKFSDTSTYKDTSDFYKEISEQGYKLSFVNVPVSIIDSWVDEGKLYLFQIYNKDFSPNSTGTPNMHTLYWRNLFSKENLDDVVLKLNGEAELFYRGVGIKNPVVHSVGSKVVNRTTKDGKTISEAIHDEIYKYVNRKIPELSQETKKLYENGLVVVKTIQKNHELIKDKHYTQEKFLFHVPITINYKASGNSYINENVRQFLKNNPDVNIIGLDRGERHLIYMSLIDQKGNIIQQKTFNTVERKKNGATVSVDYHEKLDQKEKERDAARKNWQTIGKIAELKEGYLSAVIHELVTLMIEHNAIIVMEDLNFGFKRGRFHVEKQVYQKFEHMLIDKLNYLVFKDRGLKESGGVLNGYQLAGIFESFQKLGKQSGFLFYVPAGYTSKIDPATGFANLLDMTNLTNVQKKRDFFAKFDSICFDEEKQMFAFTFDYKNFNRKDAQEMSRTKWTVYSNGKRIQFCGKGKASKHIENITEEFKTLFREFDYQNGNNILDSILEVGAALKAGEKPAKEIADFWDKLLVLFKLVLQMRNSDAKTGDDYIISPVMSEDGIFFDSREQEKLGNNAKLPKDADANGAYHIALKGLYLLKAFDKTPEDQLKKVDMKISNADWFRFAQEKEYSK

SEQ ID NO: 250 - protein, 1332 aa, unidentified
  REGION 1..1332: note = Category: MG31 effectors
  REGION 1..1332: note = Description: MG31-23 effector
  source 1..1332: note = uncultivated organism sequence
MRTIDEFCGQKNGYSLSKTLRFELKPQGKTLENINKAGLVKVDEQRAKDYQDVKKLLDNYHKYFIDDILKNASEKDLDWKPLKDAVEEYQKDKTKDEQLKKEQDKMRSSIVKCFSADKKRFDHLTAATPYDLFKTELPEWLSKNSFPNLNNKAVETFKKFSTYFTGYQETRKNIYSAEAISTAVPFRIVHDNFPKFLQNLSIYKWINEKCPEVIKNAQNEIGSILAGKKLEDFFTLNSFNIFLTQTGANEQRGIDFYNQLIGGVKQQNIQIKGINQCINEYWQQHPEFAKENRRVKMVPLYKQILSDRSTLSFVIESIENDKELFDAVTKFNESITLIKDTETEKTSVLENISTLIKNISDFDANHVFVNAKDLAGISLVLFGKWDALQIRMNEFAKATFSTKQERSRWVKNLEENSTTKRKGVFSFAELDRVLAFSSEEINATEISIKDYFDTQYKKFFDAEKNEVVVTKEVTVLSVDDLLISIQSKWNSLQKVVNNSTTENQLKENTENVAILKDYLDCVNELFTRLKVLNVDKSEARDTSFYSVYDEVMETLSEIMPLYNKVRNYITKKSFDIGKYKLNFDNPTLASGWDLNKEDANTCVILEKDGNYYLGVMNAKNKPKFSAIQPDDSVPCYKKMVYKLLPGPNKMLPKVFFSTKGIATFNPPKEILEGYNAGKHKKGDTFDLNFCHKLIDYFKSAINQHPDWKNFNFKFSDTSTYKDTSDFYKEISEQGYKLSFVNVPVSIIDSWVDEGKLYLFQIYNKDFSPNSTGTPNMHTLYWRNLFSKENLDDVVLKLNGEAELFYRGVGIKNPVVHSVGSKVVNRTTKDGKTIPEAIHDEIYKYVNRKIPELSQETKKLYENGLVVVKTIQKNHELIKDKHYTQEKFLFHVPITINYKASGNSYINENVRQFLKNNPDVNIIGLDRGERHLIYMSLIDQKGNIIQQKTFNTVERKKNGATVSVDYHEKLDQKEKERDAARKNWQTIGKIAELKEGYLSAVIHELVTLMIEHNAIIVMEDLNFGFKRGRFHVEKQVYQKFEHMLIDKLNYLVFKDRGLKESGGVLNGYQLAGIFESFQKLGKQSGFLFYVPAGYTSKIDPATGFANLLDMTNLTNVQKKRDFFAKFDSICFDEEKQMFAFTFDYKNFNRKDAQEMSRTKWTVYSNGKRIQFCGKGKASKHIENLTEEFKTLFREFDYQNGNNILDSILEVGAALKAGEKPAKEIADFWDKLLVLFKLVLQIRNSDAKTGDDYIISPVMSEDGIFFDSREQEKLGNNAKLPKDADANGAYHIALKGLYLLKVFDKTPEDQLKKVDMKISNADWFRFAQEKEYSK

SEQ ID NO: 251 - protein, 1332 aa, unidentified
  REGION 1..1332: note = Category: MG31 effectors
  REGION 1..1332: note = Description: MG31-24 effector
  source 1..1332: note = uncultivated organism sequence
MRTIDEFCGQKNGYSLSKTLRFELKPQGKTLENINKAGLVKVDEQRAKDYQDVKKLLDNYHKYFIDDILKNASEKDLDWKPLKDAVEEYQKDKTKDEQLKKEQDKMRSSIVKCFSADKKRFDHLTAATPYDLFKTELPEWLSKNSFPNLNNKAVETFKKFSTYFTGYQETRKNIYSAEAISTAVPFRIVHDNFPKFLQNLSIYKWINEKCPEVIKNAQNEIGSILAGKKLEDFFTLNSFNIFLTQTGANEQRGIDFYNQLIGGVKQQNIQIKGINQCINEYWQQHPEFAKENRRVKMVPLYKQILSDRSTLSFVIESIENDKELFDAVTKFNESITLIKDTETEKTSVLENISTLIKNISDFDANHVFVNAKDLAGISLVLFGKWDALQIRMNEFAKATFSTKQERSRWVKNLEENSTTKRKGVFSFAELDRVLAFSSEEINATEISIKDYFDTQYKKFFDAEKNEVVVTKEVTVLSVDDLLISIQSKWNSLQKVVNNSTTENQLKENTENVAILKDYLDCVNELFTRLKVLNVDKSEARDTSFYSVYDEVMETLSEIMPLYNKVRNYITKKSFDIGKYKLNFDNPTLASGWDLNKEDANTCVILEKDGNYYLGVMNAKNKPKFSAIQPDDSVPCYKKMVYKLLPGPNKMLPKVFFSTKGIATFNPPKEILEGYNAGKHKKGDTFDLNFCHKLIDYFKSAINQHPDWKNFNFKFSDTSTYKDTSDFYKEISEQGYKLSFVNVPVSIIDSWVDEGKLYLFQIYNKDFSPNSTGTPNMHTLYWRNLFSKENLDDVVLKLNGEAELFYRGVGIKNPVVHSVGSKVVNRTTKDGKTIPEAIHDEIYKYVNRKIPELSQETKKLYENGLVVVKTIQKNHELIKDKHYTQEKFLFHVPITINYKASGNSYINENVRQFLKNNPDVNIIGLDRGERHLIYMSLIDQKGNIIQQKTFNTVERKKNGATVSVDYHEKLDQKEKERDAARKNWQTIGKIAELKEGYLSAVIHELVTLMIEHNAIIVMEDLNFGFKRGRFHVEKQVYQKFEHMLIDKLDYLVFKDRGLKESGGVLNGYQLAGIFESFQKLGKQSGFLFYVPAGYTSKIDPATGFANLLDMTNLTNVQKKRDFFAKFDSICFDEEKQMFAFTFDYKNFNRKDAQEMSRTKWTVYSNGKRIQFCGKGKASKHIENLTEEFKTLFREFDYQNGNNILDSILEVGAALKAGEKPAKEIADFWDKLLVLFKLVLQIRNSDAKTGDDYIISPVMSEDGIFFDSREQEKLGNNAKLPKDADANGAYHIALKGLYLLKVFDKTPEDQLKKVDMKISNADWFRFAQEKEYSK

SEQ ID NO: 252 - protein, 1332 aa, unidentified
  REGION 1..1332: note = Category: MG31 effectors
  REGION 1..1332: note = Description: MG31-25 effector
  source 1..1332: note = uncultivated organism sequence
MRTIDEFCGQKNGYSLSKTLRFELKPQGKTLENINKAGLVKVDEQRAKDYQDVKKLLDNYHKYFIDDILKNASEKDLDWKPLKDAVEEYQKDKTKDEQLKKEQDKMRSSIVKCFSADKKRFDHLTAATPYDLFKTELPEWLSKNSFPNLNNKAVETFKKFSTYFTGYQETRKNIYSAEAISTAVPFRIVHDNFPKFLQNLSIYKWINEKCPEVIKNAQNEIGSILAGKKLEDFFTLNSFNIFLTQTGANEQRGIDFYNQLIGGVKQQNIQIKGINQCINEYWQQHPEFAKENRRVKMVPLYKQILSDRSTLSFVIESIENDKELFDAVTKFNESITLIKDTETEKTSVLENISTLIKNISDFDANHVFVNAKDLAGISLVLFGKWDALQIRMNEFAKATFSTKQERSRWVKNLEENSTTKRKGVFSFAELDRVLAFSSEEINATEISIKDYFDTQYKKFFDAEKNEVVVTKEVTVLSVDDLLISIQSKWNSLQKVVNNSTTENQLKENTENVAILKDYLDCVNELFTRLKVLNVDKSEARDTSFYSVYDEVMETLSEIMPLYNKVRNYITKKSFDIGKYKLNFDNPTLASGWDLNKEDANTCVILEKDGNYYLGVMNAKNKPKFSAIQPDDSVPCYKKMVYKLLPGPNKMLPKVFFSTKGIATFNPPKEILEGYNAGKHKKGDTFDLNFCHKLIDYFKSAINQHPDWKNFNFKFSDTSTYKDTSDFYKEISEQGYKLSFVNVPVSIIDSWVDEGKLYLFQIYNKDFSPNSTGTPNMHTLYWRNLFSKENLDDVVLKLNGEAELFYRGVGIKNPVVHSVGSKVVNRTTKDGKTIPEAIHDEIYKYVNRKIPELSQETKKLYENGLVVVKTIQKNHELIKDKHYTQEKFLFHVPITINYKASGNSYINENVRQFLKNNPDVNIIGLDRGERHLIYMSLIDQKGNIIQQKTFNTVERKKNGATVSVDYHEKLDQKEKERDAARKNWQTIGKIAELKEGYLSAVIHELVTLMIEHNAIIVMEDLNFGFKRGRFHVEKQVYQKFEHMLIDKLNYLVFKDRGLKESGGVLNGYQLAGIFESFQKLGKQSGFLFYVPAGYTSKIDPATGFANLLDMTNLTNVQKKRDFFAKFDSICFDEEKQMFAFTFDYKNFPGKGSQEMSRTKWTVYSNGKRIQFCGKGKASKHIENITEEFKTLFREFDYQNGNNILDSILEVGAALKAGEKPAKEIADFWDKLLVLFKLVLQMRNSDAKTGDDYIISPVMSESGNFFDSREQEKLGNSAKLPKDADANGAYHIALKGLYLLKAFDKTPEDQLKKVDMKISNADWFRFAQEKEYSK

SEQ ID NO: 253 - protein, 1332 aa, unidentified
  REGION 1..1332: note = Category: MG31 effectors
  REGION 1..1332: note = Description: MG31-26 effector
  source 1..1332: note = uncultivated organism sequence
MRTIDEFCGQKNGYSLSKTLRFELKPQGKTLENINKAGLVKVDEQRAKDYQDVKKLLDNYHKYFIDDILKNASEKDLDWKPLKDAVEEYQKDKTKDEQLKKEQDKMRSSIVKCFSADKKRFDHLTAATPYDLFKTELPEWLSKNSFPNLNNKAVETFKKFSTYFTGYQETRKNIYSAEAISTAVPFRIVHDNFPKFLQNLSIYKWINEKCPEVIKNAQNEIGSILAGKKLEDFFTLNSFNIFLTQTGANEQRGIDFYNQLIGGVKQQNIQIKGINQCINEYWQQHPEFAKENRRVKMVPLYKQILSDRSTLSFVIESIENDKELFDAVTKFNESITLIKDTETEKTSVLENISTLIKNISDFDANHVFVNAKDLAGISLVLFGKWDALQIRMNEFAKATFSTKQERSRWVKNLEENSTTKRKGVFSFAELDRVLAFSSEEINATEISIKDYFDTQYKKFFDAEKNEVVVTKEVTVLSVDDLLISIQSKWNSLQKVVNNSTTENQLKENTENVAILKDYLDCVNELFTRLKVLNVDKSEARDTSFYSVYDEVMETLSEIMPLYNKVRNYITKKSFDIGKYKLNFDNPTLASGWDLNKEDANTCVILEKDGNYYLGVMNAKNKPKFSAIQPDDSVPCYKKMVYKLLPGPNKMLPKVFFSTKGIATFNPPKEILEGYNAGKHKKGDTFDLNFCHKLIDYFKSAINQHPDWKNFNFKFSDTSTYKDTSDFYKEISEQGYKLSFVNVPVSIIDSWVDEGKLYLFQIYNKDFSPNSTGTPNMHTLYWRNLFSKENLDDVVLKLNGEAELFYRGVGIKNPVVHSVGSKVVNRTTKDGKTIPEAIHDEIYKYVNRKIPELSQETKKLYENGLVVVKTIQKNHELIKDKHYTQEKFLFHVPITINYKASGNSYINENVRQFLKNNPDVNIIGLDRGERHLIYMSLIDQKGNIIQQKTFNTVERKKNGATVSVDYHEKLDQKEKERDAARKNWQTIGKIAELKEGYLSAVIHELVTLMIEHNAIIVMEDLNFGFKRGRFHVEKQVYQKFEHMLIDKLNYLVFKDRGLKESGGVLNGYQLAGIFESFQKLGNQSGFLFYVPAGYTSKIDPATGFANLLDMTNLTNVQKKRDFFAKFDSICFDEEKQMFAFTFDYKNFNRKDAQEMSRTKWTVYSNGKRIQFCGKGKASKHIENITEEFKTLFREFDYQNGNNILDSILEVGAALKAGEKPAKEIADFWDKLLVLFKLVLQMRNSDAKTGDDYIISPVMSESGNFFDSREQEKLGNSAKLPKDADANGAYHIALKGLYLLKAFDKTPEDQLKKVDMKISNADWFRFAQEKEYNK

SEQ ID NO: 254 - protein, 1332 aa, unidentified
  REGION 1..1332: note = Category: MG31 effectors
  REGION 1..1332: note = Description: MG31-27 effector
  source 1..1332: note = uncultivated organism sequence
MRTIDEFCGQKNGYSLSKTLRFELKPQGKTLENINKAGLVKVDEQRAKDYQDVKKLLDNYHKYFIDDILKNASEKDLDWKPLKDAVEEYQKDKTKDEQLKKEQDKMRSSIVKCFSADKKRFDHLTAATPYDLLKTELPEWLSKNSFPNLNNKAVETFKKFSTYFTGYQETRKNIYSAVAISTAVPFRIVHDNFPKFLQNLSIYKWINEKCPEVIKNAQNEIGSILAGKKLEDFFTLNSFNIFLTQTGANEQRGIDFYNQLIGGVKQQNIQIKGINQCINEYWQQHPEFAKENRRVKMVPLYKQILSDRSTLSFVIESIENDKELFDAVTKFNESITLIKDTETEKTSVLENISTLIKNISDFDTNHVFVNAKDLAGISLVLFGKWDALQIRMNEFAKATFSTKQERSRWVKKLEENSTTKRKGVFSFAELDRVLAFSSEEINATGIRIKDYFDTQYKKFFDAEKNEIVVTKEVTVLSVDDLLISIQAKWNSLQKLINNSKNENQLKENEENVAILKDYLDCVNDLFTRLKVLNVDKSEARDTSFYSVYDEVMETLSEIMPLYNKARNYITKKTFDIGKYKLNFDNPTLASGWDLNKEDANTCVILEKDGSYYLGVMNAKNKPKFSAIQPDDSVPCYKKMVYKLLPGPNKMLPKVFFSTKGIATFNPSKEILEGYNAGKHKKGDTFDLNFCHKLIDYFKSAINQHPDWKNFNFKFSDTSTYKDTSDFYKEISEQGYKLSFVNVPVSIIDSWVDEGKLYLFQIYNKDFSPNSTGTPNMHTLYWRNLFSKENLDDVVLKLNGEAELFYRGVGIKNPVVHAVGSKVVNRTTKDGKTIPEAIHDEIYKYVNRKIPELSQDAKKLYENGLVVVKTIQKNHELIKDKHYTQEKFLFHVPITINYKASGNSYINENVRQFLKNNPDVNIIGLDRGERHLIYMSLIDQKGNIIQQKTFNTVERKKNGATVSVDYHEKLDQKEKERDAARKNWQTIGKIAELKEGYLSAVIHELVTLMIEHNAIIVMEDLNFGFKRGRFHVEKQVYQKFEHMLIDKLNYLVFKDRGLKESGGVLNGYQLAGVFESFQKLGKQSGFLFYVPAGYTSKIDPATGFANLLDMTNLTNVQKKRDFFAKFDSICFDEEKQMFAFTFDYKNFNRKDAQEMSRTKWTVYSNGKRIQFCGKGKASKHIENLTEEFKTLFREFDYQNGNNILDSILEVGAALKAGEKPAKEIADFWDKLLVLFKLVLQIRNSDAKTGDDYIISPVMSEDGIFFDSREQEKLGNNAKLPKDADANGAYHIALKGLYLLKAFDKTPEDQLKKVDMKISNADWFRFAQEKEYNK

SEQ ID NO: 255 - protein, 1332 aa, unidentified
  REGION 1..1332: note = Category: MG31 effectors
  REGION 1..1332: note = Description: MG31-28 effector
  source 1..1332: note = uncultivated organism sequence
MRTIDEFCGQKNGYSLSKTLRFELKPQGKTLENINKAGLVKVDEQRAKDYQDVKKLLDNYHKYFIDDILKNASEKDLDWKPLKDAVEEYQKDKTKDEQLKKEQDKMRSSIVKCFSADKKRFDHLTAATPYDLFKTELPEWLSKNSFPNLNNKAVETFKKFSTYFTGYQETRKNIYSAEAISTAVPFRIVHDNFPKFLQNLSIYKWINEKCPEVIKNAQNEIGSILAGKKLEDFFTLNSFNIFLTQTGANEQRGIDFYNQLIGGVKQQNIQIKGINQCINEYWQQHPEFAKENRRVKMVPLYKQILSDRSTLSFVIESIENDKELFDAVTKFNESITLIKDTETEKTSVLENISTLIKNISDFDANHVFVNAKDLAGISLVLFGKWDALQIRMNEFAKATFSTKQERSRWVKKLEENSTTKRKGVFSFAELDRVLAFSSEEINATEISIKDYFDTQYKKFFDAEKNEVVVTKEVTVLSVDDLLISIQSKWNSLQKVVNNSTTENQLKENTENVAILKDYLDCVNELFTRLKVLNVDKSEARDTSFYSVYDEVMETLSEIMPLYNKVRNYITKKSFDIGKYKLNFDNPTLASGWDLNKEDANTCVILEKDGNYYLGVMNAKNKPKFSAIQPDDSVPCYKKMVYKLLPGPNKMLPKVFFSTKGIATFNPPKEILEGYNAGKHKKGDTFDLNFCHKLIDYFKSAINQHPDWKNFNFKFSDTSTYKDTSDFYKEISEQGYKLSFVNVPVSIIDSWVDEGKLYLFQIYNKDFSPNSTGTPNMHTLYWRNLFSKENLDDVVLKLNGEAELFYRGVGIKNPVVHSVGSKVVNRTTKDGKTIPEAIHDEIYKYVNRKIPELSQETKKLYENGLVVVKTIQKNHELIKDKHYTQEKFLFHVPITINYKASGNSYINENVRQFLKNNPDVNIIGLDRGERHLIYMSLIDQKGNIIQQKTFNTVERKKNGATVSVDYHEKLDQKEKERDAARKNWQTIGKIAELKEGYLSAVIHELVTLMIEHNAIIVMEDLNSGFKRGRFHVEKQVYQKFEHMLIDKLNYLVFKDRGLKESGGVLNGYQLAGIFESFQKLGKQSGFLFYVPAGYTSKIDPATGFANLLDMTNLTNVQKKRDFFAKFDSICFDEEKQMFAFTFDYKNFNRKDAQEMSRTKWTVYSNGKRIQFCGKGKASKHIENLTEEFKTLFREFDYQNGNNILDSILEVGAALKAGEKPAKEIADFWDKLLVLFKLVLQIRNSDAKTGDDYIISPVMSEDGIFFDSREQEKLGNNAKLPKDADANGAYHIALKGLYLLKVFDKTPEDQLKKVDMKISNADWFRFAQEKEYSK

SEQ ID NO: 256 - protein, 1332 aa, unidentified
  REGION 1..1332: note = Category: MG31 effectors
  REGION 1..1332: note = Description: MG31-29 effector
  source 1..1332: note = uncultivated organism sequence
MRTIDEFCGQKNGYSLSKTLRFELKPQGKTLENINKAGLVKVDEQRAKDYQDVKKLLDNYHKYFIDDILKNASEKDLDWKPLKDAVEEYQKDKTKDEQLKKEQDKMRSSIVKCFSADKKRFDHLTAATPYDLFKTELPEWLSKNSFPNLNNKAVETFKKFSTYFTGYQETRKNIYSAEAISTAVPFRIVHDNFPKFLQNLSIYKWINEKCPEVIKNAQNEIGSILAGKKLEDFFTLNSFNIFLTQTGANEQRGIDFYNQLIGGVKQQNIQIKGINQCINEYWQQHPEFAKENRRVKMVPLYKQILSDRSTLSFVIESIENDKELFDAVTKFNESITLIKDTETEKTSVLENISTLIKNISDFDANHVFVNAKDLAGISLVLFGKWDALQIRMNEFAKATFSTKQERSRWVKNLEENSTTKRKGVFSFAELDRVLAFSSEEINATEISIKDYFDTQYKKFFDAEKNEVVVTKEVTVLSVDDLLISIQSKWNSLQKVVNNSTTENQLKENTENVAILKDYLDCVNELFTRLKVLNVDKSEARDTSFYSVYDEVMETLSEIMPLYNKVRNYITKKSFDIGKYKLNFDNPTLASGWDLNKEDANTCVILEKDGNYYLGVMNAKNKPKFSAIQPDDSVPCYKKMVYKLLPGPNKMLPKVFFSTKGIATFNPPKEILEGYNAGKHKKGDTFDLNFCHKLIDYFKSAINQHPDWKNFNFKFSDTSTYKDTSDFYKEISEQGYKLSFVNVPVSIIDSWVDEGKLYLFQIYNKDFSPNSTGTPNMHTLYWRNLFSKENLDDVVLKLNGEAELFYRGVGIKNPVVHSVGSKVVNRTTKDGKTIPEAIHDEIYKYVNRKIPELSQETKKLYENGLVVVKTIQKNHELIKDKHYTQEKFLFHVPITINYKASGNSYINENVRQFLKNNPDVNIIGLDRGERHLIYMSLIDQKGNIIQQKTFNTVERKKNGATVSVDYHEKLDQKEKERDAARKNWQTIGKIAELKEGYLSAVIHELVTLMIEHNAIIVMEDLNFGFKRGRFHVEKQVYQKFEHMLIDKLNYLVFKDRGLKESGGVLNGYQLAGIFESFQKLGKQSGFLFYVPAGYTSKIDPATGFANLLDMTNLTNVQKKRDFFAKFDSICFDEEKQMFAFTFDYKNFNRKDAQEMSRTKWTVYSNGKRIQFCGKGKAYKHIENLTEEFKTLFREFDYQNGNNILDSILEVGAALKAGEKPTKEIADFWDKLLVLFKLVLQMRNSDAKTGDDYIISPVMSESGNFFDSREQEKLGNSAKLPKDADANGAYHIALKGLYLLKAFDKTPEDQLKKVDMKISNADWFRFAQEKEYNK

SEQ ID NO: 257 - protein, 1332 aa, unidentified
  REGION 1..1332: note = Category: MG31 effectors
  REGION 1..1332: note = Description: MG31-30 effector
  source 1..1332: note = uncultivated organism sequence
MRTIDEFCGQKNGYSLSKTLRFELKPQGKTLENINKAGLVKVDEQRAKDYQDVKKLLDNYHKYFIDDILKNASEKDLDWKPLKDAVEEYQKDKTKDEQLKKEQDKMRSSIVKCFSADKKRFDHLTAATPYDLFKTELPEWLSKNSFPNLNNKAVETFKKFSTYFTGYQETRKNIYSAVAISTAVPFRIVHDNFPKFLQNLSIYKWINEKCPEVIKNAQNEIGSILAGKKLEDFFTLNSFNIFLTQTGANEQRGIDFYNQLIGGVKQQNIQIKGINQCINEYWQQHPEFAKENRRVKMVPLYKQILSDRSTLSFVIESIENDKELFDAVTKFNESITLIKDTETEKTSVLENISTLIKNISDFDTNHVFVNAKDLAGISLVLFGKWDALQIRMNEFAKATFSTKQERSRWVKKLEENSTTKRKGVFSFAELDRVLAFSSEEINATGIRIKDYFDTQYKKFFDAEKNEIVVTKEVTVLSVDDLLISIQAKWNSLQKLINNSKNENQLKENEENVAILKDYLDCVNDLFTRLKVLNVDKSEARDTSFYSVYDEVMETLSEIMPLYNKARNYITKKTFDIGKYKLNFDNPTLASGWDLNKEDANTCVILEKDGSYYLGVMNAKNKPKFSAIQPDDSVPCYKKMVYKLLPGPNKMLPKVFFSTKGIATFNPSKEILEGYNAGKHKKGDTFDLNFCHKLIDYFKSAINQHPDWKNFNFKFSDTSTYKDTSDFYKEISEQGYKLSFVNVPVSIIDSWVDEGKLYLFQIYNKDFSPNSTGTPNMHTLYWRNLFSKENLDDVVLKLNGEAELFYRGVGIKNPVVHAVGSKVVNRTTKDGKTIPEAIHDEIYKYVNRKIPELSQDAKKLYENGLVVVKTIQKNHELIKDKHYTQEKFLFHVPITINYKASGNSYINENVRQFLKNNPDVNIIGLDRGERHLIYMSLIDQKGNIIQQKTFNTVERKKNGATVSVDYHEKLDQKEKERDAARKNWQTIGKIAELKEGYLSAVIHELVTLMIEHNAIIVMEDLNFGFKRGRFHVEKQVYQKFEHMLIDKLNYLVFKDRGLKESGGVLNGYQLAGVFESFQKLGKQSGFLFYVPAGYTSKIDPATGFANLLDMTNLTNVQKKRDFFAKFDSICFDEEKQMFAFTFDYKNFNRKDAQEMSRTKWTVYSNGKRIQFCGKGKASKHIENLTEEFKTLFREFDYQNGNNILDSILEVGAALKAGEKPAKEIADFWDKLLVLFKLVLQIRNSDAKTGDDYIISPVMSEDGIFFDSREQEKLGNNAKLPKDADANGAYHIALKGLYLLKAFDKTPEDQLKKVDMKISNADWFRFAQEKEYNK

SEQ ID NO: 258 - protein, 1332 aa, unidentified
  REGION 1..1332: note = Category: MG31 effectors
  REGION 1..1332: note = Description: MG31-31 effector
  source 1..1332: note = uncultivated organism sequence
MRTIDEFCGQKNGYSLSKTLRFELKPQGKTLENINKAGLVKVDEQRAKDYQDVKKLLDNYHKYFIDDILKNASEKDLDWKPLKDAVEEYQKDKTKDEQLKKEQDKMRSSIVKCFSADKKRFDHLTAATPYDLFKTELPEWLSKNSFPNLNNKAVETFKKFSTYFTGYQETRKNIYSAEAISTAVPFRIVHDNFPKFLQNLSIYKWINEKCPEVIKNAQNEIGSILAGKKLEDFFTLNSFNIFLTQTGANEQRGIDFYNQLIGGVKQQNIQIKGINQCINEYWQQHPEFAKENRRVKMVPLYKQILSDRSTLSFVIESIENDKELFDAVTKFNESITLIKDTETEKTSVLENISTLIKNISDFDANHVFVNAKDLAGISLVLFGKWDALQIRMNEFAKATFSTKQERSRWVKNLEENSTTKRKGVFSFAELDRVLAFSSEEINATEISIKDYFDTQYKKFFDAEKNEVVVTKEVTVLSVDDLLISIQSKWNSLQKVVNNSTTENQLKENTENVAILKDYLDCVNELFTRLKVLNVDKSEARDTSFYSVYDEVMETLSEIMPLYNKVRNYITKKSFDIGKYKLNFDNPTLASGWDLNKEDANTCVILEKDGNYYLGVMNAKNKPKFSAIQPDDSVPCYKKMVYKLLPGPNKMLPKVFFSTKGIATFNPPKEILEGYNAGKHKKGDTFDLNFCHKLIDYFKSAINQHPDWKNFNFKFSDTSTYKDTSGFYKEISEQGYKLSFVNVPVSIIDSWVDEGKLYLFQIYNKDFSPNSTGTPNMHTLYWRNLFSKENLDDVVLKLNGEAELFYRGVGIKNPVVHSVGSKVVNRTTKDGKTIPEAIHDEIYKYVNRKIPELSQETKKLYENGLVVVKTIQKNHELIKDKHYTQEKFLFHVPITINYKASGNSYINENVRQFLKNNPDVNIIGLDRGERHLIYMSLIDQKGNIIQQKTFNTVERKKNGATVSVDYHEKLDQKEKERDAARKNWQTIGKIAELKEGYLSAVIHELVTLMIEHNAIIVMEDLNFGFKRGRFHVEKQVYQKFEHMLIDKLNYLVFKDRGLKESGGVLNGYQLAGIFESFQKLGKQSGFLFYVPAGYTSKIDPATGFANLLDMTNLTNVQKKRDFFAKFDSICFDEEKQMFAFTFDYKNFPGKGSQEMSRTKWTVYSNGERIQFCGKGKASKHIENLTEEFKTLFREFDYQNGNNILDSILEVGAALKAGEKPTKEIADFWDKLLVLFKLVLQMRNSDAKTGDDYIISPVMSESGNFFDSREQEKLGNNAKLPKDADANGAYHIALKGLYLLKAFDKTPEDQLKKVDMKISNADWFRFAQEKEYNK

SEQ ID NO: 259 - protein, 1332 aa, unidentified
  REGION 1..1332: note = Category: MG31 effectors
  REGION 1..1332: note = Description: MG31-32 effector
  source 1..1332: note = uncultivated organism sequence
MRTIDEFCGQKNGYSLSKTLRFELKPQGKTLENINKAGLVKVDEQRAKDYQDVKKLLDNYHKYFIDDILKNASEKDLDWKPLKDAVEEYQKDKTKDEQLKKEQDKMRSSIVKCFSADKKRFDHLTAATPYDLFKTELPEWLSKNSFPNLNNKAVETFKKFSTYFTGYQETRKNIYSAEAISTAVPFRIVHDNFPKFLQNLSIYKWINEKCPEVIKNAQNEIGSILAGKKLEDFFTLNSFNIFLTQTGANEQRGIDFYNQLIGGVKQQNIQIKGVNQCINEYWQQHPEFAKENRRVKMVPLYKQILSDRSTLSFVIESIENDKELFDAVTKFNESITLIKDTETEKTSVLENISTLIKNISDFDANHVFVNAKDLAGISLVLFGKWDALQIRMNEFAKATFSTKQERSRWVKNLEENSTTKRKGVFSFAELDRVLAFSSEEINATEISIKDYFDTQYKKFFDAEKNEVVVTKEVTVLSVDDLLISIQSKWNSLQKVVNNSTTENQLKENTENVAILKDYLDCVNELFTRLKVLNVDKSEARDTSFYSVYDEVMETLSEIMPLYNKVRNYITKKSFDIGKYKLNFDNPTLASGWDLNKEDANTCVILEKDGNYYLGVMNAKNKPKFSAIQPDDSVPCYKKMVYKLLPGPNKMLPKVFFSTKGIATFNPPKEILEGYNAGKHKKGDTFDLNFCHKLIDYFKSAINQHPDWKNFNFKFSDTSTYKDTSDFYKEISEQGYKLSFVNVPVSIIDSWVDEGKLYLFQIYNKDFSPNSTGTPNMHTLYWRNLFSKENLDDVVLKLNGEAELFYRGVGIKNPVVHSVGSKVVNRTTKDGKTIPEAIHDEIYKYVNRKIPELSQETKKLYENGLVVVKTIQKNHELIKDKHYTQEKFLFHVPITINYKASGNSYINENVRQFLKNNPDVNIIGLDRGERHLIYMSLIDQKGNIIQQKTFNTVERKKNGATVSVDYHEKLDQKEKERDAARKNWQTIGKIAELKEGYLSAVIHELVTLMIEHNAIIVMEDLNFGFKRGRFHVEKQVYQKFEHMLIDKLNYLVFKDRGLKESGGVLNGYQLAGIFESFQKLGKQSGFLFYVPAGYTSKIDPATGFANLLDMTNLTNVQKKRDFFAKFDSICFDEEKQMFAFTFDYKNFNRKDAQEMSRTKWTVYSNGERIQFCGKGKASKHIENITEEFKTLFREFDYQNGNNILDSILEVGAALKAGEKPAKEIADFWDKLLVLFKLVLQMRNSDAKTGDDYIISPVMSESGNFFDSREQEKLGNSAKLPKDADANGAYHIALKGLYLLKAFDKTPEDQLKKVDMKISNADWFRFAQEKEYNK

SEQ ID NO: 260 - protein, 1332 aa, unidentified
  REGION 1..1332: note = Category: MG31 effectors
  REGION 1..1332: note = Description: MG31-33 effector
  source 1..1332: note = uncultivated organism sequence
MRTIDEFCGQKNGYSLSKTLRFELKPQGKTLENINKAGLVKVDEQRAKDYQDVKKLLDNYHKYFIDDILKNASEKDLDWKPLKDAVEEYQKDKTKDEQLKKEQDKMRSSIVKCFSADKKRFDHLTAATPYDLFKTELPEWLSKNSFPNLNNKAVETFKKFSTYFTGYQETRKNIYSAEAISTAVPFRIVHDNFPKFLQNLSIYKWINEKCPEVIKNAQNEIGSILAGKKLEDFFTLNSFNIFLTQTGAKEQRGIDFYNQLIGGVKQQNIQIKGINQCINEYWQQHPEFAKENRRVKMVPLYKQILSDRSTLSFVIESIENDKELFDAVTKFNESITLIKDTETEKTSVLENISTLIKNISDFDANHVFVNAKDLAGISLVLFGKWDALQIRMNEFAKATFSTKQERSRWVKNLEENSTTKRKGVFSFAELDRVLAFSSEEINATEISIKDYFDTQYKKFFDAEKNEVVVTKEVTVLSVDDLLISIQSKWNSLQKVVNNSTTENQLKENTENVAILKDYLDCVNELFTRLKVLNVDKSEARDTSFYSVYDEVMETLSEIMPLYNKVRNYITKKSFDIGKYKLNFDNPTLASGWDLNKEDANTCVILEKDGNYYLGVMNAKNKPKFSAIQPDDSVPCYKKMVYKLLPGPNKMLPKVFFSTKGIATFNPPKEILEGYNAGKHKKGDTFDLNFCHKLIDYFKSAINQHPDWKNFNFKFSDTSTYKDTSDFYKEISEQGYKLSFVNVPVSIIDSWVDEGKLYLFQIYNKDFSPNSTGTPNMHTLYWRNLFSKENLDDVVLKLNGEAELFYRGVGIKNPVVHSVGSKVVNRTTKDGKTIPEAIHDEIYKYVNRKIPELSQETKKLYENGLVVVKTIQKNHELIKDKHYTQEKFLFHVPITINYKASGNSYINENVRQFLKNNPDVNIIGLDRGERHLIYMSLIDQKGNIIQQKTFNTVERKKNGATVSVDYHEKLDQKEKERDAARKNWQTIGKIAELKEGYLSAVIHELVTLMIEHNAIIVMEDLNFGFKRGRFHVEKQVYQKFEHMLIDKLNYLVFKDRGLKESGGVLNGYQLAGIFESFQKLGKQSGFLFYVPAGYTSKIDPATGFANLLDMTNLTNVQKKRDFFAKFDSICFDEEKQMFAFTFDYKNFNRKDAQEMSRTKWTVYSNGKRIQFCGKGKASKHIENLTEEFKTLFREFDYQNGNNILDSILEVGAALKAGEKPAKEIADFWDKLLVLFKLVLQIRNSDAKTGDDYIISPVMSEDGIFFDSREQEKLGNNAKLPKDADANGAYHIALKGLYLLKAFDKTPEDQLKKVDMKISNADWFRFAQEKEYNK

SEQ ID NO: 261 - protein, 1294 aa, unidentified
  REGION 1..1294: note = Category: MG32 effectors
  REGION 1..1294: note = Description: MG32-1 effector
  source 1..1294: note = uncultivated organism sequence
MTIFDSFTGLYKLSKTLRFELKPVGKTVEFLKEHNGLLGDFKRAEDYPKVKAILDEAHKDLIERALTGVELDWQPLADALEESRIGEKNTNLKDVQKKFREKIATLLSEDKGYEKLTDPTPRNFIQEKLKLTSNNLITPLKTFEKFACYFKGFQENRKNVYSSEEIVTAVPYRVVNDNFPKYYSNVKVFESLQAKYPGIIKAVEDNLKDYLNGCKLSSIFTLNNYSSCLTQSGISFINTIIGGYSVKDAPKIRGVNEEVNQYLQKHPELLREERPPRMTLLFKQILSDRETQSFVMTQFQNDTEAIAAIDAFAELLKEEKVLSFVVELLSTISSTTQNIYVAGSELAKISMRLSGYWGLIRDAQESCIETILAMTKVTKAKEKELREALEANVFALTDLLALDLTLVDEEDNEKKYSLLDYWSRENCDSVIQKVKDTETAYNTLKARVTTSNWLHESHDNVEIVKAYLDALQELLHYLKPLRVSNEINKNQGFYAEFDALYDTLELIIPLYNRVRNYLTRKVGDAQKVRLYFDLTTRTEGWMESKIKERKTVLFERDGAYYLGFIPSKNRLPAFNKFIPQGGDATYRRMVYKQIGNVSNYLSIKQMKPTLLRQISLASSDEKREYYTNILKWLGGEYDADKKVWKNGKFDKHTLSALELAQLISYVINEFIPNYDNLRGYKFKFNAPESYPNWKSFTDHVQMMGCYSINFEEVSKCKIDDLVERGDLYLFQLWNKDFSENSTGLPNLHTLYWRSLFAPENLQQAILQLNGGAELFYRFAPLQKPQTIHKKGTKLVNRHTCDGKLIPEVYYQEIYKWANGKLPEGLSATAKDWMAHATIKDAKHQITKDRRYTEDKYFFHVPITFNFTIANKSKSLNSLIQDATRNNPDVNIIGLDRGERNLLYLTLINQKGEILQQKSFNVVEHVNSEGKTIETNYHDKLKDRERDRDRARKSWDTIGKIKDLKEGYLSAVIHEIVTLMLEHNAIIVLEDLNSDFKRGRFCVERQVYQKFEKMLIDKLNYLSLKTRAITVPGGILKGYQLTEKFESFQKLGKQSGILFYVPAAYTSKIDPTTGFTNLFKLKKCTNAANRKVFFELFDEIRYDEKRKAFAFTFDYDKFKTSQTSYQKKWTVYSAETRLTYQREKDGNGREIIIRPTTLITDAVKLLGIEVKDGLNLLEVIQKTPAEPRTAKFYGDLFYAFERTLQMRNSSSETGDDYIESPVENTDGIRFDTREEAKKGKDAKLPIDADANGAYHIALKGLWYLKNDFNRDKDGKIQKITHAQWLKFMQAKEWLK

SEQ ID NO: 262 - protein, 1460 aa, unidentified
  REGION 1..1460: note = Category: MG37 effectors
  REGION 1..1460: note = Description: MG37-1 effector
  source 1..1460: note = uncultivated organism sequence
MASTNQSAVPTTQRAYMLRLHPARPFGNHEWKREAADMQAALWATHEAVNRGAKTFGEWLLTLRGGLSYRLADEPITEATGRSERTPTDRARRNRRILLALSWFSVEDESGAPVNSDVIVAYGDGCKLRQEAQQERNRKLIEALGSVLHAQGVPPSEIGELQAPGTWLGDCAQSLSSAIRPDAVWVNRSEVFSQLCTELPGLDADYAAVTTFSFFGGSEKYFYVDDGAAEENEAGEAGEEAADFRQKARQWISTNFGTGKKSDNARISAALKSLAGGNLDEFSGRSKADLVKYCVGLLGIDPSNATEDALRVAVGWNTGRPSKGRLAIQNLPDLLTKDGIGVFRRKIMEEADEKSKNASAKNVPAWIANMRAKIEAGIGIPYVTDRNLIGEYSVMLDHAARRVSIAQTWTKRAEAERRRFSDDSERMHDVPHAARSWLDRFSETRSSDTGAVGEYRIRPRALQGWELVVQRWSKSNCRTEEDRIAAVREIQADWEDNKKIGDIPLFEALATDDARCVWSPDGSSDPDILKRYVAASHARAKQAAFKVPAYRHPHPLSHPVFCDFGNSRWKIRFAVHEREYARRNGKGTVNKPGDAQGLQMGLWNGNGVQPHEMRWASKRLSVDLALDDLAVSDAVPVTLGSRFGRAALPSVLPVSVLNVFDEGDWNGRLQVPRSQLERIASLLAKNKVAAAKEFRQKLRWSLTFSPRLQPTGPFHDFAAQHGITPNRKGEYFPNGEQNRITKREGKAKLVLSRLPGLRLLSVDLGHRFAAACAVWESLSGPDFAKEIFGLTIESGSAEGLYLHTRHMDESGKERSTIYRRIGSDALPDGSDHPAPWARLSRQFLIKLQGEERSARKAAPTEIYSVRELEAGFGRVSEKDDLPTQVDELMSHTIRVSRLALRRHGDRARIAFAMISSYKPMPGDRKYNFFPNDTSDGFDDTPEQRHRKHIEFIQDALLLWHDLISSKGWQDQAAEQLWKQHIATLLGYQHPEPINRDGSGPERKKKRNENFDRLRGAAEALINNAPLRLTLNAEWKGRWESDDQDWRSHLRRLQDWARPPASKGSQAIRHVGGLSLTRLATLTELRRKVQVGFFTRLLPNGDKARIGERFGQKTLGVIEEMREQRVKQLASRITEAALGIGRVQPGTKHDPRRPRVRVDLPCHAIVIESLRNYRPDDLQTRRENRALMEWSSGKVRKYLEEACYLYGLHLREVPPNYTSRQCSRTGLPGIRCADVPIEQFRAAPFWRKIVDSARKRISQNKGTEEDRFFCDLDETYGNDVNPQAGRVATLRLPRKGGDLFVSAPVWAQLNRKDQYGNDRVSARPNDWSSKRALQADLNAAANIGLRALLDPDFPGTWWYVPCTARDGRATQDKVKGSSCFVAENWRILSVSERSATKREVVNAWHDPSTCSLSNRLDWRETTHYWNTVRARAVEALRQFNGLPRSNSAPVHNSLESALRER

SEQ ID NO: 263 - protein, 804 aa, unidentified
  REGION 1..804: note = Category: MG37 effectors
  REGION 1..804: note = Description: MG37-2 effector
  source 1..804: note = uncultivated organism sequence
LAELDLFNGRTIKAVRLRWQSKRLTNDLALHQTAVIDDATPVSRANRLGRAAAGAGSRSAVRILGVFDHKHWNGRLQAPRAQLHKLAKIRDNATVPEPARRQKYERGLSTIRWILTFSPRLQQKGPWLEYAAAQNLSAKSPHFAENRGRGWLAQHLLGRLDGLRILSVDLGQRYAAACAVWEAMSGDQVRATCASAGAPEPDKSALSIRVSVGGRRTILRRVGEDAWARLDRCFVIRLAGEDVPARKASPAEIQAVQTLCRELGYSDASRAAAAVDKLMSYALRVLRLGLQRHARRAMVVFGLAAKEKVVLGNQLRALSEDERTDSIGTALADWWTFAVSSRWPDPHAAALWDEHIADRAAGIELPPDLESFSFRERLLVREKLLKDVRPIAQALRPEEVEQLTEIWRLQWLGEEARWCKRLRWIKDWLLPRGSGAQCNSIRRVGGLSLRRLNNLRALYRLEKSFAGRLRVGVGGHRCESQVPSEEFGRKTLTALERLRENRVKQTASRIVAAALGLGKDLKRGHGERFAPCHAVVIENLTNYRPDEVRSRRENRQLMDWCAAKVKKYLNESCDLHGILLREVQAAYTSRQDSLSGAPGVRCADVPIRDFMACGGYWERELRRADKANSSGRSDARSRYLIALRDRISAAIPYPAAAATKGAVRIPVDGGPVFVSADPQSPAAHGTQADMNAAANIGLRALLDPDWAGRWWYVPCNASTGVPVADGLKGSALIQPNLTLFSSHNGAEKKPKRQVVNLWRDVSARPLNVGIWRTYAQYRASVMERVTAILLTGLQTLGDDVDLPF

SEQ ID NO: 264 - protein, 1484 aa, unidentified
  REGION 1..1484: note = Category: MG37 effectors
  REGION 1..1484: note = Description: MG37-3 effector
  source 1..1484: note = uncultivated organism sequence
MPDEALVNGSTAGTDLMVVTQRAYTLRLQGVDPQDHSWRDALWKTHEAVNKGAWAFGDWLLTLRGGLDHSLADAKVKGGKGNPDRDPTDEERKARRILLALSWLSVESKKGAPEKYRLDKQSSARSNLNPEEALREILKGRGLGKSEIESWVQDCSASLSAPIRDDAVWVNRSKAFDDAVKSVGCSLTRDEAWDMLERFFGSRDAYLAPAKGSEDESSETEQEDKAKDLVQKAGQWLSSRFGTGKGADFSRMAKIYEEIANRAGKAQPGMTGDKAIADLATALSKFSPTSNDLQGVLGLISGPGYKSATRKLLKRFRDKTPVTQEDFQNLQDKAREDAQKCKNKTGSKGHRPYADAVLRDVESVCGFTYLQDGGSARHSEFAVMLDHAARRVSLAHTWIKRAEAERSRFQEDAKKVDQVPEAAKKWLNNFCLERSRAAGALEPYRIRRRAVDGWKEVVAAWSKPDCKTTEDRIAAARALQDDPEIDKFGDIQLFEALAEDDAVCIWHKDDDPANPPDPQPLLDYVAATDAEFKKRHFKVPMYRHPDELLHPVFCDFGNSRWNICFDVHKNTKTPFPRTLCLTLWTGSEGMKPVPLRWQSKRLARDLAFGQDTRKDGASDVTRADRLGRAASNVGKNDAVNIAGLFEEKHWNGRLQAPRRQLEAIARYVEKHGWNEKAKNIRDAIQWSVTFSAKLQPNGPWCAYAKEHGLRKDPQYWPHTEVNKDRKGHARLILSRLPGLRVLSVDLGHRYAAACAVWEAISTRQFQQNIEDKKILRGGTDAESLYCHTEHTTDGKKHTTIYRRIGADTLPDGKPHPAPWARLDRQFLIKLQGEAEGAREASNEEIWAVHKMETVLGRSVPLIDRLVAAGWGSTEKQKARLDAIKKLGWVPIKRADASEDADTEEEEELAFRPSLSVDDLMSSAVRTMRLALKRHGDRARIAFAMTAAYKPMPGDRRYYFTESKDLSATEDATARNSKHIEFIQDALLLWYGLISSRGWRDEAARQLWDDHVAKLHGYKAPEEIGEDVSGAEREKKQKENREKLYDVGKALAQNESLRKTLHHAWKTRWEEDDGRWKKQLRWFKDWILPRGKYASDPSIRKVGGLSLTRLATLTEFRRKVQVGFFTRLKPYGTRAETKEQFGQSTLDALEHLREQRVKQLASRIVEAALGIGSENKQHWEGGKRPRARSKDPRFAPCYAVVIEDLTHYRPEETRTRRENRQLMSWSSSKVKKYLAEACQLHGLHLREVSAGYTSRQDSRTGAPGIRCHDVPVKEFMRSPFWRKQVAQAEKKQDEGKGDARERFLCVLNAKWKGQPEADWEKAGAVRVPLKGGEIFVSADQNSPAAKGLHADLNAAANIGLRVLTDPDWPGKWWYVPCDPVSFLPVKDKVEGSAVVKPDQPLPKSAQAQSGDGAKDKKKPGKRGASKSKESKKVVNLWCDISSSPLECREEWKEYAAYQNEVQSRVIHILEKQIKRLRQATARGVQ

SEQ ID NO: 265 - protein, 1500 aa, unidentified
  REGION 1..1500: note = Category: MG37 effectors
  REGION 1..1500: note = Description: MG37-4 effector
  source 1..1500: note = uncultivated organism sequence
MATAINYPTTQRAYTLRLRGIDPQDQSWRDALWATHEAVNRGAKVFGEWLLTLRGGLDHQLADAPVKVRGGTTRLPSDEERRDRRVLLALSWLSVEDAHGAPPDASLIVAKGTDSADCRARKLADALIAILQARSVAASEIGDPSKPPEDQPGTWLGDCMGSLSAAIRDDAVWVNRSKAFDAATQSCPSLTRDEIWDFLEPFFASPDAYLKPERAESDEGDSTSAATEDKAKDLVQKAGGWLSKRMGAGGGANFQDLARAYQAIAQWASSAQPGQSAQQAVGSLAGYLSQHGFSPTANDATGVLAVISGPGYKSATRNHITAIATSPEITPQDLSKLQELATKDKAGCSSKIGGKGPRPYATMILQQVEAACGFTYLQSDGPARHREFSVMLDHAARRVNVAHSWIKNAEAERRQFESDARRIKKVPQDALNWLRGYCEERGGASGSLEGYRIRRRAIDGWDQVVIRWSRSDCQSADDRIAAARQLQDDPEIDKFGDIQLFEALAAEEALCVWKPDGNPTAQPLKDFVAATEADAKKKRFKVPAYRHPDPLRHPVFTDFGNSRWGIEYSAHRAPAKCDELGQQVDRLTQAVAEAQRNLDGATAAQRASRESKLAEAQSKLVAAQTEFAAINDPHRVELKLWNGQAVAAIPMRWSSKRLIADLSLRRATQPSSDQRIGVTRADRLGRAAGNADDGRPVTITGLFQQDHWNGRLQAPRAQLDAIAKHVDKHGWDAKARRQIARIRWVVSFSAELSQQGPWFEFCHRFGEDAPARPFVSRHGEYAVKHRDNDQRKGHAKLILSRLPGLRVLAVDLGHRYAAACAVWEAISSDQMRQACAAANAPAPHPLAMYIHLKSTTAKGKPTTTIYRRIGPDKLPDDTPHPAPWARLDRQFLIKLPGEDRPARAASPDEIKAVEDFEDSVGRVRTAVDPPRKRGVDLLMHDAVRTARLALARHGRRARIAFQLISQVRILPGGRPQTLDDAGRRDLLNDTLADWYALATDSRWTDAAARQLWNERLAALNGGFTIDPPADASQPEAERTRAQRRQAEQELRHRLASLVEALFCNPTLCQQLHQAWTDRWNADDQQWRSRLKWLSRWLLPRGGSRRDGSRRHVGGLSLTRISTLIDFRRKVQVGYFTRLRPDGSRAEIGPQFGQSTLDAIQRLKDQRIKQLTSRIVEAALGIGVEQDRIWDAAKRKWRTVKRPREPRYHVDDQGVQQRDPRFQACHAVVIEDLSHYRPEETRTRRENRATMDWKSAETRKRLADHCQLYGLHLRDVNPQYTSRQDSRTGAPGCRCVDVSVADFLTKPAWRKQVAQARGKVASNRGDARDRLLVELDHQLTTANSLRGEMDSLRIPVNGGEVFVSADPRSPLAAGIQADLNAAANIGLRALMDPDFLGTWWYVPCDPSTKKPHIEKVKGSILATVGALQATSEEAAAPPRRGRGGTRSAAPREVINLWRDPSAVRIQDATAGEVWDVTPVYWSIVKDRVVDVLRQRNTKSGD

SEQ ID NO: 266 - protein, 1427 aa, unidentified
  REGION 1..1427: note = Category: MG37 effectors
  REGION 1..1427: note = Description: MG37-5 effector
  source 1..1427: note = uncultivated organism sequence
MTQHAYTLKLRSLYEQRSTNDEKTIVLKAKDAKHLWQTHLLINRGAQVFGDWLLTMRGGLSPSLADELIMEGKGTNKRNREPTEQEKADRHILLALSWLSVESYEGAPDKYVIASAVDDKDKRSKALITALEKVLKRQKITTNDINIWRRDCEDVFSSAIRDDAVWVNRADAFNDLSAEINWDYNDASSLLFHFIKQKDYFNLESKDNDKNNTIKDKESFGQVARGWLSANWGKGKKSDFSEIINKLQKIVNYDFNSLYKKSGYKIISVITQHLTTKKDSDNKETFKKLCKYIGWQGRSSKGRLALEKLYNKKSVTKKDIVYLNEKLQQEIKEKKSKNRVIPKWVAKIQKYLEEKINIKYQPLDMSRNLIGEFGVMFDHALRHVSVAHSWIKNAEINRRRFHEDAQKIDNVTKDAKEWLNEYTHEKQEFTGALGKYIINPRAIDGWKDILKGWKGCSNYEERVEVINTIQTNKNDADKHFGDANLFKRLAKDDTRAVWINNDNKFDETILKNYVDAKKASYDMQRFKVPAYRHPHPLLHPVYCDYGNSRLNVKYDAFDIINYVLNNKKIKGAEKVINKLSISLWDGTSFQNIPFFWGGKRFKTDLALDNINNLYSSNKHLSLKNSIETTKADRFGRSLVTADSIRLEIYNKGEWNARLQVDRRLLENINKKLKASNINCYSDIFSIKTSNAMKIQQLVYKLPWFLTTSPELQSAHTLKLGPWADYINSCKDKSPFLRNNKISYIGWPHYNKNKKRNKKGSMILSHLPNLRVLSVDLGHRYGATCVVWETISNKDIINLCKKHNVNQPKVDTIYHVIKTDKKIKIHFRRIAGNTLPDGLPHPASWARLERQFMIKLQGEDRSSRKIFNNEKQIAKQVAEFCGNLHDEKAFFNNNKNIEQLMSATVSILLDGIRRHNDIAKIAYYLSPERGRNPGDESLKKGLENALQLWHQLWNSKHYKHEFAKETWDKYIISFFSNKERQELTSIGDNKNKTCRKKQKAIFKNIAQKLSADDRMMMYKAWDNYWHERDGHGDKGKTKLCRQCIRLVRDWIMPRRDSDYVFSKQFRNVGGLSLTRINTFKKLYRVIKAYAGRPEPENIKINIAEKGDTSSKGMGDRILKAMENMRDTRIKQLASRIVEAALGLGKEQGKKDKNTKDISRPRENIFKPCHALIIENLKNYRPDELQTRRENRQLMTWSSHRIFDFLKDECDLFGIHLRTVSPSYTSRQDSRTGAPGIRCTDIPLTNFLKENSYWQQQVKKADEKKLKDDYSSFIVNAYSILIKKYGHTPPKDKWIRLPRRGGEIFVTADNNSPIAKGIHADINAAANIGLRALLDPDWAGSWWYVPCNKDGTPKSTEIKGSTIFKEINKLPLQGDIGGKGDIVNLWSDVSSSNLENKVWKYSTNYKSNVRKRVIERLMQQSILKKDQND

SEQ ID NO: 267 - protein, 1338 aa, unidentified
  REGION 1..1338: note = Category: MG37 effectors
  REGION 1..1338: note = Description: MG37-6 effector
  source 1..1338: note = uncultivated organism sequence
MAKETTTQRSYTVSLCKPELGAKAWKALAATHIGMAKGAKACGDMLLNMAAGIAPCAIEELGFSGAEAVRNARRMLTLTWFDVESEDGSPQEFVVPVEELPQKLRDHLISAGLDREEADSWLEDCQDVFATPIREDSCWIDRRSSFEAMEARLGVDISQSDIEDFCFGQFAILGSLKDYLIIPDYESLQPDGISDAPSKIQAARNMLSSRLGAGIGSDTAAMADAYDLINRALEGLSSGEHCPKNEFRRVIELELDDSMPDISFEEFVNSKIKGIGRPTATAQRMEAALACREFIPWSQIEALMEKSADDARKQRAKVGLKGRRPYFDAIMGDLEKKTGIPYPAEGNQTPARNWYSCLFDHAARGVSAHHTWVKRAESTRNATYANNEAFETLPDEARAFLSKYEKERSLSLGAVEPYVIRRKAITGWTKDHVKQLHNAKSAEERVEILKEAQSQGDMGDMTLLIDLVRDDALCAWHDVEGKPAEKILEVWAKHQELERERLHFKTPSYRHPDHLLHPVFADFGKSRPEATYTFGESLEQRTVTLMLVDGGGFSRFTFHWNSKRLMDDFDFSALEKEGKAAACAMTTRFGNSLEEERKPRLLLTKAAKKPIVSDVGTRLQLTRASLERCAKRQNDAMKNPDELDWFLSLALNIKPAPFTPKALIAQAKERKDENKARTSALSKLRYSRIHGLTFIGVDLGHRKAASCSVWKTCSAEEIEQLCIEAGHELPDKNTLHLTLDCIDRRINARRIGADTLPSSEQHPAPWAVLQREFAIELPGAKEEEQRAATKNELSFLANPYAISVETRSAKAKKSAYRTTSEAQYAAVEAIRRDVKQHASMASFIHLIRSKKITKPGGAEMLLSDDELVKTVEKRLEKELGNKYAKPAPWVENLPRSNDPSTCAHILCTEKEYVDALEKQWEEDDENIRIALRILRNWIFKGIEPYSDSRTACKGVGGLSLNRIATMQMAYQLVRSFSMRPFPTDTRRGIAMAERGELAELGRRMSAHINTMREQLAKHVASRIVEAALGLGGSQNTSEKRNVRTPGDRFQPCDLVVIESLTNYRPEQTRSRAENRRIMQWASARVGEMLRDECEIYGIALYETPAAYTSRQDSRTGLPGFRFKEVPVAAFVNGGSYHGVNIDRALSSDCENERRFYGELLKRWNKGKGEWDEPLRPEKTVWTLKRGAWVSKNGMLLKKGMAPQPIPIVANGSELFMASTDEGVLKIQADINAAGNIALRGVTDPDWAGSWWRVNIQAKSGMVEKRHRGSLAFDGTAIDPEGKAPHEGVIGAWSTVGATPLSDEKRKWSTYQKYWDDQRSKIFARLCRRYGIPPAIEEE

SEQ ID NO: 268 - protein, 1397 aa, unidentified
  REGION 1..1397: note = Category: MG37 effectors
  REGION 1..1397: note = Description: MG37-7 effector
  source 1..1397: note = uncultivated organism sequence
MAVKTTQRAYTLRLTGTDRNDQTWRENLWRTHEVVNKGAKAFGDWLLTLRGGLSHKLAEPEPDAKLPKGYTRDDLRRDRRILLALSWLSVESKVGAPERLIVAEADDPQRKEKVVKALERILNQRRCSPADAASWVANCRDSLSAAIREDAVWVNRKEAFDDLAGNWNGLTDDDALMTLSGFFGEASEYLCLPEGDSDSAGADGEHFSNLARAWLSSNWGTGTKSDKTQIAHALDVLAKANLSRLVGRAGTELAAALVGLLGKKLEDDQDPWEVLRLLIGWSTGRSSKGRMAIEKASSVSALAPEDLTRLQTKLGEEAASKLGKAGVSSPTWSADLRREIESVTQMQFVTGRNLIGEYATMLDHAARRVSQTHSWVKLAEARRQTFTAETARLGAVPRDIRDWLDAFCERRSMESGALAGYRIRRRAVDGWDEVVRAWSKSGNRTEADRVKAARGVEADPEMDKFGDIQLFEALADDEAKCVWLRDGKPDSGPLKDYVRAKDAEDRMRRYKVPAYRHPDPLLHPVFCDFGCSRWTISFGVHDSVRELDGLREALAKLAGSTEEMAEARRLKAKKAIAEARETLMKPEVLHGLSMGLWDGSAITPIGLKWQSKRLPGDLALADAGSTELTWLSRADRLGRAAGAVSSKDSAGIIGLFDQKEWNGRLQAPRVQLEAVARCKDTAKRARLRYRLEWLVTLSAELQPQGPWCDYAKAHDIKDDPKYWPHSDENKKRQGHAKLILSRLPSLRVLSVDLGHRYAATCAVWEALSEKEVRKVCSAAGQAAPKPDDTWLRLKTGQRTAVYRRTSADTWAHLDRQFTIKLQGENAPARMASPMEMKLVQELEKALGRTRSNENPFPQQVDELMSEAVFILRRGLRCHGDRARIAFNLTTDKRLLSGGRQEKLDKPGRVTLLQETLASWRNLADDNAWQDGCAKQWWDDFVAPLAADATLPATPAEDALLPTIKAYRRKLTDSLKSVAEVLSGNPQLRQKLHVLWATRWRADDAGLRVHLHEVHRWILPRGKGRADATIRHAGGLSLRRLATIRGIWQLQKAYSMRPDPDDLRKNVPKAGVTNEEFGRRTLDSFERLRENRVKQLASRIVEATLGIGREQSKVNCKDPKRPRERVYATCHAVVVEDLDNYRPDEVRTRRENRQLMQWSAAKVRDYLAESCQLHGLHLRKVYAGYTSRQDSRTGRPGVRCSDVPVPDFLRRIKPRIVDLRKKGDSESRFLAAAYDFWSGKPHTKGETVRIPQRGGDIFVSADPNSPAAKGLQADLNAAANIGLKALLDPDWPGKWWYVPCDAKTHIPVPEKVKGGAADIPDALAPVSSGDDDGKKRKRKTASGDITNFWRDPAATAVAQDGWVETPEYWSRVKDQVIRILMRQLSGKELAGIPYEPRL

SEQ ID NO: 269 - protein, 1148 aa, unidentified
  REGION 1..1148: note = Category: MG37 effectors
  REGION 1..1148: note = Description: MG37-8 effector
  source 1..1148: note = uncultivated organism sequence
DERGAPNGKGLRVATGRDTGDQRREAVEAALREILEKRGVNEEEIRAWLRDCGPSVEARIRDDAVWVNRSAVFDEVANGWDTANARGDAHTLLSFILGDEFLTPPTPNKLKKAADQVDEGDEDEQQERQQAIKASSRGAGQKTRHPFSHLLGQGGPFGKPTRNLLLRDRWRDHIKAELEQSTGIPVVDSQKDKGKMKKASGPSHTELQREMFSKAASRLAQIVTKQRQQEADRLARKEADDELCKMESDSSFADALAALRAYCDEYRVTSGAIGEFLIRPRQITGWESVLRRWASIGEQDPERALEARIDAVKEAQDADEEKKFGDVNLFFRLAEDKFKAAWQRAGKPDPTILQRFVKGMKARSDTERLKVAAFRHPDPCRYPVFAQFGVSRPDIRFRRLKAFADAPAGDDPRAVGMLLWHPKLKSARLTLMFGASKRLDREIGSACDNALRGTDRLPEVSRRGRLGAAAAGLQTADTLARVVRVFDLRSVKSRPAGDEQGDGDGDENGAEKLKAPKWNGTLSTNRRDLAEIGKLVNEDAKKAARSRLRWTLTVSMEMEGRGPWFRYVVASQDQTPFVRTVRKDKPNDKNDLGKGYSERKGDKRVEAEGRPYQEFNKPLKENKNQTALVEDSSTARGGKACLILSRLPSLRLLSVDLGHRFAAACAAWETLAKDAFEKECRDAEANGAKIVLGPEGCKPDEADYVHVVWPEKNSNAATNKARAEGRGKFQPVTVYRRIGSDQIPDGTAHPAPWARLDRQFFIKLQGENEGAREASNEEIWAVHQLEAELGRTAPLIERMVRGGFGQHEKQKRRLEALRGMGWEPATSDVLPGTADEDEGEARKVSRSVDELMFAAVRTMRLALRRHGDRARIAFAMTADHKPMPGGRKYYFDKAEDASTNDDEATRRGKHIEFFQDALSLWHDLFSSRGWKDGAAKALWDQHIATLSGYLAPEEIAEDLTGSERKKKRKENRDKLRVTAEALAKDSNRRRGLQEKWKQRWEADDGAPAEVDQTTGRKLKEGSGWHARLRWFQNWVMPSSRQGLKSIRHVGGLSLTRLALLTEFRRKVQVGFFTRLHPDGTKTETKEEFGQSTLDTLEHLRQQRVKQLASRIVEAALGIGRIKIPKRGKAPQRPRQAVDAPCHAVVIES

SEQ ID NO: 270 - protein, 777 aa, unidentified
  REGION 1..777: note = Category: MG37 effectors
  REGION 1..777: note = Description: MG37-9 effector
  source 1..777: note = uncultivated organism sequence
DIKWLLTFSPKLRPLGPWLEYGGKEKIKERQEVEEKGGRGNDARLLLCRLPRLRVLSVDLGHRYAAACAVWETLGEEDFKREIKGRKVLCGGSSGECMYCHTLHRDREGKVLKTIYRRIGADTLPDGRPHPAPWARLDRQFLIKLQGEREGAREASVEEIWKVHELEARLGRTKPLIDRLVAAGWGQTPGQKKRLRILEGLGWKQTQGVVDVTKDNEMSYKPSLSVDELMFSTVRTLCLALGRHGDRARIAHALTADYKKMPGGQRYYFNRAEDASVGDDESVRHEKHVEYILDALLRWHDLFEAKGWQDEEARELWDKYIANLSCCLEVSEMDDSLTDAELKKRRKDFKERLRPVAEAIVKDGKLRKKIQQEWKRRWERDDEKWREDIRWFKHWIFPRKKQAGPSIYRMGGLSLTRLATMTEFRRKVQVGFFTRLHPDGTTGEIGEDFGRKVLEDLEVMREQRVKQLVSRLVEAALGIGSEDLSHWEGQKRPQQRIEDPRFSPCHAIIIEDLTHYRPDETRTRRENRQLMTWSSSKVKKYLAEACELHGLYLLEVPARYTSRQDSRTGAPGIRCSDVSVAEFKNSPYWRKEVARAKAKNEKNQGDARDRYLCELDAQLAGSGRLKNVRVPIAGGEIFVSADTGSPATKGIQADLNAAANIGLRALVDPDWPGKWWYVPCDSSSFKPINDRVKGCKVIDTQESLKEASPGLAVKGEKNSEKKRQRRAKHREVVNLWRDISAKPVSAAYGPWDEYSVYWNRVQDQVVKILRNNLALSK

SEQ ID NO: 271 - protein, 755 aa, unidentified
  REGION 1..755: note = Category: MG37 effectors
  REGION 1..755: note = Description: MG37-10 effector
  source 1..755: note = uncultivated organism sequence
DRLGRAAAGVPASATVRIAGIFEQKDWNGRLQAPRARLNAIAARVARHGWDDKAKRMRARLRWLITFSARLQPSGPWVDYTATFPDDASAKPFVSRKGDYAVRHQGNDAREGHAKLVLSRLPGLRVLSVDLGHRYAAACAVWETLAKVVFEKERHDAEAKGAHVVLGPEGCKPEEAIYAHFVWPEKESNAATKKARQEGREKFHPVTVYRRIGPDELVDTSTGEVKEHPAPWARLDRQFLIKLQGEDHEARKASPAEVEAVQELERAVGREPPDQRSLRVDDLMSETVRTVRLTLQRHGRRARIAFNLTASKRLLPGGREEVLTDEGRVGLLADTLADWYALFAGKGWNDEWARQQWETYVTPLLQGAALPQIPEDAEATPKARKKYRADLTENLKPAAESLAQNEPLRMKLHCLWATRWSKDDIALRKCLRWLRDWILPRGKKVKEKAGRAIRHVGGLSLTRIATIKSLYQVQKAFHMRPEPEDLRKNAPSQGDDALLDFGRSILDVMEHLREQRVKQLASRIVEAALGIGIERQVGKKTPKRPRQRLYWKDEKGNEHGDRRFAPCHAVVIENLTHYRPDETRTRRENRQLMSWSSSKVKKYLAEACQLNGLHLREVQAGYTSRQDSRTGAPGVRCQDVPVKEFMRSPFWRKQVAQAEKKQAGDKGDARERLLCDLNAEWKGKPEADWEKAGTVRVPLKGGEIFVSARPCSCCKHGKRGGAPGLQADLNAAANIGLKALTDPDWPGKWWYVPCD

SEQ ID NO: 272 - protein, 788 aa, unidentified
  REGION 1..788: note = Category: MG37 effectors
  REGION 1..788: note = Description: MG37-11 effector
  source 1..788: note = uncultivated organism sequence
DWNGRLQAPRAQLNAIAARVTRHGWDDKAKQMRDRLRWLIAFSARLQPSGPWVEYARAFPDDAPAKPFVSRKGDYAVRHQDNDARKGHAKLILSRLPGLRLLSVDLGHRYAAACAVWETLSTEQVRKACQEAGNEPPKDSDLYLHLKNGQRTVVYRRIGPDTIEAVDESTGEIKPVPHPAPWARLDRQFLIKLQGEDHEARKASPAEAEAVQELERAVGREPPDQRSLRVDDLMSKTVHTVRLALRRQHGRRASIAFNLTAAKRLLPGGREEDLDEEGRVELLADRLSDWYTLFKGKGWNDEWAKEQWETHIAPLLQGAALPQISEDAEATPKARKKYRADLTEQLKPAAESLARNPSLCKKLHCLWATRWRDDDGALRKRLRWLRDWILPRGKNARRDPAIRHVGGLSLTRIATIKALYQVQKAFRTRPEPDDLRKNIPAKGDDALRDFGRSVLDVMEHMREQRVKQLASRIAEAALGVGRVKRFAGGKDPKRPREQVDRPCHAIVIENLAHYRPEETRTRRENRQLMTWSSSKVRKYLAEACQLYGLHLSEVNAGYTSRQDSRTGAPGIRCQDVPVQKFMQSPSWRREVAHAEKKHAEGKSEARERFLCDLNAKWKGREAEWEKAGTVRIPLNGGEIFVSAGPCKCCERNDRNGPAGLQADLNAAANIGLKALTDPDWPGKWWYVPCDPKTFKPVKDKVAGSAAIRLDKPLKDLPAAQGTDGARKKPSKTKAQQREIVNLWRDVSSQPISANDDWREYKPYWDHVQERVVKILRQWAGLTPNYKNQ

SEQ ID NO: 273 - protein, 1249 aa, unidentified
  REGION 1..1249: note = Category: MG37 effectors
  REGION 1..1249: note = Description: MG37-12 effector
  source 1..1249: note = uncultivated organism sequence
FGTGKGADFNHMSRVYRKIAEWVNSSSATPGQNGREFMVSLAEGLAEFNPRSKDLDGVKSLISGPGYKSATRNLLDHLWGSDTVTEDHLQRLREAASNDAASCSGKVGEKGRRPYADKILLDVEETCGFSYLTDSNGGDVLTKTRDSYPENYDWGTSRHKSFAVMLDHAARRVSIAHTWIKKAESRRQRFEADAQKIHEVPHNIREWLDNFCTEWSDITGALDGYRIRRRAIDGWKEVVKAWSLPDCRTKEDRVAAARQLQDNPELDKFGDIQLFEALAEDDALCVWHRNGELDSEPDPQPLIDYVAAEEAEFKKQQFKVPAYRHPDPLLHPVFCDFGNSRWDITFSAHRSGQNRNEQHDSYFTMTLWDGMRIGNIDLRWHSKRLTRDLALKDKNSPVKPQKEVTRADRLGRAAAGVSGYEAVRVAKLFQEKYWNGRLQAPREQLEAIARHVKQHGWDQRACLMRDRIRWTVTFSAPLQPSGPWLKYVEQHTSLSKWPHNEDNKTRKEMARLILCRLPGLRVLSVDLGHRFAAACAIWESLSSLDFQKETSSRKILRGGTGPDHLFCHTEHRDESGKRHVTIYRRIGADLLPDGTTHPAPWARLDRQFLIKLQGEEEGTREASNAEIWAVHQFEKAIGRALPLIDRLTNAGWGSTEKQQQRLQELNKLGWFPARQEKADLPDDEEVDFFRPSIAVDDLMASATRSARLALRRHGDRARIAFALKGEYKTLPGNRKYYFNSPRDASAEHDEKTRHSEYVQFLRDALEMWYNLASSNTWYDRKAREWWVEYIPEVPLPRDDTKIPARGTSGSDKQALKQQLLSVAERLQKNAELRRQLSDAWEKQWKEDDQKWRGYLRWLRQWILPRGGRVDRRAIRHTGGLSLARLATITALRRQVQVAYYTRLRPDGSRAEISENFARKTLDALEELRLQRVKQLASRIVEAALGVGSENRNHWEKERRRPRQQICDPRFNPCQAVVIERLDHYRPEEVRTRRENRQLMTWSAAKVKKYLAEECLLNGLHLREVSAAYTSRQDSRTGAPGMRCQDVSPREFAKSPLWRKLVGRKTTGQTNDLNPIQCFLIDMDETLRNGSWPGRTIRLPLRGGELFISADPSSPAAQGLQADLNAAANIGLRALTDPDWPGRWWYVPCDPATSRPKADRVNGSSAINISNPLRNVPTDNSPSTSTKKRGAKKTGSGDDKTVNLWRDISCAPVSSENGPWQEFSDYWEYVTQRVLGILAAHKQYGDSVPY

SEQ ID NO: 274 - protein, 839 aa, unidentified
  REGION 1..839: note = Category: MG37 effectors
  REGION 1..839: note = Description: MG37-14 effector
  source 1..839: note = uncultivated organism sequence
GRAGGGGTGDVAARYVKRLHKKYGNCRPQAPRAQLADIARHVQQHGLDQRACLMRDRIRWTVTFSAPLQPSGPWLKYVEQHTSLSKWPHNEDNKTRKEMARLILCRLPGLRVLSVDLGHRFAAACAIWESLSSLDFQKETSSRKILRGGTGPDHLFCHTEHRDESGKRHVTIYRRIGADLLPDGTTHPAPWARLDRQFLIKLQGEEEGTREASNAEIWAVHQFEKAIGRALPLIDRLTNAGWGSTEKQQQRLQELNKLGWFPARQEKADLPDDEEVDFFRPSIAVDDLMASATRSARLALRRHGDRARIAFALKGEYKTLPGNRKYYFNSPRDASAEHDEKTRHSEYVQFLRDALEMWYNLASSNTWYDRKAREWWVEYIPEVPLPRDDTKIPARGTSGSDKQALKQQLLSVAERLQKNAELRRQLSDAWEKQWKEDDQKWRGYLRWLRQWILPRGGRVDRRAIRHTGGLSLARLATITALRRQVQVAYYTRLRPDGSRAEISENFARKTLDALEELRLQRVKQLASRIVEAALGVGSENRNHWEKERRRPRQQICDPRFNPCQAVVIERLDHYRPEEVRTRRENRQLMTWSAAKVKKYLAEECLLNGLHLREVSAAYTSRQDSRTGAPGMRCQDVSPREFAKSPLWRKLVGRKTTGQTNDLNPIQCFLIDMDETLRNGSWPGRTIRLPLRGGELFISADPSSPAAQGLQADLNAAANIGLRALTDPDWPGRWWYVPCDPATSRPKADRVNGSSAINISNPLRNVPTDNSPSTSTKKRGAKKTGSGDDKTVNLWRDISCAPVSSENGPWQEFSDYWEYVTQRVLGILAAHKQYGDSVPY

SEQ ID NO: 275 - protein, 1402 aa, unidentified
  REGION 1..1402: note = Category: MG37 effectors
  REGION 1..1402: note = Description: MG37-15 effector
  source 1..1402: note = uncultivated organism sequence
HTLADTKVKGGKGKPDRDPTDEERKARRILLALSWLSVESKLGAPADFIIASGKVVAALEEILKSRNVAKNEIDEWKNDCSASLSAAIRDDAVWINRSKAFDDAVKSIGSSLTREEAWDMLERFFGIRDAYLAPAKGSEDESSEAEQEDKAKDLVQKAGQWLSSRFGTGKGADFRRMADVYNKIAEWAGNPQTSTTGNEAINNLAAALSEFNPASNDLQGVLGLISGPGYKSATRNLLTQIAAKATVTQQDLASLKDKATKDAQKCNQNTGSKGKRRYSDAILNNVEAVCGFTYLQDGDSARHSEFAVILDHAARRVSLAHTWIKRAEAERSRFEEDAKKVDQVPEAAKDWLNNFCLERSGLSGAQEPYRIRRRAVDGWKEVVTAWSKADCKTAEDRIAAARALQDDPEIDKFGDIQLFEALAENDAVCVWHKDGDAAKAPDPQPLIDYALAAEAEFKKRHFKVPAYRHPDALLHPIFCDFGKSRWGICFDVHKNAQTPFPRALCLTLWTGSGMVSVPLCWQSKRLARDLALGQDAQKDGTPKVTRADRLGRAASNVGKSDMVNIAGLFEQKDWNGRLQAPRQQLEAIAKRVDKHGWNDETAKKMLDRLQWLITFSARLQPQGPWCAYAKKHGLKENPQYWPHAKENENRKGHARLILSRLPGLRVLSVDLGHRYAAACAVWEAVNAEQVKEACKAAGRVEPEASDLYLHLKRKVTKQKKGNQVVVEETTIYRRIGADTLPDGKLHPAPWARLDRQFLIKLQGEEERVREASNEEIWAVHQLEAELGRTVPIIDRLVKAGWGQAGKQKTRLEALRELGWTPAKEAQGSDETEEGEPRKPSLSVDELMSSAVRTMRLALKRHSDRARIAHYLITDEKTKPGGIKERLDENGRIDLLQDALVMWHDLFSSRGWRDDAARQLWDDHIAKLSGYKAPEEIGEESSSPERRNKQKENREKLHDVAKALAQDVTLRKALHDAWKKRWEEDDGRWKKQLRRFKDWVLPRGKHASDPTIRKVGGLSLPRLATLTEFRRKVQVGFFTRLHPDGTRAETGEKFGQSTLDALEHLREQRVKQLASRIVEAALGIGSEGGKGWDGAKRPRQRISEPRFAPCHAIIIEDLTHYRPEETRTRRENRQLMTWSSSKVKKYLAEACQLHGLHLREVSASYTSRQDSRTGAPGTRCQDVPVKEFMRSPFWRKQVAQAEKKQAESKGDSRERFLCGLNAMWKDKAVADWEKAGAVRVPLKGGEVFVSADRISPSAKGLQADLNAAANIGLRALTDPDWPGKWWYVPCEPASFRPVKDKVDGSAVVNPDQPLRQSAQAQSGDAAKDKKKRGNKGAGKSKEVVNLWRDISSSPLECIEFGEWKEYAAYQNEVQSRVIRILEEQIKGRDKQPHEGSKEDDIPF

SEQ ID NO: 276 - protein, 820 aa, unidentified
  REGION 1..820: note = Category: MG37 effectors
  REGION 1..820: note = Description: MG37-16 effector
  source 1..820: note = uncultivated organism sequence
IAGLFEQKHWNGRLQAPRHQLEAIARYVGKHGWDQKAQKMRDAISWLVTLSANLQPQGPWCEFAERFHLRSDPKYRPHADINKNRKGHGRLILSRLPGLRVLAVDLGHRHAAACAVWEALSTEAFKDEVSAKRILRGGTDNDALYCHAEQETGGRKHVVIYRRIGSDTLPDGKPHPAPWARLDRQFLIKLQGEEEGVRQASNDEIWSVHQLEAELGRKRPLIDLLYKTRWAQKKNQTGTENKKLAELRNRGWVPTDDTHDPHDTEKHTSASPSLAVDELMSYAVRTMRLALKRHGDRARIAHYLITDEKTLPGGVRQKLDEKGRIDLVQDALVIWHGLFSSAAWRDDAAKQLWDDHISKLAGYKILNEIEEDLSALERRKKERQIRDELRETAAALAQKGDLRIALYDAWKRRWKEDDAQWKKRIRWFKDWILPRGKSANSRAIRRVGGLSLTRIATLTEFRRKVQVGFFTRLRPDGTKTEINEQFGQSVMDAIERLREQRVKQLASRIVEAALGIGRMKRPKKGKTPKRPDIRVDKPCHAVVIENLTHYRPEETRTRRENRQLMTWSSSKVHKYLDEACRLHGLHLRGEIPAAYTSRQDSRTGAPGLRCQDVSVDEFRRSPFFRKQVAQAKERMDENRGDARDRFLCDLDSTNGPGTFRIPLSGGEIFVSADPASPAAKGIQADLNAAANIGLRALLDPDWPGKWWYVPCEAASFKPVADKVKGSHAVKLDQPLRSPAEDNSAHGRRKSGKGDGRSKEVINLWRDVSSHPLECTAGGVWKEYAAYHEDVQCRVIKILDQQLNNGNRRGLDEFEADPLPF

SEQ ID NO: 277 - protein, 801 aa, unidentified
  REGION 1..801: note = Category: MG37 effectors
  REGION 1..801: note = Description: MG37-17 effector
  source 1..801: note = uncultivated organism sequence
KKQRFKVPAYRHPDAFLHPVFCDFGNSRWSIDYAVHRAPEKLARAQQLLEKKKEELTRAEQALSKASDPSKRSSIEKKLKTLNVAFKQQEAEVLWLESHHAMTMGLWNGSRIEDTPLLWQSKRFGSDIGQAGAEHPLVASRADRFGRAVAMAKDNAPVVPSGLFDLADWNGRLQAPRRQLDAIAAIHDRTDLSVEEKRQLVAKRIRTIRWLVTFSAKLQSRGPFIAYAAQHGLDWRYGAHGIENKSREGLAKLVLCRLPGLRILSVDLGHRYAAACAVWETLSAAQMQNACLEAGMEAPSQRTLYLHLKHFVNGKEKKTIYRRIGADTLPDGSPHPASWARLDRQFLIKLQGEDRDARPATCDEVVAVEQLETELGYVRPIKRKGREHLVDELMSDALRTLRLGLQRHGARARIAFNLTATKRTRPGGIQELLDQESRIGLLTETLLEWNELYAGERWADELARDMWNKQIQPLLGGTILQETNNQDVTPSAAKRRMQREETREKLRPVAKQIAENDSLCRQLNVLWSTRWQIEDAAWRMRLRWMRRWLLPRGINRDPQFRKSIRDVGGLSLIRIASFKSLYQVQKAYWMRPHPDDLRRNIPERGDSSLTSFGQRVLDAMERMRENRVKQLASRIAEAALGIGDETSVNAKNGRQKRPTERSNDPRFAPCHAVVIEDLTHYRPDETQTRRENRQLMSWSSSKVKKYLGEACQLNGLYLREVPPAYTSRQDSRTGAPGLRCNDVTVAEFYTSRFWRKQVEAAEKNQKDGKKGDARERYLLSIDERIRSEAYDRDVFRIPVKG

SEQ ID NO: 278 - protein, 1468 aa, unidentified
  REGION 1..1468: note = Category: MG37 effectors
  REGION 1..1468: note = Description: MG37-18 effector
  source 1..1468: note = uncultivated organism sequence
KQAAVTQRAYTLRLRGVDPQDQSWRDALWATHEAVNKGAKAFGDWLLTLRGGLDHALADAKVKGGKGKPDRDPTDEERKGRRILLALSWLSVESEKGAPEEYLVPHDLDKQSGTRSNWKTVDALREILRGRRLDESEIESWVRDCSASLSAAIRDDAVWVNRSKAFDDAVESVSSSLTRDEVWDMLERFFGSREAYLAPAKGAEDESAEVEQEDKAKDLVQKAGQWLSSRFGTGKGADFSRMATVYKEIANWAGKAQPGMTGDKAIADLAGALSEFSPTSNDLRGVLSLISGPGYKSATRNFLSQLATRTVVAESDLQSLQKSAKHDAQKCTANTGAKGQRPYSRVVLEQVESACGFTYLQDGGPARHSEFAVMLDHAARRVSLAHTWLKRAEAERRRFEEDAGRMGNVPASVKQWLDSFCADRSEASGALEPYRIRRRAVDGWKEVVAAWSKADCKTAEDRIAAARALQDDPEIQKFGDIQLFEVLADDEALCVWHKDGDSAKAPDPQPLIDYVLATDAEFKKRQFKVPAYRHPDALLHPVFCDFGNSRWDISFAVHEAGKSTVRKKKGQWQNSDPHALSMTLWTGSTVEPRRLRWQSKRLTRDLAFKEGKQNGNAPTVGRADRLGRAAAGVPEHGAVSIAGIFELEDWNGRLQAPRAQLNAIAARVARHDWDAKAKQMRDHLRWLITFSAKLQPSGPWLEYAAAFPDDAPAKPFVSRKGDYAVRHQGNDAREGHAKLILSRLPGLRVLSVDLGHRYAAACAVWETLSAKQVKAACQAAGHEPPKDSDVYLHLTKKVKKQKKGKEVEVEETTIYRRIGADTLPDGKPHPAPWARLDRQFLIKLQGEEEGAREASNQEIWAVHQMETVLGLSVPFIDRLIAAGWGCTEKQKSRLEELKKIGWTPAPKAESSGVQKENEEVDVCKPSLAVDELMSGAVRTVRLALQRHGRRARIAFNLTASKKLLSGGREEGLTDEGRVELLADTLADWYALFTGKGWTDEWARQQWETHVTPLLQGAALPKIPEDAEAAPKARKEYRADLTEHLKPVAETLAKDESLCARLHCLWATRWRENDVALRKRLRWLRDWILPRGRKAEADRAIRRVGGLSLTRIATIKSLYQVQKAFHMRPEPEDLRKNIPSKGDDALLDFGRSILDVMEHLREQRVKQLASRIAEAALGIGRMKRFAGGKDPKRPRERVDRPCHAVVIENLTHYRPDETRTRRENRQLMSWSSSKVKKYLAEACQLNGLHLREVSASYTSRQDSRTGAPGVRCQDVPVKEFMQSPFWRKQVAQAEKKQAKGKGDARERFLCDLNAKWKGRPEADWEKAGAVRVPLKGGEIFVSADEKSPAAKGLQADLNAAANIGLRALTDPDWPGKWWYVPCDPTNFKPAKDKVAGSPAICLDKPLKDTDGKAGARSREVVNLWRDVSSQPISANDDWREFTPYWNDAEARVVNILRQSAGLARDQGER

SEQ ID NO: 279 - protein, 804 aa, unidentified
  REGION 1..804: note = Category: MG37 effectors
  REGION 1..804: note = Description: MG37-19 effector
  source 1..804: note = uncultivated organism sequence
LAELDLFNGRTIKAVRLRWQSKRLTNDLALHQTAVIDDATPVSRANRLGRAAAGAGSRSAVRILGVFDHKHWNGRLQAPRAQLHKLAKIRDNATVPEPARRQKYERGLSTIRWILTFSPRLQQKGPWLEYAAAQNLSAKSPHFAENRGRGWLAQHLLGRLDGLRILSVDLGQRYAAACAVWEAMSGDQVRATCASAGAPEPDKSALSIRVSVGGRRTILRRVGEDAWARLDRCFVIRLAGEDVPARKASPAEIQAVQTLCRELGYSDASRAAAAVDKLMSYALRVLRLGLQRHARRAMVVFGLAAKEKVVLGNQLRALSEDERTDSIGTALADWWTFAVSSRWPDPHAAALWDEHIADRAAGIELPPDLESFSFRERLLVREKLLKDVRPIAQALRPEEVEQLTEIWRLQWLGEEARWCKRLRWIKDWLLPRGSGAQCNSIRRVGGLSLRRLNNLRALYRLEKSFAGRLRVGVGGHRCESQVPSEEFGRKTLTALERLRENRVKQTASRIVAAALGLGKDLKRGHGERFAPCHAVVIENLTNYRPDEVRSRRENRQLMDWCAAKVKKYLNESCDLHGILLREVQAAYTSRQDSLTGAPGVRCADVPIRDFMACGGYWERELRRADKANSSGRSDARSRYLIALRDRISAAIPYPAAAATKGAVRIPVDGGPVFVSADPQSPAAHGTQADMNAAANIGLRALLDPDWAGRWWYVPCNASTGVPVADGLKGSALIQPNLTLFSSHNGAEKKPKRQVVNLWRDVSARPLNVGIWRTYAQYRASVMERVTAILLTGLQTLGDDVDLPF

SEQ ID NO: 280 - protein, 904 aa, unidentified
  REGION 1..904: note = Category: MG37 effectors
  REGION 1..904: note = Description: MG37-20 effector
  source 1..904: note = uncultivated organism sequence
LTRAEQALSKASDPSKRSSIEKKLKTLNVAFKQQEAEVLWLESHHAMTMGLWNGSRIEDTPLLWQSKRFGSDIGQAGAEHPLVASRADRFGRAVAMAKDNAPVVPSGLFDLADWNGRLQAPRRQLDAIAAIHDRTDLSVEEKRQLVAKRIRTIRWLVTFSAKLQSRGPFIAYAAQHGFDWRYGAHGIENKSREGLAKLVLCRLPGLRILSVDLGHRYAAACAVWETLSAAQMQNACLEAGMEAPSQRTLYLHLKHFVNGKEKKTIYRRIGADTLPDGSPHPASWARLDRQFLIKLQGEDRDARPATCDEVVAVEQLETELGYVRPIKRKGREHLVDELMSDALRTLRLGLQRHGARARIAFNLTATKRTRPGGIQELLDQESRIGLLTETLLEWNELYAGERWADELARDMWNKHIQPLLGGTILQETNNQDVTPSAAKRRMQREETREKLRPVAKQIAENDSLCRQLNVLWSTRWQIEDAAWRMRLRWMRRWLLPRGINRDPQFRKSIRDVGGLSLIRIASFKSLYQVQKAYWMRPHPDDLRRNIPERGDSSLTSFGQRVLDAMERMRENRVKQLASRIAEAALGIGDETSVNAKNGRQKRPTERSNDPRFAPCHAVVIEDLTHYRPDETQTRRENRQLMSWSSSKVKKYLGEACQLNGLYLREVPPAYTSRQDSRTGAPGLRCNDVTVAEFYTSRFWRKQVEAAEKNQKDGKKGDARERYLLSIDERIRSEANDRDVFRIPVKGGEIFVSACGQDGGSNANRKAPPGLQADLNAAANIGLRAIFDPDWEGRWWYIPCDATTICPVAKKFNGCKAVDSSKPLRIVAEKVAVSSSGIDEKRSGRKGIALTDGSRIVNLWRDPSGAPIRRDVPSNSEWQDYAEYWNKVQSRVIANLRKSYGLREI

SEQ ID NO: 281 - protein, 869 aa, unidentified
  REGION 1..869: note = Category: MG37 effectors
  REGION 1..869: note = Description: MG37-21 effector
  source 1..869: note = uncultivated organism sequence
LWDGTHIEDTPLIWQSKRFGSDIGQPVEAQPLPVSRADRFGRAVALAQDNVPVIPSGLFDLSDWNGRLQAPRRQLEAIAAIRDSAKLSVNEKQQLVAKRIQSIRWLLTFSAKLQSHGPFIAYAAQHGFDWRYGAHGPENKSRQGLAKLILCRLPGLRILSVDLGHRYAAACAVWETLNAGQIQKACLDAGKEAPGPCTLYLHLKQIANGKEKKTIFRRIAADTLPDGSPHPAPWARLDRQFLIKLQGEDRDARLATSEEIAAVEQMENELGVVRQLKRKGRELLVDELMSDALRTLRLGLRRHGVRARIAFNLTANKRIRPGGKEEVLDQEGRVLLLTETLLAWYELYTAERWTDEPARELWNRHIQPLLGATILQNTVNQEDTPSAAKRRKLREETSGKLKHVAEEIAKNDSLCRQLHVLWSAQWQTEDVIWRTRLRMMRRWLLPRGVKRNAQLRISIRDVGGLSLTRIASFKSLYQVQKAYQMRPHPEDPRLNIPERGDSRLENFGQRVLDAMERMRENRVKQLASRIAEAALGIGGETGISSKDGSQKKRPTERSSDPRFAPCHAVVIEDLTHYRPDETQTRRENRQLMSWSSSKVKKYLGEACELNGLYLREVSPAYTSRQDSRTGAPGLRCNDVTVVEFNNSPFWRKQVGAAEKNQKEGNKGDARERYLLSIEEGIRGAANDRDIFRIPVKGGEIFVSACITDGGNNAKKNAPPGLQADLNAAANIGLRAIFDPDWEGRWWYIPCDAATLCPDAKKFIGCKAVDPTKPLRVVAEEGAISASGIGSKKSGRKKNAATDGTRIVNLWRDPSGAPIHRDVLRSPEWQDYAGYWNEVQHRVIRNLKTCYEQTSQQEDPFVSQDADKPF

SEQ ID NO: 282 - protein, 1171 aa, unidentified
  REGION 1..1171: note = Category: MG37 effectors
  REGION 1..1171: note = Description: MG37-22 effector
  source 1..1171: note = uncultivated organism sequence
MAAETTTRAYTIKISGEGNWRKLLWDTHVAVNRGAWVWGDWLLTLRGGLPASLTADHPDRRVLLALSWLSVESPASLAPDKHIVAYGTDEDRAAKVMARFREILSRKQVSDVAGWEGACEPALSARIRDDAVWVDRSAAFSGMQAKFPGLTTDWAANTLFDLLGGSEAYFAMPDDEEPAPTEAKDFVQKAGGWLSRNWGAGQKSDSTAISARLRRLADTPPKTVAGTSGDDAIARLLELVDADSESADAKNRSKLLKKAIGWKGRSSKGAVALQKLASASRVTPEQWEQTRTKFLEEADAQDSKATHRGVKPPWMDDLRNALEGWIGVPYRTTRDLIWEHGVSLDHALRRVSSAHSWIKRAEVERRQFQEAAEKEILPKATKRLDDFCTTRSGESGAIGEYVIHRRAIDGWDKIVRAWRQLSETATAKDRTQAARDVQSNLDDNEKFGDIFLFEALAADDAKCVWRDAKGRPDSQILKDYSAQTVAEHNQRRFKVPAYRHPDPLRNPIYVDFGNSRWGISYEALAASQRRQSLQVKLVKAKTDEAREKLRQDLAESADLRGVTLNLWTGVGVEPTKLRWHGSRLWKDLDLAHFGLPGDVSVTRADRLGRAVAGQPQGAVSVAEVFAAKDWNGRLQVPRKQLSRLADLVYGKENGVRRGADYFRLIATVENSRAKKEFERFNWFLTTSARFQPSGPWIEFIEKGLPSGIEYRSGRSGSYLNYEANKDRKGRARIQLARIPGLRVLSFDLGHRYAAACAVWETLTEAALQREIKGRQVLSGGVKAKSIYLHTYHTGDNGKSHRTIYRRTGEGMWARLDRQFLIKLQGEDWTARRAHHEEWEGFNKFRTFLGMQPSAELLRIDELQREAVKLARVGLRRLGDAARVALAMTATSKPISGGRTSGAFTPEERIGYLQEALVRWQELAQSGEFVDDWAKEQWHAWVIAKLGGPQSIAVEPDSRASDRKKRKETTAAPLKPVAEIIAEPQSRIAVELNHMWTERFRKLEHDWRLHLRWLRRLILPSKRDNDKNPRQIRNVGGLSVQRLQTIRALYETLKAFRMRPEPDDLRKNVPAWGDESLAQFGRRVLNRLERLREQRIKQLASRIVEGALGAGRMNVVRGRDHKRPQMSVDAPCHVVVAEDLEFYRPEETRFRRENRRLMDWAARNVRKYIVEG

SEQ ID NO: 283 - protein, 1478 aa, unidentified
  REGION 1..1478: note = Category: MG37 effectors
  REGION 1..1478: note = Description: MG37-23 effector
  source 1..1478: note = uncultivated organism sequence
MAASISPTQRAYTLRLTGHKNDENWRDALWRTHEAVNKGAKAFGEWLLTLRGGLDHNLATATLGKKPPSDRDVRDRRVLLALSWLSVEDERGAPTEFIVAKGAGAPEERKRKVRQRFEEILLGRGLSPDEAKEWATDCDDSLSAAIRDDAVWVDRSAAFDAARNRIGDTLTREEPWDVFNRFFRSQANYFAGIERPPDVLEDNDESDLESDDSKDERAKDLAQHAGKWLSNRFGGGSGANFGEMAEAYDALARAIREIPEGIPGDKAFFHLAVSLAAFQPKSDDLSGIRSLVSGPGHKSATHNLLEKLSSSGSSDQLIHQISEAAAQDASNCREKLGIKGPRTWSDTILKNVEDATGITYQHDGAGGARHTEYSVILDHAARRVSAGHSWIKRAESLRLRFERDKQRLDEVPADALAFLDLYCEDRTGLSGAAGRYRIRRRAIDGWTDVVRAWGKCADSQERIDRARELQSDPEMKFGDIQLFEALAEDAARCVWQSSGKPDPEILKSYVFARDAEDRMQRYKVPAYRHPDPLRNPVFCDFGKSRWSIDFAAHSGTPEKLDKARRGIEKAQVALEKAQAKKVRAGDNTAADKAQKDVEKCERQLAEKKAELQWLENPRSLRLGLWTGRQLEPTQLRWRSKRLAADLCIGGERGAPEGEVSRADRLGRAVGGVAAGGNPEIVGLFDLKDWNGRLQVPRAQLDAIARLLEKGRKSKADEAIRYLDWLVSFSAKLQPQGPWVDYAETTGLVRPDPKYWPHSDANKKRKERGRLILSRLPGLRLISVDLGHRYGASCAVWEAVSGKAVADACGAAGLAPPSADRVHLSIPCSKDGARRKQFYRRIAGDLLPDGKPHPAPWARLDREFTIKLQGEDKTPRKPFSNERKDVAAFKDWLGYSREKGGREPATVLDLMTHAVWLARLGLGRHGCRARIAWGLTANERLLPGGCKAAFNDAADQERFLTDLLLEWHGLAQPGSRNDPAAKQLWEEHIQPMGAETPQEEADTSFRERKKAREKLAERLAPVAAALRKNESLRKKLSIAWEQRWSRDDGEWKKRLKWLNRWLLPRGIMVEDEKTGRQRPPHAIRLKTIRNVGGLSLDRLAAIRSLYQVQKQYRMKPEPDNPRKNVPEKDDHSLDNFGKKTLDALEKMREQRVKQLASRIAEAALGIGSENARHWEGSRRPCERIADPRFAPCHAVVIENLTHYRPDETRTRRENRQLMAWSSSKVKKYLQEQCELHGLHLREVQAAYTSRQDSRTGAPGMRCVDVPVREFLREGGFWRGRVGKEQEKKEPERTHVEQLLVDLHGLWSKAPEAARWNKSVRVIQRGGEVFVPAAASSPIGKGLQADLNAAANIGLKALVDPDWPGAWWYVPCIAGSLIPVADKIKGAECAFADSKAPLRRNKESGEGNQRPAKSKGKSGKTKEIYNLWRDPGTGILAPGGWAFHKNYWQDVERRVAQNLRVSNGLAASIEPPPITEDVPY

SEQ ID NO: 284 - protein, 788 aa, unidentified
  REGION 1..788: note = Category: MG37 effectors
  REGION 1..788: note = Description: MG37-24 effector
  source 1..788: note = uncultivated organism sequence
MAEKNSKEQPVVTTQRAYTLRLSGTDKHDNSWCDRLWKTHEAVNKGAKVFGDWLLTMRGGLCHTLAEADVPGKGKKPARRPTQQEIKNRRIVLALSWLSVESKCGAPESYIVPHDSNTATGERKNWKTVEALREILRSRGLTEERAIEWADDCRDSLRATIREDAVWVNRSKAFDLAATNIGASLTREELWDFLQPFFANRHSYLEMDTVASATNGDSETDTEESKAASSDEKAKDLSQKAGQWLSSRFGTGPGADFSRFSKVYEVLATACRSIAPEVSGVEAINRLAIAIKKCSPSSNDIEGILGLISGPGYKSATRNILQQINRLQSVSEQDLSRLCDACEKDASQSRQKVGGKGSRPYADAILQDVERTCGICYARTEDHPSRHWQYAVILDHAARRVSMAHSWIKRAEEQRSKFEIEKNKLLRVPRDALAWLAAFCAKRSSDSGANDAYRIRRSAVDGWKQVVAAWAALPAKSEIAGSELRSDAERARIQVARELQDTVEKFGDIQLFEALAIREAKCVWMPDGKPDAQPLLDYVFGTDAIAKKQRFKVPAYRHPDAFLHPVFCDFGNSRWSIDYAVHRAPGKLTKARQLLEKKSAEISKAELALGKMDDALRHAAISETLQNLRAAYKQQQAEVAWLKTLQAITMGLWDGNGIQDTQLLWRSKRFGANIGQPDAVHPSPVSRADRFGRAVALAEDNVPVIPSGLFDLPEWNGRLQAPRRQLEAIAAMRDSAKLSAGEKQQLVAKRIHSIRWLVTFSAKLQSHGPFITYAEQHGFDWRYGMHGF

SEQ ID NO: 285 - protein, 918 aa, unidentified
  REGION 1..918: note = Category: MG37 effectors
  REGION 1..918: note = Description: MG37-25 effector
  source 1..918: note = uncultivated organism sequence
MAEKNSKEQPVVTTQRAYTLRLSGTDKHDNSWCDRLWKTHEAVNKGAKVFGDWLLTMRGGLCHTLAEADVPGKGKKPARRPTQQEIKNRRIVLALSWLSVESKCGAPESYIVPHDSNTATGERKNWKTVEALREILRSRGLTEERAIEWADDCRDSLRATIREDAVWVNRSKAFDLAATNIGASLTREELWDFLQPFFANRHSYLEMDTVASATNGDSETDTEESKAASSDEKAKDLSQKAGQWLSSRFGTGPGADFSRFSKVYEVLATACRSIAPEVSGVEAINRLAIAIKKCSPSSNDIEGILGLISGPGYKSATRNILQQINRLQSVSEQDLSRLCDACEKDASQSRQKVGGKGSRPYADAILQDVERTCGICYARTEDHPSRHWQYAVILDHAARRVSMAHSWIKRAEEQRSKFEIEKNKLLRVPRDALAWLAAFCAKRSSDSGANDAYRIRRSAVDGWKQVVAAWAALPAKSEIAGSELRSDAERARIQVARELQDTVEKFGDIQLFEALAIREAKCVWMPDGKPDAQPLLDYVFGTDAIAKKQRFKVPAYRHPDAFLHPVFCDFGNSRWSIDYAVHRAPGKLTKARQLLEKKSAEISKAELALGKMDDALRHAAISETLQNLRAAYKQQQAEVAWLKTLQAITMGLWDGNGIQDTQLLWRSKRFGANIGQPDAVHPSPVSRADRFGRAVALAEDNVPVIPSGLFDLPEWNGRLQAPRRQLEAIAAMRDSAKLSAGEKQQLVAKRIHSIRWLVTFSAKLQSHGPFITYAEQHGFDWRYGMHGFENKSRQGLAKLILCRLPGLRILSVDLGHRYAAACAVWETLSTGQIQKSCGVAGMEAPGPRTLYLHLKQIVDGKEKKTIYRRIGADTLPDGSPHPAPWARLDRQFLIKLQGEDRDARPATSEEIAAVEHME

SEQ ID NO: 286 - protein, 1503 aa, unidentified
  REGION 1..1503: note = Category: MG37 effectors
  REGION 1..1503: note = Description: MG37-26 effector
  source 1..1503: note = uncultivated organism sequence
MAELDPTQRAYTLRLQGQRREDYSWSDALWATHEAVNKGVKVFGDWLLTLRGGLDPGLAERPVKDKKGERPPEDKERKNRRILLALSWLSVESEQGAPEKYIVASGRDLTSERIEKVKTAFHEILKCKGLDENQIQAWTTDCLPSLSAAIREDAVWVNRNKAFEDAKRQYDITDEDVWDILEPFLGNVDAYFFIKDLPADDQDESAEESSGGGEEPKDLVKQAGQWLSSRFGTGKGADFDRMSAVYEKMAELTSRLEGEMTSGAFFESLAEHLSEFNPDSSEPQAILKLVSGPGYKSATRNLIKKFAEQPTLNSDDLMNFTNAAREDAQESRNKVGSKGQRNYADAILSSVERVCGFTYLTASDGSDVSVETRYQLPENYTWGTSRHKEFAVMLDHAARRVSIAHSWIKKAEARRNKFEADAQKIKDIHPDVKAYLDAYCESRASLVGSLEEYLIRPRAVSGWEEVVKAWAKLEKQPGWDNKEPDQRKQARVDVARELQDQIEKFGDIQLFESLASDDATLVWHKDGKADGEPDPELLKNYVKATVANFNKQRFKVPAYRHPDAYYHPVFCDFGNSRWDVRFSVHEAHTVLAEKKAQLERLQQEMQTTRNLTKKSKLQSQIKDLEEELRWLENPRLVQMKLWTGKSIAPVILRWQSKRLVQDLALKQNASTAPEVVSVSRADRLGRAAAGLSANHIVQVKNIFDEDHWNGRLQAPREQLEELARHVEKHGWDARAIKLRRSIQWLVTFSPKLEPWGPWCEYVNTHPDFKGLKTKNPSAWPHAEENKKRSGDARLILCRLPNLRVLSVDLGHRYAAACAVWETLSKEDFIKQTEGKKIKAGGTGSDSLYCHVEHECDGKKRTIIFRRIGSDILPDGSEHPAPWARLDRQFFIKLQGEQEGAREASNEEIWQVHELEKELGVNTPLIDRLVTTGWGETDGQQARLEDLRKRGWKPKTSLGITVDESAEEHDEEEARFRPSLSVDDLMAYTVRSLRLALKRHGDRARIAFAMEGKYMHVSGGRKYYFDEQRDASEGASSDERGKSYTEYLAKALQIWADLAYRVAYEPENNCQNGAESASKEAASFDSKYSDPKAEELWTKYIAHLPEYEKLERFGGSKKRAETQKKKKNEERLEKLAKALIDDVDRRTKIHDEFKAYWEEEDKRWSDRIKRVKRWLTGKGLGDTAESNSKHGRKVGGLSLTRIATLTEFRRKVQVGFYTRLRPDGSKKEIKEGFSQKLLDALEELREQRVKQLCSRIIEAALGVGSENVEHWEDTKKRPRGPLSAKDPRFAPCHAIVIENLEHYRPKEVRTRRENRQLMTWSAGHIRKLLKEETYLYGLHLREVSPSFTSRQDSRTGAAGIRCSDVTVREFLYSPRWRKRVLQARENGNKDVESEFLHMIDERLNDKQKHHTLSSVIRLPDRGGEIFVSSDPRSPAAVGIQADLNAAANIGLRALMDPDWPGKWWYVSCSASSFAPAQKYVKGSACMPPRLPVQRNESTDLDDGS

SEQ ID NO: 287 - protein, 1100 aa, unidentified
  REGION 1..1100: note = Category: MG37 effectors
  REGION 1..1100: note = Description: MG37-27 effector
  source 1..1100: note = uncultivated organism sequence
MAELELPKTQRAYTLRLRGADPADSSWRDALWATHEAVNKGAQVFGDWLLTLRGGLDHTLADTKVKGAKGKPDRDPTRDERCDRRILLALSWLSVESAPRQGDTHEKFVIASGKDDTPSSRDKKVVGKLREILKKRGLKDDDLAGWISDCEPSLSAAIRDDAVWVDRSAAFDAAQKCVGLSLTREEVWDLLQPFFGSREAYLASLEAAEDSDSEAAAEDKAKDLVQEAGQWLSSRFGTGKGADFAGMVNVYNTIAAWAKEQTGKTNRFGSEALSSLGKRLTVFKPKTNDADGILGLISGPGYKSATRNIILAWKEPSAQVTAENVAKLGEAAAEDAQKCTTNIGGKGHRQWSDALLREVEAACGFTYLQNDGPARHSEFAVMLDHAARRVSMGHNWIKRAESERRKFKADAAKVNNVPSKARSWLDQFCEQRAGISGAIDAYRIRKRAVGGWKEVVVKWNRPACKTVEDRVAAARELQDDPDIDKFGDIQLFEALAEDDAVCVWRMNGEANAQSLIDYAAATDAGARQRRFKVPAYRHPDPLSHPVFCDFGNSRWDISFSVHKARSDKAETEKKVALKKEAVEKARCAVEKDRGDNKETEAQSKLKKAQADLAEAEAKLAWLSSRHAISMGLWNGVKVGNSTPLFWSCKRLTNDMALRQNGYPTASMKVTRADRLGRAAVGATSDALIDILGVFDEEHWNGRLQAPRTQLNAIAAHVSKHGWDVKARKMRDRIRWLVSFSAKLRATGPWIDYAKKFSENAPAKPFVSRWGEYAVKHKENDSRAGHAKFALSRLPGLRVLSVDLGHRFAAACAVWEALPISTMKQEIVDRKIVAGGTAEHDLYCHVAKPTAKIAESGRNKGKPITEITIYRRIGADTLAKDTPHPAPWARLDRQFFIKLQGEEEGAREASNEEIWAVHQMETALGRSVALIDRLVAAGWGGTDKHKQKARLEALTKLGWQRSSEKPPYGKRPSLSVDELMSSAVRTLRLALKRHGDRARIAHYLIADEKTKPGGIKEKLDIKKGRIELLQDALVLWHDLFSSRGWRDDSARQLWDTHIARLSGYQTPEEIGEEASARERTAKEKETREKLSGAAQSLASNE

SEQ ID NO: 288 - protein, 1448 aa, unidentified
  REGION 1..1448: note = Category: MG37 effectors
  REGION 1..1448: note = Description: MG37-28 effector
  source 1..1448: note = uncultivated organism sequence
MAEQVAATQRAYTLRLRGVDPQGPSWREALWRTHEAVNKGAKAFGDWLLTLRGGLDHALADAKVKDGKSERCPTDDERKGRRILLALSWLSVESEKGAPAEHFVPHDLDKQSGTRSRWKTVDALKEILKGRGLCESEIELWVQDCSASLSATIRDDAVWVNRSKAFDTICNGQKIVEARKDCQTMLWYLLGDDYLTLPKKPEKPKEEPTETEGEPSEEESNQERRSAVIQSGKGAGQRTRHPFSHIFGDSTGFGKPLRKLDLRDHWKTHLETRVTASQIPMRDAKKKKEEGVSQKEGVSPEEGVSPTELHREMFSKAASRLAQIWTKQKQQEVERQNRKAADEALKTLEADTQCKSALDLLDALCVERGTASGAQEEYRIRPRQIDGWDRVVKAWDPTANTCDPTVAEEQRIAAAKRLQDEDSDEKFGDINLFIALAEDKYKAVWWHANAPKPEILKTYVKGKKARADAVRLKVAAFRHPDPYFNPVFCQFGVSRPRIEFRRLRDFTSKPEGRDVRAVGLLLWNGEKADLHVLHAVSKRMDREVGDACGSVQKGAADLAEVTRRSRLSIATLAQLPEKGSVRVAHVFDRKKVKARKTNEKGAGAEGASEPAREKEPEWNGTLLGERRALEAIGRLVEDGKHTEAKECRRRLHWWLIVSLEMRPQGPWLKYGEDNNLLEVRYDKQQKENVVATAPRNSRDEWRGLAYPFRHPCNEKGRKGMARHQLSRLSGLRVLSVDLGHRYAAACAVWETLTTGCFQTEIEGRRILRGGTGEDALYCHTEHEANGRTHTTIYRRIGPDKWPDRTPHPAPWARLDRQFLIKLQGEEDSAREASNDEIWAMHRMETALGRAVPLIDRLVAAGWGHTEKQKARLEGLKTLGWTPAPRAQQSADPEGTQEEGYRPSLCVDELMFSAVRTLRLGLRRHGDRARIAHYLITDEKIKPGGVKERLDENGRVELLLDALVLWHNLFSSRSWQDAAAKQLWDAHVAKMSGYQRPEEIREGISRQERKKKQEEIRHNLRCAAAALAKDANLRKALHDAWNERWKHDDEQWKKHLRWFKAWVLPHGPAANSCSIRKAGGLSLTRIATLTEFRRKVQVGFFTRLHPDGTKAQINEQFGQSTLDAIEHLREQRVKQLASRIAEAALGIGRMKRSEGGKDPRRPRARVDRPCHAVVIENLTRYRPEETRTRRENRQLMSWSSSKVKKYLAEACQLNGLHLREVQAGYTSRQDSRTGAPGIRCQDVPVKEFMQSPFWRRQVAQAEKRQAEGKGDARECFLCELNAKWKGKPEADWEKAGAVRIPLKGGEIFVSADPKSPAAKGLQADLNAAANIGLKALLDPDWAGRWWYVPCDPTSFKPVEDKVGGCAAICLDKPLKNASAAQDTDKPGKKRRKAGKQTGACVNLWRDVCSQPISAGDGWREFTPYWNGVQARVVNILRQAAGFARDPEER

SEQ ID NO: 289 - protein, 1420 aa, unidentified
  REGION 1..1420: note = Category: MG37 effectors
  REGION 1..1420: note = Description: MG37-29 effector
  source 1..1420: note = uncultivated organism sequence
MAERATVATTQRAYTLRLRGMDKSDNSWRDALWATHEAVNSGAKVFGDWLLTLRGGLSHKLADKPDVQGEPPSEQERKNRRILLALSWLSVEDRHGAPADFIVEQPVEALRTVLAARGLGEDELGSWIEDCSPSLSAHIREDAAWVNRSDAFDQFRSRTGGSADREYACRVVLGFLELKGPYFHVPSVDDDSSSSPAASGDDKPLVNEATGWLCDNWGVGKKTDKARVSGILDRLGRLDFDKFVGKSSIELLRFACQEIGLDAAEGAAAHTLCSNLIAHIGWQGRPSSARMALEAISAAPNVTDALAQRLTKKLRQEAAAKLEESGIAVPSWMPDERVRLERAIGLAYRDGKDRTFEFAVMLDHALRRVSGAHSWIKLAEGERRKFAEDAAKLQAVPAAVRELLNRFCEDRGGISGAVEAYRIRKRAIGGWDQIVAAWRACPDSEEARIDAARRVQAEWEDTDGKFGDIQLFEALATDDAKCVWENGPQPLQDYVAATTARADQLRFKVPAYRHPDPLRHPVFCDFGNSRWTIKFAVHERHKLNGGRPRKNVDADWLRDDSALSMQLWNGEALAPKPMRWSCKRLVNDLAIKQKPVSDGDAVTAVTRADRLGRAAAGATRDQQVRIANIFDEKDWNGRLQAPRVQLDAIARHVDRCGWDAKAQTMLRRIRWLVSFSPKLTPRGPWVDYCSQFDDASATRPFVSGKGEYAVKHAGNEARQGHARLILSRLPGLRVLSVDLGHRFAAACAVWQTITARQMEEACRTRGHQAPSPDDLFIHLKRRIRKTVKDKEREVEQTDVYRRIGPDRLPDGTEHPAPWARLERQFVIRLQGEGNARRATRDERDRVKDFETHIGFRNAADERMPSMVDELQFHALRLARLGIARHACRAKIAWALTSLCSLRPGGGQECFAEGSPEHAEHLTRCLMDWHAMAAESRWNDSQMRDLWNQNVAAIDPDLKIVEPPIEPPSERPTRQEREKNQNQTEERIRAAVGRLTIDSRTAAAGEIARRWNDDDARWREHLRWLRSWLLPRGLKKDKARARLARRMGGLSLTRIAAFKSLYQVQKAFFMRPDPANPRKRVPSPGDESLERFGQRVLDAMERLRDQRVKQLASRIAEAALGIGAEGIPGRRPDRCVHDPCHAIVIEDLTHYRPDDLQTRRENRQLMDWSSSKVRKHLSEACQLHGLHLREVSPAYTSRQSSRTGLPGVRCQDVSIMTFLKAPHWRKRARVAKERLEAHRGGALDCYLCELDEQLSRLANDRKSPWPPLRLPVRGGDLFVSVDGHTVQADLNAAANIGLRALLDPDFGGRWWYVPCNSVGKPLPEKVKGCPLFTGKPLTSADANPPTPRPAGKGRKKGARTDEPRTINLWRNPVAQPPESTTAWTTFDRFWPNVEAQVVKALQQQNEHRARIARNPLEETPF

SEQ ID NO: 290 - protein, 1392 aa, unidentified
  REGION 1..1392: note = Category: MG37 effectors
  REGION 1..1392: note = Description: MG37-30 effector
  source 1..1392: note = uncultivated organism sequence
MAESLPATQRAYTLRLRGADPDDESWREALWRTHEAVNKGAKAFGDWLLTLRGGLSHELADEPVKAKGGRRQPSADEKRDRRIVLALSWLSVESERGAPQQFIVASGKDNDKQRQHKLVKALRDILQKRGVGKAELDEWVKACEGPLGAAIREDAVWVNRSAAFDQAVKRIGKSLSRDQVWDLLERFFGSKNAYLAPIVLKDEAEPSEKAKDLVQKAGQWLSSRFGKGKGAKFEVLSGAYQEIERWAKSARPSSPAHLMAHLARLLKAPSEDLDGVLSIISGPGYKSATRNLLKKLSGQQRVSSEDLARLAKTAADDRVKCKSKVGEKGKRPWADTILEDVQRACGFKYIPDGGPARHRQFAVMLDHAARRVSVAHTWIKRAEAKRRSFEEDARKIGQVPSQAKQWLDDFCLERSRSSGSLEGYRIRKRAADGWEHVVSRWAGADCTTVADRIAVVRELQSDPEIDKFGDIQLFEALAEDDATCVWKPEGEPDPQPLKDYVAAKDAEFKRRRFKVPAYRHPDPLLHPIFCDFGCSRWDIKFDVHEAYKRKERKSTQTQTNPHGLTMRLWDGTDVSDVRLRWRTKRLFGDLNLGGAGAGKDVSRADRLGRAAAGAQEGEAVQIAGLFEDKDWNGRLQAPRPQLDAIARRVDAHGWDKQAVRMRARLEWLLTFSARLRPRGPWTEFAKKNDLRPDPVYWPHAAENKNRQGRGRLILSRLPGLRLLSVDLGHRYAAACAVWEAVSAEAVKKACKEAGHPNVKEDDLYLHLKRKDQGKLRTTIYRRIGADRLGQPTPRKEVAHPAPWARLERQFLIKLQGEDETPRKARKDEFKAVENLERELGRERSEADKLPHRIDELMSEAVRTVRLALGRHGNRARIAHYLVATEKTMPGGVVQSLDQSGRVRQIAYALELWYELAASSKWKDDWAAELWEKQAWAKDVPLQKRDEETVTRQALKKEKKERCGKLEAAAENLLRDGARCRDLSARWAKRWGEEDKKFRERLRWLRDWILPRGKKAAKNPAIRHVGGLSLTRLATIRSLWQVQKAFFTRMTPEGRRRDEDGRPLTAGEGFGQKVLDALDRMRDQRVKQLASRIVEAALGVGKEQEKCANRDPRRPRECVFEPCHAIVIENLTNYRPEETRTRRENRQLMRWSAGKVKKYLSELCQLHGLHLREVGAEYTSRQDSRTGAPGIRCQDVPVREFMRSPFWRKQVAQAEKKLEKGEGGARERLLCELNANWKDSSEKELKEAGVIRVPLNSGEIFVSADAKSPAAKGLQADLNAAANIGLRALLDPDWPGAWWYVPCDAKTMKPSKEEASGSAAVDMEKPLVQVSEAKPGARGGRGKSEKPVVNLWRDVSARALEPGDWRRWEPYWNDVSARVVRLLRKQQGLPDFA

SEQ ID NO: 291 - protein, 1451 aa, unidentified
  REGION 1..1451: note = Category: MG37 effectors
  REGION 1..1451: note = Description: MG37-31 effector
  source 1..1451: note = uncultivated organism sequence
MAGNDQNTTQRAYTLRLCGTDPNDQSWRVALWCTHEAVNKGAYAFGDWLLTMRGGLDHTLADAPIADRDPTDEERKARRILLALSWLSVESELGAPEEFIIASGEDAEMERNGRVLTALEDVLKKRGLRKEKIQEWIEDCSPSLSAAIRKDAVWVNRSKAFDAAIGTYHGLTREYAYTVINSFFRLDDKYLQLPDIGVDDQSGAGADVAESPEFRTLARQWVSTNFGTGEKSDADLILKKLNILVAADLIRFAKQSKVSFIKEMCNLLGIQGEDVDALRTGIGWKTGRKSKGRLAIDSLPEQVTSESIQRLQQKFEEEVSDKQRKTRDVPGWMPSFRQAIEKECGMPFRGDRDHIGEFAVMLDHAARRVSQAHSWIKRAEAERRRFEEDARKMDDVPEKTKEWLDSFCSERSDTSGALEPYRIRKRAVDGWKEVVAAWSKADCLTTEDRIAAARALQDDPEISKFGDIQLFEALAEEDAMCVWHKDGDPANAPDPQPLIYYALASEADFKKRQFKVPAYRHPDALKHPVFCDFGKSRWAIDYEIHRNAKTPSPRALTLTLWTGKEMKPVSLRWQSKRLAHDLNIKSDGRGEGASLVTRADRMGRAASGVSKDDEVEIAGLFETKEWNGRLQAPRCQLEDIARHVDKHGWDSKASVMLNAVQWLVTFSARLQPQEPWREYAKNNENVNLNLDKKNRQPHTDENKNRKGRHAKLVLSRLPGLRVLSVDLGHRYAAACAVWETLSIESFRKEIRGRTILRGGKDAEALYCHTEHEENGNKHVTIYRRIGADKLPDGATHPAPWARLDRQFLIKLQGEGEEAREASNEEIWAVHRMESELGRAVPLIDRLVAAGWGRTEKQAERLEALKRLGWEPPLATAPVVEDASGEDADAYRPSLAVDELMSSAVRTLRLALKRHGDRARIAYAMTATYKSMPGDRKYYFTKAEELSSNDDQATREEKHIEFILDALVLWQSLISSRGWRDEAAKLLWDKHIAKLPVYEAPEELGEDITSVERKKKRDNNREKLYGVAKALVQDRPLRNELHDAWNKRWEQDDARWREWLRWSRDWILPRGRQAGDHSIRKVGGLSLNRLATLTEFRRKVQVGYYTRLRPDGTRKEIGEAFGQKVLDDLEQMREQRVKQLASRIVEAALGIGSEDRAHWEGGKRPRQRIDDRRFAPCHAVVIENLTHYRPEETRTRRENRQLMTWSSSKIKKYLKEACQLHGLHLCEVTASYTSRQDSRTGAPGIRCQDVAVREFMLSPFWRKQVKRAEAKQAENKGDSRERFLCELNAKWKNKTEVEWRNAGVVRIPLRGGAVFVSADRRSPASKGIQADLNAAANIGLRALIDPDWPGKWWYVPCFSSSFIPTDESTKGSEAITGKPLKERPTDDTGKMATRKRSGRSSRSSGGVVNLWRDVSSLPVSADKGPWEEYQPYWNKVQERVVRILHDNMVDSG

SEQ ID NO: 292 - protein, 1472 aa, unidentified
  REGION 1..1472: note = Category: MG37 effectors
  REGION 1..1472: note = Description: MG37-32 effector
  source 1..1472: note = uncultivated organism sequence
MAHQAAVTQRAYTLRLRGEDPQDRSWRDALWATHEAVNKGAKAFGDWLLTLRGGLDHALADAKVEGGKGKPDRDPTDEERKGRRILLALSWLSVESEKGAPEEYLVPHDLDKQSGARSNWKTVDALREILKGRGLGESEIESWVQDCSASLTAAIRDDAVWVNRSKAFDDLCPRFRGLDRDYAAKTISFFFGNQGTYLALPNRDNDEDATTAVQSGDSSDFRERARQWVSTNFGTGTKSDNARICSALHTLATSNLMSFDGCSKADFLKHLATLLGRSEPNKEPEEVLRIAIGWTTGRPSAGLLAIKSLPDPVTANDIDTLQRKFADEKAKKEEKADLLRVPEWIRTFRETVERECGIPYVGKRDHIGEYSVMLDHAARRVSIVHSWIKRAEAERRRFDEDAKRMANVPEPAKNWLETFCLERSGASGARDQYRIRRRAVDGWEEVVAAWSKADCKTAEDRIAAARALQDDPEIQKFGDIQLFEALADDDALCVWHKDGDSAKAPDPQPLIDYVLASDAESKKGRFKVPAYRHPDALLHPVFCDFGKSRWDIKFDVHEARKSTARKKEGATQNSDPHALSMTLWTGSTFKSQKLRWQSKRLTHDLALGQGKQDHRAPEVARADRLGRAAAGVPASATVRIAGIFEQKDWNGRLQAPRARLNAIAARVARHGWDDKAKRMRARLRWLITFSARLQPSGPWVEYTATFPDDASAKPFVSRKGDYAVRHQGNDAREGHAKLVLSRLPGLRVLSVDLGHRYAAACAVWETLAKEVFEKERHDAEAKGAHVVLGPEGCKPEEAIYAHFVWPEKESNAATKKARQEGREKFHPVTVYRRIGPDELVDTSTGEVKEHPAPWARLDRQFLIKLQGEDHEARKASPAEVEAVQELERAVGREPPDQRSLRVDDLMSETVRTVRLALQRHGRRARIAFNLTASKRLLPGGREEVLTDEGRVGLLADTLADWYALFAGKGWNDEWARQQWETYVTPLLQGAALPQIPEDAEATPKARKKYRADLTENLKPAAESLAQNEPLRMKLHCLWATRWSKDDIALRKCLRWLRDWILPRGKKVKEKAGRAIRHVGGLSLTRIATIKSLYQVQKAFHMRPEPEDLRKNAPSKGDDALLDFGRSILDVMEHLREQRVKQLASRIVEAALGIGIERQVGKKTPKRPRQRLYWKDEKGNEHGDRRFAPCHAVVIENLTHYRPDETRTRRENRQLMSWSSSKVKKYLAEACQLNGLHLREVQAGYTSRQDSRTGAPGVRCQDVPVKEFMRSPFWRKQVAQAEKKQAGDKGDARERLLCDLNAEWKGKPEADWEKAGTVRVPLKGGEIFVSARPCSCCKHGKRGGAPGLQADLNAAANIGLKALTDPDWPGKWWYVPCDPTNFKPARDKVAGSAAICLDKPLKNAPAAQDTEGPRKKRDEAGARSRGVVYLWRDVSSRPISANDAWREFTPYWNDVQARVVNILQQLAKNQGVR

SEQ ID NO: 293 - protein, 809 aa, unidentified
  REGION 1..809: note = Category: MG37 effectors
  REGION 1..809: note = Description: MG37-33 effector
  source 1..809: note = uncultivated organism sequence
MAKDNAPVVPSGLFDLADWNGRLQAPRRQLDAIAAIHDRTDLSVEEKRQLVAKRTRTIRWLVTFSAKLQSRGPFIAYAAQHGFDWRYGAHGIENKSREGLAKLVLCRLPGLRILSVDLGHRYAAACAVWETLSAAQMQNACLEAGMEVPSQRTLYSHLKHFVNGKEKKTIYRRIGADTLPDGSPHPASWARLDRQFLIKLQGEDSDARPATCDEVVAVEQLETELGYVRPIKRKGREHLVDELMSDALRTLRLGLQRHGTRARIAFNLTATKRTRPGGIQELLDQESRIGLLTETLLEWNELYAGERWADELAMDMWNKHIQPLLGGTILQETNNQDVTPSAAKRRMQREETRKKLRPVAKQIAENDSLCRQLNVLWNTRWQIEDAAWRMRLRWMRRWLLPRGINRDPQFRKSIRDVGGLSLIRIASFKSLYQVQKAYWMRPHPDDLRRNIPERGDSSLTSFGQRVLDAMERMRENRVKQLASRIAEAALGIGDETSVNAKNGRRKRPTERSNDPRFAPCHAVVIEDLTHYRPDETQTRRENRQLMSWSSSKVKKYLGEACQLNGLYLREVPPAYTSRQDSRTGAPGLRCNDVTVAEFYTSRFWRKQVEAAEKNQKDGKKGDARERYLLSIDERIRSEANDRDVFRIPVKGGEIFVSACGQDGGSNANRKAPPGLQADLNAAANIGLRAIFDPDWEGRWWYIPCDATTICPVAKKFNGCKAVDSSKPLRIVAEKVAVSSSSIDEKRSGRKGIALTDGSRIVNLWRDPSGAPIRRDVPSNSEWQDYAEYWNKVQSRVIANLRKSYGLREI

SEQ ID NO: 294 - protein, 1325 aa, unidentified
  REGION 1..1325: note = Category: MG37 effectors
  REGION 1..1325: note = Description: MG37-34 effector
  source 1..1325: note = uncultivated organism sequence
MAKETTTQRSYTVSLCKPELGAKAWKALAATHIGMAKGAKACGDMLLNMAAGIAPCAIEELGFSGAEAVRNARRMLTLTWFDVESEDGSPQEFVVPVEELPQKLRDHLISAGLDREEADSWLEDCQDVFATPIREDSCWIDRRSSFEAMEARLGVDISQSDIEDFCFGQFAILGSLKDYLIIPDYESLQPDGISDAPSKIQAARNMLSSRLGAGIGSDTAAMADAYDLINRALEGLSSGEHCPKNEFRRVIELELDDSMPDISFEEFVNSKIKGIGRPTATAQRMEAALACREFIPWSQIEALMEKSADDARKQRAKVGLKGRRPYFDAIMGDLEKKTGIPYPAEGNQTPARNWYSCLFDHAARGVSAHHTWVKRAESTRNATYANNEAFETLPDEARAFLSKYEKERSLSLGAVEPYVIRRKAITGWTKDHVKQLHNAKSAEERVEILKEAQSQGDMGDMTLLIDLVRDDALCAWHDVEGKPAEKILEVWAKHQELERERLHFKTPSYRHPDHLLHPVFADFGKSRPEATYTFGESLEQRTVTLMLVDGGGFSRFTFHWNSKRLMDDFDFSALEKEGKAAACAMTTRFGNSLEEERKPRLLLTKAAKKPIVSDVGTRLQLTRASLERCAKRQNDAMKNPDELDWFLSLALNIKPAPFTPKALIAQAKERKDENKARTSALSKLRYSRIHGLTFIGVDLGHRKAASCSVWKTCSAEEIEQLCIEAGHELPDKNTLHLTLDCIDRRINARRIGADTLPSSEQHPAPWAVLQREFAIELPGAKEEEQRAATKNELSFLANPYAISVETRSAKAKKSAYRTTSEAQYAAVEAIRRDVKQHASMASFIHLIRSKKITKPGGAEMLLSDDELVKTVEKRLEKELGNKYAKPAPWVENLPRSNDPSTCAHILCTEKEYVDALEKQWEEDDENIRIALRILRNWIFKGIEPYSDSRTACKGVGGLSLNRIATMQMAYQLVRSFSMRPFPTDTRRGRRMSAHINTMREQLAKHVASRIVEAALGLGGSQNTSEKRNVRTPGDRFQPCDLVVIESLTNYRPEQTRSRAENRRIMQWASARVGEMLRDECEIYGIALYETPAAYTSRQDSRTGLPGFRFKEVPVAAFVNGGSYHGVNIDRALSSDCENERRFYGELLKRWNKGKGEWDEPLRPEKTVWTLKRGAWVSKNGMLLKKGMAPQPIPIVANGSELFMASTDEGVLKIQADINAAGNIALRGVTDPDWAGSWWRVNIQAKSGMVEKRHRGSLAFDGTAIDPEGKAPHEGVIGAWSTVGATPLSDEKRKWSTYQKYWDDQRSKIFARLCRRYGIPPAIEEE

SEQ ID NO: 295 - protein, 938 aa, unidentified
  REGION 1..938: note = Category: MG37 effectors
  REGION 1..938: note = Description: MG37-35 effector
  source 1..938: note = uncultivated organism sequence
MALTVETTQRAYTMRLTGDSDNTHWRELLWKTHELTNRGAHAFGDFLLTMRGGLSHELATGNTSEETRTRRIILAMSWLSVESKEGSPQQFHVPQNWEGKKQLGQYKVLEALESILTKRGLDRKEIEAWINDCTASLQARIRDDAVWVNRSECFDAFCKEAGVSVNRASAKNNLFFFISEDQYFLLKDIGEESANVPDSNSLNLVQLARKWLSNYWGAGIGNDKRSIKDSLTTIAGLDYGHMFDRSGTDLLNYIAVKLRFGEVEGDWDLRRLKSCIGWRSGRSSSAAMALEKIAAEKNISKEAVERFVEKCADEAKTIKVPDKESQDTQTWNENIRGQLERAIGVPYRDEKDHIDEFSVMLDHGARHVSVAHSWMLLQEGKRIEFSKDAQKLNKVPEEARQYLDEYCELRTELTSAVGDYVIRKRAIEGWKEVVKAWSASDCRTPEDYVEAARQAQAEDVEGGKFGDINLFEALAEEDACCVWRNDKGKPDADILKNYVEARWAETQMKRFKVPMYRHPDALRHPVYCDFGSSRFSIDYAALRAKKDVPVNSLTLTVYDGASFKPLTLRWQSKRLMKDIIDLRPKDNKDGDAIVVSRADRLGRAAGGAGDVKKGLTIATVFDEKKWNGRLQVSRRQLDNLERKLMKAGVPDKDRCKTVQSHLPNLDWFITFSPKLSPQGPWIDYAMENKLKVNAKNIFNWRQRFEPKKRGTLTYAPLCRLPDLRVLSVDLGHRYAASCAVMQTMSTKQLCALCEDAGATPPAGDALYFVLSEQNGEKPKKKWFRRIGPDRLPDGAEHPAPWAMIERQFTIKLDGEDDTVRGARKEEIKNAVGFCENIGIDENDLPKNAVDELMGFCVRQYRLALRRHSDVARIAFAMTAQHRHGMGGRKETLDSSGILEEKTKALLLWDNLRNGRGKAKETAERIWGNYLAVHVDRLG

SEQ ID NO: 296 - protein, 1442 aa, unidentified
  REGION 1..1442: note = Category: MG37 effectors
  REGION 1..1442: note = Description: MG37-36 effector
  source 1..1442: note = uncultivated organism sequence
MANQAAVTQRAYTLRLRGVDPQDQSWRDALWATHEAVNKGAKAFGDWLLTLRGGLDHALADAKVKGGKRKPDRDPTDEERKGRRILLALSWLSVESEKGAPDRHVVPHDLNKQSGSRSWKTVDALREILKGRGLDESEIESWVQDCSASLSAAIRDDAVWVNRSKAFDDAVKSIDCSLTRDEVWDMLDRFLGSRDAYLAPAKGAEDESAEAEQEDKAKDLVQKAGQWLSSRFGTGKGADFSRMAAVYEKIADWAGKARAGMTGDAAVAGLAAALSEFSPASNDLQGVFRLISGPGYKSATRKLLKQLPARPSVAQEDLENLRDSACDDAEKCKANTGSKRQRAYADAILKDVESVCGFTYLQEGGPARHSEFAVMLDHAARRVSLAHTWIKRAEAERRRFEEDARRMDKLPARVKQWLDAFCFERSERLKASGEKKTYRIRRRAVDGWKELVAAWSNADCKTAEDRIAAARALQDDPEIEKFGDIQLFEALADDEALCVWHKDGDLAKSPDPQPLIDYVLATDAEFKKRQFKVPAYRHPDALLHPVFCDFGNSRWDISFDVHKAVKTSERNRKNMMAQDPHALSMTLWTGSTVEPQRLRWQSKRLARDLALKGRQDANARPVTRADRLGRAAAGVFAHSAVRIAGIFAQEDWNGRLQAPRAQLDAIAARVARHGWDAKARQMRDHLRWLITFSAKLQLSGPWAGPEPSPWVEYTKTFPDDAPAKPFVSRKGDYAVRHQGNDARNGHAKLILSRLPGLRVLSVDLGHRYAAACAVWETLSAEQLKAACQAAGHEPPKDSDLYLYLKKKVKKQKKGKALEVEETTVYRRIGADVLPDGKPHPAPWARLDRQFLIKLQGEDTEARKASSAEVGAVQELERAVGREPPDQRSLRVDDLMSETVRTVRLALQRHGRRARIAFNLTASKRHLPDGREEVLTAEERVKLLADTLADWYALFTGKGWHDEWARQQWETHIAPLLQGSVLPQIPEDAEDVPKARRKYQDDLMERLSPLARSLAGNDSLCRKLHCLWATRWRENDVILRKRLRWLRDWILPRGRNAEGDPAIRHVGGLSLTRIATIKSLYQVQKAFHMRSEPEDPSRNNPSKGDDALLDFGRSILDVMEHMREQRVKQLASRIAEAALGIGRVKRLAGGKDPKRPRQRVDRPCHAVVIENLTHYRPEETRTRRENRQLMSWSSSKVSKYLAEACQLHGLHLREVQAGYTSRQDSRTGAPGVRCQDVPVSEFMQSPFWRKQVAQAEKKRAEGKGDARERFLCDLNEKWKGQPEADWKRAAAVRVPLKGGEIFVSADEKSPAAKGLQADLNAAANIGLRALTDPDWPGKWWYVPCDPTNFKPAKDKVAGSAAICLDKPLKNAPAAQDTDGPRKKRGKAEARSREVVNLWRDVSSQPISANDDWREFTPYWNEVQARVVNILRQSAGFARDQGER

SEQ ID NO: 297 - protein, 843 aa, unidentified
  REGION 1..843: note = Category: MG37 effectors
  REGION 1..843: note = Description: MG37-37 effector
  source 1..843: note = uncultivated organism sequence
MAQQPQVPVTQRAYTLRLSRAPGECAACHTDACDCWRDVLWATHEAVNRGTKAFGDWLLTLRGGLCHTLADMKVPAKGKKPARESTEEERRDRRVLLALSWLSVEDERGAPNGDGLRIATGRGTGDQRGKAVKAALHEILKKRGLNETEIESWLSDCGASLEARIREDAVWVNRSVCFDKAAKSVGDTLTREEVWDFLEPFFGTREAYFTGLSDSEEEEDESTREDEKAKDLVQKAGQWLSARFGTGAGADFNLMGGAYQKIAGWASRAASGNQGAKTMERLADCLELPSDSRDLNGVLGVISGPGYKSATRNHLKTMAGKPQVAQDDLDRLKELAEKDAAKCKENVGRKGRRPWSDRVLEDVEKACGFTYLQNDGPARHKEFSVMLDHAARRVSIAHSWIKRAEQRRREFEEDAKKRDALSTRAPEAVEWLDRFCADRSTATGASADSGYRIRKRAVEGWPHVVKAWSRPSCTTEDDRITAAREVQGDSEIEKFGDIQLFEALATAEAVCVWRNQDNEPDASILTDYAAATTAEHDQKRFKVPAYRHPDALRHPVFCDFGNSRWMIRFACHEATKARNGSKRSVKNDAESTQGRHGLRMGLWNGQSVDDVDLHWSSKRLTADLALDDHPDANAVKVTRGDRLGRAASGAVAHAAVMNVFEERDWNGRLQAPRAQLDRIARLEDDAKRAQAETLRRRLRWLVSFSPRLRPSGPFIEYAASHGIKPNRRGEYYPNAPANKGRERLGKLVLSRLPGLRVLSVDLGHRFAHPGTAPIPEGAMRADEPSLLAYLVSSGPYMLEGADQVDYAKPSGERPPPPGLGENGMALVRNPSWQASSDSLRPAY

SEQ ID NO: 298 - protein, 1469 aa, unidentified
  REGION 1..1469: note = Category: MG37 effectors
  REGION 1..1469: note = Description: MG37-38 effector
  source 1..1469: note = uncultivated organism sequence
MARKSESVADPPTAEAPLTQRAYTLRLRAVDPQDDSWRDALWATHEAVNKGAKVFGEWLLTLRGGLGHELAEPPPLPKGKTRSDDETAALQKSRRILLALSWLSVEDARGAPDGAIRIASGEDADSVRRDKVLATLRSVLAGRGVGQRAIESWISDCADSLSARIRDDAVWVNRSAAFDTKTKELRGLTHKYATETILSFFGPADDYFSLPDADADDGATLAAGDDDSKFKQKARQWISTNFGTGEKSDTGQIIESLRKLAKAELDRFARRPKAELIEAMSRKVHGPTPDFDGLRAGIGWSTGRPSKGRLAVEKLPDRPTKTDIEALQQKFAEEADDKESKSGARDVPKWMPGFRAFVEAAIGMPFVGSRNHIGEFSVMLDHAARRVSIGHSWIKRAEAERRRFEADAQRLGTVPADAAAWLDAYVRDRSGSAGGEYRIRRRAVEGWDEILKRWKRPTCASAEDRIAAAREVQADPEIDKFGDIQLFEALASDDALSVWRNGNDIAPDRLKDYVFAHDARFKQRRFKVPAYRHPDALRHPVFGDFGNSRWKVEYSVLEAAKAARGDRRISAQDAEWIENPRGIRMGLWNGDAVKDFDLWWSCKRLSADLALRQPAHNGQVRSVSRADRLGRAASGIKPGESPSPAGLFSQAEWNARLQAPRSQLTDLAAYLDRSDGRWDDRARKMRDRIAWLVTFSAKLECRGPFIDYAARHGITPNRKGEYYPNADRNKADKREGHAKLMLSRLPGLRVLSVDLGHRFAAACAVWETLSRAELKKEIAGRSVIDGGAGATDLYLHTRHTDCAGKERKTIYRRIGSDQLPDGSDHPAPWARLDRQFLIKLQGEESRARKASADEIETIRQMEIQLGYVREAHKPLPAQIDELLSEGVRLVRLGLRRHGDAARIAYAFHPEAARLTPGGGVEAHTPDTRQQAILDALIRWHGMAMSDRWSDPCAMDAWQTRIQPALTTELPALTPDADRWERNRFRTALEAALTPVATALSREGAETLHTLWSERWEADDAAWRPRLRQLRRMLLPRGLRPVAGDTDAQAAARKARRGAARHTGGLSLTRIATIRELYQVQKAYAMRPEPDNPRKNIPESNDDRFAEFGRSILEAVERLREQRVKQLASRIAEAALGVGRAPRTGDHDRKRPLSPVDAACHAIVIESLRNYRPDELQTRRENRALMNWSAGKVRKYLEEACQLHGLHLREVMPNYTSRQCSRTGLPGLRCDDVPIDEFLTAPWWNKAVNAAAKRLQENGNDSLDRLLVALRENRSGATTDSDKCSQRTLRLPRAGGDLFVAAPPSGDATKGRHRGALQADLNAAANIGLRALLDPDFPGRWWYIPCIEDKAAGTAVPRADKVKGSVCFGPDSSKPEQVGSLLKPGAGDSSDGQSRPARRQRNRRSNAEGKETTNFWSDPRAAALRNAKDGGFWLPTPAYWRWVRKRVVDALWEANGLGAPPADLVRDGRA

SEQ ID NO: 299 - protein, 1510 aa, unidentified
  REGION 1..1510: note = Category: MG37 effectors
  REGION 1..1510: note = Description: MG37-39 effector
  source 1..1510: note = uncultivated organism sequence
MARKTESAAEPPAPEAPLTQRAYTLCLRGTDTQDDSWRDALWATHEAVNKGAKVFGEWLLTLRGGLSHELAEPPPPPKGKKRRDDDAIAVRKHRRILLALSWLSVEDERGAPNGVFRVASGRESDSARHGKVLEAFKKILESRGIIGDEADSWVNDCTASLSSAIREDAVWVNRSAMFDAAVLKIGPSLTRDEVWDILEPFFGSREAYFAGVELTDEKSSAEEKAKDLVQKAGQWLSSRFGTGTGADFESMSKVYAAMAEWADAAPAFPSGADAIKNLAHSLADFRPATDDAGGILGLISGPGYKSATRNIVKNWESRTTVVTRDDLRKFAETATNDEHKSMANVGAKGRRPWSDRVLEQVEHACGFTYLQTGGPARHKQFSVMLDHAARRVSIAHSWIKRAEAERRRFEADAQRLGTVPADAAAWLDAFVQERSGSAGGEYRIRRRAIEGWDEVLKRWARSDCKTAEDRIAAAREVQADPEIDKFGDIQLFEALASDDALCVWKNGDNFTPDQLKDYVFAHDARFKQRRFKVPAYRHPDALRHPVFGDFGNSRWKVEYSALEAAKAARGGRRIGTEDADWLGNPRSVRLGLWNGDAVNDFDLRWSCKRLSADLALWQPAHNGQVRSVSRADRLGRAASGIKPDDSPSPAGLFSQAEWNARLQAPRSQLNDLAAYLDRNGGRWDDKAKRMRDRLAWLVTFSAKLECRGPFIDYAARHGINANRKGEYYPNADRNKADKREGHAKLILSRLPGLRVLSVDLGHRFAAACAVWEALPRHEFEQEIRGREIIAGGTGPEQLFCHTRYTDKAGKARTTVYRRIGSDTLPDGSEHPAPWTRLDRQFLIKLQGEDAPARKASPDEIKLVERLENELGRRRDDGLPLPRRVDDLMAEAVRTLRLGLRRHGRVAKIAYAFNPDCPGIPGMGGALKAIARGNDDHIKFLVNALADWHAMATDAAWDGSDARQLWNQHIKPVPNGFEVAESTRTEPNAERTTRQQRRKTEEELREKLRPIAEHFARASKESTRGIYEAWRDLWESKDGPKRTKSNFAHTLIHDQAGKVIGSRTAPKQGAPSPEGWHLRLRQTTDWITGRRPPGNISLSPGWKQHVGGLSLTRISTMRALYQLHKAFAMRPRPDKVQGAPERGESNAGTAQSILDAMERMREQRVKQLASHIAEAALGVGRMKQTDGRDRKRPRSPVDAPCHAIVIESLRNYRPDELQTRRENRALMNWSAGKVRKYLEEACQLHALHLREVMPNYTSRQCSRTGLPGMRCEDVPIDEFLSAPWWKKMVNAADKRLQDNGTDSQDRLLVELQKKWSIASDQEKRAQRTLRLPRAGGDLFVTAPPNRAATVEDRSQGALQADLNAAANIGLRALLDPDFPGRWWYIPCIEDKAARTAVPRADKVKGSTCFGPDPSKPEQFGSFLKPDAGDSPEGHPRPARRSGTRPSKADGKQTTNFWSDPSATALRNAQDGGFWLPTPAYWRWVRKRVVAALWQANGLDAPPADLVRDDQA

SEQ ID NO: 300 - protein, 1475 aa, unidentified
  REGION 1..1475: note = Category: MG37 effectors
  REGION 1..1475: note = Description: MG37-40 effector
  source 1..1475: note = uncultivated organism sequence
MARKTESVVETPAPEAPLTQRAYTLRLRGTDTQDDSWRDALWATHEAVNKGAKVFGEWLLTLRGGLSHELADQRVIEGKGASKKERDPTDDERRDRRILLALSWLSVESAPRDKDDPRKPFLIGAANGPTSREQALREALADILQKRGLSTPEIGDPNVEPENQPDTWLGQCGPSLAARIREDAVWVNRSAMFDAVTSGWQKQDARSDAHTLLSFILSDDFLTLPTAKKQQGKKNDKDPEASENESEQEERQKAVKASSRGAGQRTRHPFSHLLGEGKPFGKPQRTLSLRDQWHGYIKPKLEEVGIPVLDAKASNKGKRKDAAPAHTELQREMFSKAASRVAQIVTKQRQQEADRLARREADADLRMMENDAAYADALKALQEYCDEYRVMSGATGEFLIRPRAVTGWDRVVKRWAGITEANPDAAREARIEAVKEAQDADEEKKFGDANLFMRLADERYRPVWQINGNADRTILERFVKGMKARSDSKRLKVAAYRHPDPYFNPIFCQFGVSRPAIRFGRLKAFSDSPAANDLRAVGMLLWHPNKKCAQITVMHGVSRRLDREIGSACDQVQQDAGKLPSVSRRGRLGAAAAGLASADAPARVAGVFDLKKVKSRAKDDAKEEHEDEGSGNGKLKEPTWNGTLSTNRRDLAAIARLIANGDAQKAERRRQQLRWTLTVSMDMECRGPFIEYAARHGINANSKGEYYPNADRNKADRRKGHAKLILSRLPGLRVLSVDLGHRFAAACAVWDALPKADFEQEIKGREIIAGGTGPEHLFCHTQHKDAAGKQRTTIYRRIGCDNLPDDAKHPAPWARLDRQFFIKLQGEETPARKASPEETKLVERLERELGRRRDDGQRLPRRVDDLMAEAVRTLRLGLRRHGRVARIAYAFNPDCPGIPGMGGSLKAIERGSNDHIQFLVNALADWYALATDSVWNSSAARRLWNEHIKPVPNGFEIAQPTQPEPNAEPTTRQQQRKSEEALREKLRPIAEHFAGADKESTRGIHEAWKNLWEEQDGTGRSKGDFDHTLLRDQNGKVVGSRTRPKAGQETAGGWHEHLRRVTDWITGRRYPGEESPSNGWKQNVGGLSLTRIATMRSLYQLHKAFAMRPRPDKVQGAPERGESNAGTAQSILDAMERMREQRVKQLASRIVEAALGVGRMKQTDCRDRKRPRSPVDAPCHAIVIESLRNYRPDELQTRRENRALMNWSAGKVRKYLEEACQLHGLHLREVMPNYTSRQCSRTGLPGMRCDDVPIDEFLTAPWWNKAVNAAAKRLQENGTDSLDQMLVALREKWSKASDSDKRGQRTLRLPRAGGDLFVAAPPNGAATGQKPRRALQADLNAAANIGLRALLDPDFPGRWWYIPCIEDKAAGTAVPRADRVKGSACFGPDPSKPEQSGSLKPGAGHSSDEHSRPVRQQATSRSNADGQETTNFWSDPRATALRNAEDGSWLPTPAYWRWVRKRVVAALWKMNGLDA

SEQ ID NO: 301 - protein, 1481 aa, unidentified
  REGION 1..1481: note = Category: MG37 effectors
  REGION 1..1481: note = Description: MG37-41 effector
  source 1..1481: note = uncultivated organism sequence
MARRSASTSKPPGPVAPTTQRAYTLRLRRAPGKCPHCEQDACDCWREALWATHAAFNRGAKAFGDWLLTLRGGLSHELAEQPSPPKNKEPTCEESDAIRKNRRILLALSWLSVEDDCSAPTGTFRVASGKDSEAERKNKVLTAFRSILTARRMRSQDVESWIADCAASLSAKIREDAVWINRSACFDQRALDLKVLSREYAKAAVMSFFGPLDEYFKLPDEADDTKPAVGGDGPDFRTLARQWVSTNFGTGKKSDSEAIAQNLRKLADANLAPFSGKPKAALIAHLSVELDGSTADIDGLCRAIGWNTGRPSKGRVAIERLPDPPTETSIQTMQQKFREEAEAKASSKGLRQVPEWMPAFQKSIERDCGMPFKLGEGRDHIGEFSVMLDHAARRVSIGHSWIKRAEAERRRFEADAQRLNHIPAAAKDWLDQFVQFRSGSSGAAAAGGEYRIRRRAIEGWDEIIKRWKRAACKSPEDRVAAAREVQADPEIEKFGDIQLFEALAADDAECVWRGDGNGTPDPLKDYVAATDALDKMRRFKVPAYRHPDPLAHPVFGDFGNSRGDIRFAVHEAAKATRGTKRIAKDQKEWIRERHGLRMGLWDGQSVRTADLRWSSKRLVDDLALRNHVTTRRTGPVSRADRLGRAAAGLGADEAACVAGLFELPDWNGRLQAPRAQLDAIAACVAANGGKWDDKARKLRDRIEWLVSFSAKLECCGPFMEYASQNGIQPNGKGEYYPHAERNKGRTGHAKLILSRLPGLRVLAVDLGHRFAAACAVWEALSKIAFDAETKGREVVSGGRAADDLYCHTRHLDCAGKARTTIYRRIGPDKLPDGSDHPAPWARLDRQFLIKLQGEERPARAAGPAETAAVQQIETDLGRARGQEDLPPRPVDSLMREAVRTIRIALRRHGDAARIAYAFKPGAKRLKPGGGAQDHTPETHADAILEALLRWHELATGARWRDPWAETQWKDWVQPHISATLPELANDADRWERKRHRAALEQVLRPVAQMLIQRPTDALHQVWSKHWADEDLKWPSRLRWLRNWLLPRGPRARSGAARNVGGLSLLRIATLRELYQTQKAYAMRPEPDDPRKRIAGRNDDRYDELGRSVLQVIERLREQRVKQLASRIVEAALGVGRAKPTRGRQRPQSRVDVPCHAVIIESLRNYRPDELQTRRENRAIMNWSAGKVRKYLEEACQLHGLHLREVMPNYTSREDSRTGLPGVRCVDVPVDPKLGKPKAYWWNSVLSTARKKSIGDAASHDKQGDATSRFIVELAGCLDRLKADGKPLPKTVRVPRIGGDLFVAAPPTSCTAPAHQPHPACDGARALQADLNAAANIGLRALLDPDFPAKWWYVPCIDDQRGLALPRADKVLGSACFPGDPATFGSLLKTRTAAGPAVDGQAAPDRKPRTGTHRPGSAKSRSLGDGKATTNYWSDRSARDLRPADEGGHWQPTNVYWNWVRKRALLGLYSFNGLSPPSDDRP

SEQ ID NO: 302 - protein, 871 aa, unidentified
  REGION 1..871: note = Category: MG37 effectors
  REGION 1..871: note = Description: MG37-42 effector
  source 1..871: note = uncultivated organism sequence
MATAIQYPTTQRAYTLRLRGIDPQDQSWRDALWATHEAVNRGAKVFGEWLLTLRGGLDHQLADAPVKVRGGTTRLPSDEERRDRRVLLALSWLSVEDAHGAPRDASLIVAKGTDSADCRARKLADALIAILQARSVAASEIGDPSKPPEDQPGTWLGDCMGSLSAAIRDDAVWVNRSKAFDAATQSCPSLTRDEIWDFLEPFFAGAEAYLRPERAESDESESASEAAQEEKAKDLVQKAGGWLSKRMGAGGGANFQDLARAYQAIAQWASYAQPGQSGQQAVEVLAGYLSQHGFSPTANDATGVLSVIRGPGYKSATRNYIITAIAKSPAITAQNLSQLQELATKDNERCSSKIGGKGSRPYSNMILQHVEAACGFTYLQSDGAARHREFSVMLDHAARRANVAHSWIKKAEAERRQFESDARRIENVPQDALNWLRRYCEERGGASGSLEGYRIRRRAVDGWDKVVIRWSRSDCQSADDRIAAARQLQDDPEIDKFGDIQLFEALAAEEALCVWKPNGNPTAQPLKDFVAATEADAKKKRFKVPAYRHPDPLRHPIFADFGNSRWGIEYSAHRAPAQCDELRQKVDKLAAAVADAQRKLEGTKAAQRASRESKLAEAQSKLVAAQKEFAAISDPYRVELKLWNGRAVAAIPMRWSSKRLIADLSLRRATEPSSDQRIGVTRADRLGRAAGNADDGRPVTITGLFQQDHWNGRLQAPRAQLDAIAKHVDKHGWDAEARRQIARIRWVVSLSAELSQQGPWFEFCNRFGEDAPARPFVSRQGEYAVKHRDNDQRKGHAKLILSRLPGLRVLAVDLGHRYAAACAVWEAVTCEQMQHACQAAGTTSPDAQAMFVHLKCSNARGKTVTTIYRRI

SEQ ID NO: 303 - protein, 1505 aa, unidentified
  REGION 1..1505: note = Category: MG37 effectors
  REGION 1..1505: note = Description: MG37-43 effector
  source 1..1505: note = uncultivated organism sequence
MATENGKEQPNVTTQRAYTLRLSGLDKHDNTWRDRLWNTHEAVNKGAKAFGDWLLTMRGGLCHTLAEVDVPGIGKKPVCLPTRQEIKNRRIVLALSWLSVESFHGAPESLLVSHDLDMAAGERKNWKTIDALHEILRRRGLCEEQIDQWAIDCRDSLSAKIREDAVWVNRSKSFDLAKAKIRESLSREDIWDFLQPFFGNKYSYLKMKTAVTTTSEDFEADAEESKDESSEEKAKDLSQKAGQWLSSRFGTGTGADFSRFCEVYDAIANYCHNIQAGVSGTEVCGSLADALHEFSPRSMNINGILELISGPGYKSATRNVLQKINNLQSVSQLDLDRVHDASVKDAQQSREKVGGKGSRPYANAVLQDVEAACGITYHNTDNGPSHHWQYAVILDHAARRVSMAHSWIKRAEEERGKFEIEKDKLLRVPADARVWLDAFCTRRSSESGAIDSYRIRRSAIDGWKQVVAAWAALPTEAEDKDSVLPSAAESARIQKARELQDTIEKFGDIQLFEALSLPDAKCVWLTNGKPDAQPLMDYVAGTDAVSKKQRFKVPAYRHPDAFLHPVFCDFGNSRWSIDYAVHRAPEKLARAQQLLEKKKEELTRAEQALSKASDPSKRSSIEKKLKTLNVAFKQQEAEVLWLESHHAMTMGLWNGSRIEDTPLLWQSKRFGSDIGQAGAEHPLVASRADRFGRAVVMAKDNAPVVPSGLFDLADWNGRLQAPRRQLDAIAAIHDRTDLSVEEKRQLVAKRTRTIRWLVTFSAKLQSRGPFIAYAAQHGFDWRYGAHGIENKSREGLAKLVLCRLPGLRILSVDLGHRYAAACAVWETLSAAQMQNACLEAGMEVPSQRTLYSHLKHFVNGKEKKTIYRRIGADTLPDGSPHPASWARLDRQFLIKLQGEDSDARPATCDEVVAVEQLETELGYVRPIKRKGREHLVDELMSDALRTLRLGLQRHGTRARIAFNLTATKRTRPGGIQELLDQESRIGLLTETLLEWNELYAGERWADELAMDMWNKHIQPLLGGTILQETNNQDVTPSAAKRRMQREETRKKLRPVAKQIAENDSLCRQLNVLWNTRWQIEDAAWRMRLRWMRRWLLPRGINRDPQFRKSIRDVGGLSLIRIASFKSLYQVQKAYWMRPHPDDLRRNIPERGDSSLTSFGQRVLDAMERMRENRVKQLASRIAEAALGIGDETSVNAKNGRRKRPTERSNDPRFAPCHAVVIEDLTHYRPDETQTRRENRQLMSWSSSKVKKYLGEACQLNGLYLREVPPAYTSRQDSRTGAPGLRCNDVTVAEFYTSRFWRKQVEAAEKNQKDGKKGDARERYLLSIDERIRSEANDRDVFRIPVKGGEIFVSACGQDGGSNANRKAPPGLQADLNAAANIGLRAIFDPDWEGRWWYIPCDATTICPVAKKFNGCKAVDSSKPLRIVAEKVAVSSSSIDEKRSGRKGIALTDGSRIVNLWRDPSGAPIRRDVPSNSEWQDYAEYWNKVQSRVIANLRKSYGLREI

SEQ ID NO: 304 - protein, 1520 aa, unidentified
  REGION 1..1520: note = Category: MG37 effectors
  REGION 1..1520: note = Description: MG37-44 effector
  source 1..1520: note = uncultivated organism sequence
MAYQNGKEQPTVTNQRAYTLRLSGTNDQDSIWRNRLWHTHEAVNKGAKTFGDWLLTMRGGLCHTLAEADVPGKGNKPARHPTPQEIRSRRVVLALSWLSVESQHGAPERHLVSHDLDIATGERKNWKTVEALREILHGRCLCKELIDEWANDCRDSLSATIREDAVWVNRSKAFDLAAKKIGASLTREELWDFLQPFFANKHGYLQMDTVAGVTNGDSETDAEEAKEDSSEEKAKDLSQKAGQWLSSRFGTGTGADFSRFSKVYEVLAARCGSVAVGVSGVEAIRILAGTLADFSPGSNDIEGMLGLMSGPGYKSATRNILQKINTLQTVSQQDLDRLREASEKDALQSKQKVGGKGSRPYANAILQDVEAACGICYAGTGESPARHWQYAVILDHAARRVSMAHSWIKRAEEQRSKFEIEKDKLDHVPKDALAWLDAFCARRSSESGASDAYRIRRSAVDGWKQVVAAWAALPPKPENQGSELLSDAESARIQAARELQDTVEKFGDIQLFEALSLTGAKCVWQPDGRPDAQPLLDYVAGTDAISKKQRFKVPAYRHPDALLHPVFCDFGNSRWNINYAIHRAPEKLTPAQQLLEKKKAEIDKAELTLAKAGDAAKQANISEKINGLRAAFIQQQEKVAWLNSRHAMTMSLWDGTHIEDTPLIWQSKRFGSDIGQPVEAQPLPVSRADRFGRAVALAQDNVPVIPSGLFDLSDWNGRLQAPRRQLEAIAAIRDSAKLSVNEKQQLVAKRIQSIRWLLTFSAKLQSHGPFIAYAAQHGFDWRYGAHGPENKSRQGLAKLILCRLPGLRILSVDLGHRYAAACAVWETLNAGQIQKACLDAGKEAPGPCTLYLHLKQIANGKEKKTIFRRIAADTLPDGSPHPAPWARLDRQFLIKLQGEDRDARLATSEEIAAVEQMENELGVVRQLKRKGRELLVDELMSDALRTLRLGLRRHGVRARIAFNLTANKRIRPGGKEEVLDQEGRVLLLTETLLAWYELYTAERWTDEPARELWNRHIQPLLGATILQNTVNQEDTPSAAKRRKLREETSGKLKHVAEEIAKNDSLCRQLHVLWSAQWQTEDVIWRTRLRMMRRWLLPRGVKRNAQLRISIRDVGGLSLTRIASFKSLYQVQKAYQMRPHPEDPRLNIPERGDSRLENFGQRVLDAMERMRENRVKQLASRIAEAALGIGGETGISSKDGSQKKRPTERSSDPRFAPCHAVVIEDLTHYRPDETQTRRENRQLMSWSSSKVKKYLGEACELNGLYLREVSPAYTSRQDSRTGAPGLRCNDVTVVEFNNSPFWRKQVGAAEKNQKEGNKGDARERYLLSIEEGIRGAANDRDIFRIPVKGGEIFVSACITDGGNNAKKNAPPGLQADLNAAANIGLRAIFDPDWEGRWWYIPCDAATLCPDAKKFIGCKAVDPTKPLRVVAEEGAISASGIGSKKSGRKKNAATDGTRIVNLWRDPSGAPIHRDVLRSPEWQDYAGYWNEVQHRVIRNLKTCYEQTSQQEDPFVSQDADKPF

SEQ ID NO: 305 - protein, 1434 aa, unidentified
  REGION 1..1434: note = Category: MG37 effectors
  REGION 1..1434: note = Description: MG37-45 effector
  source 1..1434: note = uncultivated organism sequence
MDKQVAVTQRAYTLRLQGADPQDQSWREALWQTHEAVNKGARAFGDWLLTLRGGLDHTLADAKVKGGKGKPDRDPTNEERRDRRILLALSWLSVESAPKDGDTRKPFVTATGQDSQAIREEKVLCALRGILEKRGVRGADLEGWIKDCTPSLSAAIRDDAVWVNRSEAFDKAVDSIGSSLTRDEVWDMLERFFGSRQAYLAPAEGAEDESAEAEQEDKAKDLVQKAGQWLSSRFGTGKGADFSRMAAVYEKIADWAGKARAGMTGDAAVAGLAAALSEFSPASNDLQGVLRLISGPGYKSATRNLLNQFAARPSVAQEDLENLRDSACDDAEKCKANTGSKGQRAYADAILKDVESVCGFTYLQDGGPARHSEFAVMLDHAARRVSLAHTWIKRAEAERRRFEEDARRMDKVPASVKAWLDGFCLERSEASGALEPYRIRRRAVDGWKELVAAWSNADCRTAEDRIAAARALQDDPEIEKFGDIQLFEALADDEALRVWHKDGDSAKAPDPQLLIDYVLATDAEFKKRQFKVPAYRHPDALLHPVFCDFGNSRWDISFDVHEAVKTGGRNRKNMMVPQDPHALSMTLWTGSTVEPQRLRWQSKRLARDLALKGRQGSNAPEVTRADRLGRAAADVPARATVRIAGVFEQEDWNGRLQAPRAQLDAIAARVARHGWDDKARQMRDHLRWLITFSAKLQPSGPWLDYAAAFPDDAPAKPFVSRKGGYAVRHQDNDAREGHAKLSLSRLPGLRVLCVDLGHRYAAACAVWETLSATQVGDACRAAGREPPRDSDLYLHLKKKVKKQKKGTEVEVEETTIYRRIGADILPDGKPHPAPWARLDRQFLIKLQGEDREARKAGPAELEAVQRVEKEVGREPPDQRALRVDELMSETVRTVRLALQRHGRRARIAFNLTAHKKLLPGGREEVLTAEERIGLLADTLADWYALFTGKGWNDHWARQQWEAHITPLLQGAALPQMPHDAEDMPKARREYEADLMKRLSPVAKSLAGNESLRRQLHCLWATRWRDDDVTLQKCLRRLRDWILPRGRKAKADGAIRHVGGLSLTRIATIKSLYQVQKAFYMRPQPQDLRKNIPSKGDDALVGFGRRILDAMEHMREQRVKQLASRIAEAALGIGRVKRLAGGKDPKRPRQRVDRPCHAVVIENLTHYRPEETRTRRENRQLMSWSSSKVRKYLAEACQLHGLHLREVQAGYTSRQDSRTGAPGVRCQDVPVKQFMQSPFWRKQVAQAEKKRAEGKGDARERFLCDLNAKWNDKLEADWEKAGAVRIPLKGGEIFVSADRDSPAAKGLQADLNAAANIGLKALLDPDWPGRWWYVPCDPATFKPAEDKVAGSAAICLDKPLKNASVAQSTDRRVKKGGKTEARSREVVNLWRDVSSQPISADDNWREFAPYWNDVQARVVRILRQSAGLATDQEER

SEQ ID NO: 306 - protein, 1469 aa, unidentified
  REGION 1..1469: note = Category: MG37 effectors
  REGION 1..1469: note = Description: MG37-46 effector
  source 1..1469: note = uncultivated organism sequence
MEIPTTQRAYTLRVSGRDKNDHGWRNWLWRTHEAVNKGAKVFGDWLLTLRGGIDHSLADVKDESERTNRRIVLALSWLSVESQNGAPPKRFHVSADGTTDALAEILRLRKVSKPEIESWQRDCRASLTAATRLDAVWVNRSALFDEAAREIGKSLTRDEVWDLFDRFFGSRDAYFEGLATADEDDEEGGGAEEERAKDLAQKARGWLSNRFGSGSGADFSAIADEYDGFAKWCRWFHEHPKESIETSAKQLRKALRIDELPERLASTPGPPNRVQTTYQAIVAAISDGKRLPKEEYAELAEIADSQAEAKRKLVGRKDSKPWANKILDDVIEACRIPYRDTAAEADLINEYSVILDHAARRICMAHSWIKLAEANRQEFTKDARKLDELREYAPAAVSQLDNLCDERTKVTGAIEDYRIRRGAITDWERVVKSWSRKKCVTSADRIAAAREVQAEPENEKPGDIQLYELLAAENYLSVWKQGDKATHKTLQDYVAATDAQAKQRRFKVPAYRHPDPLLHPVFCDFGESRWSVDYSAHRAPAGRNNAHALLAKRTADLAKAREAMFKAKNAELRQKAQEKVSKLESAAAQALDDTQFMELRHGLRIKLFDGSCVDERDLVWHSKRLDSDLALRSDSSPGDELPIAVSRADRLGRAAAGANADAAVAVADLFKLKEWNGRLQAPRAQLNAIAAVRDRKRNKDLSMGDRKARVERMISRLQWLVTFSAKLQPQGPWLTFCQRLPEGFNYDPKKRRLYHKANKNRKGRAQIILARIPGLRVLSVDLGHRFAAGCAVWETLSSGDMKRACNEAGVPVPSTDDLHKVIKRDKRRTIYRRIAADRLPDGTPHPGPWVRLDRQFLIKLQGEESAARLGSPAEIAAVDRLEAELGYSRARPRTKAESSVDLLMAEAVRLVRLGIGRLKRRMRIAHQLTARQVAGMAQKKVKLDDAGRREVLTKTLRDWHDLATSRDWRDEFAVRTWQTHILPLVAGAELPEVPQLETGAARKKRLTAAEERLAPVAERLVARDVTTMREEWAHFVRAEKQLWQKRLRWLRDWLLPRKGRRNAASIRRVGGLSVLRIATLKELYQVQKAYRMLGDPDDPTKGIPQRGDDSLDRFGQRVLTAMERLRENRVKQLASRVIEAALGFGREPGSTGNKQNARSQSQTHEPCHAVVIENLKNYRPDESMTRRETRQLMAWASATVAKYLDEGCQLYGLYIRQVPAAYTSRQDSRTAAPGTRCQDVSVERFLRPHWAVVRSVNDLLPDAESAGMDFQERVTAAEKLVRSGKGNAEQRFLVELYQHSRKLPEQKRRGRSVRIPQRGGELFVSADRRSPIARGIQADLNAAANIGLKALLDPDWAGAWWYVPVDDRTYKPVEKSVAGSAALSISQALSEPPQRGDDEKERNKKKPSTRRGSSGDPQEIINLWRFVSAKELPKDKWFDYQQFQNIVRKSVIDILRAQAGIPEDRVGTQ

SEQ ID NO: 307 - protein, 1379 aa, unidentified
  REGION 1..1379: note = Category: MG37 effectors
  REGION 1..1379: note = Description: MG37-47 effector
  source 1..1379: note = uncultivated organism sequence
MKKWGKRIISGVIAASLLTAAAISGSEQGTGTVASVVQAGTETSFMGKLLEGGYIDAFTSWTQEEQNKFYDGLSPQQQSVFLEVTNCQITRELIKSERSKEELEQFFDRLQPYFLILKKGNQEKPDDEIVIECINQIEGTDYHSSEQYIKQLVSEKKDHYLEFYNALKLVKDGKLEIESAVDDFYKELGFLKKDRVPANSAEVSRQPVQVQKKAAVKAVSDGYSNFKAVSSLKALKDAVASVKKGEKIAVRVDKGFNVTSVIRTNGRHVKIYADGESGHNLNRTAGYKDVMLEVNGGSLTLGAYDGDGRAKNNLYINGKNIAASAPLIEVASGHLYLNKYSRIIDGYFLADFAGGAGIALNSGTSCYMFGGRIDNCRAKSSKDVSSSSPKSSHGGGVLVGNGSSFYMFAGSIEHCQSIHGGGIMNYGTLRLYGGAISDCAASNQKKDALGGAVKVQGAIETDGKVSSTKGDLGVWKYTRSAAWIVNGKDGYQQGTTTGVVLKNNQADAGGAICLNNGSNGAIQDCNINGNHSTGNGAGICLSNGSYKKGAALELKTGAVIHGNESKGYGGGIYCADSVKGSLSGGTMYDNSAKYGAGIYHEAEFRMSGGTVRSNHSGNSGGGIYAKGKLSMTGGEISANTAATYGGGAILKTAGGSVSGGSIKGNSASANGGGLQIDGTVSLSNASVSSNSASGKGGGISVSSSGTCNLSSGNVSGNTAKAGGGGIYIDGTCKANGSSFTGNQSSGDGGAVYIASGTFTTFQANQAVNIQGNSASGNGSGIYNRNITVLNNNAHILNNQCKNGTQRGIFHEGSLFSIEGNTEIQQEIYLAKDRFVTASNRYFSNSNSLKAKISLDTANIRNGYAVVKGNVSNSADGNYKTGEALLNNQSAGGRFVYAGSGYVMRPGNLKKSSSGCAPFSIVLSQAYQIRYDKNSKEEVMNMPTAAVKYWEEDIKLSALTPTGGSGSFVAWNTKADGTGDGYQPGNVYTANADATLFALWPHYRVEYLPGIRSAAGTTDSQEQNKSEEILLRKNGFRSSEGKFVGWKQDIYHAKKRAERESVGYAELREEKDRGKNDYLLEFSKQMRGMLTEKQLQNSNLLLDKDDIFILKALWDLKPNIILKDKQTFIENEKVDRKRILELIESCSDVEDGNLIENVKIINIKYGKTKNGWCPSEQNFPEGMNSTDVMDTYFMKLEKDESVDVEITFQVADSAGNITSAKGLVCVIYNNPPKLYSHNLAFYQEDISTKPQDILKEIQNNYNVEDIEDEKKGLKIPVSIINPSPLLIEQFNSVGKYKIVYQAVDSLGKKTNLESEVYIAENNPFKDSYKFSIRFINKKYLYTLKKESKWIKDQILNAQLTSQLEKTREDAVLRYKFKVSK

SEQ ID NO: 308 - protein, 1481 aa, unidentified
  REGION 1..1481: note = Category: MG37 effectors
  REGION 1..1481: note = Description: MG37-49 effector
  source 1..1481: note = uncultivated organism sequence
MPKQNKPPVTQRAYTLRLRGTDLNDQSWRDALWKTHEAINKGAKAFGDWLLTLRGGLDHSLVDTKVKGGKGNPDRDPTDEERKTRRILLALSWLSVESKLGAPENFIVASGEESAQDRNNKVIAALEEILKSRGVAENEIDQWKKDCSASLSAAIREDAVWVNRSKAFDEAVKSVAFSLTRDEVWDMLERFFKSPTAYLDPAKGSEHEYSETEKEEKAKDIVQNAGQWLSSRFGTGKGADFSRMAEVYEKIAVWAGNAQAGTTWNEAIRNLAAALSKFSPKTNDLQGVDGLISGTGHKSRTKNLLKVLAAKSEVTIQDLEILKNNAAEDARKCFQKKGSKGHLPYSDAILRDVESVCGFTYLQNGGPARHFEFAVMLGHAARRVSLAHTWIKRAEAERRRFEEDAKKMDNVPVKTKEWLDEFIRERSGFSGALEPYQIRRRAVDGWKEVVAAWSKAVCKTAEDRIAAARALQDDPEIDKFGDIQLFEALAADDALCVWHNEGNATNAPDPQPLIDYVLAAEAEFKKRHFKVPAYRHPDPLLHPVFCDFGKSSWDIKFAVHSFSKKRGRSNNRMTESNDLHAFSMTLWTGVRMQPVSLYWQSKRLARDLALGKYVRNEGAIAVTRADRLGRAASNTSNNDLVTIAGLFEQEYWNGRLEAPRRQLEAIARYVEKHGWDDQAEKMRDQIKWFVTFSAKLQPQGPWCAFAQKLRLSINPQYWPFADANKKRKAHAKLILSRLPGLRVLSVDLGHRYAAACAVWEALSSEEVLQACRAVGHEDPKESDLYLHLKKKVTKQKKGNPVEVEETTIYRRIGADKLPDGTPHPAPWARLDRQFLIKLQGEEEGVRQASNEEIWQVHQLEAALGRSKPLINRLISSGWGITKNQQSRIEALKKLGWCPPEQPESGDVSDADEEEITYKPPLSVDELMSSAVRTMRLALKRHGDRARIAHYLITDEKTKPGGVKEKLDANGRTEMLQDALVLWHDLFSSRSWRDDAAKQLWDEHIIKLTGDKLPEEIGEDASESERGKKKKENREKLHDAAKALAEDESLRKTLHDLWKTRWEEDDRQWKKHLRWFSDWVLPRGKAADDPAIRKVGGLSLTRLATLTEFRRKVQVGFFTRLHPDGTRAETKEQFGLSTLDALERMREQRVKQLASRIAEAALGIGSQDKRHWEGGNRPRRRINDPRFAPCHAVVIEDLTHYRPEETRTRRENRQLMTWSSSKVKKYLAEACQLYGLHFREIFAGYTSVQDSRTGAPGIRCQDVPVKEFMRSPFWRKQVKQAETKLSENKGDARERFLCSLNAMWKDKAVTDWERAGVVRLPLKGGEVFVSADPLSPAARGLQADLNAAANIGLRALTDSDWPGKWWYVPCESSSLRPVKEKVEGSPAVNPTQALPQSAQKQSDGAGAKKKRKGSGTGKPKEVVNLWRDVSSSPLDDPNAGEWKEYTAYQNEVQWRVVRILEEELKGRFQRLYEGAKEDGIPF

SEQ ID NO: 309 - protein, 1188 aa, unidentified
  REGION 1..1188: note = Category: MG37 effectors
  REGION 1..1188: note = Description: MG37-50 effector
  source 1..1188: note = uncultivated organism sequence
MPKQNKPPVTQRAYTLRLRGTDLNDQSWRDALWKTHEAINKGAKAFGDWLLTLRGGLDHSLVDTKVKGGKGNPDRDPTDEERKTRRILLALSWLSVESKLGAPENFIVASGEESAQDRNNKVIAALEEILKSRGVAENEIDQWKKDCSASLSAAIREDAVWVNRSKAFDEAVKSVAFSLTRDEVWDMLERFFKSPTAYLDPAKGSEHEYSETEKEEKAKDIVQNAGQWLSSRFGTGKGADFSRMAEVYEKIAVWAGNAQAGTTWNEAIRNLAAALSKFSPKTNDLQGVDGLISGTGHKSRTKNLLKVLAAKSEVTIQDLEILKNNAAEDARKCFQKKGSKGHLPYSDAILRDVESVCGFTYLQNGGPARHFEFAVMLGHAARRVSLAHTWIKRAEAERRRFEEDAKKMDNVPVKTKEWLDEFIRERSGFSGALEPYQIRRRAVDGWKEVVAAWSKAVCKTAEDRIAAARALQDDPEIDKFGDIQLFEALAADDALCVWHNEGNATNAPDPQPLIDYVLAAEAEFKKRHFKVPAYRHPDPLLHPVFCDFGNSRWDIKFAVHSFSKKRGLSKNSMTESNDLHAFSMTLWTGVRMQPVSLYWQSKRLARDLAFGKYVRNEGAIAVTRADRLGRAASNTSNNDLVTIAGLFEQEYWNGRLEAPRRQLEAIARYVEKHGWDDQAEKMRDQIKWFVTFSAKLQPQGPWCAFAQKLRLSINPQYWPFADANKKRKAHAKLILSRLPGLRVLSVDLGHRYAAACAVWEALSSEEVLQACRAVGHEDPKESDLYLHLKKKVTKQKKGNPVEVEETTIYRRIGADKLPDGTPHPAPWARLDRQFLIKLQGEEEGVRQASNEEIWQVHQLEAALGRSKPLINRLISSGWGITKNQQSRIEALKKLGWCPPEQPESGDVSDADEEEITYKPPLSVDELMSSAVRTMRLALKRHGDRARIAHYLITDEKTKPGGVKEKLDANGRTEMLQDALVLWHDLFSSRSWRDDAAKQLWDEHIIKLTGDKLPEEIGEDASESERGKKKKENREKLHDAAKALAEDESLRKTLHDLWKTRWEEDDRQWKKHLRWFSDWVLPRGKAADDPAIRKVGGLSLTRLATLTEFRRKVQVGFFTRLHPDGTRAETKEQFGLSTLDALERMREQRVKQLASRIAEAALGIGSQDKRHWEGGNRPRRRINDPRFAT

SEQ ID NO: 310 - protein, 1298 aa, unidentified
  REGION 1..1298: note = Category: MG37 effectors
  REGION 1..1298: note = Description: MG37-51 effector
  source 1..1298: note = uncultivated organism sequence
MPKQPKPPLTQRAYTLRLRGADSNDQSWRDALWQTHEAVNRGAKAFGDWLLTLRGGLDHSLADAKVKGKSGKPDRDPTDEERKARRILLALSWLSVESKLGAPAHCIIASGTEASEDRNRKVLAALEEILRSRGVGPDEIKAWKDDCSPSLCAAIRDDAVWVNRSKAFDEAVKSIGSSLTRDEVWDMLEHFFGGRDAYLAPAKGSEDESSETEQEDKAKDLVKKAGQWLSQRFGTGEGANFSRLAKAYEKIATWADQALSGMAGDKTMADLATALSEFNPPSNDLEGVLEQIKGRGHKSATRNLLSDIAAKATVTQQDLARLKDTATKDAQESKRKAGLKGQRPYSAAILKDVEYVCGFTYLQEGGRARHDEFAVILDHAARRVSLAHTWIKRAEAERRKFEEDAKKIGQVPKAAKDWLDQFCLERSGVSGALEPYRIRRRALDGWKEVVAAWSKSDCKTVEDRIAAARALQDDPEIDKFGDIQLFEALAADDAVCVWHKDGDAAKTPDPQPLIDYALAAEAEFKKRHFKVPAYRHPDALLHPIFCDFGNSRWDICFAVHTNVQTPSPRALSLTLWTGSEMKQVPLCWQSKRLARDLAFGQDARKDGASDVTRADRLGRAASNVGKSHVVNIAGLFKQKHWNGRLQAPRRQLEAIDRYVKKHGWDQKAENMRDAIQWSVTFSARLQPRGPWYAYAKEHGLREHPRYWPHAQENKKRKGHARLILSRLPGLRVLSVDLGHRSAAACAVWEAVTAEQVKEACQAAGQRKPEESDLYLHLKKKVTKQKKGKDVEVEETTIYRRIGADTLPDGTPHPAPWARLDRQFLIKLQGEEEGVREASNEEIWAVHQMEAALGRSVPLIDRLVASGWGATEKQKARLNTLRNLGWKPLEKAEAQEVPDGGEEMSFSPSLSVDELMSSAVRTMRLALKRHGDRARIAHYLITDEKTKPGGLKEKLDEHGRIDLLVDALVMWHGLFSSRGWRDDAARQLWDEHIAKLSGYKAPEEIGEPSSGPERRNQQKENREKLYEVAKALAQDKTLRGALHDAWKKRWEEDDGRWKRQLRWFKDWILPRGKHASNPTIRKVGGLSLSRLATLTEFRRKVQVGFFTRLHPDGTRAETQEQFGQSTLDALEHLREQRVKQLASRIVEAALGVGSEDKRHWDGKKRPRQRIADPRFAPCHAIVIEDLTHYRPEETRTRRENRQLMTWSSSKVKKYLAEACQLHGLHLREVSASYTSRQDSRTGAPGIRCQDVPVKEFMRSPFWRKQVAQAEAKQAENKGDARERFLCDLNAMWKDKTVAD

SEQ ID NO: 311 - protein, 1504 aa, unidentified
  REGION 1..1504: note = Category: MG37 effectors
  REGION 1..1504: note = Description: MG37-52 effector
  source 1..1504: note = uncultivated organism sequence
MPPGDHSPPVTQRAYTFRLRGPDPSDQSWRDALWKTHEAVNKGAKVFGDWLLTLRGGLAHTLVEARVKKKGNSKENGEDDREPTAEERKSRRILLALSWLSVESKLGAPEKFIVATGEEAAQERSRKVIGALKEILEKRGLTTSEIEQWENDCSASLSAAIRDDAVWVNRSKAFDEVVHRVGPSLTREELWDMLGLFFASPNAYLAPVTLSEEEPLGTEQEDKAKDLVKKAGQWLSSRFGTGKGADFSHIAGVYGKLAVWAHEAQAGMTGQQAIYNLIGALNEFNPSSNDLEGLLRLISGPGYKSATRNLLGQFNNKTAITQDDLKRLAETALADKVKCETNSRPKGERAYANSILHDVESACGFTYRVDKGEQPVPVSDYSHYANDYRWGPANHSEFAVMLDHAARRVSLAHTWIKRAEAERRQFEENAKKIDKVPKVAREWLDSLCAERSIVLGALEPYRIRRRAVDGWKHVVAAWSKSDCKTAQDRITAARLLQEDPEIDKFGDIQLFEALAEDHAVCVWQRDGEAGKTSDPQLLIDYALAAEAEFKKRHFKVPAYRHPEAFWHPVFCDFGQSRWKICFDVHKNRQSRRQRACANRISRKICFDVHKKRQTLRLSLEVWTGSKMLDMPLCWQCKRLARDLALGQDHKKDRSCQVTRADRLGRAVSNVARNQEVQILGLFEQEYWNGRLQAPRPQLEALGRYIEKHGWDAKAQKSCRAIRWMISFSPRLQPAGPWGKFAEKLQLNPNPKYWPHAEDNKDRGSRSKLILCRLPGLRVLSVDLGHRYAAACAVWEAVDAEQVKEACQAAGHREPNENDLYLHLKKRTTKQKKGSQGVVEETTIYRRIGADTLPDCTPHPAPWARLDRQFLIRLQGEEDEARAASNEEVWAVHKLEAELGRTIPLIDRLLGAGWGQTEKQKARLKALRELGWTPANKCQAFNSTDETELRRPSLAVDELMLDAVGTLRLALKRHGDRARIARYLITDERTKPGGVKEKLDENGRIELLQDALIIWHGLFSSPRWRDDAAKQLWNEHIAKLVGEQNLVEVSEDASGSERRTKQKQNREKLREAAKALVDDVALRQALHDMWKRRWEEEDREWRRRLRWFKDWVLPRREQARKAYSRPAETGSSSHPKRRARYAAIRRVGGLSLTRLATLTEFRRKVQVGFFTRLKPDGTKAEAKEGFGQSTLDALEHLRAQRVKQLASRIVEAALGVGRIRRFPGVKNPKRPDTPVDKPCHAIVIENLTHYRPEETRTRRENRQLMTWSSSKIKKYLAEACQLYGLHLREVTAAYTSRQDSRTGAPGLRCQDVPVKEFMRSLFWRKEVAQAEKKLTAGKGSSYERLLCELNQRWKDNSPGDGKRAELLRLPHKGGEIFVSAAPDSPAARGLQADLNAAANIGLRALTDPDWPGKWWHVPCNAVTFRPVEDKVKGSAAVKLDQSLRQVAHPQSKDPGAKKSKEIVNLWCDISSLPLEHREWKLDWEPYPAYWNNVQCRVIRVLQGKV

SEQ ID NO: 312 - protein, 1477 aa, unidentified
  REGION 1..1477: note = Category: MG37 effectors
  REGION 1..1477: note = Description: MG37-53 effector
  source 1..1477: note = uncultivated organism sequence
MPQQAKPPVTQRAYTLRLRGADPSDTSWRKALWQTHEGVNKGAKAFGDWLLTLRGGLDHTLADAKVKSGKGKPDRDPTDEERKGRRILLALSWLSVESERGAPEGYIIASGKEAAEDRNGKVVAALEDILKSRGLADTEIAEWKKDCSASLSAAIRDDAVWVNRSKAFDEAAKSVGCSLTREEVWDMLERFFGSREAYLAPAKGSEDDSSETEQEDKAKDLVQKAGQWLSSRFGTGTGADFRRMADVYGKIAAWADKAPAGMTGAKAIEDLATALRQFNPASNDLTGVLGLISGPGYKSATRNLLNQLAAQTTVTQQDLAYLKDKATDDAQKCKQNTGSKGRRPYSDAILKDVESVCGFTYLQKDGPARHSEFAVILDHAARRVSLAHTWIQRAEAERRRFEEDAQKMANVPGPVKDWLDSFCAERSQASGALEPYRIRRRAVDGWKDVVAAWSKSSCRTSADRIAAARALQDDPEIDKFGDIQLFEALAEDDAACVWHKEGDAAKSPDPQPLMDYVLASEAEFKKRHFKVPAYRHPDALLHPVFCDFGKSRWDICFDVHKNVQTPFPRAVCLTLWTGSEMKPVPLCWQSKRLARDLALGQGGQKDGTSEVTRADRLGRAASNVTKSAEVKISGLFEQADWNGRLQAPRQQLEAIAAVRDNLSLSDQERERRMSGMMDRIRWLVTFSAKLQPQGPWCEYAERHGLRTDPRYWPHADTNKDRKGHARLILSRLPDLRVLSVDLGHRYAAACAVWEAVNAEQVTEACRAAGHEAPKASDLYLHLKKKVTKQKKGKPVDVEETTIYRRIGADTLPDGAPHPAPWARLDRQFLIKLQGEEEEVREASNEEIWAVHQLEKELGRVTPLVDRLVTSGWGGTDKQKARLEKLKQLGWSPAKEDKPESDESSDDMESDGYKSSLSVDELMSSAVRTLRLGLKRHGDRARIAHCLVTDEKTKPGGIKEKLDENGRVDLLQDALVLWHDLFSSRGWRDDAARQLWDEHVAKLSGYKAPEEIVEESSGPERKKKQKENREKLYDVAKAMAQDMTLREALHDAWKKRWEEDDERWKKRLRWFKDWVLPRGKHASDPTIRKVGGLSLPRLATLTEFRRKVQVGFFTRLQPDGTRAETKEQFGQSALDALEHLREQRVKQLASRIAEAALGIGSEARKHCDQGKRPRQRIDDPRFAPCHAVVIEDLTHYRPEETRTRRENRQLMTWSSSKVKKYLAEACQLHGLHLREVSAGYTSRQDSRTGAPGIRCQDVPVKEFMRSPFWRKQIAQAEKKQAEGKGDARERFLRELNAMWKDKTVADWEKAGVIRVPVRWGEIFVSASRDSQGAKSLQADLNAAANIGLRALTDPDWPGKWWYVPCEPASFRPVKDKVDGSAVVNPDQALRRSAQAQSGDAAKDKKKRGNKGGGKSKEVVNLWRDISSSPLECIEFGEWKEYAAYQNEVQCQVIRVLKEQIEGRDKQPHEGSKEDDISF

SEQ ID NO: 313 - protein, 1011 aa, unidentified
  REGION 1..1011: note = Category: MG37 effectors
  REGION 1..1011: note = Description: MG37-54 effector
  source 1..1011: note = uncultivated organism sequence
MPQQPTTQRAYTLRLRGADPNETSWREALWQTHEAVNKGAKVFGDWLLTLRGGLDHALADTKVKGKKGKPDRDPSAEERKARRILLALSWLSVESKLGAPADFIIASGEETAEARNAKVIAALEEILRSRDVAEEAIGDVTKKPEDQPGTWIGDCAPSLTAAIREDAVWVNRSKAFDEAVKSIGSSLTREEAWDMLERFFGSRDAYLAPAKGSEDESSETEQEDKTKDLVQKAGQWLSSRFGTGKGADFCRMADVYKKIAEWADNAQADTTGNDAINNLAAFLSEFNPASNDLKGVLGLISGPGYKSATRNLLTQIAAKATVTQQDLARLKDTATEDARKCYQNTGSKGQRRYADSILKDVESVCGFTYLQEGGPARHSEFAVILDHAARRVSLAHTWIKRAEAERRKFEEDAKKIGQVPKAAKDWLDQFCLERSGVSGAQEPYRIRRRAVDGWKEVVTAWSKADCKTAEDRIAAARALQDDPEIDKFGDIQLFEALAEDDAVCVWHKDGDAAKTPDPQPLIDYALAAEAEFKKRHFKVPAYRHPDALLHPIFCDFGKSRWDICFDVHKNTKTPFPRTLCLTLWTGSEMVSVPLCWQSKRLARDLALDHGRQDLGSPKVTRADRLGRAASNVTENDEVKIAGLFEQADWNGRLQAPRQQLEAIARYVAKNGWDEKAKKMRDAIQWLVTFSAKLQPNGPWCAYAEEHNLNKDPQYWPHADTNKDRKSHARIILSRLPGLRVLSVDLGHRYAAACAVWEALSDKAFKEDLEGKKIIRGGTSDNSLYCHTEHEVNGKKHITIYRRIGADTLPDGTPHPAPWARLDRQFLIKLQGEEEGVREASNEEIWQVHQMECTLGRKTPLIDRLVAAGWGSTEKQKARLDALKNLGWKPVEKAETSEDADTEEEELSFRPSLSVDELMSSAVRTMRLGLKRHGDRARVAYYLITDEKTKPGGIKEKLDENGRIDLLQDALVIWHDLFSSRGWRDDAAKRLWDENIARLCGYKAPEEIGENA

SEQ ID NO: 314 - protein, 1461 aa, unidentified
  REGION 1..1461: note = Category: MG37 effectors
  REGION 1..1461: note = Description: MG37-55 effector
  source 1..1461: note = uncultivated organism sequence
MPQQPTTQRAYTLRLRGADPNETSWREALWQTHEAVNKGAKVFGDWLLTLRGGLDHALADTKVKGKKGKPDRDPSAEERKARRILLALSWLSVESKLGAPADFIIASGEETAEARNAKVIAALEEILRSRDVAEEAIGDVTKKPEDQPGTWIGDCAPSLTAAIREDAVWVNRSKAFDEAVKSIGSSLTREEAWDMLERFFGSRDAYLAPAKGSEDESSETEQEDKTKDLVQKAGQWLSSRFGTGKGADFCRMADVYKKIAEWADNAQADTTGNDAINNLAAFLSEFNPASNDLKGVLGLISGPGYKSATRNLLTQIAAKATVTQQDLARLKDTATEDARKCYQNTGSKGQRRYADSILKDVESVCGFTYLQEGGPARHSEFAVILDHAARRVSLAHTWIKRAEAERRKFEEDAKKIGQVPKAAKDWLDQFCLERSGVSGAQEPYRIRRRAVDGWKEVVTAWSKADCKTAEDRIAAARALQDDPEIDKFGDIQLFEALAEDDAVCVWHKDGDAAKTPDPQPLIDYALAAEAEFKKRHFKVPAYRHPDALLHPIFCDFGKSRWDICFDVHKNTKTPFPRTLCLTLWTGSEMVSVPLCWQSKRLARDLALDHGRQDLGSPKVTRADRLGRAASNVTENDEVKIAGLFEQADWNGRLQAPRQQLEAIARYVAKNGWDEKAKKMRDAIQWLVTFSAKLQPNGPWCAYAEEHNLNKDPQYWPHADTNKDRKSHARLILSRLPGLRVLSVDLGHRYAAACAVWEALSDKAFKEDLEGKKIIRGGTSDNSLYCHTEHEVNGKKHITIYRRIGADTLPDGTPHPAPWARLDRQFLIKLQGEEEGVREASNEEIWQVHQMECTLGRKTPLIDRLVAAGWGSTEKQKARLDALKNLGWKPVEKAETSEDADTEEEELSFRPSLSVDELMSSAVRTMRLGLKRHGDRARVAYYLITDEKTKPGGIKEKLDENGRIDLLQDALVIWHDLFSSRGWRDDAAKRLWDENIARLCGYKAPEEIGENASGVERKTKQKENREKLHGVAKALAQDVTLRKALHDAWKKRWEEDDGRWKKQLRWFKDWVLPRGKHASDPTIRKVGGLSLTRLATLTEFRRKVQVGFFTRLHPDGTRAETGEKFGQSALDALEHLREQRVKQLASRIVEAALGIGRMKRPAKGKDPKRPEVRVDEPCHAIVIEDLTHYRPEEVRTRRENRQLMDWASSKVKKYLSEACQLHGLHLREVSAAYTSRQDSRTGAPGIRCEDVPVKDFLNLPFWKKEVKSAESKDDAQSKYFIALCEKASVMTEEEKKKTSFRIPRRGGEIFVSADETSPASKGLQADLNAAANIGLRALTDQDWPGKWWYVPCDPVSFLPVKDKVEGSKAVKLDQPLLAQEQSGDGAKDKKKRGKKGAGKSKEVVNLWRDVSSREISPEDVAWEYYSAYQNKVQSRVISILKEQMKDRDRQPHEGSKEDDIPF

SEQ ID NO: 315 - protein, 1284 aa, unidentified
  REGION 1..1284: note = Category: MG37 effectors
  REGION 1..1284: note = Description: MG37-56 effector
  source 1..1284: note = uncultivated organism sequence
MPSRTSPRAYTMKLAPVSSAGADDWQLPLVRTHEKFNAAVRYWADFLLTLCGGFRPADVPAPEGDGQDRMQTRYRRIFLALSWLRVESQDPLNEDYRVRPDQLRDMLAEILTDRGLDAQVIGSWQEECSQIFSSPIRPEACWVNRARMFDERFRGLSDAERAQIFSDVIFRFVGADVYWAPPEEDAGGRARNDYIKPARAWLSERTGTGKGRDFARIAENKERIAGWAATAPAGLGIQQLRQDLAAAMGWETSLEAFRNGITHVQSNGPPPRSVRLLRDLADGMPIDLRELEKACREEADRDRKKVGRKGRTPWAERLWAEYCTRIQAPLQIDFNAPALSEAAIRVFSNWSWIKRSVSEREQASSGRELISQVPLEARTFLDEYCQRRAEETGAIAQFRIRRRAIAGWEDIVRAWSQEACRTLDDRQAAVAAAQADTPESFGDARLFLDLAADQARCVWQPYGTPDHHILVRYVQAREAEAVYMARKVPMFRHPDPWRHPAFVQFGNSRPRVRYVRPADSPDGRGLVELQLVDAGSGKLRYVRFRWRSKRVLKELLGADQGQVSTGAPPVPRIHRLALAAAGIASPEHASVKVFEGKAEWNARLQFPRGRHGRSTPGRSWLLTLSAQLSPLQKAAPAPATDPRGQGARLRFSRQPEGLRILGVDLGQKAAAACAVWETVSRESLERECRLRRVCAPSPEDLHFEIPDECGRQRHYRRIASDFLPDGQTPHPSPWARLERLFLIRLPGEDEAARPLLKHENEEIARFGGQIGFGPLRERRVDKQMRHCLREARLYLRRLGNLAKLSWDLQHSEWGRSAERWLDLARTDTPLGRWSAQMWREATGEPPPVGGAGGRAGSSPPADASRLLEARLAGKGAIWAETVAARFEEERQLARELVRWLRRWVAPQGTRGKANRSVGGVSMLRINNLTDLYRVEKMWATLPQPDLKDSRTVPQEFCAKLLLIRDQLRETRVRLIASRILEAAVGLGMEPERRKGEPLARRLAAPPPDPRHRRCDVIAIENLSGYGTSDSRPRRENRGLMNWSKERIRKRLLEGAELLGLRVEEVLPNYTSRQDFRTGAPGIRGRMVKAGRLAQLKTWERLLQRAADRNDPVAQYVRTLASNLERIPDSAMVFVPEDGGDIFVPDTDASPAGGIHADMNAAANIGLKAVLDPDWAGAWWYVPVRPDTGRPDTAERLRGCRAPGLDRMRVDLPGSGDPIRNAWRHPSSQPLHLSQWQPYAEYWENVKRAALRRQLERLFSSPSFAASPTGPRTWPAAPLTDPSQL

SEQ ID NO: 316 - protein, 1142 aa, unidentified
  REGION 1..1142: note = Category: MG37 effectors
  REGION 1..1142: note = Description: MG37-57 effector
  source 1..1142: note = uncultivated organism sequence
MSQQTQLPPTQRAYTLRLRGTDFFDWSWRDALWHTHEAVNRGAYKFGDWLLTLRGGLDHSLANARGKGKSKDNQSVCELTNEERRTRRILLALSWLSVESMLGAPEQFIVATGQEAAKDRSAKVIKALEGILSKRGLEEKEIEEWKNDCAASLSADIRDDAVWVNRSEAFDEAVKRIGSSLHREEVWDMLERFFGSRNAYFAPAKNAESENESGKAQQEEKAKDLVQKAGQWLSSRFGTGKGANFSRMAKVYGKIVGWADMAPQNVNGSNAIASLAESLSEFTPAPNDLPDVLGLISGPGYKSATRELLKKIADKDNVTQADIEALRKKAASDVEKCNQNTGSKGQKAYSDAILNDVECACGFTYLQKGDSARHSEFAVMLDHAARRVSLAHTWIKRAEAERSKFEEDAKKINQIPKPAKDWLDQFCLERSGALGALEPYRIRRRAIDGWKEVVTAWSKKDCKTTEDRIAAARALQDDPEIDKFGDIQLFEALAADDAQCVWLKDDGTPNPQILIDYTLATEAQFKKRIFKVPAYRHPDPLLHPVFCDFGCSRWKIDFSMREAATKLSVVEAKLKKKQVAVQNAEQLLEKCRGQGERQNKAEERLREAQEELQKVQRELEYLRSPQLLKMTLFNSTELKEYVLGWQSKRLFKDLVVEKQASNDNSKKITRADRLGRAAGNASVDSPIEILHIFEEQEWNGRLQAPRQQLEALARYVKKHGWDSKAEKMRDNIKWLITFSARLQPQGPWCEYAREKNSFGLKDDPKFWPHTATNKTRKGLAQIILSRLPGLRVLSVDLGHRYAAACTVWESLSTEVFRKDIEGRKILCGGTDANALYCHTEHETNGKKHTTIYRRIGADTLPDGTPHPAPWARLDRQFLIKLQGELEGTREASNKEIWTVHQMEAAFGRAQPLIDRLVAAGWGNTEKQKSRLEALKNLGWVSVSQNEILGELDVEEQTNRYEPSLSVDELMLSAVRTLRLGLKRHSDRAKIAHYLITDEKTKPGSVKEKLDENTRIELLQNALVIWHNLFSSRAWNDGAAKKLWDEHIVKLSGHTTPDDISEDSPENKGTIKQKEKQKKLYDVAKALSQELAIRKFLYNAWRKRWEEDDEMWKKELRWFKDWVLPPAKILLVRKSSVVYSFSG

SEQ ID NO: 317 - protein, 1479 aa, unidentified
  REGION 1..1479: note = Category: MG37 effectors
  REGION 1..1479: note = Description: MG37-58 effector
  source 1..1479: note = uncultivated organism sequence
MSQQVKPPVTQRAYTLRLRGIDPSDTSWRKALWQTHEGVNKGAKAFGDWLLTLRGGLDHTLADTKVKGGKGKPDRDPTDEERKARRILLALSWLSVESKLGAPVGFIIASGTEAAEDRNRKVVAALEEILKSRNVATNEIDQWKNDCSASLSAAIRDDAVWVNRSKAFDEAVKSIGSSLTREEAWDMLERFFGSRDAYLAPAKGSEDESSETEQEDKAKDLVQKAGQWLSSRFGTGKGADFCRMANVYGKIAAWADNAQADTTGNDAINNLAAALNEYSPEPNDLKGVLGLISGPGYKSATRNLLNQLAAKATVTQQDFVSLKDKASNDAQKCKQNTGSKGPRPYSDAILKNVESVCGFTYLQDGGPARHSEFAVILDHAARRVSLAHTWIKRAEAERRKFEEDAKKIDQVPKAAKDWLDSFCLERSGASGALEPYRIRRRAVDGWKEVVAAWSKADCKTAEDRIAAARALQDDPEIDKFGDIQLFEALAEDDAVCVWHKDGDAAKPPDPQPLIDYALAAEAEFKKRHFKVPAYRHPDALLHPVFCDFGNSRWDICFDVHKNVQTPFPRALSLTLWTGSGMVSVPLCWQSKRLARDLALGQNAQNDGSSEVTRADRLGRAASNVTKSDEVKISGLFEQEDWNGRLQAPRQQLEAIAAVRDNLSLSDQERERRMSGMIDRIRWLVTFSAKLQPQGPWCEFAEKIQIGINPQYWPHADTNKDRKGHARLILSRLPGLRVLSVDLGHRYAAACAVWEAVNAEQINVACRAAGHREPKASDLYLHLKRKTTKQKKGDQVEFKETTIYRRIGADTLPDGTPHPAPWARLDRQFLIKLQGEEEGVRAASNEEIWAVHRLEVELGRTAPLIDRLVKAGWGQSGKQKTRLDALRNLGWAPANEVQGSDEMDEGEVHKPSLSVDELMSSAVRTMRLALKRHGDRARIAFAMTAAYKPMPGDRKYYFTEAKDASANEDATARNGKHIEFIQDALLLWYGLTSSRGWRDDAARQLWDDHIAKLSVYKAPEEIGEDASGVERKTKQKENREKLHDVAKALAQDVNLRKVLHNAWKKRWEKDDERWKKQLRWFKDWVFPRGKHASDPAIRKVGGLSLPRLATLIEFRRKVQVGFFTRLQPDGTRAETKEQFGQSALDTLEHLREQRVKQLASRIVEAALGIGRVRRPLGGKDPKRPDVRVDEPCHAIVIEDLTHYRPEETRTRRENRQLMTWSSSKVKDYLSEACQLHGLHLREVSASYTSRQDSRTGSPGIRCQDVPVKEFMRSPFWRKQVAQAEKKGDAHERFLCELNAMWKDKTVADWEKAGAVRVPLKGGEVFVSADRISPSAKGLQADLNAAANIGLRALTDPDWPGKWWYVPCEPASFRPAKDKVDGSAVVNPGQPLRQSAQAQSGDAAKDKKKRGNKGAGQSKEVVNLWRDISSSPLECIECGEWKEYAAYQNEVQYRVIRILEEQIKGRDRQPHEGSREDDIPF

SEQ ID NO: 318 - protein, 1518 aa, unidentified
  REGION 1..1518: note = Category: MG37 effectors
  REGION 1..1518: note = Description: MG37-59 effector
  source 1..1518: note = uncultivated organism sequence
MTELQTQRAYTLRLKGIDEKDQSWRDALWKTHEAVNKGAKVFGDWLLTLRGGLDHTLADAEIPGEKGKPDRAPTQEERKHRRILLALSWLSVESERGAPEEFIVATGKEPAATRNDKVIAALKDILRGRNLTEEKISEWTEVCTPSLSAAIREDAVWVNRSRAFDEAVKRIGSSLTREEVWDMLECFFGSRNAYLAPVKISEDESSDGEQEEKAKDLVQKAGQWLSSRFGTGEGADFAKMAAVYAKIAAWAGNAQAGTTGNEVINNLATALREFTPKSNDLKGVLDLISGPGYKSATRNLLKQIANTKTVTREDISKLQETAGEDSEECATKTGSKGKRAYADAILKDVESVCGFTYRIDKDGQPVSVADYSKYDEDYKWGSSRHKEFAVMLDHAARRVSLAHTWIKRAEAERRKFEEDSKKIMQVPQAAKDWLDAYCAQRSEASGALEPYRIRKRAIQGWKEIIASWNKPDCKTAEDRIAAARQLQDDPEIEKFGDIQLFEALAEDDAQCVWKKEDGTLDPEILINYTLASEAMFKKQHFKVPSYRHPDAFLYPVFCDFGNSRWELDFSIREAATKLKEIEAKIEKQRQEVHKVQQALEKCENDEKRPKMEERLKEAQKKLQESQNYGEYLHSNNKITMVLFDGTFVKKHIFAWQSKRLTKDLALYQEPSADPKNVVSRADRLGRAVASVGINDAVKVAGLFEQENWNGRLQAPRQQLEAIAQYVEKHGWDNKAEKMRASIKWFITFSAKLQSKGPWNEFARKHGLKEDPHYWPHAEKNENRTAHSRLILSRLPGLRVLSVDLGHRYAAACAVWEALGSEAFKKDIEGKRIIRGDTDENALYCHTEHEANGKKHITIYRRIGADTLPDGAHHPAPWARLDRQFLIKLQGEDEQAREASNEEIWKVHQLENTLGRRTPLIDRLIAGGWGYTEKQKARLEVLTNLGWCPTNKTDNQEEGDEEETAILSKPSLLVDDLMFSAVRTLRLALKRHGDRARIAHYLITDEKTKPGGVKEKLDKNGRVELLLDALGLWHDLFSSPGWHDEKAKQLWNAYIAGLLPEGELQQAKSVTTSAALGGQQKKEKKEKLRAVAEALYLNSDLCHSLNEVWRKRWEEDDKQWRIYIRWFKDWIMPRGANAKSPAIRHVGGLSLTRLATLTEFRRKVQVGFFTRLHPDGTKTETREDFGQKTLDTLEHLREQRVKQLASRIVEAALGIGSEDKRHWDGKKRPRQRIADPRFVPCHAVVIENLTHYRPEETRTRRENRQIMEWASSKVKKYLSEICQLHGLHLREVSAAYTSHQDSRTGAPGIRCQDVSLIEFMKSPFWRKQVAQAEKKQKEGKGDAVERYLCELNQKWKGASEEEWRKAGFVRIPLRGGEIFVSAAGHDSPAAKGIHADLNAAANIGLRALLDPDWSGKWWYVPCNSSTMCPARDKVTGSAAVNPGQPLQVSAQLESDDAAKDTKKRKKKGDGKSKEIINLWRDISSYPLEDTRGGTWSNKTVYWNRVQSNVVHILQNQMKG

SEQ ID NO: 319 - protein, 766 aa, unidentified
  REGION 1..766: note = Category: MG37 effectors
  REGION 1..766: note = Description: MG37-60 effector
  source 1..766: note = uncultivated organism sequence
MVTGARWPLSPKKSLSDLSAVRGQDHILSRIPGLRVLSVDLGHRYAAACAVWEAISTRQFQQNIEGKKILRGGTDAESLYCHTEHTTDGKKHTTIYRRIGADTLPDGTPHPAPWARLDRQFLIKLQGEEEDSREASNEEIWQVHQMEVELGRRTPIIDRLVASGWGTTERQKARLATLKNLGWKPVEVAGAQEDADAEEEETSFRPSLSVDELMSSAVRTMRLALKRHGDRARIAHYLITDEKTKPGGIKENLDENGRIELLQDALVIWHDLFSSRGWRDDAAKRLWDEHIARLCGYKAPEEIGENASGVERKTKQKENREKLHGVAEALAQDVTLRKALHDAWKKRWEGDDGRWKKQLRRFRDWVLPRGKHASDPTIRKVGGLSLPRLATLTEFRRKVQVGFFTRLHPDGTRAETKERFGQSALDALEHLREQRVKQLASRIAEAALGIGRMRRPVGGKDPKRPDVRVDEPCHAIVIEDLTHYRPEETRTRRENRQLMTWSSSKVKKYLAEACQLHGLHLREVAASYTSRQDSRTGAPGIRCQDVPVNEFMRSPFWRKQVKQAEAKQAENKGDARERFLCDLNTMWKDKTVADWEKAGVIRVPVRGGEIFVSASQDFQGAKSLQADLNAAANIGLRALTDPDWPGKWWYVPCEPASFRPVKDKVDGSAVVNPDQPLRQSAQAQSGDAAKDKKKRGDKGAGKSKEVDNLWRDISSSPLEWIEFGEWKEYAAYQNKVQSRVIRILEEQIKGRDKQPHEGSKEDDIPF

SEQ ID NO: 320 - protein, 758 aa, unidentified
  REGION 1..758: note = Category: MG37 effectors
  REGION 1..758: note = Description: MG37-61 effector
  source 1..758: note = uncultivated organism sequence
NRHSYLEMDTVASATNGDSETDTEESKAASSDEKAKDLSQKAGQWLSSRFGTGPGADFSRFSKVYEVLATACRSIAPEVSGVEAINRLAIAIKKCSPSSNDIEGILGLISGPGYKSATRNILQQINRLQSVSEQDLSRLCDACEKDASQSRQKVGGKGSRPYADAILQDVERTCGICYARTEDHPSRHWQYAVILDHAARRVSMAHSWIKRAEEQRSKFEIEKNKLLRVPRDALAWLAAFCAKRSSDSGANDAYRIRRSAVDGWKQVVAAWAALPAKSEIAGSELRSDAERARIQVARELQDTVEKFGDIQLFEALAIREAKCVWMPDGKPDAQPLLDYVFGTDAIAKKQRFKVPAYRHPDAFLHPVFCDFGNSRWSIDYAVHRAPGKLTKARQLLEKKSAEISKAELALGKMDDALRHAAISETLQNLRAAYKQQQAEVAWLKTLQAITMGLWDGNGIQDTQLLWRSKRFGANIGQPDAVHPSPVSRADRFGRAVALAEDNVPVIPSGLFDLPEWNGRLQAPRRQLEAIAAMRDSAKLSAGEKQQLVAKRIHSIRWLVTFSAKLQSHGPFITYAEQHGFDWRYGMHGFENKSRQGLAKLILCRLPGLRILSVDLGHRYAAACAVWETLSTGQIQKSCGVAGMEAPGPRTLYLHLKQIVDGKEKKTIYRRIGADTLPDGSPHPAPWARLDRQFLIKLQGEDRDARPATSEEIAAVEHMENELGVVRQLKRKGRELLVDELMSDTLRTLRLGLRRHGER

SEQ ID NO: 321 - protein, 952 aa, unidentified
  REGION 1..952: note = Category: MG37 effectors
  REGION 1..952: note = Description: MG37-62 effector
  source 1..952: note = uncultivated organism sequence
PAYRHPDPLLHPVFCDFGCSRWQICFDVRKNVRTTSPRRLCLTLFTGSGMELVPFSWQSKRLARDLALEQRHRNPEASEVTRADRLGRAAAGVSAGGAVSIKNIFNEENWNGRLQAPRSQLAAIAARVDKHGWDAKALRMLDRLRWLITFSPRLEPTGPWIEYALRIPDDAAAKPFLSRKNGFAVLHRSNDDRKGLAKLILSRLPGLRVLSVDLGHRYAAACAVWETLSADQVREACQAAGHDGPTECDLYLHLKKDGRTVIYRRIGADTLSDGTPHPAPWARLDRQFLIKLQGEEHKAREASNAEIWAVHQMEAALGRSVPLIDRLVASGWGQRTEGQRARLEALKQLGWRPVTKKSASDDESQWQAACHEGVTPEAEKSASDDEYKPSLSIDELMSSAVRTMRLALKRHGDRARIAHYLITDEKTKPGNVKEQLDENGRIELLQDALVLWHDLFSSKGWQDNKAKELWYVHIATLPEYKAFQSSGEGHAGPERRGKPEEDREKLGVVAQALAPNVTLREALHNAWKKRWEEDDARWKALLRWCKDWILPRGEAANSPAIRKVGGLSLIRLATLTEFRRKVQVGFFARLRPDGKKAETGEKFGRKTLDALEELREQRVKQLASRIAEAALGIGKEHVFPTAKEPQKKCWCGSVHRKKDPKRPRERVHSPCHAVVIENLTHYRPEETRTRRENRQLMSWSSGKVKKYLAEACQLNGLHLREVNAAYTSRQDSRTGAPGIRCQDVPVKEFMRSPFWREQVAQAKKKQAEGKGDARERFLCDLDEQWKNRSEDEWKKAGPVRVPLQGGEIFVSADGTSPAAKGLHADLNAAANIGLCALTDPDWPGRWWYVPCDPASFKPIKDKVEGSAAVKPDQALRQPAQAQRGDAARDRKKRGKVGGRSREVVNLWRDVSSRPISPNDSWQEFTPYWNDVQARVVNILRQSAGLTRGQGEP

SEQ ID NO: 322 - protein, 1018 aa, unidentified
  REGION 1..1018: note = Category: MG37 effectors
  REGION 1..1018: note = Description: MG37-63 effector
  source 1..1018: note = uncultivated organism sequence
PESARIQKARELQDTIEKFGDIQLFEALSLPDAKCVWLTNGKPDAQPLMDYVAGTDAVSKKQRFKVPAYRHPDAFLHPVFCDFGNSRWSIDYAVHRAPEKLARAQQLLEKKKEELTRAEQALSKASDPSKRSSIEKKLKTLNVAFKQQEAEVLWLESHHAMTMGLWNGSRIEDTPLLWQSKRFGSDIGQAGAEHPLVASRADRFGRAVVMAKDNAPVVPSGLFDLADWNGRLQAPRRQLDAIAAIHDRTDLSVEEKRQLVAKRTRTIRWLVTFSAKLQSRGPFIAYAAQHGFDWRYGAHGIENKSREGLAKLVLCRLPGLRILSVDLGHRYAAACAVWETLSAAQMQNACLEAGMEVPSQRTLYSHLKHFVNGKEKKTIYRRIGADTLPDGSPHPASWARLDRQFLIKLQGEDSDARPATCDEVVAVEQLETELGYVRPIKRKGREHLVDELMSDALRTLRLGLQRHGTRARIAFNLTATKRTRPGGIQELLDQESRIGLLTETLLEWNELYAGERWADELAMDMWNKHIQPLLGGTILQETNNQDVTPSAAKRRMQREETRKKLRPVAKQIAENDSLCRQLNVLWNTRWQIEDAAWRMRLRWMRRWLLPRGINRDPQFRKSIRDVGGLSLIRIASFKSLYQVQKAYWMRPHPDDLRRNIPERGDSSLTSFGQRVLDAMERMRENRVKQLASRIAEAALGIGDETSVNAKNGRRKRPTERSNDPRFAPCHAVVIEDLTHYRPDETQTRRENRQLMSWSSSKVKKYLGEACQLNGLYLREVPPAYTSRQDSRTGAPGLRCNDVTVAEFYTSRFWRKQVEAAEKNQKDGKKGDARERYLLSIDERIRSEANDRDVFRIPVKGGEIFVSACGQDGGSNANRKAPPGLQADLNAAANIGLRAIFDPDWEGRWWYIPCDATTICPVAKKFNGCKAVDSSKPLRIVAEKVAVSSSSIDEKRSGRKGIALTDGSRIVNLWRDPSGAPIRRDVPSNSEWQDYAEYWNKVQSRVIANLRKSYGLREI

SEQ ID NO: 323 - protein, 798 aa, unidentified
  REGION 1..798: note = Category: MG37 effectors
  REGION 1..798: note = Description: MG37-64 effector
  source 1..798: note = uncultivated organism sequence
QAARKLQDTIEKFGDIQLFESLSLPDAKCVWLTNGKPDAQPLMDYVAGTDAVSKKQRFKVPAYRHPDAFLHPVFCDFGNSRWSIDYAVHRAPEKLARAQQLLEKKKEELTRAEQALSKASDPSKRSSIEKKLKTLNVAFKQQEAEVLWLESHHAMTMGLWNGSRIEDTPLLWQSKRFGSDIGQAGAEHPLVASRADRFGRAVAMAKDNAPVVPSGLFDLADWNGRLQAPRRQLDAIAAIHDRTDLSVEEKRQLVAKRIRTIRWLVTFSAKLQSRGPFIAYAAQHGFDWRYGAHGIENKSREGLAKLVLCRLPGLRILSVDLGHRYAAACAVWETLSAAQMQNACLEAGMEAPSQRTLYLHLKHFVNGKEKKTIYRRIGADTLPDGSPHPASWARLDRQFLIKLQGEDRDARPATCDEVVAVEQLETELGYVRPIKRKGREHLVDELMSDALRTLRLGLQRHGARARIAFNLTATKRTRPGGIQELLDQESRIGLLTETLLEWNELYAGERWADELARDMWNKHIQPLLGGTILQETNNQDVTPSAAKRRMQREETREKLRPVAKQIAENDSLCRQLNVLWSTRWQIEDAAWRMRLRWMRRWLLPRGINRDPQFRKSIRDVGGLSLIRIASFKSLYQVQKAYWMRPHPDDLRRNIPERGDSSLTSFGQRVLDAMERMRENRVKQLASRIAEAALGIGDETSVNAKNGRQKRPTERSNDPRFAPCHAVVIEDLTHYRPDETQTRRENRQLMSWSSSKVKKYLGEACQLNGLYLREVPPAYTSRQDSRTGAPGLRCNDVTV

SEQ ID NO: 324 - protein, 917 aa, unidentified
  REGION 1..917: note = Category: MG37 effectors
  REGION 1..917: note = Description: MG37-65 effector
  source 1..917: note = uncultivated organism sequence
QLFEALAADDAIVVWQSDGKADPLKDYVAAKAAEDRLHRYKVPAYRHPDPLLHPVFCEFGCSRWTIKFGIHQAWQALAQARAELTKAKGILASARSEDEKMKANVRVPKAQRRQEFEQARAAQRLTMDLWTGNDIKTTEMRWQSKRMPGDLAFATALSDSPVFLPRADRLGRAAGGAALSDAPAVSGLFEQNEWNGRLQAPRPELEAIARCQDPHRKTRLRSRLNWLITFSAELQPQGPMIAFAAAHDLQIRNSPLSTAKFLHVNEPRLSTNEGRKGYARFTLPPLSGLRVLSVDLGHRYAAACAVWETISETRLAELCKAAGHRPPQPKDMALHLPGQRNGKKVKTIFRRTGPAMWARLDRQFTIKLQGEDKPSRKASTHEFEAVVRFEKELGRTRSDENPLPHDVMRLMAEAVRSARLGLRRHGDRARIAFNLTTKTKLLPGGRTEKLTPETSVELLQDTLVLWHNLRNSPTWQDDFAESCWNESIAPLLENVVLPEPPVEGAAAQTVKAFRRTLRDKLKPAAQNLAGNPQLRQKLHTLWATRWRKDDEAWRGRLRWLRDWLLPRGKAKSDASIRHVGGITLTRLATIRGLWQTQKAFALRPDPDDLRRNVPKRGASSERFGQRVLDALDHLRENRIKQLASRIVEAALGIGKEQPKVNRRDPKRPRSQVHSPCHAVVIEDLKNYRFADSRPRRENRQLMQWSARNVRRYLAEACQLYGLHLCEVFAGYTSRQDSRTGAPGCRATDLPVPDFLKRYDRLVKNAEGEERKFLEALKARWDGCTDRSKLVRILDRAGKLFVSADESSPAVKGIQADLNAAANIGLRALLDPDWPGKWWWVPCGKDGKPAEKECKGTRAFDLNLQLLPATECRGKDIVNAWRDVSADPIVPGKGMSYAEYWNRVKARVVVNLRRQAGL

SEQ ID NO: 325 - protein, 1078 aa, unidentified
  REGION 1..1078: note = Category: MG37 effectors
  REGION 1..1078: note = Description: MG37-66 effector
  source 1..1078: note = uncultivated organism sequence
RAEAERSRFEEDAKKVDQVPEAAKDWLNNFCLERSGLSGAQEPYRIRRRAVDGWKEVVTAWSKADCKTAEDRIAAARALQDDPEIDKFGDIRLFEALAEDDAVCVWHKDGDAAKAPDPQPLIDYALAAEAEFKKRHFKVPAYRHPDALLHPIFCDFGKSRWDICFDVHKKVQTPFPRALCLTLWTGSGMNTVPLCWQSKRLARDLALGQDAQNDGSSEVTRADRLGRAASSVAKSDEVKISGLFEQADWNGRLQAPRQQLEAIAVVRDNLSLSDQERERRMSGLMDRIQWLVTFSAKLQPQGPWCKYAQDQKLGLNIDPQYWPHAGENKNRKGQARLILSRLPGLRVLSVDLGHRYAAACAVWEAVSTETFRKEINGKNILRGGSGKDDLYCHTKHDAESKKHTTIYRRIGADTLPDGEPHPAPWARLDRQFLIKLQGEEEGAREASNEEIWAVHQMEIALGRSVPLIDRLVAAGWGCTERQKSRLEELKKLGWKPLPAAEPTGDESGEDEGADVYKPSLAVDELMSSAVRTMRLALKRHGDRARIAHYLIADKKTKPGGIKEKLDENGRIELLQDALVLWRDLFSSRGWRDDAAKQLWDDDITRLSGYKAPEKIGEDVSGVERKKKQKENREKLRDVAKALAQDVTIRGKLHDAWKKRWEEDDGRWKKQLRWFNDWIFSRGKAADNSTIRKVGGLSLTRLATLTEFRRKVQVGFFTRLHPDGARAETKEQFGQSALDAIENLREQRVKQLASRIAEAALGVGRMKRPRGGKDPKRPDIRVDEPCHAVVIEDLTHYRPEETRTRRENRQLMTWSSSKVKKYLAEACQLHGLHLREVSASYTSRQDSRTGAPGTRCQDVPVKEFMRAPFWRKQVAQAEKKQAESKGDSRERFLCGLNAMWKDKAVADWEKAGAVRVPLKGGEVFVSADRISPSAKGLQADLNAAANIGLRALTDPDWPGKWWYVPCEPASFRPVKDKVDGSAVVNPDQPLRQSAQAQSGDAAKDKKKRGNKGAGKSKEVVNLWRDISSSPLECIEFGEWKEYAAYQNEVQCQVIRILEEQIKDRDRQPHEGSKEDDIPF

SEQ ID NO: 326 - protein, 793 aa, unidentified
  REGION 1..793: note = Category: MG37 effectors
  REGION 1..793: note = Description: MG37-67 effector
  source 1..793: note = uncultivated organism sequence
RKEKVVAAFREILKTRLKPNVAQAEIESWVADCAESLAAQIRKDAVWVNRSAIFDRATAGWDEASARSDAHTLLSHVLSDEYLTLPTAKKSQKKNTDANDDEDQEEQEQRQSAVKASSKGAGDRTRHPFSHIFREGKPFGGAKSLVLVERWWSYLKPLVEAAGISLPPRGKAKLKGGDELQREMFSKAASRVAQIVTKQRQQEADRLERKKADAALRLMEEDESFNAALTALRTYCDDYRVMSGATGEFLLRPRQVGTGWDRVVRRWSAISEADPERAREARVEAVKEIQDSDEDKKFGDANLFFRLAEDRFTTVWCPDGNPHNADPTILDRFVKGMKARSDSERLKVAAFRHPDPYRNPIFCQFGVSRPKIHFGRLKTFTDDHAGNDPRAVGMLLWHPVSNSAKLTLLHGVSQRLDREIGAARDQVQQNTEELRAVSRRGRLGAAAGGLPNADSPARVAGVFDLKTITHRATDEEQEDADNERPETGKLKEPKWNGTLSADRRELEAIRKLIDKGDMQKANRCRQQLRWTLTVSMKMEGRGPWITFASKWEEAHGHKYQPFGAFATNDKLKGRNRLFRWQWDRDARDFVVNLTKPFENPTDAKGRDGHARLILSRLPGLRLLSVDLGHRFAAACAVWEASPLSVLKKEIKNREIIAGGTGTHDLYCHTRHIDEHRKERTTIYRRVGTDKLDDGSAHPASWARLDRQFFIKLQGEQWPARMASEAEYEYVQRLESELGRVRGNNNQLPWRVDDLMSEAVRSARLALGRHGDAARIAYAFKPDSVLLTPGGGSA

SEQ ID NO: 327 - protein, 1101 aa, unidentified
  REGION 1..1101: note = Category: MG37 effectors
  REGION 1..1101: note = Description: MG37-68 effector
  source 1..1101: note = uncultivated organism sequence
RTSSSFASDEYLIRRRAIDGWERVVKAWAQLGDEATRQQRIDAAREIQSNLDDNEKFGDIQLFAGFGDDDADEPRPCLADEAAVVVWLTEAGKPDPDILENYSAATVAAHNRRRFKVPAYRHPDPLRHPVFVDYGNSRWGISYSALRESQARAKLKEKLNSAATDSARQKLQEQLQALPELRSVTLDLWTGQQVESVPFRWHGKRLWKDLDLDHFGEPAANTATRADRFGRAVAGQPQAAVSIAEVFGQKDWNGRLQAPRRELDHLADLVYGKRADADFDKLARLTSGSAPHRARKALENLHWFLTTSAKLKPQGPWLDYVARGLPDGVEYRSGRNGPYLNYVVNKDRKGRARLELARLPGLRVLSLDLGHRYAAACTVWETLSTAQMEAACKAAGRPLPQADEPFIHTKQPTEALQKSGRRKGQPVTKTTIYRRIGPNLLPDGTEHPAPWARLDRQFLLKLPGEDHPARFATRTEFADFNRLRLVAGLREDTAQVIENRPDCVNRRVDQLQVDAVRITQLGLRRLGNLARVAYILTAATKPLAGGQSSTPLSREERVDYVLDALVRWQELAQSTEYTNKWAKELWSDQWAKDLWSEWVQGHFGGPQLVDVSGDTPRSERQRRSEDSRNRLRSVAEQLAAPNGAANCELHRLWSTKWQSRSDKWRVQLRWLRRIILPRIGPRPSGTDAEAHVRRRQHARAIRQMGGLSLRRLKTIRDLYQVLKAFHMRPEPDNLRKNVPEPGDDSLLNFGRRILDQLERLREQRIKQLASRIVEAALGVGSENRREHWNGRRRPSQPIADARFAPCHAVVIENLENYRPEDTRLRRENRQLMTWAARNVRKYIVEGCQLNGLHFVEVSPTYTSRQDSRTGAPGVRCEDLPRTAFANAVEVFRGNPPSSPESSTHSHREVSYIVSLLRKAEDKRNRGEPVSAREQVALSLAERIDDVPPHCGVIRLPRNGGEVFVSANPTSPSSQGLQADLNAAANIGLRALGDPDWLGSWWYLLVDAATGIPVTERIQGSTVWTERVTTSVLAHVADGQSGRRRGTKKERTAVYAFSPWHLSWGQIDRDGVWTTTKNYWPEVERRVADLLISRQTEPETPW

SEQ ID NO: 328 - protein, 840 aa, unidentified
  REGION 1..840: note = Category: MG37 effectors
  REGION 1..840: note = Description: MG37-69 effector
  source 1..840: note = uncultivated organism sequence
SVDLALDDLAVSDAVPVTLGSRFGRAALPSVLPVSVLNVFDEGDWNGRLQVPRSQLERIASLLAKNKVAAAKEFRQKLRWSLTFSPRLQPTGPFHDFAAQHGITPNRKGEYFPNGEQNRITKREGKAKLVLSRLPGLRLLSVDLGHRFAAACAVWESLSGPDFAKEIFGLTIESGSAEGLYLHTRHMDESGKERSTIYRRIGSDALPDGSDHPAPWARLSRQFLIKLQGEERSARKAAPTEIYSVRELEAGFGRVSEKDDLPTQVDELMSHTIRVSRLALRRHGDRARIAFAMISSYKPMPGDRKYNFFPNDTSDGFDDTPEQRHRKHIEFIQDALLLWHDLISSKGWQDQAAEQLWKQHIATLLGYQHPEPINRDGSGPERKKKRNENFDRLRGAAEALINNAPLRLTLNAEWKGRWESDDQDWRSHLRRLQDWARPPASKGSQAIRHVGGLSLTRLATLTEVRRKVQVGFFTRLLPNGDKARIGERFGQKTLGVIEEMREQRVKQLASRITEAALGIGRVQPGTKHDPRRPRVRVDLPCHAIVIESLRNYRPDDLQTRRENRALMEWSSGKVRKYLEEACYLYGLHLREVPPNYTSRQCSRTGLPGIRCADVPIEQFRAAPFWRKIVDSARKRISQNKGTEEDRFFCDLDETYGNDVNPQAGRVATLRLPRKGGDLFVSAPVWAQLNRKDQYGNDRVSARPNDWSSKRALQADLNAAANIGLRALLDPDFPGTWWYVPCTARDGRATQDKVKGSSCFVAENWRILSVSERSATKREVVNAWHDPSTCSLSNRLDWRETTHYWNTVRARAVEALRQFNGLPRSNSAPVHNSLESALRER

SEQ ID NO: 329 - protein, 1130 aa, unidentified
  REGION 1..1130: note = Category: MG37 effectors
  REGION 1..1130: note = Description: MG37-70 effector
  source 1..1130: note = uncultivated organism sequence
VMLDHAARRVSIAHSWIKRAEAERRRFEADAKRLDTVPDKAAAWLDAFVQERSGSVGGEYRIRRRAIEGWDDVLKRWGRADCKTADDRIAAAREVQADPEIEKFGDIQLFEALAADDAQCVWRLNGKVDPSPLRDYVLGHDASFRKRRFKVPAYRHPDPLRHPVFCEFGNSRWSIEYSAHKAHSKLGKVRDTVKKKKESLDKTCAQLKKARSAARPNPERIARLEARIATIRDDLQNAQKEADRLASHRGVRMRLWDGNDTVLHDLKWSSKRLVADLAIDVQHTSHPTGVTRADRLGSSASGATGDVAILNVFDEKHWNSRLQAPRAELDRIARLEDKGETRRAESLKRRLRWLITFSPRMLPYGPFIDYAARFADDAPARPVVSYNGEYIIKHADSDKRKGHAMLILSRLPGLRVLSVDLGHRFAAACAVWETLSITDFKKEVEGCDIAAGGSGEHDLYLHTLHTDVRGKQRKTIYRRIGPDVLSDGKQHPAPWARLDRQFLIKLQGEEMPARAALPAEMEFVRRLEADLGRSRDANNPLPRRVDELMSEAVRSLRLGLARHARRAKIAWALDPATRSVLGMGGAETAFRPGDENHVKLLVNALFDWHSLASDHKWSDDAARGLWNKHIVPLDDAWEINPPHLNADNRDNITRQQRRKDDETLRKRLKPIAQSLAASDRAQIHKAWCERWQRDDGMPADRSRGAPATGWHARLRQVHDWIVGRRCPGSDAPSHSWKKHVGGLSLTRLSTMRSLYRLHKSFAMRPRPDKPRGAPEKGETNAGVAKSLLDAMERMREQRVKQLASRIVEAALGVGRMKPAAGRDRKRPRSRVDEPCHAVVIESLRHYRPDELRTRRENRALMNWSASKVRKRLEEACQLYGLYLREVPASYTSRQCSRTGLPGVRCADVPVTEFLSAPWWSKAISAAKKKIDGRSTNAEARLLVDLHEKWSAANPHDRQGCTVRVPRNGGDLFVAAPPRRCASSRGSNDAATSALQADLNAAANIGLRALLDPDFWGRWWYVLCDAATGKPARDKYAGSACIDLDKQLLPPQAKADSAVRKRGRKGGGDRINAWRDVAAENGLDPAKGWQVHTAYWNDVKARVVSALRRVNGLPIPEDASSADLASQAGRG

SEQ ID NO: 330 - protein, 1282 aa, unidentified
  REGION 1..1282: note = Category: MG37 effectors
  REGION 1..1282: note = Description: MG37-72 effector
  source 1..1282: note = uncultivated organism sequence
VWVNRSKAFDAFDEAVKSIDRSFVWDMLERFFGSREAYLAPEKGVEDEAAEVEQEDKAKDLVQKAGQWLSNRFGTGKGADFSRMATVYQKIAEWAGKDQPERAGKEAIADLAAALNAASNDLQGVLGLISGPGYKSATRNLLKQYNEKPLLTTQDFKNLQKKATDDECKCREKTDSKGRRPYADAILKDVESACRFTYQQDGGRARHSEFAVMLDHAARRVSLAHTWIKRAEAERRRFEEDAKRMANVPGPAKEWLDTFCQERSGVLGALEPYRIRRRAVDGWKEVVTAWSKCSCRNSEDRIAAARALQDDPHIEKFGDIQLFEALADDDAARVWHKDGDCAKPPDPQPLIDYVLANDAESKKRRFKVPAYRHPDALLHPVFCDFGKSRWDIKFAVHEARKNTACKNKKKNVMRNDDSHALSMTLWTGSTVEPRLLRWQSKRLMHDLALTQDKQDGTAREVTRADRLGRAATGMRADDAVSIAGIFEQNDWNGRLQAPRAQLDAIAARVAKHGWDAKARQMRDRLHWLITFSAKLQPSGPWFEYAAQFPDDAPAKPFVSHKGDYAITHQSTGKRNYHAKLILSRLPGLRVLSVDLGHRYAAACAVWHTLSKKDFENDLRDKRIVRGGIGENDLFCHAEYERNGKTYTVVYRRIGADSIESVDKETNEVRTASHPAPWARLERQFLIKLQGEDTEARKAGPAEVAAVQELDKAVGRKPPDRRSLRVDDLMSEAVRTMRLALQRHGRRARIAFSLTAKKKLLPGGREESLTHEGRVALLADTLADWYALFTGKGWDDEWAKQQWETHFTPLLHGTALPQSPGDAEATPKARKQYQADLTERLKPVAESLAKNGSLCWKLHCLWATRWRENDVALRKHLRWLRDWILPRGKAKNDKAIRHVGGLSLTRIATIKSLYQAQKAYHMRPDPEDLRKNIPSKGDDTLRHFGRRILDVMEHLREQRVKQLASRIAEAALGIGIEHSAARKTPRRPRQRLYWKDEQGNEHGDRRFAPCHAVVIENLTHYRPEETRTRRENRQLMSWSSSKVKKYLAEACQLNCLHLREVQAGYTSRQDSRTGAPGVRCQDVPVKEFMQSPFWRKQVAQATKKLAEGKGNARERFLCDLNAKWKDKSEADWEKAGVVRLSLKGGEIFVSADANSPAAKGVQADLNAAANIGLKALLDPDWPGRWWYVPCDAKTFKPAKDKVGGSAAIDPYEPLKNALTAQDTDGPKKKRGKARKQNREYANLWRDVSSQPISADDGWRESTPYWNDVQKRVVDILRQSAGLA

SEQ ID NO: 331 - protein, 489 aa, unidentified
  REGION 1..489: note = Category: MG37 effectors
  REGION 1..489: note = Description: MG37-73 effector
  source 1..489: note = uncultivated organism sequence
MKAQGRVNSPAALRRLEQVLNQLRELHDACLYQWRLAENNHEPKWFDANRQQKELTLMRAHSPEHDNVLRRLQDNVIRHTAARWNKYLKDENTGRPRYKTGRFRTIALDSPQGRVIRFTATGKPVLHINSLPAIRLLTSQQIPSDRQPRAVRITLKGRMIHVRLSYQFELPERLEPTLATSPVGVDLGIALSMATSTGQTFRSPKQAYLQTQERKARRKLSKVIAAAMATGTAGFRAALDADGRQRLTKKGRPMRQLVWSSGKPTKSYLKARRRLSAITERLALLRREFRHRVTTSLIEKAAAEGRDLLAMENLQVKNMTASARGTVEKPGRNVRAKSGLNRAILQEAWGETLTMLEYKAERAGIASVRVYAQATSITCSCCGHRDPKSRTSQSRFKCTACDYQANADFNASLNIADRGMLYFQKRKGLSIEDLRQARRDESHSGGTEGPETGPAGHPASQTSQESPINASASVLTRRDPAQAESFAIF

SEQ ID NO: 332 - protein, 438 aa, unidentified
  REGION 1..438: note = Category: MG37 effectors
  REGION 1..438: note = Description: MG37-74 effector
  source 1..438: note = uncultivated organism sequence
MSDAVDPHLTEPYGPRTSSCATELICRDCGYRTPLLDRAFKCPACGEGLDIDYDYDRAKQLIEGRPVEGRPWNLWRFEELLPITGRRAQSRVGAFAGKTPLIHAERLGAELGLSNLYLKDDSTNRPSLSYKDRVVGMAIARLLELGKDEVGCVSTGNVGTAVASLAAQAGATPYIFYPGNMEKGKAKACRAMGAQVIQLDANYDQANRACRELAITTGMEFANITLRPFYAEGAKTMAFEVVEELGWKAPDHFVIPAAGGTLSSRVHKGLLELEKVGLAETAGSKINIAQASGCSPIATAIGAGGGEIVPQTPETAAHSLAIGAPGDGALVVDAVVSRNGSGATASDEEIFEAIDLLGATEGILTEPAGGTTIASTAKLAQEGRIAPDETVVAVISGNGLKTLHEHPEKSWPEMVPCEVGAMEEMLNDFRQAAAAALH

SEQ ID NO: 333 - protein, 497 aa, unidentified
  REGION 1..497: note = Category: MG37 effectors
  REGION 1..497: note = Description: MG37-75 effector
  source 1..497: note = uncultivated organism sequence
MQNCQVRTIKAQGRVNSRAALSRLEQVLDQLRELHDACLYQHRLAEKNHEPKRFDVNRQQKELTLLQADSPEQNNLLRRLQGNVIRHTAARWNKYLKESATGRPRYKTSRFRTIALDSPQGKVMRFTASGKPVLHISSLPAIRLLTSQEILDDRQPRAVRITLKGGRIQVRLSYQFEVRERQDPTLATSPIGVDLGIALSVATSTGQTFQSPKQLYLQAQERKYRRKLNRIVASAMATGTAGFRAVLDADGSQMLTRKGRPMRELVWTSGKPAKAYLKARRRLSEITERLALLRREFRHRVTTSLIEKAAAEGRDLLAMEDLQVRNMTASARGTVEKPGRNVRAKSGLNRAILHEAWGETLTMLEYKAERAGIPSVRVNAQATSITCSCCGHKDPKSRNSQSSFKCTACHYQANADSNASLNIADRGMLYFQKRKGLSIESLRQARRDAGLSGGTEGPDTGPAGQPASQNNLESPTNASKSALTGPDRGKTESLAIF

SEQ ID NO: 334 - protein, 1489 aa, unidentified
  REGION 1..1489: note = Category: MG37 effectors
  REGION 1..1489: note = Description: MG37-76 effector
  source 1..1489: note = uncultivated organism sequence
MPDEALVNGSTAGTDRVVVTQRAYTLRLQGVDPQDHSWRDALWKTHEAVNKGAWAFGDRLLTLRGGLDHALADAKVEGGKGKPDRDPTDEERKARRILLALSWLSVESEKGAPEKYLVPHDLDKQSGARSNWKTVDALKEILKGRGLGKSEIESWVQDCSSSLSAPIRDDAVWVNRSKAFDDAVKSVGCSLTRDEAWDMLERFFGSRDAYLAPAKGSEDESSETEQEDKAKDLVQKAGQWLSSRFGTGKGADFSRMATIYEEIANRAGKAQPGMTGDKAIADLATALSKFSPPSNDLQGVLGLISGPGYKSATRNLLLDRFRDKTPVTQEDFQNLQDKAREDAQKCKNKTGSKGHRPYADAVLRDVESVCGFTYLQDGGSARHSEFAVMLDHAARRVSLAHTWIKRAEAERSRFQEDAKKVDQVPEAAKKWLNNFCLERSRAAGALEPYRIRRRAVDGWKEVVAAWSKPDCKTTEDRIAAARALQDDPEIDKFGDIQLFEALAEDDAVCIWHKDGDPANPPDPQPLLDYVAATDAEFKKRHFKVPMYRHPDELLHPVFCDFGNSRWNICFDVHKNTKTPFPRTLCLTLWTGSEGMKPVPLRWQSKRLARDLAFGQDTRKDGASDVTRADRLGRAASNVGKNDAVNIAGLFEEKHWNGRLQAPRRQLEAIARYVEKHGWNEKAKNMRDAIQWSVTFSAKLQPKGPWCAYAKEHGLRKDPQYWPHTEVNKDRKGHARLILSRLPGLRVLSVDLGHRYAAACAVWEAISTRQFQQNIEGKKILRGGTDAESLYCHTEHTTDGKKHTTIYRRIGADTLPDGKLHPAPWARLDRQFLIKLQGEAEGAREASNEEIWAVHEMETVLGRSVPLIDRLVAAGWGSTEKQKARLDAIKKLGWVPIKRADASEDADTEEEEELAFRPSLSVDDLMSSAVRTMRLALKRHGDRARIAFAMTAAYKPMPGDHRYYFTEAKDLSANEDATARNSKHIEFIQDALLLWYGLISSRGWRDEAARQLWDDHVAKLHGYKAPEEIGEDVSGAEREKKQKENREKLYDVGKALAQNESLRKTLHHAWKTRWEEDDGRWKKQLRWFKDWILPRGKKYASDPSIRKVGGLSLTRLATLTEFRRKVQVGFFTRLKPDGTRAETKEQFGQSTLDALEHLREQRVKQLASRIVEAALGIGSENKQHWEGGKRPRARSKDPRFAPCHAVVIEDLTHYRPEETRTRRENRQLMSWSSSKVKKYLAEACQLHGLHLREVSAGYTSRQDSRTGAPGIRCHDVPVKEFMRSPFWRKQVAQAEKKQDEGKGDARERFLCDLNAKWKGQPEADWEKAGAVRVPLKGGEIFVSADQNSPAAKGLHADLNAAANIGLRVLTDPDWPGKWWYVPCDPDSFLPVKDKVEGSAVVKPDQPLPKSAQAQSGDGAKDKKKPGKRGASKSKESKKVVNLWCDISSSPLECREWKEYAAYQNEVQSRVIHILEKQIKRLRQATARGVQ

SEQ ID NO: 335 - protein, 1379 aa, unidentified
  REGION 1..1379: note = Category: MG37 effectors
  REGION 1..1379: note = Description: MG37-77 effector
  source 1..1379: note = uncultivated organism sequence
MKKWGKRIISGVIAASLLTAAAISGSEQGTGTVASVVQAGTETSFMGKLLEGGYIDVFTSWTQEEQNKFYDGLSPQQQSVFLEVTNCQITRELIKSERSKEELEQFFDRLQPYFLILKKGNQEKPDDEIVIECINQIEGTDYHSSEQYIKQLVSEKKDHYLEFYDALKLVKDGKLEIESAVDDFYKELGFLKKDRVPANSAEVSRQPVQVQKKAAAKAVSDRYSNFKAVSSLKALKDAVASVKKGEKIAVRVDKGFNVTSVIRTNGRHVKIYADGESGHNLNRTAGYKDVMLEVNGGSLTLGAYDGDGRAKNNLYINGKNIAASAPLIEVTSGHLYLNKYSRIIDGYFLADFAGGAGIALNSGTSCYMFGGRIDNCRAKSSKDVSSSSPKSSHGGGVLVGNGSSFYMFAGSIEHCQAIHGGGIMNYGTLRLYGGAISDCAASNQKKDALGGAVKVQGAIETNGKVSSTKGDLGVWKYTRSAAWIVNGKDGYQQGTTTGVVLKNNQADAGGAICLNNGSNGAIQDCNINGNHSTGNGAGICLSNGSYKKGAALELKTGAVIHGNESKGYGGGIYCADSVKGSLSGGTMYDNSAKYGAGIYHEAEFRMSGGTVRSNHSGNSGGGIYAKGKLSMTGGEISANTAATYGGGAILKTVGGSVSRGSIKGNSASANGGGLQIDGTVSLSNASVSSNSASGKGGGISVSSSGTCNLSSGNVSGNTAKAGGGGIYIDGTCKANGSSFTGNQSSGDGGAVYIASGTFTTFQANQAVNIQGNSASGNGSGIYNRNITVLNNNAHILNNQCKNGTQRGIFHEGSLFSIEGNTEIQQEIYLAKDRFVTASNRYFSNSNSLKAKISLDTANIRNGYAVVKGNVSNSADGNYKTGEALLNNQSAGGRFVYAGSGYVMRPGNLKKSSSGCAPFSIVLSQAYQIRYDKNSKEEVMNMPTAAVKYWEEDIKLSALTPTGGSGAFVAWNTKADGTGDGYQPGNVYTANADATLFALWPHYRVEYLPGIRSAAGTTDSQEQNKSEDILLRKNGFRSSEGKFVGWKQDISSARKRMELEPVGYKELKEEREKGKLNHILDFAESYKKVNSSENLDNINSLLDVEDIFFMEGQWDSKPDIILNDKKTFLENEKIKKNDLLKVVKGCYDEEDGELTKKVQIIKLDYTKSMKGYRPETQNFSGGMNDTDVMDTYFMKLEKDETVEVKVTFQAEDSVGNVAEKEGTVCVTYNNPPKLHSQNLAFYQKDIDNNPQTILKEIFENYQVEDIEDDKKGLKVPVSVIDPIPLQIEKLNSVGEHKIVYQAIDSLGKKTKLDSIVYIAENNPFKDSYKYNVRFINKKYLYTLKESSKWKKNEELNAQLTSQLEKTKEDAELKYEFEIKK

SEQ ID NO: 336 - protein, 437 aa, unidentified
  REGION 1..437: note = Category: MG37 effectors
  REGION 1..437: note = Description: MG37-78 effector
  source 1..437: note = uncultivated organism sequence
MSDAVDPHLTEPYGLRTRSCATELVCRDCGYRTPLLDKAFKCPACGEGLDIDYDYELAKKRIAERPAAERPWNIWRFEELLPILNLRAQQRVAQFAGKTPLIHAERLGAELGLSNLYLKDDSTNRPSLSYKDRVVGMAIARLLELGKDEVGCVSTGNVGTAVASLAAQAGARPYIFYPGNMEKGKAKACRAMGAQVIQLDANYDQANRACRELALETGMEFANITLRPFYAEGAKTMAFEVVEELGWQAPDHFVIPAAGGTLSSRVHKGLVELEKVGLAETTGSKINIAQASGCSPIAAAIVGGGEIEHQTPETAAHSLAIGAPGDGNLVVDAVRSRSGSAATASDEEIWNAIDLLGTTEGILTEPAGGTTIASTARLAQEGKIGPDETVVAIISGNGLKTLHEHPEKDWPEGVPCEVGAMERLLNDFRQAAATALH

SEQ ID NO: 337 - protein, 431 aa, unidentified
  REGION 1..431: note = Category: MG37 effectors
  REGION 1..431: note = Description: MG37-79 effector
  source 1..431: note = uncultivated organism sequence
MTEGRGDRRTRSCATELVCRGCGYRAPLLETAFRCPGCDLGLDIEYDYERAKSLISEVGLGERPQNIWRFEELLPIVSGVARARVAQFAGQTPLIRAERLGAELGLHNLYVKDDSTNRPSLSYKDRVVGMAVARALEIGAGEIGCVSTGNVGTATASLAAAAGLKPYVFYPANLERAKARGCRALGAQVCQVDGNYDEANRACRELTEATGIPFANISLRPFYAEGAKTLAYELVESLGWRSPDHVVMPAAGGTLSSRVHKGLVELETLGLAATAATKLHVGQPTGCSPIATTIVEGAEEIVPQQPETLAHSLAIGAPGDGDLVVEAVRSRGGTAAAVPDGEILEAMELLAATEGVLTEPAGGTTVAATMKLAQRGVIDPDAVTVIVISGNGLKTLSEQPVKPWPEGVPCNATTMEEVVVEFREGGVTSRT

SEQ ID NO: 338 - protein, 1379 aa, unidentified
  REGION 1..1379: note = Category: MG37 effectors
  REGION 1..1379: note = Description: MG37-80 effector
  source 1..1379: note = uncultivated organism sequence
MKKWGKRIISGVIAASLLTAAAISGSEQGTGTVASVVQAGTETSFMGKLLEGGYIDVFTSWTQEEQNKFYDGLSPQQQSVFLEVTNCQITRELIKSERSKEELEQFFDRLQPYFLILKKGNQEKPDDEIVIECINQIEGTDYHSSEQYIKQLVSEKKDHYLEFYDALKLVKDGKLEIESAVDDFYKELGFLKKDRVPANSAEVSRQPVQVQKKAAAKAVSDRYSNFKAVSSLKALKDAVASVKKGEKIAVRVDKGFNVTSVIRTNGRHVKIYADGESGHNLNRTAGYKDVMLEVNGGSLTLGAYDGDGRAKNNLYINGKNIAASAPLIEVTSGHLYLNKYSRIIDGYFLADFAGGAGIALNSGTSCYMFGGRIDNCRAKSSKDVSSSSPKSSHGGGVLVGNGSSFYMFAGSIEHCQAIHGGGIMNYGTLRLYGGAISDCAASNQKKDALGGAVKVQGAIETNGKVSSTKGDLGVWKYTRSAAWIVNGKDGYQQGTTTGVVLKNNQADAGGAICLNNGSNGAIQDCNINGNHSTGNGAGICLSNGSYKKGAALELKTGAVIHGNESKGYGGGIYCADSVKGSLSGGTMYDNSAKYGAGIYHEAEFRMSGGTVRSNHSGNSGGGIYAKGKLSMTGGEISANTAATYGGGAILKTVGGSVSGGSIKGNSASANGGGLQIDGTVSLSNASVSSNSASGKGGGISVSSSGTCNLSSGNVSGNTAKAGGGGIYIDGTCKANGSSFTGNQSSGDGGAVYIASGTFTTFQANQAVNIQGNSASGNGSGIYNRNITVLNNNAHILNNQCKNGTQRGIFHEGSLFSIEGNTEIQQEIYLAKDRFVTASNRYFSNSNSLKAKISLDTANIRNGYAVVKGNVSNSADGNYKTGEALLNNQSAGGRFVYAGSGYVMRPGNLKKSSSGCAPFSIVLSQAYQIRYDKNSKEEVMNMPTAAVKYWEEDIKLSALTPTGGSGAFVAWNTKADGTGDGYQPGNVYTANADATLFALWPHYRVEYLPGIRSAAGTTDSQEQNKSEDILLRKNGFRSSEGKFVGWKQDISSARKRMELEPVGYKELKEEREKGKLNHILDFAESYKKVNSSENLDNINSLLDVEDIFFMEGQWDSKPDIILNDKKTFLENEKIKKNDLLKVVKGCYDEEDGELTKKVQIIKLDYTKSMKGYRPETQNFSGGMNDTDVMDTYFMKLEKDETVEVKVTFQAEDSVGNVAEKEGTVCVTYNNPPKLHSQNLAFYQKDIDNNPQTILKEIFENYQVEDIEDDKKGLKVPVSVIDPIPLQIEKLNSVGEHKIVYQAIDSLGKKTKLDSIVYIAENNPFKDSYKYNVRFINKKYLYTLKESSKWKKNEELNAQLTSQLEKTKEDAELKYEFEIKK

SEQ ID NO: 339 - protein, 446 aa, unidentified
  REGION 1..446: note = Category: MG37 effectors
  REGION 1..446: note = Description: MG37-81 effector
  source 1..446: note = uncultivated organism sequence
MSTTTTQSLARGSRKRTRSCATGLRCHRCDLSYALEESVFACPQCGKGLDITYDYELAARRFEEVPRETRARNIWRFEELLPIVDASAQARVGSHGGYTPLIRADRLGAELGIANLYLKDDSTSRPSLSYKDRVVAMSVARLLELGRTEMGCVSTGNVGTAVASYAAKAGADAYVFYPNRLEDTKARACAAMGAKVCQVEGNYDEANRRCREVAESTGMEFANITLRPFYAEGAKTEAFEIVEQLEWKAPEHIITAAAGGTLSSRLHKGLGELQLLGLAETDSTRIHIAQPSGCNPISAAILAEEAEIRPITPETAAHSLAIGAPGDGYLVIDAVLKRGGTGGFASDPEIFAGVDLLAATEGLLTEPAGGTTVAVLHKMAAEGRFGADEVVVAIITGNGLKTLDDHPDKPWPAKIECELDAMLEALEELKSTAALRDRALEALAHR

SEQ ID NO: 340 - protein, 435 aa, unidentified
  REGION 1..435: note = Category: MG37 effectors
  REGION 1..435: note = Description: MG37-82 effector
  source 1..435: note = uncultivated organism sequence
MSDAHLGGPGGPRTSSCATELVCRDCGYRTPLLDTAFKCPACGEGLDIAYDYERAKSLIAERGLGERPQNIWRFEELLPITSRAAQQRVGQFSGHTPLIHAERLGAELGLKNLYLKDDSTNRPTLSYKDRVVSMAVARLLELGKDEIGCVSTGNVGTAVAALAAKAGATAYIFYPGNMEKGKAKACRALGAQVCQLDGNYDQANRACRELSLASGIEFANITLRPFYAEGAKTMAFEVVEELGWQAPDHFVIPAAGGTLSSRVHKGLNELETVGLAETAGTRINIAQAGGCGPIATAILGGGEIEPQTPDTAAHSIAIGAPGDGALVLDAVRTRGGSAAMATDAEIFGAIDLLGATEGLLTEPAGGTTIAATARLASEGKIGAEETVIAVISGNGLKTLQDHPEKEWPEMVACDVETMGAQLAEFRQAAAAGVAR

SEQ ID NO: 341 - protein, 1379 aa, unidentified
  REGION 1..1379: note = Category: MG37 effectors
  REGION 1..1379: note = Description: MG37-83 effector
  source 1..1379: note = uncultivated organism sequence
MKKWGKRIISGVIAASLLTAAAISGSEQGTGTVASVVQAGTETSFMGKLLEGGYIDVFTSGTQEEQNKFYDGLSPQQQSVFLEVTNCQITRELIKSERSKEELEQFFDRLQPYFLILKKGNQEKPDDEIVIECINQIEGTDYHSSEQYIKQLVSGKKDHYLEFYNALKLVKDGKLEIESAVDDFYKELGFLKKDRVPANSAEVSRQSVQVQKKAAAKAVSDGYSNFKAVSSLKALKDAVASVKKGEKIAVRVDKGFNVTSVIRTNGRHVKIYADGESGHNLNRTAGYKDVMLEVNGGSLTLGAYDGDGRAKNNLYINGKNIAASAPLIEVTSGHLYLNKYSRIIDGYFLADFAGGAGIALNSGTSCYMFGGRIDNCRAKSSKDVSSGSPKSSHGGGVLVGNGSSFYMFAGSIEHCQAIHGGGIMNYGTLRLYGGAISDCAASNQKKDALGGAVKVQGAIETDGKVSSTKGDLGVWKYRRSAAWIVNGKDGYQQVTTTGVVLKNNQADAGGAICLNNGSNGAIQDCSINGNHSTGNGAGICLSNGSYKKGAALELKMGAVIHGNESKGYGGGFYCADSVKGSLSGGTMYDNSAKYGAGIYHEAEFRMSGGTVRNNHSGNSGGGIYAKGKLSMTGGEISANTAATYGGGAILKTAGGSVSGGSIKGNSASANGGGLQIDGTVSLSNASVSSNSASGKGGGISVSSSGTCNLSSGNVSGNTAKAGGGGIYIDGTCKANGSSFTGNQSSGDGGAVYIASGTFTTFQANQAVNIQGNSASGNGSGIYNRNITVLNNNAHILNNHCKNGTQRGIFHQGSLFSIEGNTEIQQEIYLAKDRFVTASNRYFSNSNSLKAKISLDTANIRNGYAVVKGNVSNSADGNYKTGEALLNNQSAGGRFVYAGSGYVMRPGNLKKSSSGCAPFSIVLSQAYQIRYDKNSKEEVMNMPTAAVKYWEEDIRLSALTPASGSGAFVAWNTKADGTGDGYQPGNVYTANADATLFALWPHYRVEYLPGIRSAAGTTDSQEQNKSEDILLRKNGFRSSEGKFVGWKQDISSARKRMELEPVGYKELKEEREKGKLNHILDFAESNKKVNSSENLDNINSLLDVEDIFFMEGQWDSKPDIILNDKKTFLENEKIKKNDLLKVVKGCYDEEDGELTKKVQIIKLDYAKSMKGYRPETQNFSGGMNDTDVMDTYFMKLEKDETVEVKVTFQAEDSVGNVAEKEGTVCVTYNNPPKLHSQNLAFYQKDLDNNPQTILKEIFENYQVEDIEDDKKGLKVPVSVIDPIPLQIEKLNSVGEHKIVYQAIDSLGKKTKLDSIVYIAENNPFKDSYKYNVRFINKKYLYTLKESSKWKKDEELNAQLTSQLEKTKEDAVLKYEFEIKK

SEQ ID NO: 342 - protein, 437 aa, unidentified
  REGION 1..437: note = Category: MG37 effectors
  REGION 1..437: note = Description: MG37-84 effector
  source 1..437: note = uncultivated organism sequence
MSDAVDPHLTGPDGPRTRSCATELICRDCGYRTPLLDTAFKCPACGEGLDIDYDYERAKRRIEERGLEGRPGNVWRFEELLPITNLRAQQRVAQFAGKTPLIHAERLGAELGLSNLYLKDDSTNRPSLSYKDRVVGMAIARLLELGKDEVGCVSTGNVGTAVASLAAQAGARPYIFYPGNMEKGKAKACRAMGAQVIQLDANYDQANRACRELALTIGMEFANITLRPFYAEGAKTMAFEVVEELGWQAPDHFVIPAAGGTLSSRVHKGLVELEKVGLAETAGSKIDIAQASGCSPIATAIVGGGEIEPQMPETAAHSLAIGAPGDGALVVDAVRSRSGSAATASDDEIWNAIDLLGTTEGILTEPAGGTTVAATARLAQEGKIGPDETVVAVISGNGLKTLHEHPEKDWPEGVPCEVGEMERLLNDFRQAAATALH

SEQ ID NO: 343 - protein, 437 aa, unidentified
  REGION 1..437: note = Category: MG37 effectors
  REGION 1..437: note = Description: MG37-85 effector
  source 1..437: note = uncultivated organism sequence
MSDAADPHLSEPYGLRTNSCATELACRDCGYRTPLLDRAFKCPACGEGLDVDYDYELARKRIEDRPPAERPSNIWRFEELLPILNRRAQQQVGAFAGKTPLIHAERLGAELGLSKLYLKDDSTNRPSLSYKDRVVGMAIARLLELGKSEVGCVSTGNVGTAVAALAAQAGATPYIFYPGNMEKGKAKACRALGAQVIQLDANYDQANRACRELAITTGMEFANITLRPFYAEGAKTMAFEVVEELGWQAPDHFVIPAAGGTLSSRVHKGLVELEKVGLAETAGSKIDIAQASGCSPIAAAIVGGGEISPQTPETAAHSLAIGAPGDGALVLDAVRSRQGSAATASDDEIFGAIDLLGATEGILTEPAGGTTIASTARLAQEGKIAPDETVVAIISGNGLKTLHEHPEKSWPENVPCEVGAMEEMLNDFRQAAAAALR

SEQ ID NO: 344 - protein, 1379 aa, unidentified
  REGION 1..1379: note = Category: MG37 effectors
  REGION 1..1379: note = Description: MG37-86 effector
  source 1..1379: note = uncultivated organism sequence
MKKWGKRIISGVIVASLLTAAAISGSEQGTGTVASVVQAGTETSFMGKLLEGGYIDVFTSWTQEEQNKFYDGLSPQQQSVFLEVTNCQITRELIKSERSKEELEQFFDRLQPYFLILKKGNQEKPDDEIVIECINQIEGTDYHSSEQYIKQLVSEKKDHYLEFYNALKLVKDGKLEIESAVDDFYKELGFLKKDRVPANSAEVSRQPVQVQKKAAAKAVSDGYSNFKAVSSLKALKDAVASVKKGEKIAVRVDKGFNVTSVIRTNGRHVKIYADGESGHNLNRTAGYKDVMLEVNGGSLTLGAYDGDGRAKNNLYINGKNIAASAPLIEVTSGHLYLNKYSRIIDGYFLADFAGGAGIALNSGTSCYMFGGRIDNCRAKSSKDVSSSSPKSSHGGGVLVGNGSSFYMFAGSIEHCQAIHGGGIMNYGTLRLYGGAISDCAASNQKKDALGGAVKVQGAIETNGKVSSTKGDLGVWKYTRSAAWIVNGKDGYQQGTTTGVVLKNNQADAGGAICLNNGSNGAIQDCNINGNHSTGNGAGICLSNGSYKKGAALELKTGAVIHGNESKGYGGGIYCADSVKGSLSGGTMYDNSAKYGAGIYHEAEFRMSGGTVRSNHSGNSGGGIYAKGKLSMTGGEISANTAATYGGGAILKTVGGSVSGGSIKGNSASANGGGLQIDGTVSLSNASVSSNSASGKGGGISVSSSGTCNLSSGNVSGNTAKAGGGGIYIDGTCKANGSSFTGNQSSGDGGAVYIASGTFTTFQANQAVNIQGNSASGNGSGIYNRNITVLNNNVHILNNQCKNGTQRGIFHEGSLFSIEGNTEIQQEIYLAKDRFVTASNRYFSNSNSLKAKISLDTANIRNGYAVVKGNVSNSADGNYKTGEALLNNQSAGGRFVYAGSGYVMRPGNLKKSSSGCAPFSIVLSQAYQIRYDKNSKEEVMNMPTAAVKYWEEDIKLSALTPTGGSGAFVAWNTKADGTGDGYQPGNVYTANADATLFALWPHYRVEYLPGIRSAAGTTDSQEQNKSEDILLRKNGFRSSEGKFVGWKQDISSARKRMELEPVGYKELKEEREKGKLNHILDFAESYKKVNSSENLDNINSLLDVEDIFFMEGQWDSKPDIILNDKKTFLENEKIKKNDLLKVVKGCYDEEDGELTKKVQIIKLDYTKSMKGYRPETQNFSGGMNDTDVMDTYFMKLEKDETVEVKVTFQAEDSVGNVAEKEGTVCVTYNNPPKLHSQNLAFYQKDIDNNPQTILKEIFENYQVEDIEDDKKGLKVPVSVIDPIPLQIEKLNSVGEHKIVYQAIDSLGKKTKLDSIVYIAENNPFKDSYKYNVRFINKKYLYTLKESSKWKKNEELNAQLTSQLEKTKEDAVLKYEFEIKK

SEQ ID NO: 345 - protein, 1379 aa, unidentified
  REGION 1..1379: note = Category: MG37 effectors
  REGION 1..1379: note = Description: MG37-87 effector
  source 1..1379: note = uncultivated organism sequence
MKKWGKRIISGVIAASLLTAAAISGSEQGTGTVASVVQAGTETSFMGKLLEGGYIDVFTSWTQEEQNKFYDGLSPQQQSVFLEVTNCQITRELIKSERSKEELEQFFDRLQPYFLILKKGNQEKPDDEIVIECINQIEGTDYHSSEQYIKQLVSEKKDHYLEFYNALKLVKDGKLEIESTVDDFYKELGFLKKDRVPANSAEVSRQPVQVQKKAAAKAVSDGYSNFKAVSSLKALKDAVASVKKGEKIAVRVDKGFNVTSVIRTNGRHVKIYADGESGHNLNRTAGYKDVMLEVNGGSLTLGAYDGDGRAKNNLYINGKNIAASAPLIEVTSGHLYLNKYSRIIDGYFLADFAGGAGIALNSGTSCYMFGGRIDNCRAKSSKDVSSSSPKSSHGGGVLVGNGSSFYMFAGSIEHCQAIHGGGIMNYGTLRLYGGAISDCAASNQKKDALGGAVKVQGAIETNGKVSSTKGDLGVWKYTRSAAWIVNGKDGYQQGTTTGVVLKNNQADAGGAICLNNGSNGAIQDCNINGNHSTGNGAGICLSNGSYKKGAALELKTGAVIHGNESKGYGGGIYCADSVKGSLSGGTMYDNSAKYGAGIYHEAEFRMSGGTVRSNHSGNSGGGIYAKGKLSMTGGEISANTAATYGGGAILKTVGGSVSGGSIKGNSASANGGGLQIDGTVSLSNASVSSNSASGKGGGISVSSSGTCNLSSGNVSGNTAKAGGGGIYIDGTCKANGSSFTGNQSSGDGGAVYIASGTFTTFQANQAVNIQGNSASGNGSGIYNRNITVLNNNAHILNNQCKNGTQRGIFHEGSLFSIEGNTEIQQEIYLAKDRFVTASNRYFSNSNSLKAKISLDTANIRNGYAVVKGNVSNSADGNYKTGEALLNNQSAGGRFVYAGSGYVMRPGNLKKSSSGCAPFSIVLSQAYQIRYDKNSKEEVMNMPTAAVKYWEEDIKLSALTPTGGSGAFVAWNTKADGTGDGYQPGNVYTANADATLFALWPHYRVEYLPGIRSAAGTTDSQEQNKSEDILLRKNGFRSSEGKFVGWKQDISSARKRMELEPVGYKELKEEREKGKLNHILDFAESYKKVNSSENLDNINSLLDVEDIFFMEGQWDSKPDIILNDKKTFLENEKIKKNDLLKVVKGCYDEEDGELTKKVQIIKLDYTKSMKGYRPETQNFSGGMNDTDVMDTYFMKLEKDETVEVKVTFQAEDSVGNVVEKEGTVCVTYNNPPKLHSQNLAFYQKDIDNNPQTILKEIFENYQVEDIEDDKKGLKVPVSVIDPIPLQIEKLNSVGEHKIVYQAIDSLGKKTKLDSIVYIAENNPFKDSYKYNVRFINKKYLYTLKESSKWKKNEELNAQLTSQLEKTKEDAVLKYEFEIKK

SEQ ID NO: 346 - protein, 430 aa, unidentified
  REGION 1..430: note = Category: MG37 effectors
  REGION 1..430: note = Description: MG37-88 effector
  source 1..430: note = uncultivated organism sequence
MSSFAETTRSCATELVCRDCGLRLPLEDTTSKCLGCGQGLDIEYDYELAKARLAELPTAQRAINIWRFEELLPIHDATAQRRVGINSGRTPLIHADRLGAELGLRKLYIKDDSTQRPSLSYKDRVVSMAVARLLELGKDEIGCVSTGNVGTAVASLAAKAGVTAYVFYPSNLEPGKARACRALGAAVIQLDGNYDQANRACRELALASGVQFANITLRPFYAEGAKTVAYEVVEKLDWISPDHFVIPAAGGTLSSRVHKGLVELERVGLAETSATKIHAAQPDGCGPIAEAILDGSGEIKHQTPHTAAHSLAIGAPGDGSLVVDAVMSRGGSAAAVTDEEIFEAIDLLGATEGILTEPAGGTTIASTAKLANEGKLGADETVVAVISGNGYKTLDEHPEKPWPSMVSCDVESMGEMLAEFRQHGVGATFS

SEQ ID NO: 347 - protein, 1379 aa, unidentified
  REGION 1..1379: note = Category: MG37 effectors
  REGION 1..1379: note = Description: MG37-89 effector
  source 1..1379: note = uncultivated organism sequence
MKKWGKRIISGVIAASLLTAAAISGSEQGTGTVASVVQAGTETSFMGKLLEGGYIDVFTSWTQEEQNKFYDGLSPQQQSVFLEVTNCQITRELIKSERSKEELEQFFDRLQPYFLILKKGNQEKPDDEIVIECINQIEGTDYHSSEQYIKQLVSEKKDHYLEFYDALKLVKDGKLEIESAVDDFYKELGFLKKDRVPANSAEVSRQPVQVQKKAAAKAVSDRYSNFKAVSSLKALKDAVASVKKGEKIAVRVDKGFNVTSVIRTNGRHVKIYADGESGHNLNRTAGYKDVMLEVNGGSLTLGAYDGDGRAKNNLYINGKNIAASAPLIEVTSGHLYLNKYSRIIDGYFLADFAGGAGIALNSGTSCYMFGGRIDNCRAKSSKDVSSSSPKSSHGGGVLVGNGSSFYMFAGSIEHCQAIHGGGIMNYGTLRLYGGAISDCAASNQKKDALGGAVKVQGAIETNGKVSSTKGDLGVWKYTRSAAWIVNGKDGYQQGTTTGVVLKNNQADAGGAICLNNGSNGAIQDCNINGNHSTGNGAGICLSNGSYKKGAALELKTGAVIHGNESKGYGGGIYCADSVKGSLSGGTMYDNSAKYGAGIYHEAEFRMSGGTVRSNHSGNSGGGIYAKGKLSMTGGEISANTAATYGGGAILKTVGGSVSGGSIKGNSASANGGGLQIDGTVSLSNASVSSNSASGKGGGISVSSSGTCNLSSGNVSGNTAKAGGGGIYIDGTCKANGSSFTGNQSSGDGGAVYIASGTFTTFQANQAVNIQGNSASGNGSGIYNRNITVLNNNAHILNNQCKNGTQRGIFHEGSLFSIEGNTEIQQEIYLAKDRFVTASNRYFSNSNSLKAKISLDTANIRNGYAVVKGNVSNSADGNYKTGEALLNNQSAGGRFVYAGSGYVMRPGNLKKSSSGCAPFSIVLSQAYQIRYDKNSKEEVMNMPTAAVKYWEEDIKLSALTPTGGSGAFVAWNTKADGTGDGYQPGNVYTANADATLFALWPHYRVEYLPGIRSAAGTTDSQEQNKSEDILLRKNGFRSSEGKFVGWKQDISSARKRMELEPVGYKELKEEREKGKLNHILDFAESYKKVNLSENLDNINSLLDVEDIFFMEGQWDSKPDIILNDKKTFLENEKIKKNDLLKVVKGCYDEEDGELTKKVQIIKLDYTKSMKGYRPETQNFSGGMNDTDVMDTYFMKLEKDETVEVKVTFQAEDSVGNVAEKEGTVCVTYNNPPKLHSQNLAFYQKDIDNNPQTILKEIFENYQVEDIEDDKKGLKVPVSVIDPIPLQIEKLNSVGEHKIVYQAIDSLGKKTKLDSIVYIAENNPFKDSYKYNVRFINKKYLYTLKESSKWKKNEELNAQLTSQLEKTKEDAELKYEFEIKK

SEQ ID NO: 348 - protein, 1378 aa, unidentified
  REGION 1..1378: note = Category: MG37 effectors
  REGION 1..1378: note = Description: MG37-90 effector
  source 1..1378: note = uncultivated organism sequence
MKKWGKRIISGVIVASLLTAAAISGSEQGTATVSSVVQAGTEMSFMGKLLEGGYIDVFTSWSQEEQNKFYDRLSPKEKSVFLEVTNCQIIRELIKSERTKEELERLFDRLEPYFLMLKKGSQEKPDEEIVIECINQIEGKDYESLEQYLKQLVSEKHGYYLDFYTALKRVKDGKSEIQSAVNDLYKNLGFLKEDKVPAKPDKVSPLPVQVQKKAAKAVSDGYSNFKAVSSLKALKDAVASVEKGEKIAVRVDKGFNVTSAIRTNGRHVKIYADGESARNLNRAVGYKDAMLEVNGGSLTLGAYDGDGRAKNNLYINGKNVAASAPMIEVISGQLYLNKYSRIIDGYFLADFAGGAGIAMNSGTSCYMFGGKIDSCRAKSSKDVSSSSPKSSHGGGVLVGNGASFYMFAGSIEHCQAIHGGGIMNYGTLRLYGGTVSDCAASNKKKDALGGAVKVQGAIETDGKVNSTKGDLGVWKYTRSGTWAVNGKDGYQQKSTTGVVLKNNQADAGGAVCLNNGSNGAIQDCNIYGNHSNGNGAGICLSNGSYKKGAALEIKAGAVIHGNESKGYGGGIYCADSVKGSLRGGSMYDNSAVYGAGVYHEAEFRMTGGTVRNNHSGNSGGGIYAKGKLSMTGGEISSNTAATYGGGAILKNAGGSLSGGSIKNNTASVNGGGLQIDGAVSFSNVSVSSNSASGKGGGISVSSAGTCSFSSGNVSGNTSKAGGGGIYIDGTCKANGSNFTGNQSYGDGGAVYIASGTFTTFQANQAVNIQGNSASGNGSGIYNRNTAILNNNAHILNNQCKNGTQRSIFHEGSLFSIEGHTEIQQEIYLAKDRFITVSNRYFSNSNSLTARISLDAANIRNGYAAVKGNISNSADSNYKTGDALLNNQSVNGRFMYAGSGYVMRPGNLKKSSSGCVPYSIVLSQAYQIRYDKNSKEEVMNMPTAAVKYWEEDIRLSALTPSGGSGVFVAWNTNADGTGDGYQPGNVYTANADATLFALWPHYRVEYLPGIQGAAGTTDSQEQNKSENILLRKNGFRSSEGKFIGWKQDISSARKRRELEPVGYKELKEERERGKSDHILAFAKSYKKVNASVNLDNKNSLLNAEDIFFMEGQWDSKPDIILHDKKTFLENEKIRKNDLLKAVKGCYDDEDGDLTEKVQIIKLDYGTSMEGYRPEPQNFSGGMNDTDVMDTYFMKLEKDETVEVKVIFQVEDSVGNVAEKEGTVYVTYNNPPKLHSQNLAFYQKDLDNNPQTVLKEILENYQVEDLEDDKSGLKVPVSVVDPIPMQIEKLNSVGEHKIVYQAIDSLGKKTKLDSTVYIAENNPFKDSYKYNVRFINKKYLYTLKESSKWKKDGKLNAQLTSQLEKTREDAVLKYEFKIKK

SEQ ID NO: 349 - protein, 430 aa, unidentified
  REGION 1..430: note = Category: MG37 effectors
  REGION 1..430: note = Description: MG37-94 effector
  source 1..430: note = uncultivated organism sequence
MLNAEDRTRSCATELVCRDCGRRLPLLDTTSKCLGCGQGLDVDYDYELAKARLAEHPTAERAINIWRFEELLPIVDARAQARVGRYSGRTPLIHADRLGAELGLKKLYLKDDSTQRPSLSYKDRVVSMAIARLLELGKEEIGCVSTGNVGTAVSSLAAKAGVTAYVFYPSNMERGKARACRALGAAVCQLDGNYDEANRACRELALASGIQFANITLRPFYAEGAKTVAYEVVEQLEWEAPDHFVIPAAGGTLSSRVHKGLNELEMVGLAETSGTKINVAQPSGCGPIAAAILDGSGEIEPQTPHTAAHSLAIGAPGDGPLVVDAVMSRGGSAATATDPEIFDAIDLLGATEGILTEPAGGTTVASTIKLANEGKLGPDDTVVAIISGNGYKTLDEHPDKPWAEGVACEVDSMTEMLNEFRQHGVGATLS

SEQ ID NO: 350 - protein, 440 aa, unidentified
  REGION 1..440: note = Category: MG37 effectors
  REGION 1..440: note = Description: MG37-95 effector
  source 1..440: note = uncultivated organism sequence
MSTAVGRAEENQTTRSCVTELVCQKCDVKLPITDMEAFCPTCGKCLDVAYDYELAASRLREMPMSERPASIWRLSELLPIRDSRAQAQVGQFSGLTPLIPANRLGAELGLKKLYVKDDSTSRPSLSYKDRVVSTAIARLIELGKSEIGCVSTGNVGTAVASLAAKAGVTPYVFYPNRLEQTKARACRALGARVCQVSGNYDEANRECRKVAAASGLEFANITLRPFYAEGAKTMAFEIVEQLGWNAPDHIVSATAGGTLSSRLHKGLIELETVGLAQTSSTKMHIAQPDGCSPIASAIIAHQPEIQPCKPTTAAHSLAIGSPGDGYLVIEAVRSRHGSAASASDEEIFLGIDLLAATEGILTEPAGGTTIAVLKKLAEAGEIDPDAVVVAIITGNGLKTLDDHPEKTWPSMVECESESMLSVLSDFQHEQAASAGQPLPA

SEQ ID NO: 351 - protein, 438 aa, unidentified
  REGION 1..438: note = Category: MG37 effectors
  REGION 1..438: note = Description: MG37-96 effector
  source 1..438: note = uncultivated organism sequence
MSDAADPHLSEPYGLRTRSCATELTCRDCGYRTPLLDRAFKCPACGEGLDVDYDYELAKQRIAERPAGERPWNIWRFEELLPILNRRAQLRVAQFAGKTPLIHAERLGAELGLSRLYLKDDSTNRPSLSYKDRVVGMAIARLLELGKEEVGCVSTGNVGTAVASLAAQAGARPYIFYPGNMEKGKAKACRAMGAQVIQLDANYDQANRACRELALETGMEFANITLRPFYAEGAKTMAFEVVEELGWQAPDHFVIPAAGGTLSSRVHKGLVELERVGLAETAGSKINIAQASGCSPIASAISEGGEIVTQTPETAAHSLAIGAPGDGHLVVDAVRSREGAAATASDEEIFGAIDLLGATEGILTEPAGGTTIASTARLAQEGRIGPDETVVAIISGNGLKTLHEHPEKDWPEGVPCEVGAMEEILNDFRQAAAAAALR

SEQ ID NO: 352 - protein, 430 aa, unidentified
  REGION 1..430: note = Category: MG37 effectors
  REGION 1..430: note = Description: MG37-97 effector
  source 1..430: note = uncultivated organism sequence
MLNDQARTRSCATEMVCRDCGRTYPLSDTAFRCHGCGNGLDIDYDYELAKKRLGEIPPAEREINIWRFEELLPITDASAQARVGRYSGRTPLIHADRLGAELGLKKLYLKDDSTQRPSLSYKDRVVSMAVARLLELGKDEIGCVSTGNVGTSVSSLAAKAGVAAYVFYPSNMERGKARACRALGAAVIQLDGNYDQANRACRELALASGMQFTNITLRPFYAEGAKTEAYEIVEQLEWCSPDHIVIPAAGGTLSSRVHKGLNELEMVGLAETSQTKINVAQAEGCNPIATAILEEADEIEPQTPNTVAHSIAIGAPGDGALVVDAVKSRGGSAAAVTDQEIFEGIDLLGATEGVLTEPAGGTTIACTAKLANEGKLGPDDTVVAIVSGNGYKTLDEHPEKSWPEMVAPDVEAMSEVLNELRQHGVGATLS

SEQ ID NO: 353 - protein, 430 aa, unidentified
  REGION 1..430: note = Category: MG37 effectors
  REGION 1..430: note = Description: MG37-98 effector
  source 1..430: note = uncultivated organism sequence
MSPFAEETRSCATELVCRDCGQRLPLMDTTFKCLGCGQGLDIDYDYELAKARLGELPMSEREINIWRFEELLPILDARAQRRVGFYSGRTPLIHADRLGAELGLRKLYLKDDSTQRPSLSYKDRVVSMAVARLLELGKEEIGCVSTGNVGTAVASLAAKAGVTAYVFYPSNLEPGKARACRALGAAVIQLDGNYDQANRACRELALASGVQFANITLRPFYAEGAKTVAYEVVEKLDWISPDHFVIPAAGGTLSSRVHKGLQELEKVGLSETAATKIHAAQPDGCGPIAGAILDGSGEIQPQTPHTAAHSLAIGAPGDGPLVVDAVMSRGGSAATVTDEEIFEAIDLLGATEGILTEPAGGTTVASTAKLAAEGKFGPDETVVAVISGNGYKTLDEHPEKPWPSMVSCDVESMGEMLAEFRQHGVGATLS

SEQ ID NO: 354 - protein, 439 aa, unidentified
  REGION 1..439: note = Category: MG37 effectors
  REGION 1..439: note = Description: MG37-99 effector
  source 1..439: note = uncultivated organism sequence
MRRPSTPPSSPSGSRKRTRSCATGLVCHRCERNFPLEQAIFACPDCGKGLDVAYDYELAARHFAEVPRAERPLNIWRFEELLPIVGTSAQALVGSYAGYTPLIAADRLGAELGLSNLYLKDDSTSRPSLSYKDRVVSMSVARLLELGKDEIGCVSTGNVGTAVASLAAKAGVDAYVFYPSHLEAMKARACRALGAEVCQVEGNYDEVNRRCRDLAAATGMEFANITLRPFYAEGAKTAAFEIVEQLDWQSPDHIVTPAAGGTLSSRLHKGLGELQLLGLAETSATRIHIAQPSGCNPIASAILAEEAEIHAVTPETAAHSLAIGAPGDGYLVIDAVRKRGGTGGFASDPEIFAGIDLLASTEGLLTEPAGGTTIAVLEKLAAAGRFAPDDTVVAVITGNGLKTLDEHPAKPWPDKVDCELDAMLAALEELGRKPSPVAA

SEQ ID NO: 355 - protein, 444 aa, unidentified
  REGION 1..444: note = Category: MG37 effectors
  REGION 1..444: note = Description: MG37-100 effector
  source 1..444: note = uncultivated organism sequence
MSTQTAQSPPGAGQRTRSCATGVACHRCEKHYPLEDTVFACPGCGKGLDVVYDYELAARHFKEVPSSERPQNIWHFEELLPIVDASAQARVGLHSGYTPLIRADRLGAELGLSNLYLKDDSTSRPSLSYKDRVVSMSVARLLERGKTEIGCVSTGNVGTAVASMAAAAGVDAYVFYPNRLEDMKARACMALGAKVCQVEGNYDEANRRCREVAETTGMDFANITLRPFYAEGAKTAAFEIVEQLDWRSPDHIITAAAGGTLSSRLHKGLLELQHLGLSETDPTRIHIAQPSGCNPIATAIIAEEAEVRPVTPETAAHSLAIGAPGDGYLVIDAVLKRGGTGGFASDPEIFAGIDLLAATEGLLTEPAGGTTVAVLEKLAAAGRFAPDDTVVAIITGNGLKTLDDHPPKPWPAKVDCELDAMLAALSELKSGGSLVDSAREQLHA

SEQ ID NO: 356 - protein, 444 aa, unidentified
  REGION 1..444: note = Category: MG37 effectors
  REGION 1..444: note = Description: MG37-101 effector
  source 1..444: note = uncultivated organism sequence
MSTQTAQSPPGAGQRTRSCATGVACHRCEKHYPLEDTVFACPGCGKGLDVVYDYELAARHFKEVPSSERPQNIWHFEELLPIVDASAQARVGLHSGYTPLIRADRLGAELGLSNLYLKDDSTSRPSLSYKDRVVSMSVARLLERGKTEIGCVSTGNVGTAVASMAAAAGVDAYVFYPNRLEDMKARACMALGAKVCQVEGNFDEANRRCREVAETTGMDFANITLRPFYAEGAKTAAFEIVEQLDWRSPDHIITAAAGGTLSSRLHKGLLELQHLGLSETDPTRIHIAQPSGCNPIATAIIAEEAEVRPVTPETAAHSLAIGAPGDGYLVIDAVLKRGGTGGFASDPEIFAGIDLLAATEGLLTEPAGGTTVAVLEKLAAAGRFAPDDTVVAIITGNGLKTLDDHPPKPWPAKVDCELDAMLAALSELKSGGSLVDSAREQLHA

SEQ ID NO: 357 - protein, 430 aa, unidentified
  REGION 1..430: note = Category: MG37 effectors
  REGION 1..430: note = Description: MG37-103 effector
  source 1..430: note = uncultivated organism sequence
MLSPEDRTRSCATEMVCRDCGRTYPLLDTAFRCHGCGNGLDIDYDYELATKRLAEIPPAEREINIWRFEELLPIVDARAQARVGRYSGRTPLIHADRLGAELGLKKLYIKDDSTSRPSLSYKDRVVSMAIARLLELGNDEIGCVSTGNVGTAVSSLAAKAGVAAYVFYPSNMERGKARACRALGAAVIQLDGNYDQANRACRELALASGMQFTNITLRPFYAEGAKTEAYEVVEQLEWHSPDHFVIPAAGGTLSSRVHKGLNELEMVGLAETSGTKINVAQAEGCDPIATAILDGSGEIEPQSPQTAAHSIAIGAPGDGALVVDAVKSRGGSAASVTDAEIFEGIDLLGATEGILTEPAGGTTIASTAKLAAEGKIGPEDTVVAIVSGNGYKTLDEHPDKPWAEGVACEVEAMGEVLNELRQHGVGATLG

SEQ ID NO: 358 - protein, 437 aa, unidentified
  REGION 1..437: note = Category: MG37 effectors
  REGION 1..437: note = Description: MG37-104 effector
  source 1..437: note = uncultivated organism sequence
MSDAVDPHLTGPEGPRTRSCATELVCRDCGYRTPLLDTAFKCPACGEGLDVDYDYERAKEAIAERGLEGRPANVWRFEELLPITSLGAQRRVAQFAGKTPLIHAERLGAELGLSNLYLKDDSTNRPSLSYKDRVVGMAIARLLELGKDEVGCVSTGNVGTAVASLAAQAGARPYIFYPGNMEKGKAKACRAMGAQVIQLDANYDQANRACRELAITTGMEFANITLRPFYAEGAKTMAFEVVEELGWQAPDHFVIPAAGGTLSSRVHKGLVELETVGLAETAGSKINIAQASGCSPIATAIVGGGEIEPQMPETAAHSLAIGAPGDGTLVLDAVRSRGGSAATASDDEIWNAIDLLGATEGILTEPAGGTTIASTARLAQEGKIGPDETVVAVISGNGLKTLHEHPEKDWPEGVPCEVGAMEQLLNDFRQAAAAALH

SEQ ID NO: 359 - protein, 437 aa, unidentified
  REGION 1..437: note = Category: MG37 effectors
  REGION 1..437: note = Description: MG37-105 effector
  source 1..437: note = uncultivated organism sequence
MSEAVEPHLEGTYGSRTRSCATELACRDCGYRTPLLDTAFKCPACGEGLDIDYDYELAKARIAEHDLSARPHNIWRFEELLPILSRKAQAKVGQFSGQTPLIHADRLGAELGLKKLYLKDDSTNRPTLSYKDRVVGMAIARMLELGKDEIGCVSTGNVGTAVAALAAKAGAAAYIFYPGNMEKGKAKACRALGAHVCQLDGNYDQANRACRELALTSGMQFANITLRPFYAEGAKTMAFEVVEELGWVAPDHFVIPAAGGTLSSRVHKGLNELELVGLAETSGTKINIAQPSGCGPIAGAILDGGEIQHQAPNTAAHSLAIGAPGDGSLVVDAVRTRGGTAATASDDEIFAAIDLLAATEGVLTEPAGGTTIASTAKLAAEGKLGPDDTVVAVISGNGLKTLQDHPEKTWPEMVACEVETMESVLNDFRREVAAVHH

SEQ ID NO: 360 - protein, 445 aa, unidentified
  REGION 1..445: note = Category: MG37 effectors
  REGION 1..445: note = Description: MG37-106 effector
  source 1..445: note = uncultivated organism sequence
MSIQTAESPPQGSRQRTRSCAIELACRRCDNHYPLEQAVFACPDCGKGLDVVYDYELAARHFREVASSERPQNIWHFEELLPIVDASAQARVGRHAGYTPLIQADRLGAELGIANLYLKDDSSNRPSLSYKDRVVSMSVARLLELGKSEIGCVSTGNVGTAVASLAAKAGVDAYVFYPNRLEDTKARACMALGAKVCQVEGNYDEANRRCRELAEATGMEFANITLRPFYAEGAKTAAFEIVEQLDWRAPDHIVTAAAGGTLSSRLHKGLVELQLLGLSETDSTRIHIAQPSGCNPIASAILAEEAEIHAVTPETAAHSLAIGNPGDGYLVIDAVLKRGGTGGFASDPEIFAGIDLLAATEGLLTEPAGGTTIAVLEKLAAAGRFAADETVVATITGNGLKTLDDHPRKPWPAKIDCELDAMRAALEDLKSSGSLVQSAREQLHF

SEQ ID NO: 361 - protein, 438 aa, unidentified
  REGION 1..438: note = Category: MG37 effectors
  REGION 1..438: note = Description: MG37-107 effector
  source 1..438: note = uncultivated organism sequence
MSDAVDPHRTEPYGLRTRSCATELTCRECGYRTPLLDKAFKCPACGEGLDVDYDYELAKKRIAERSTDERPWNIWRFEELLPILNRRAQERVAQFAGKTPLIHAERLGAELGLSRLYLKDDSTNRPSLSYKDRVVGMAIARLLELGKDEVGCVSTGNVGTAVASLAAQAGARPYIFYPGNMEKGKAKACRAMGAQVIQLDANYDQANRACRELALETGMEFANITLRPFYAEGAKTMGFEVVEELGWQAPDHFVIPAAGGTLSSRVHKGLVELEKVGLAETAGSKINIAQASGCSPIATAITGGGEIVTQTPETAAHSLAIGAPGDGNLVVDAVRSREGSAATASDEEIWSAIDLLGATEGILTEPAGGTTIASTARLAQEGKIGPDETVVAVISGNGLKTLHEHPEKDWPEGVPCEVGAMEQILNDFRQAAAAAALR

SEQ ID NO: 362 - protein, 437 aa, unidentified
  REGION 1..437: note = Category: MG37 effectors
  REGION 1..437: note = Description: MG37-108 effector
  source 1..437: note = uncultivated organism sequence
MSDAVDPHLEAPAGPQTRSCATELICRDCGYRTPLLDTAFKCPACGEGLDVDYDYERAQATIAAHPLDERPHDLWRFEELLPITSQRAQSRVGQISGQTPLIHAERLGAELGLNRLYIKDDSTNRPTLSYKDRVVGMAIARLLELGKDEVGCVSTGNVGTAVSALAAAAGAKAYVFYPGNMEKGKAKACRALGAQVCQLDGNYDQANRACRELSLASGIEFANISLRPFYAEGAKTMAFEVVEQLGWEAPDHLVIPAAGGTLSSRVHKGLNELQTVGLATTEGAKLNIAQASGCSPIAAAIRGGGELEPQTPETAAHSIAIGAPGDGNLVIDAVRTRGGWAATASDPEIFEAIDLLGRTEGLLTEPAGGTTIACTARLAQEGKIGRDEVVVAAITGNGLKTIADHPEKPWPEGVACNVEAMSEMLAEFRATAETALH

SEQ ID NO: 363 - protein, 1379 aa, unidentified
  REGION 1..1379: note = Category: MG37 effectors
  REGION 1..1379: note = Description: MG37-109 effector
  source 1..1379: note = uncultivated organism sequence
MKKWGKRIVSGVIAVSLLAAASISRQKPGGNTVESIVQAGTEASFMGSLLQGEYIDVFTSWPVKEQNVFYDSLKPQERSVFFEVTNYQIIRQLTKTGRKKKDLDDLLQKLGAYFQLLRIGSVEKAKEQTVIECINEIEKTEYQSADEYVKQLIPEKQTCYMEFYLALNQAWKDKKDIQDAVDELYKKLGFKEEKKQDSPTTAVIKSSRTVQQKAAAKAVSDGFSNFKAVSSLKEMKDAIDSVKKGEKLAVRVDKGFNVTSAIKTNGRHVKLYADSVSGHNLNRTSAYKGAMIEVNGGSLTLGAYDGDGRAKNTLYINGKNVTATASLIEVTSGQLYLNKYSRIMDGYYLADFAGGGGVTLESGTSCYMFGGKIDGCQAANSKDVSSSSPKSSHGGGIVVNDKASFYMFSGSVERCKAVHGGGIMVYGTARLYGGTITDCAAVNKKNDALGGAVKVQGAFSTDGKTTSVTGDFAAWKYTRSNTWSVNGKDGYEQASTSGAVLKNNQANAGGSVCINNGSKGTIQDCNIYGNQSTGNGAGICLSNGSYKKGASLEIKNGAGIHGNTSSGYGGGVYCADSVKGSISGGSVYNNTASYGAGIYHEAEFLMSGGTVRNNQSANSGGGFYAKGKLVTTGGEVAGNTAKTYGGGAIIKSAGASISGVRIKSNSAAVNGGGVQLDGQAVVSNAAVSENTASAKGGGISVSTAGGLQMNKGTVSGNTAKSNGGGINADGTCKVNGSNLTGNQVNGDGGAVYVGSGTFTTFQANQAVNIEGNSAAKNGAGIYNKNVTVLNNNAHILINQCKNGSEHNVFHAGSQLLVEGNAEIKQEVYLTKDRFITASSKYFSSANSLTMKISMDSSNVRNGYAVVKGDIPDTRDSSYKAGDTLLHNQAAEGRFAYTGTCYGLRPGNLKKSSSGCVPYSIVLSQAYKICYDKNSTQEVRNMPTAAVKHWEEDMRLSELVPSSGSGVFVAWNTRSDGTGNGYQPGNLYTANEDVILFALWPHYKVEYVPGIQGTNGVTDSQEQNKSEDILLRKNGFRSSEGKFICWKQDAYKARKRNEMEAAGYTDLKTERDGQGQDYVFGFSKNLRRGNLNSNSENAGSLLDVDDIFIMKGQWDFKPDIILKDKMIFRENEKVNRKKLLELVESCHDIEDGDLMKRIQISKIQYGMTKKGKKPKDVIFSNGMENSDLMNTYFMLLDKNETVNVKITFQVEDSAGNLTTKEGFVYVNYNHPPKLHSYNLAYYQQELETKDQIVLKEIIENCKVEDIEDDEQGIKIPVSVVEPIPLQIEKLKAAGKHKIVYKAVDSLGKETKLETELYIAEGSPYLDSYIYRVRFINKDYLHTLDQNSKWRKNLDLNKKLVTQLEKTENDVLMKYKFQSNK

SEQ ID NO: 364 - protein, 1378 aa, unidentified
  REGION 1..1378: note = Category: MG37 effectors
  REGION 1..1378: note = Description: MG37-110 effector
  source 1..1378: note = uncultivated organism sequence
MKKWGKRIISGVIVASLLTAAAISGSEQGTATVSSVVQAGTEMSFMGKLLEGGYIDVFTSWTQEEQIKFYDRLSPKEKSVFLEVTNCQIIRELIKSERTKEELERFFDRLEPYFLMLKKGSQEKPDEEIVIECINQIEGKDYESLEQYLKQLVSEKHGYYLDFYTALKRVKDGKSEIESAVNDLYKNLGFLKEDKVPAKPDKVSPLPVQVQKKAAKAISDGYSNFKAVSSLKALKDAVASVEKGEKIAVRVDKGFNVTSAIRTNGRHVKIYADGESAHNLNRAVGYKDAMLEVNGGSLTLGAYDGDGRAKNNLYINGKNVAASAPMIEVTSGQLYLNKYSRIIDGYFLADFAGGAGIAMNSGTSCYMFGGKIDSCRAKSSKDVSSSSPKSSHGGGVLVGNGASFYMFAGSIEHCQAIHGGGIMNYGTLRLYGGTVSDCAASNKKKDALGGAVKVQGAIETDGKVNSTKGDLGVWKYTRSGTWAVNGKDGYQQKSTTGVVLKNNQADAGGAVCLNNGSNGAIQDCNIYGNHSNGNGAGICLSNGSYKKGAALEIKTGAVIHGNESKGYGGGIYCADSVKGSLRGGSMYDNSAVYGAGVYHEAEFRMTGGTVRNNHSGNSGGGIYAKGKLSMTGGEISSNTAAAYGGGAILKNAGGSLSGGSIKNNTASVNGGGLQIDGAVSFSNVSVSSNSASGKGGGISVSSAGTCNFSSGNVSGNTSKAGGGGIYIDGTCKANGSNFTGNQSYGDGGAVYIASGTFTTFQANQAVNIQGNSASGNGSGIYNRNTAILNNNAHILNNQCKNGTQRGIFHEGSLFSIEGHTEIQQEIYLAKDRFITASNRYFSNSNSLTARISLDAANIRNGYAAVKGNISNSADSNYKTGDALLNNQSVNGRFMYAGSGYVMRPGNLKKSSSGCVPYSIVLSQAYQIRYDKNSKEEVMNMPTAAVKYWEEDIRLSALTPSGGSGVFVAWNTNADGTGDGYQPGNIYTANADATLFALWPHYRVEYLPGIQGAAGTTDSQEQNKSENILLRKNGFRSSEGKFIGWKQDISSARKRRELEPVGYKELKEERERGKSDHILAFAKSYKKVNASVNLDNKNSLLNAEDIFFMEGQWDSKPDIILHDKKTFLENEKIRKNDLLKAVKGCYDDEDGDLTEKVQIIKLDYGTSMEGYRPEPQNFSGGMNDTDVMDTYFMKLEKDETVEVKVIFQVEDSVGNVAEKEGTVYVTYNNPPKLHSQNLAFYQKDLDNNPQTVLKEILENYQVEDLEDDKSGLKVPVSVVDPIPMQIEKLNSVGEHKIVYQAIDSLGKKTKLDSTVYIAENNPFKDSYKYNVRFINKKYLYTLKESSKWKKDGKLNAQLTSQLEKTREDAVLKYEFKIKK

SEQ ID NO: 365 - protein, 432 aa, unidentified
  REGION 1..432: note = Category: MG37 effectors
  REGION 1..432: note = Description: MG37-111 effector
  source 1..432: note = uncultivated organism sequence
MSLSADQRTRSCATELVCHDCGLRLPLLDTTFKCLGCGQGLDIDYDYELARARLADQPVAQRELNIWRFEELLPIVDASARARVGRYSGRTPLIHADRLGAELGLRKLYLKDDSTQRPSLSYKDRVVSMAVARLLELGKEEIGCVSTGNVGTAVASLAAKAGVAAYVFYPSNLERGKARACRALGAAVIQLDGNYDEANRACRELAMASDIQFANITLRPFYAEGAKTMAFEVVEQLDWVSPDHFVIPAAGGTLSSRVHKGLEEMEKVGMAETAATKIHIAQAGGCDPIATAILDGGGEIEAQRPNTAAHSLAIGAPGDGPLVIDAVTSRGGSAASATDPEIFEALDLLGATEGILTEPAGGTTIAAAMKLANEGKLGPDDTVVAVISGNGYKTLDEHPDKPWPEGVAPEVEAMEQTLAQFRNTGTSAALSG

SEQ ID NO: 366 - protein, 1378 aa, unidentified
  REGION 1..1378: note = Category: MG37 effectors
  REGION 1..1378: note = Description: MG37-112 effector
  source 1..1378: note = uncultivated organism sequence
MKKWGKRIISGVIVASLLTAAAISGSEQGTATVSSVVQAGTETSFMGKLLEGGYIDVFTSWTQEEQNKFYDRLSPKEKSVFLEVTNCQIIRELIKSERTKEELERFFDRLEPYFLMLKKGSQEKPDEEIVIECINQIEGKDYESLEQYLKQLVSEKHGYYLDFYTALKRVKDGKSEIESAVNDLYKNLGFLKEDKVPAKPDKVSPLPVQVQKKAAKAVSDGYSNFKAVSSLKALKDAVASVEKGEKIAVRVDKGFNVTSAIRTNGRHVKIYADGESAHNLNRAVGYKDAMLEVNGGSLTLGAYDGDGRAKNNLYINGKNVAASAPMIEVTSGQLYLNKYSRIIDGYFLADFAGGAGIAMNSGTSCYMFGGKIDSCRAKSSKDVSSSSPKSSHGGGVLVGNGASFYMFAGSIEHCQAIHGGGIMNYGTLRLYGGTVSDCAASNKKKDALGGAVKVQGAIETDGKVNSTKGDLGVWKYTRSGTWAVNGKDGYQQKSTTGVVLKNNQADAGGAVCLNNGSNGAIQDCNIYGNHSNGNGAGICLSNGSYKKGAALEIKTGAVIHGNESKGYGGGIYCADSVKGSLRGGSMYDNSAVYGAGVYHEAEFRMTGGTVRNNHSGNSGGGIYAKGKLSMTGGEISSNTAATYGGGAILKNAGGSLSGGSIKNNTASVNGGGLQIDGAVSFSNVSVSSNSASGKGGGISVSSAGTCSFSSGNVSGNTSKAGGGGIYIDGTCKANGSNFTGNQSYGDGGAVYIASGTFTTFQANQAVNIQGNSASGNGSGIYNRNTAILNNNAHILNNQCKNGTQRGIFHEGSLFSIEGHTEIQQEIYLAKDRFITVSNRYFSNSNSLTARISLDAANIRNGYAAVKGNISNSADSNYKTGDALLNNQSVNGRFMYAGSGYVMRPGNLKKSSSGCVPYSIVLSQAYQIRYDKNSKEEVMNMPTAAVKYWEEDIRLSALTPSGGSGVFVAWNTNADGTGDGYQPGNVYTANADATLFALWPHYRVEYLPGIQGAAGTTDSQEQNKSENILLRKNSFRSSEGKFIGWKQDISSARKRRELEPVGYKELKEERERGKSDHILAFAKSYKKVNASVNLDNKNSLLNAEDIFFMEGQWDSKPDIILHDKKTFLENEKIRKNDLLKAVKGCYDDEDGDLTEKVQIIKLDYGTSMEGYRPEPQNFSGGMNDTDVIDTYFMKLEKDETVEVKVIFQVEDSVGNVAEKEGTVYVTYNNPPKLHSQNLAFYQKDLDNNPQTVLKEILENYQVEDLEDDKSGLKVPVSVVDPIPMQIEKLNSVGEHKIVYQAIDSLGKKTKLDSTVYIAENNPFKDSYKYNVRFINKKYLYTLKESSKWKKDGKLNAQLTSQLEKTREDAVLKYEFKIKK

SEQ ID NO: 367 - protein, 438 aa, unidentified
  REGION 1..438: note = Category: MG37 effectors
  REGION 1..438: note = Description: MG37-113 effector
  source 1..438: note = uncultivated organism sequence
MSEAVDPRLGGPGGPRTSSCATELVCRECGYRAPLSDTAFRCPTCDAGLDVDYDYERAKASIAARGLAERPWNIWRFEELLPIAGRRAAGTVAQFAGQTPLIPARRLGAELGLRNLYVKDDSTNRPSLSYKDRVVGMAVARALELGAGEIGCVSTGNVGTATASLAAAAGLKPYVFYPANLERAKARGCRALGAQVCQVDGNYDEANRACRELTEATGIPFANISLRPFYAEGAKTLAYELVEGLGWRSPDHVVMPAAGGTLSSRVHKGLLEFEILDLAETAATKLHVGQPTGCSPIVTTIVDGAKEIVPQQPETLAHSLAIGAPGDGDLVVEAVRSRGGSAAAVPDGEIIEAMELLAATEGVLTEPAGGTTVAATMKLAQRGEIAPDDVVVIVISGNGLKTLSEQPVKPWPEGVPCNAATMEEVVVEFREGGVTSRA

SEQ ID NO: 368 - protein, 430 aa, unidentified
  REGION 1..430: note = Category: MG37 effectors
  REGION 1..430: note = Description: MG37-114 effector
  source 1..430: note = uncultivated organism sequence
MLSSEDRTRSCATELVCRDCGRRLPLLDTTSKCLGCGNGLDIDYDYELAKARLAEHPTSERAINIWRFEELLPILDARAQARVGRYSGRTPLIHADRLGAELGLKKLYLKDDSTQRPSLSYKDRVVSMAVARLLELGKDEIGCVSTGNVGTAVASLAAKAGVTAYVFYPSNMERGKARACRALGAAVCQLDGNYDEANRACRELALASGIQFANITLRPFYAEGAKTVAYEVVEQLDWVAPDHFVIPAAGGTLSSRVHKGLNELEMVGLAQTSGTKINVAQAEGCNPIAAAILDGSGEVKPQAPNTAAHSIAIGAPGDGALVVNAVMSRGGSAAAVADSEIFDAIDLLGATEGILTEPAGGTTVASTIKLANEGKLGPEDTVVAVISGNGYKTLDEHPDKPWAEGVACELDAMTEMLNEFRLHGVGATLS

SEQ ID NO: 369 - protein, 430 aa, unidentified
  REGION 1..430: note = Category: MG37 effectors
  REGION 1..430: note = Description: MG37-115 effector
  source 1..430: note = uncultivated organism sequence
MSLSADQRTRSCATELVCHDCGLRLPLLDMTFKCLGCGQGLDIDYDYELAAARVAEQPIAERELNIWRFEELLPIVDAKARDRVGRYSGRTPLIHADRLGAELGLRKLYLKDDSTQRPSLSYKDRVVSMAVARLLELGKGEMGCVSTGNVGTAVASLAAKAGVAAYVFYPSNLERGKARACRALGAAVIQLDGNYDEANRACRELALASGIQFANITLRPFYAEGAKTMAFEVVEQLDWVSPDHFVIPAAGGTLSSRVHKGLGEMETVGMAETAATKIHIAQPEGCGPIATAVLDGSGKIEAQRPQTAAHSLAIGAPGDGPLVVDAVTSRGGSAATATDPEIFEALDLLGATEGILTEPAGGTTIAATIKLANEGKLGPDDTVVAVISGNGYKTLDEHPDKPWPERVACEVEAMEETLAGFRGAEAALSR

SEQ ID NO: 370 - protein, 448 aa, unidentified
  REGION 1..448: note = Category: MG37 effectors
  REGION 1..448: note = Description: MG37-116 effector
  source 1..448: note = uncultivated organism sequence
MSPQTAQSLGSGPPAPRQRTRSCATGLACHRCGSHYPLEQAIFACPDCGKGLDVVYDYEHAASHFRDVPSSERPHNIWHFEELLPIVDAAAQARVGQHSGYTPLIRADRLGAELGLSNLYLKDDSSNRPSLSYKDRVVSMSVARLLERGGTEIGCVSTGNVGTAVASMAAKAGVDAYVFYPNRLEDTKARACMALGAKVCQVEGNYDEANRRCRELAESTGMDFANITLRPFYAEGAKTAAFEIVEQLEWQAPDHIITAAAGGTLSSRLHKGLVELQLLELAETDSTRIHIAQPSGCNPIATAIVAEEAEIRAVTPETAAHSLAIGNPGDGYLVIDAVLKRGGTGGFASDPEIFAGIDLLAATEGLLTEPAGGTTIAVLEKLAAAGRFAPDDTVVAIITGNGLKTLDDHPAKSWPDKIECELDAMLAALSELKSSGTLVDSARRQLHP

SEQ ID NO: 371 - protein, 438 aa, unidentified
  REGION 1..438: note = Category: MG37 effectors
  REGION 1..438: note = Description: MG37-117 effector
  source 1..438: note = uncultivated organism sequence
MSTATGRVEDDKTTRSCVTELVCHRCDVRRPITDTEAFCPECGKCFDVAYDYELAKARLGELAMGERPQNIWRLSELLPIRSARAQAEVGQVSGMTPLIAATRLGSRLGLRKLYLKDDSTQRPSLSYKDRVVSSAIARALELGKTEIGCVSTGNVGTAVAALAAKAGVTPYVFYPNRLEQTKAKACRALGARVCQVAGNYDEANRECKKVAAASGLEFANITLRPFYAEGAKTTVFEIVEQLGWRAPDHIVSATAGGTLSSRLHKGLVELETVGLAQTGSTKMHIAQPAGCSPIASAIEAGDKEIHPCTPETAAHSLAIGSPGDGYLVIDAVLSRKGSAGTANDEEIFAGIDLLAETEGILTEPAGGTTIAVLKKLVESGELDPDATVVAIITGNGLKTLEDHPEKPWPQTECEAESMLAVLSDLQGQAASARQPLPV

SEQ ID NO: 372 - protein, 439 aa, unidentified
  REGION 1..439: note = Category: MG37 effectors
  REGION 1..439: note = Description: MG37-118 effector
  source 1..439: note = uncultivated organism sequence
MSDAVDPHLTEPYGLRTRSCATELTCRDCGYRTPLLDKAFKCPACGEGLDVDYDYDLAKQRIAERPAAERPWNIWRFEELLPILNRRAQERVAQFAGKTPLIHAERLGAELGLSNLYIKDDSTNRPSLSYKDRVVGMAIARLLELGKTEVGCVSTGNVGTAVAALAAQAGATPYIFYPGNMEKGKAKACRALGAQVIQLDANYDGANRACRELALATGMEFANITLRPFYAEGAKTMAFEVVEEMGWQPPDHFVIPAAGGTLSSRVHKGLVELEKVGLAETAGSKINIAQASGCSPISTAITAGGAEISPQTPETAAHSIAIGAPGDGALVVDAVVGRGGSGATATDEEIFGAIDLLGETEGILTEPAGGTTIACTARLAQEGKIAPDETVVAVISGNGLKTLHEHPEKTWPEMVPCEAGAMEEILNDFRQAAATAALR

SEQ ID NO: 373 - protein, 445 aa, unidentified
  REGION 1..445: note = Category: MG37 effectors
  REGION 1..445: note = Description: MG37-119 effector
  source 1..445: note = uncultivated organism sequence
MSTQTAQNPPSRSRQRTRSCATGLVCHRCENHYPLEQAIFACPDCGKGLDVAYDYERAASHFKEVPGSERPENIWRFEELLPIVDAAAQARVGRYAGFTPLIHADRLGAELGLSNLYLKDDSTSRPSLSYKDRVVSMSVARLLELGKHEIGCVSTGNVGTAVASMAAKAGVDAYVFYPNRLEDMKARACMALAAKVCQVEGNYDEANRRCRELALATGMEFANITLRPFYAEGAKTAAFEIVEQLDWRAPDHIVTAAAGGTLSSRLHKGLGELQLLGLSETDPTRIHIAQPSGCNPIASAILAEEAEIKPVTPETAAHSLAIGAPGDGYLVIDAVRKRGGTGGFASDPEIFAGIDLLAATEGLLTEPAGGTTIAVLEKLAAAGRFAPDETVVAIVTGNGLKTLDDHPQKPWPAKVDCELDAMLAALTELKGGGSLIDSAREQLRA

SEQ ID NO: 374 - protein, 445 aa, unidentified
  REGION 1..445: note = Category: MG37 effectors
  REGION 1..445: note = Description: MG37-120 effector
  source 1..445: note = uncultivated organism sequence
MSTQTAHSPAQGSRQRTRSCATGLACHRCDHSYPLEDAIFACPDCGKGLDVVYDYELAARHFREVPAAERPQNVWHFEELLPIVDARAQARVGQHTGYTPLIRAERLGAELGIGNLYLKDDSTSRPSLSYKDRVVSMSVARLLERGGSEIGCVSTGNVGTAVASLAAKAGVDAYVFYPNRLEDMKARACRALGAKVCQVEGNYDEANRRCRELAEATGMDFANITLRPFYAEGAKTAAFEIVEQLEWDAPDHIVTAAAGGTLSSRLHKGLVELQLLGLAETDATRIHIAQPSGCNPIASAILAEEAEVVPVTPETAAHSLAIGAPGDGYLVVDAVRTRGGTAGYASDPEIFAGFDLLAATEGLLTEPAGGTTVAVLEKLAAAGRFEADETVVAIITGNGLKTLDDHPAKPWPAKVDCELDAMRAALEDLKSGASLIDSAREQLHV

SEQ ID NO: 375 - protein, 1372 aa, unidentified
  REGION 1..1372: note = Category: MG37 effectors
  REGION 1..1372: note = Description: MG37-121 effector
  source 1..1372: note = uncultivated organism sequence
MKKWGKRIISGVIAASLLTAAAISGSEQGTGTVASVVQAGTETSFMGKLLEGGYIDVFTSGTQEEQNKFYDGLSPQQQSVFLEVTNCQITRELIKSERSKEELEQFFDRLQPYFLILKKGNQEKPDDEIVIECINQIEGTDYHSSEQYIKQLVSGKKDHYLEFYNALKLVKDGKLEIESAVDDFYKELGFLKKDRVPANSAEVSRQSVQVQKKAAAKAVSDGYSNFKAVSSLKALKDAVASVKKGEKIAVRVDKGFNVTSVIRTNGRHVKIYADGESGHNLNRTAGYKDVMLEVNGGSLTLGAYDGDGRAKNNLYINGKNIAASSGHLYLNKYSRIIDGYFLADFAGGAGIALNSGTSCYMFGGRIDNCRAKSSKDVSSGSPKSSHGGGVLVGNGSSFYMFAGSIEHCQAIHGGGIMNYGTLRLYGGAISDCAASNQKKDALGGAVKVQGAIETDGKVSSTKGDLGVWKYRRSAAWIVNGKDGYQQVTTTGVVLKNNQADAGGAICLNNGSNGAIQDCSINGNHSTGNGAGICLSNGSYKKGAALELKMGAVIHGNESKGYGGGFYCADSVKGSLSGGTMYDNSAKYGAGIYHEAEFRMSGGTVRNNHSGNSGGGIYAKGKLSMTGGEISANTAATYGGGAILKTAGGSVSGGSIKGNSASANGGGLQIDGTVSLSNASVSSNSASGKGGGISVSSSGTCNLSSGNVSGNTAKAGGGGIYIDGTCKANGSSFTGNQSSGDGGAVYIASGTFTTFQANQAVNIQGNSASGNGSGIYNRNITVLNNNAHILNNHCKNGTQRGIFHQGSLFSIEGNTEIQQEIYLAKDRFVTASNRYFSNSNSLKAKISLDTANIRNGYAVVKGNVSNSADGNYKTGEALLNNQSAGGRFVYAGSGYVMRPGNLKKSSSGCAPFSIVLSQAYQIRYDKNSKEEVMNMPTAAVKYWEEDIRLSALTPASGSGAFVAWNTKADGTGDGYQPGNVYTANADATLFALWPHYRVEYLPGIRSAAGTTDSQEQNKSEDILLRKNGFRSSEGKFVGWKQDISSARKRMELEPVGYKELKEEREKGKLNHILDFAESNKKVNSSENLDNINSLLDVEDIFFMEGQWDSKPDIILNDKKTFLENEKIKKNDLLKVVKGCYDEEDGELTKKVQIIKLDYAKSMKGYRPETQNFSGGMNDTDVMDTYFMKLEKDETVEVKVTFQAEDSVGNVAEKEGTVCVTYNNPPKLHSQNLAFYQKDLDNNPQTILKEIFENYQVEDIEDDKKGLKVPVSVIDPIPLQIEKLNSVGEHKIVYQAIDSLGKKTKLDSIVYIAENNPFKDSYKYNVRFINKKYLYTLKESSKWKKDEELNAQLTSQLEKTKEDAVLKYEFEIKK

SEQ ID NO: 376 - protein, 407 aa, unidentified
  REGION 1..407: note = Category: MG37 effectors
  REGION 1..407: note = Description: MG37-122 effector
  source 1..407: note = uncultivated organism sequence
MFACPGCGKGLDVVYDYELAARHFKEVPSSERPQNIWHFEELLPIVDASAQARVGLHSGYTPLIRADRLGAELGLSNLYLKDDSTSRPSLSYKDRVVSMSVARLLERGKTEIGCVSTGNVGTAVASMAAAAGVDAYVFYPNRLEDMKARACMALGAKVCQVEGNYDEANRRCREVAETTGMDFANITLRPFYAEGAKTAAFEIVEQLDWRSPDHIITAAAGGTLSSRLHKGLLELQHLGLSETDPTRIHIAQPSGCNPIATAIIAEEAEVRPVTPETAAHSLAIGAPGDGYLVIDAVLKRGGTGGFASDPEIFAGIDLLAATEGLLTEPAGGTTVAVLEKLAAAGRFAPDDTVVAIITGNGLKTLDDHPPKPWPAKVDCELDAMLAALSELKSGGSLVDSAREQLHA

SEQ ID NO: 377 - protein, 1378 aa, unidentified
  REGION 1..1378: note = Category: MG37 effectors
  REGION 1..1378: note = Description: MG37-123 effector
  source 1..1378: note = uncultivated organism sequence
MKKWGKRIISGVIVASLLTAAAISGSEQGTATVSSVVQAGTETSFMGKLLEGGYIDVFTSWTQEEQNKFYDRLSPKEKSVFLEVTNCQIIRELIKSERTKEELERFFDRLEPYFLMLKKGSQEKPDEEIVIECINQIEGKDYESLEQYLKQLVSEKHGYYLDFYTALKRVKDGKSEIESAVNDLYKNLGFLKEDKVPAKPDKVSPLPVQVQKKAAKAVSDGYSNFKAVSSLKALKDAVASVEKGEKIAVRVDKGFNVTSAIRTNGRHVKIYADGESAHNLNRAVGYKDAMLEVNGGSLTLGAYDGDGRAKNNLYINGKNVAASAPMIEVTSGQLYLNKYSRIIDGYFLADFAGGAGIAMNSGTSCYMFGGKIDSCRAKSSKDVSSSSPKSSHGGGVLVGNGASFYMFAGSIEHCQAIHGGGIMNYGTLRLYGGTVSDCAASNKKKDALGGAVKVQGAIETDGKVNSTKGDLGVWKYTRSGTWAVNGKDGYQQKSTTGVVLKNNQADAGGAVCLNNGSNGAIQDCNIYGNHSNGNGAGICLSNGSYKKGAALEIKTGAVIHGNESKGYGGGIYCADSVKGSLRGGSMYDNSAVYGAGVYHEAEFRMTGGTVRNNHSGNSGGGIYAKGKLSMTGGEISSNTAATYGGGAILKNAGGSLSGGSIKNNTASVNGGGLQIDGAVSFSNVSVSSNSASGKGGGISVSSAGTCSFSSGNVSGNTSKAGGGGIYIDGTCKANGSNFTGNQSYGDGGAVYIASGTFTTFQANQAVNIQGNSASGNGSGIYNRNTAILNNNAHILNNQCKNGTQRGIFHEGSLFSIEGHTEIQQEIYLAKDRFITVSNRYFSNSNSLTARISLDAANIRNGYAAVKGNISNSADSNYKTGDALLNNQSVNGRFMYAGSGYVMRPGNLKKSSSGCVPYSIVLSQAYQIRYDKNSKEEVMNMPTAAVKYWEEDIRLSALTPSGGSGVFVAWNTNADGTGDGYQPGDVYTANADATLFALWPHYRVEYLPGIQGAAGTTDSQEQNKSENILLRKNGFRSSEGKFIGWKQDISSARKRRELEPVGYKELKEERERGKSDHILAFAKSYKKVNASVNLDNKNSLLNAEDIFFMEGQWDSKPDIILHEKKTFLENEKIRKNDLLKAVKGCYDDEDGDLTEKVQIIKLDYGTSMKGYRPEPQNFSGGMNDTDVMDTYFMKLEKDETVEVKVIFQVEDSVGNVAEKEGTVYVTYNNPPKLHSQNLAFYQKDLDNNPQTVLKEILENYQVEDLEDDKSGLKVPVSVVDPIPMQIEKLNSVGEHKIVYQAIDSLGKKTKLDSTVYIAENNPFKDSYKYNVRFINKKYLYTLKESSKWKKDGKLNAQLTSQLEKTREDAVLKYEFKIKK

SEQ ID NO: 378 - protein, 439 aa, unidentified
  REGION 1..439: note = Category: MG37 effectors
  REGION 1..439: note = Description: MG37-125 effector
  source 1..439: note = uncultivated organism sequence
MSDAVDPHLTEPYGLRTRSCATELTCRECGYRTPLLDKAFKCPACGEGLDVDYDYDLAKQRIAERPAAERPWNIWRFEELLPILNRRAQERVGQFAGKTPLIHAERLGAELGLSKLYIKDDSTNRPSLSYKDRVVGMAIARLLELGKNEVGCVSTGNVGTAVAALAAQAGATPYIFYPGNMEKGKAKACRAMGAQVIQLDANYDGANRACRELALATGMEFANITLRPFYAEGAKTMAFEVVEEMGWQAPDHFVIPAAGGTLSSRVHKGLVEMETVGLAETAGSKINIAQASGCSPISTAITAGGAAIEAQTPETAAHSIAIGAPGDGALVVDAVVSRGGSGATASDEEIFGAIDLLGETEGILTEPAGGTTIACTARLAQEGKIAPDETVVAVISGNGLKTLQEHPEKSWPEMVPCEAGAMEEILNDFRQAAATAALR

SEQ ID NO: 379 - protein, 437 aa, unidentified
  REGION 1..437: note = Category: MG37 effectors
  REGION 1..437: note = Description: MG37-126 effector
  source 1..437: note = uncultivated organism sequence
MSDAANPHLTEPYGLRTNSCATELTCRDCGYRTPLLDRAFKCPACGEGLDVDYDYDLAKRRIEERPMAERPWNIWRFEELLPILNRRAQQRVGAFAGKTPLIHAERLGAELGLSNLYLKDDSTNRPSLSYKDRVVGMAIARLLELGKDEVGCVSTGNVGTAVASLAAQAGAKPYIFYPGNMEKGKAKACRAMGAQVIQLDANYDGANRACRELALATGMEFANITLRPFYAEGAKTMAFEVVEELDWRAPDHFVIPAAGGTLSSRVHKGLVEMEKVGLAETAGSKINIAQASGCSPIATAIVGGGEIEHQTPETAAHSLAIGAPGDGNLVVDAVRSRGGSAATASDEEIWNAIDLLGSTEGILTEPAGGTTIASTARLAQEGKIAPDETVVAVISGNGLKTLHEHPEKDWPEGVPCEVGAMEDLLNDFRQAAAAALR

SEQ ID NO: 380 - protein, 439 aa, unidentified
  REGION 1..439: note = Category: MG37 effectors
  REGION 1..439: note = Description: MG37-127 effector
  source 1..439: note = uncultivated organism sequence
MSDAVDPHLTEPYGSRTSSCATELACRDCGYRTPLLDKAFKCPACGEGLDVDYDYELARKRIAARPLAARPWNIWRFEELLPILNRRAQEQVGAFAGKTPLIHAERLGAELGLSNLYLKDDSTNRPSLSYKDRVVGMAIARLLELGKDEVGCVSTGNVGTAVAALGAQAGARPYIFYPGNMEKGKAKACRALGAQVIQLDANYDQANRACRELALATGMEFANITLRPFYAEGAKTMAFEVVEELGWKAPDHFVIPAAGGTLSSRVHKGLRELEMVGLAETAAAKINIAQASGCSPISTAISAGGAEIEVQTPETAAHSLAIGAPGDGALVVDAVVSRGGAGATASDEEIFEAIDLLGATEGILTEPAGGTTIASTARLAQEGKIGPDETVVAVISGNGLKTLHEHPEKTWPEMVPCEVGAMEEMLNDFRRAAAAAALR

SEQ ID NO: 381 - protein, 437 aa, unidentified
  REGION 1..437: note = Category: MG37 effectors
  REGION 1..437: note = Description: MG37-128 effector
  source 1..437: note = uncultivated organism sequence
MSDAADPHLGEAIGPRTSSCDTELVCRDCGYRTPLLDTAFKCPACGEGLDIDYDYERAKSLIAKRGLAERPDNIWRFEELLPILSQRAQGMVGQFSGQTPLIKADRLGAELGLKNLYLKDDSTNRPTLSYKDRVVSMAIARMLALGKDEIGCVSTGNVGTAVAALAAKAGARAYIFYPGNMEKGKAKACRALGAQVCQLDGNYDQANRACRELSLASGIEFANITLRPFYAEGAKTMAFEVVEQLGWTAPDHFVIPAAGGTLSSRVHKGLSELETVGLAETGATRINIAQASGCGPIATAILEGGEIVPQTPDTAAHSIAIGAPGDGALVVDAVRSRGGSAATVSDEEIFGAIDLLGATEGILTEPAGGTTVAVTAKLAAEGKLGADETVVAVISGNGLKTLQDHPEKQWPEMVACDVETMGAMLADFRQAAATTLH

SEQ ID NO: 382 - protein, 448 aa, unidentified
  REGION 1..448: note = Category: MG37 effectors
  REGION 1..448: note = Description: MG37-129 effector
  source 1..448: note = uncultivated organism sequence
MSIQTAEVPDQGQPAPRQRTRSCATGLACHRCGHSYPLESTVFSCPDCGKGLDVVYDYELAARHFKEIPTSERPQNIWHFEELLPIVDASAQARVGLHAGYTPLIRADRLGAELGIANLYLKDDSSNRPSFSYKDRVVSMSVARLLERGGTEIGCVSTGNVGTAVASMAAKAGVDAYVFYPNRLENMKARVCMALGAKVCQVEGNYDEANKRCRELAESTGMDFANITLRPFYAEGAKTAAFEIVEQLDWRAPDHIVTAAAGGTLSSRLHKGLVELQQLGLSETDATRIHIAQPSGCNPIASAILAEEAEIHPVTPETAAHSLAIGAPGDGYLVVDAVRKRGGTGAFASDPEIFAGIDLLAATEGLLTEPAGGTTVAVLEKLAAVGRFGPDETVVAIITGNGLKTLDDHPPKPWPDKVDCELDAMQEALSELKSSGTLVESARAQLHV

SEQ ID NO: 383 - protein, 441 aa, unidentified
  REGION 1..441: note = Category: MG37 effectors
  REGION 1..441: note = Description: MG37-131 effector
  source 1..441: note = uncultivated organism sequence
MTTSTPQRSSQRTRSCATGLVCHRCDNSYPLEQSIFACPDCGKGLDVVYDYELAATHFRDFPTSERPQNIWHFEELLPIVDAGAQSRVGRYSGYTPLIRADRLGAELGLGNLYLKDDSTSRPSLSYKDRVVSMAVARLLERGGTEIGCVSTGNVGTAVAAMAAKAGVDAYVFYPNALEEMKARACRALAAKVCQVEGNYDQANRRCREVAETTGMDFANITLRPFYAEGAKTAAFEIVEQLDWNAPEHIVIPAAGGTLSSRVHKGLVEMAHLGLSETGQTKIHIAQPSGCNPIASAIIAEEAEVVPVTPETVAHSLAIGAPGDGYLVIDAVLSRGGTGGFASDPEIFAGIDLLASTEGLLTEPAGGTTIAVLEKMAAAGTFAQDETVVAIITGNGLKTLDEHPDKPWPAKVKCELDAMLEALTELKAEETLLNSAQRLLGS

SEQ ID NO: 384 - protein, 352 aa, unidentified
  REGION 1..352: note = Category: MG37 effectors
  REGION 1..352: note = Description: MG37-132 effector
  source 1..352: note = uncultivated organism sequence
MRAQQRVAQFAGKTPLIHAERLGAELGLSNLYLKDDSTNRPSLSYKDRVVGMAIARLLELGKDEVGCVSTGNVGTAVASLAAQAGARPYIFYPGNMEKGKAKACRAMGAQVIQLDANYDQANRACRELALTIGMEFANITLRPFYAEGAKTMAFEVVEELGWQAPDHFVIPAAGGTLSSRVHKGLVELEKVGLAETAGTKIDIAQASGCSPIATAIVGGGEIEPQMPETAAHSLAIGAPGDGALVVDAVRSRSGSAATASDDEIWYAIDLLGTTEGILTEPAGGTTVAATARLAQEGKIGPDETVVAVISGNGLKTLHEHPEKDWPEGVPCEVGEMERLLNDFRQAAATALH

SEQ ID NO: 385 - protein, 431 aa, unidentified
  REGION 1..431: note = Category: MG37 effectors
  REGION 1..431: note = Description: MG37-134 effector
  source 1..431: note = uncultivated organism sequence
MSLAADQRTRSCATELVCRDCGLRLSLADTTFKCLQCGQGLDIDYDYELAAARLADLSLSERPLNIWRFEELLPIVDRAAQARVGKNSGRTPLIHADRLGAELGLKRLYLKDDSTARPSLSYKDRVVSMAIARLLELGKEEIGCVSTGNVGTAVASLAAKAGVAPYVFYPANMERGKARACRALGAAVIQLDGNYDEANRACRELALASGIQFANITLRPFYAEGAKTLAFEVLEQLDWKPPEHFVIPAAGGTLSSRVHKGLGEMEAVGIVGTSQVKISVAQPDGCGPIAKAVLDGTGEISAQKPNTAAHSLAIGAPGDGALVVDAVMSRGGSAATASDAEIFEAIDLLGATEGILTEPAGGTTIAATAKLAQAGKLGPEDTVVAVISGNGYKTLDEHPEKEWPSMVAPEVEAMERTLAEFRGARTGAALS

SEQ ID NO: 386 - protein, 445 aa, unidentified
  REGION 1..445: note = Category: MG37 effectors
  REGION 1..445: note = Description: MG37-135 effector
  source 1..445: note = uncultivated organism sequence
MSTPTSQSRAADPARRTRSCAQALVCRRCDLEYPLQERVFACPQCGKGLDVSYDYELAACRFEEIPPAARPQNIWQFEELLPIVDASAQARVGLTAGYTPLIAADRLGAELGIANLYLKDDSTSRPSLSYKDRVVAMSVARLLELGERAMGCVSTGNVGTAVASYAAKAGVDAYVFYPNRLEDTKARACRALGAKVCQVEGNYDEANRCCREVAQATGMEFANITLRPFYAEGAKTSAFEIVEQLNWRAPDHIVTAAAGGTLSSRLHKGLCELAQLELADTEPTRIHIAQPSGCNPIASAILAEEAEIQAVTPETAAHSLAIGAPGDGYLVIDAVRKRGGTGGFASDPEIFAGIDLLASTEGILTEPAGGTTIAVLEKLAAGGRFGPDDTVVAIITGNGLKTLDDHPEKPWPAKIDCELDAMLAALEELRRGGSPSASARERLPA

SEQ ID NO: 387 - protein, 430 aa, unidentified
  REGION 1..430: note = Category: MG37 effectors
  REGION 1..430: note = Description: MG37-136 effector
  source 1..430: note = uncultivated organism sequence
MLNSEDRTRSCATELVCRDCGRRLPLLDTTSKCLGCGNGLDIDYDYELARARLSEVPPAEREINIWRFEELLPIVDARAQARVGRYSGRTPLIHADRLGAELGLKKLYLKDDSTSRPGLSCEERVVSMAIARLLELGKEEIGCVSTGNVGTAVASLAAKAGITAYVFYPSNMERGKARACRALGAAVCQLDGNYDEANRACRELALASGIQFANITLRPFYAEGAKTLAYEVVEQLEWVAPDHIVIPAAGGTLSSRVHKGLNELETVGLAETSQVKISVAQPEGCGPIATAIIDGSGEIEPQSPQTAAHSLAIGAPGDGALVVDAVMSRGGSAATASDPAIFEAIDLLGATEGVLTEPAGGTTIASTIKLANEGKLGPDDTVVAVISGNGYKTLDEHPDKPWAEGVACEVDSMTEMLDEFRRHGVGAMLG

SEQ ID NO: 388 - protein, 430 aa, unidentified
  REGION 1..430: note = Category: MG37 effectors
  REGION 1..430: note = Description: MG37-137 effector
  source 1..430: note = uncultivated organism sequence
MLNPEDRTRSCATEMVCRDCGRTYPLLDTAFRCHGCGNGLDIDYDYELAKKRLSEIPPAEREINIWRFEELLPITDARAQARVGRYSGRTPLIHADRLGAELGLKKLYLKDDSTQRPSLSYKDRVVSMAVARLLELGKDEIGCVSTGNVGTSVSSLAAKAGVAAYVFYPSNMERGKARACRALGAAVIQLDGNYDQANRACRELALASGMQFTNITLRPFYAEGAKTEAYEVVEQLEWVSPDHFVIPAAGGTLSSRVHKGLNELEMVGLAETSQTKINVAQAEGCNPIATAILDGSGEIAPQTPNTVAHSIAIGAPGDGPLVVDAVRSRGGSAAAVTDAEIFEGIDLLGATEGILTEPAGGTTIACTAKLANEGKLGPDETVVAIVSGNGYKTLDEHPEKSWPEMIAPEVEAMSEVLDELRSHGVGAPLS

SEQ ID NO: 389 - protein, 437 aa, unidentified
  REGION 1..437: note = Category: MG37 effectors
  REGION 1..437: note = Description: MG37-138 effector
  source 1..437: note = uncultivated organism sequence
MSDAVDPHLGGASGPRTSSCATELICRDCGYTTPLLDSAFKCPACGEGLDIDYDYDRAKALIAERGLDERPQNIWRFEELLPIASRAAQQKVGQFAGRTPLIRADRLGAEIGLNNLYLKDDSTNRPTLSYKDRVVSMAIARLLELGKNEVGCVSTGNVGTAVAALAAKAGATAYIFYPGNMEKGKAKACRALGAQVCQLDGNYDQANRACRELSLASGIEFANITLRPFYAEGAKTMAFEIVEELGWIAPDHLVIPAAGGTLSSRVHKGLNELEIVGLAETAGTKINIAQAGGCSPIATAIRDGGELEPQTPETAAHSLAIGAPGDGNLVLDAVRTRGGSAAAPSDPEIFAAIDLLGATEGVLTEPAGGTTIAATAKLAAEGKIAPDDVVVATISGNGLKTLSEHPDKPWPEMVACDVDTMGAMLSDFRQAAAAALH

SEQ ID NO: 390 - protein, 445 aa, unidentified
  REGION 1..445: note = Category: MG37 effectors
  REGION 1..445: note = Description: MG37-139 effector
  source 1..445: note = uncultivated organism sequence
MSSSSTTASSQGTRQRTRSCATELVCHRCDHRYPLTDTVFACPDCGKGLDIAYDYELAGTHFRDFPISERPQNIWHFEELLPILDANAQARVGQYSGYTPLIRADRLGAELGLNNLYLKDDSTSRPSLSYKDRVVSMSVARLLERGKTEIGCVSTGNVGTAVASMAATAGVDAFIFYPNRLEEMKARACMALGAKVVQVEGNYDEANRRCREVAAETGMDFANITLRPFYAEGAKTAAFEIVEQLQWASPDHIVSPAAGGTLSSRMHKGLGELQLLGLSETEGTQIHIAQPSGCNPIASAILAEEAEVVPVMPETAAHSLAIGAPGDGYLVIDAVHKRGGTAAFASDPEIFAGIDLLAATEGLLTEPAGGTTIAVLEKLAAAGRFAPEDTVVALITGNGLKTLDEHPSKAWPAKIDCELDPMLGALAELKRTPTLMQTAREQLRA

SEQ ID NO: 391 - protein, 445 aa, unidentified
  REGION 1..445: note = Category: MG37 effectors
  REGION 1..445: note = Description: MG37-141 effector
  source 1..445: note = uncultivated organism sequence
MSTSSSNGPGERPRQQTRSCATGLACHRCGLSYALDEDAYACPQCGKGLDIVYDYERAARLFTEVPREQRPQNIWRFEELLPIVDAGAQARVGAHAGCTPLIRADRLGAELGIANLYLKDDSTSRPSLSYKDRVVAMSIARLLELGKDEIGCVSTGNVGTAVASYAAKAGVTAYVVYPNRLEDTKARACAALGARVCQVEGNYDEANRRCKEVAAAAEMEFANITLRPFYAEGAKTAAFEIVEQLSWNAPAHIVTAAAGGTLSSRLHKGLAELEQLGLAHTSSTRIHIAQPSGCNPIASAILAEEAEVHPITPETAAHSLAIGAPGDGYLVIDAVLKRGGTAGFASDPEIFAGIDLLAATEGLLTEPAGGTTVAVLEKLAKEGRFATDDVVVAIITGNGLKTLDDHPEKPWPAKIDCELDAMLAALAELKREGALAERALEQLHA

SEQ ID NO: 392 - protein, 436 aa, unidentified
  REGION 1..436: note = Category: MG37 effectors
  REGION 1..436: note = Description: MG37-143 effector
  source 1..436: note = uncultivated organism sequence
MSDAVDPHLTEPYGLRTRSCATELTCRDCGYRTPLLDKAFKCPACGEGLDVDYDYELAKKRIAERSTAERPWNIWRFEELLPILNLRAQQRVAQFAGKTPLVHAERLGAELGLSNLYLKDDSTNRPSLSYKDRVVGIAIARLLELGKDEVGCVSTGNVGTAVAALAAQAGARPYIFYPGNMEKGKAKACRGLGAQVIQLDANYDQANRACRELAITTGMEFANITLRPFYAEGAKTMAFEVVEELGWRAPDHFVIPAAGGTLSSRVHKGLVELEKVGLAETAAAKIDIAQASGCSPIATAIQGGGEIEPQTPETAAHSLAIGAPGDGNLVVDAVRSRGGAAAAVSDEEIWGAIDLLGTTEGILTEPAGGTTIASTARLAQEGRIGPDDLVVAVISGNGLKTLQEHPDKPWPEMVPCEVGAMEEMLNDFRQAAAALH

SEQ ID NO: 393 - protein, 1379 aa, unidentified
  REGION 1..1379: note = Category: MG37 effectors
  REGION 1..1379: note = Description: MG37-144 effector
  source 1..1379: note = uncultivated organism sequence
MKKWGKRIISGVIAASLLTAAAISGSEQGTGTVASVVQAGTEMSFMGKLLEGGYIDVFTSWTQEEQNKFYDGLSPQQQSVFLEVTNCQITRELIKSERSKEELEQFFDRLQPYFLILKKGNQEKPDDEIVIECINQIEGTDYHSSEQYIKQLVSEKKDHYLEFYDALKLVKDGKLEIESAVDDFYKELGFLKKDRVPANSAEVSRQPVQVQKKAAAKAVSDRYSNFKAVSSLKALKDAVASVKKGEKIAVRVDKGFNVTSVIRTNGRHVKIYADGESGHNLNRTAGYKDVMLEVNGGSLTLGAYDGDGRAKNNLYINGKNIAASAPLIEVTSGHLYLNKYSRIIDGYFLADFAGGAGIALNSGTSCYMFGGRIDNCRAKSSKDVSSSSPKSSHGGGVLVGNGSSFYMFAGSIEHCQAIHGGGIMNYGTLRLYGGAISDCAASNQKKDALGGAVKVQGAIETNGKVSSTKGDLGVWKYTRSAAWIVNGKDGYQQGTTTGVVLKNNQADAGGAICLNNGSNGAIQDCNINGNHSTGNGAGICLSNGSYKKGAALELKTGAVIHGNESKGYGGGIYCADSVKGSLSGGTMYDNSAKYGAGIYHEAEFRMSGGTVRSNHSGNSGGGIYAKGKLSMTGGEISANTAATYGGGAILKTVGGSVSGGSIKGNSASANGGGLQIDGTVSLSNASVSSNSASGKGGGISVSSSGTCNLSSGNVSGNTAKAGGGGIYIDGTCKANGSSFTGNQSSGDGGAVYIASGTFTTFQANQAVNIQGNSASGNGSGIYNRNITVLNNNAHILNNQCKNGTQRGIFHEGSLFSIEGNTEIQQEIYLAKDRFVTASNRYFSNSNSLKAKISLDTANIRNGYAVVKGNVSNSADGNYKTGEALLNNQSAGGRFVYAGSGYVMRPGNLKKSSSGCAPFSIVLSQAYQIRYDKNSKEEVMNMPTAAVKYWEEDIKLSALTPTGGSGAFVAWNTKADGTGDGYQPGNVYTANADATLFALWPHYRVEYLPGIRSAAGTTDSQEQNKSEDILLRKNGFRSSEGKFVGWKQDISSARKRMELEPVGYKELKEEREKGKLNHILDFAESYKKVNSSENLDNINSLLDVEDIFFMEGQWDSKPDIILNDKKTFLENEKIKKNDLLKVVKGCYDEEDGELTKKVQIIKLDYTKSMKGYRPETQNFSGGMNDTDVMDTYFMKLEKDETVEVKVTFQAEDSVGNVAEKEGTVCVTYNNPPKLHSQNLAFYQKDIDNNPQTILKEIFENYQVEDIEDDKKGLKVPVSVIDPIPLQIEKLNSVGEHKIVYQAIDSLGKKTKLDSIVYIAENNPFKDSYKYNVRFINKKYLYTLKESSKWKKNEELNAQLTSQLEKTKEDAELKYEFEIKK

SEQ ID NO: 394 - protein, 437 aa, unidentified
  REGION 1..437: note = Category: MG37 effectors
  REGION 1..437: note = Description: MG37-145 effector
  source 1..437: note = uncultivated organism sequence
MSEAVDPHLGGSAGPRTSSCATELVCRDCGYRTPLLDTAFKCPACGEGLDIDYDYERAKALIAERGLAERPQNVWRFEELLPIVARGAQERVGQFSGQTPLIRADRLGAELGLKNLYLKDDSTNRPTLSYKDRVVSMAIARLLELGKDEVGCVSTGNVGTAVAALAAKAGATAYIFYPGNMEKGKAKACRALGAQVCQLDGNYDQANRACRELSLASGIEFANITLRPFYAEGAKTMAFEVVEQLGWVAPDHFVIPAAGGTLSSRVHKGLNELETVGLAATAATRINIAQAGGCGPIATAILDGGEIEPQTPDTAAHSLAIGAPGDGALVVDAVRSRNGSAATASDQEIFDAIDLLGATEGLLTEPAGGTTIASTARLAAEGKIGAEDTVVAVISGNGLKTLQDHPEKQWPEMVACDVETMGSMLADFRQAAAAALH

SEQ ID NO: 395 - protein, 444 aa, unidentified
  REGION 1..444: note = Category: MG37 effectors
  REGION 1..444: note = Description: MG37-146 effector
  source 1..444: note = uncultivated organism sequence
MSTPIAESPTQARQRTRSCATALVCHRCENSYPLAQAIFACPDCNKGLDVVYDYEHAAQHFREVPSSERPQNIWHFEELLPIVDASAQARVGQHSGYTPLIRADRLGAELGLSNLYLKDDSSNRPSLSYKDRVVSMSVARLLELGRTEIGCVSTGNVGTAVASLAAKAGVDAYVFYPNRLEDTKARACMALGAKVCQVEGNYDEANKRCREVAETTGMDFANITLRPFYAEGAKTAAFEIVEQLDWQAPDHIVTAAAGGTLSSRLHKGLVELQLLELSETDSTRIHIAQPSGCNPIATAIVAEEAEIHAVTPETAAHSLAIGNPGNGYLVIDAVLKRGGTGGFASDPEIFAGIDLLAATEGLLTEPAGGTTIAVLEKLAATGRFAPDDTVVAIITGNGLKTRDDHPPKPWPAKVDCELDAMVAALDELKQSGTLVDSARELLHP

SEQ ID NO: 396 - protein, 437 aa, unidentified
  REGION 1..437: note = Category: MG37 effectors
  REGION 1..437: note = Description: MG37-148 effector
  source 1..437: note = uncultivated organism sequence
MSDAVEPHRTEPYGLRTDSCATELVCRDCGYRTPLLDTAFKCPACGEGLDVDYDYELAKRRIAERGLEGRPWNVWRFEELLPILNRRARQRVAQFAGKTPLIHAERLGAELGLSNLYLKDDSTNRPSLSYKDRVVGMAIARLLELGKDEVGCVSTGNVGTAVAALAAQAGARPYIFYPGNMEKGKAKACRGLGAQVIQLDANYDQANRACRELALTTGMEFANITLRPFYAEGAKTMGFEVVEELGWKAPDHFVIPAAGGTLSSRVHKGLLELEKVGLAETAGARINIAQASGCSPIASAITSGGEIEPQTPETAAHSLAIGAPGDGNLVVDAVRSRGGSAAAVSDEEIWEAIDLLGATEGILTEPAGGTTIASTARLAQAGKIGPDEVVVAVISGNGLKTLHEHPDKPWPEMVPCEVGAMEEMLNDFRRAATAALH

SEQ ID NO: 397 - protein, 437 aa, unidentified
  REGION 1..437: note = Category: MG37 effectors
  REGION 1..437: note = Description: MG37-149 effector
  source 1..437: note = uncultivated organism sequence
MSDAVDPHPGGPKGPRTDSCATELVCRDCGYRTPLLDTAFKCPACGEGLDIDYDYERAQTLIAERGLADRPQNIWRLEELLPIVSRRAQAKVGLFAGQTPLIRADRLGAELGLKNLYLKDDSTNRPTLSYKDRVVGMAIARLLELGKDEVGCVSTGNVGTAVAALAAKAGATAYIFYPGNMEKGKAKACRALGAQVCQLDGNYDQANRACRELSLASGIQFANITLRPFYAEGAKTMAFEVVEQLGWEAPDHFVIPAAGGTLSSRVHKGLNELETVGLAETAATKINIAQAGGCGPIAGAILGGGEIVPQTPDTAAHSLAIGDPGDGSLVVDAVRARGGSAAMPSDEEIFGAIDLLGATEGILTEPAGGTTIAATARLAAEGKLGAEETVVAVISGNGLKTLHEHPDKPWPEMVACDVETMGAMLAEFRQAAAAALH

SEQ ID NO: 398 - protein, 434 aa, unidentified
  REGION 1..434: note = Category: MG37 effectors
  REGION 1..434: note = Description: MG37-150 effector
  source 1..434: note = uncultivated organism sequence
MSDAHLGGPGGPRTSSCATELVCRDCGYRTPLLDTAFKCPACGEGLDIDYDYERAKSLIAERDLGDRPDNVWRFEELLPIVFKRAQDRVGQFSGQTPLIRADRLGAELGLKNLYLKDDSTNRPTLSYKDRVVSMAVARMLALGKDEIGCVSTGNVGTAVAALAAKAGATAYIFYPGNMEKGKAKACRALGAQVCQLDGNYDQANRACRELSLASGIEFANITLRPFYAEGAKTMAFEVVEQLGWEAPDHFVIPAAGGTLSSRVHKGLNELEIVGLAETGATKINIAQASGCGPIARAILDGGEIEPQTPDTAAHSIAFGAPGDGALVVDAVRTRGGSAATVSDAEIFGAIDLLGATEGILTEPAGGTTVAVTAKLAAEGKLGAEETVVAVISGNGLKTLQDHPEKQWPEMVACDLETMGATLADFRQTAAAAPR

SEQ ID NO: 399 - protein, 437 aa, unidentified
  REGION 1..437: note = Category: MG37 effectors
  REGION 1..437: note = Description: MG37-151 effector
  source 1..437: note = uncultivated organism sequence
MSDAVEPHLSEPYGLRTRSCATELTCRDCGYRTPLLDKAFKCPACGEGLDVDYDYDLAKERIAERGLAERPWNIWRFEELLPILNRRAQQRTAQFAGKTPLIHAERLGAELGLSNLYLKDDSTNRPSLSYKDRVVGMAIARLLELGKDEVGCVSTGNVGTAVAALAAQAGAEPYIFYPGNMEKGKAKACRAMGAQVIQLDANYDGANRACRELALATGMEFANITLRPFYAEGAKTMGFEVVEELDWNSPDHFVIPAAGGTLSSRVHKGLLELEKVGLAETAGTKINIAQAAGCSPIATAITGGGEIVTQTPETAAHSLAIGAPGDGNLVLDAVRSRGGSAAAVSDEEIWGAIDLLGQTEGILTEPAGGTTIASTARLAQEGKLGPDEVVVAVISGNGLKTLQEHPDKSWPEMVPCEVPAMEEILARLRQDAPTSVR

SEQ ID NO: 400 - protein, 430 aa, unidentified
  REGION 1..430: note = Category: MG37 effectors
  REGION 1..430: note = Description: MG37-152 effector
  source 1..430: note = uncultivated organism sequence
MTLRVAYARELVAGGHRPAVVARILRISRQAVYRVPRPRKPPDAARRPPVDDVERAIVEVAEANPTDGYRLVTAWVQRKLGRAVNRKRVLRVMRERKLIQRRTHEPKRRRPGFFMVTRPGELWHLDMTSIWLAEHGCVSTGNVGTAVASMAAAAGVDAYVFYPNRLEDMKARACMALGAKVCQVEGNYDEANRRCREVAETTGMDFANITLRPFYAEGAKTAAFEIVEQLDWRSPDHIITAAAGGTLSSRLHKGLLELQHLGLSETDPTRIHIAQPSGCNPIATAIIAEEAEVRPVTPETAAHSLAIGAPGDGYLVIDAVLKRGGTGGFASDPEIFAGIDLLAATEGLLTEPAGGTTVAVLEKLAAAGRFAPDDTVVAIITGNGLKTLDDHPPKPWPAKVDCELDAMLAALSELKSGGSLVDSAREQLHA

SEQ ID NO: 401 - protein, 1379 aa, unidentified
  REGION 1..1379: note = Category: MG37 effectors
  REGION 1..1379: note = Description: MG37-153 effector
  source 1..1379: note = uncultivated organism sequence
MKKWGKRIISGVIAASLLTAAAISGSEQGTGTVASVVQAGTETSFMGKLLEGGYIDVFTSWTQEEQNKFYDGLSPQQQSVFLEVTNCQITRELIKSERSKEELEQFFDRLQPYFLILKKGNQEKPDDEIVIECINQIEGTDYHSSEQYIKQLVSEKKDHYLEFYDALKLVKDGKLEIESAVDDFYKELGFLKKDRVPANSAEVSRQPVQVQKKAAAKAVSDRYSNFKAVSSLKALKDAVASVKKGEKIAVRVDKGFNVTSVIRTNGRHVKIYADGESGHNLNRTAGYKDVMLEVNGGSLTLGAYDGDGRAKNNLYINGKNIAASAPLIEVTSGHLYLNKYSRIIDGYFLADFAGGAGIALNSGTSCYMFGGRIDNCRAKSSKDVSSSSPKSSHGGGVLVGNGSSFYMFAGSIEHCQAIHGGGIMNYGTLRLYGGAISDCAASNQKKDALGGAVKVQGAIETNGKVSSTKGDLGVWKYTRSAAWIVNGKDGYQQGTTTGVVLKNNQADAGGAICLNNGSNGAIQDCNINGNHSTGNGAGICLSNGSYKKGAALELKTGAVIHGNESKGYGGGIYCADSVKGSLSGGTMYDNSAKYGAGIYHEAEFRMSGGTVRSNHSGNSGGGIYAKGKLSMTGGEISANTAATYGGGAILKTVGGSVSGGSIKGNSASANGGGLQIDGTVSLSNASVSSNSASGKGGGISVSSSGTCNLSSGNVSGNTAKAGGGGIYIDGTCKANGSSFTGNQSSGDGGAVYIASGTFTTFQANQAVNIQGNSASGNGSGIYNRNITVLNNNAHILNNQCKNGTQRGIFHEGSLFSIEGNTEIQQEIYLAKDRFVTASNRYFSNSNSLKAKISLDTANIRNGYAVVKGNVSNSADGNYKTGEALLNNQSAGGRFVYAGSGYVMRPGNLKKSSSGCAPFSIVLSQAYQIRYDKNSKEEVMNMPTAAVKYWEEDIKLSALTPTGGSGAFVAWNTKADGTGDGYQPGNVYTANADATLFALWPHYRVEYLPGIRSAAGTTDSQEQNKSEDILLRKNGFRSSEGKFVGWKQDISSARKRMELEPVGYKELKEEREKGKLNHILDFAESYKKVNSSENLDNINSLLDVEDIFFMEGQWDSKPDIILNDKKTFLENEKIKKNDLLKVVKGCYDEEDGELTKKVQIIKLDYTKSMKGYRPETQNFSGGMNDTDVMDTYFMKLEKDETVEVKVTFQAEDSVGNVAEKEGTVCVTYNNPPKLHSQNLAFYQKDIDNNPQTILKEIFENYQVEDIEDDKKGLKVPVSVIDPIPLQIEKLNSVGEHKIVYQAIDSLGKKTKLDSTVYIAENNPFKDSYKYNVRFINKKYLYTLKESSKWKKNEELNAQLTSQLEKTKEDAELKYEFEIKK

SEQ ID NO: 402 - protein, 437 aa, unidentified
  REGION 1..437: note = Category: MG37 effectors
  REGION 1..437: note = Description: MG37-154 effector
  source 1..437: note = uncultivated organism sequence
MSPSSTPSSSQGTRRRTRSCATDLVCHRCEHRYPLTDTVFACPDCGKGLDILYDYELAARHFAEVPSSERPQNIWHFEELLPIVSASAQARVGRYAGFTPLIHADRLGAELGLSNLYLKDDSTSRPSLSYKDRVVAMSVARLLELGKGEIGCVSTGNVGTAVASLAAKAGVDAYVFYPNRLEDMKARACAALGAKVCQVEGNYDEANRRCREVAEATGMEFANITLRPFYAEGAKTAAFEIVEQLGWASPDHIVSPAAGGTLSSRLHKGLGELQLLGLSETEHTRIHIAQPSGCNPIATAIIAEEAEIHAITPETAAHSLAIGNPGDGYLVIDAVLKRGGTGGFASDPEIFAGIDLLASTEGILTEPAGGTTIAVLEKLAREGKFAPDETVVALVTGNGLKTLDEHPPKPWPEVDCELDAMLAALEGLGREPSPVAA

SEQ ID NO: 403 - protein, 438 aa, unidentified
  REGION 1..438: note = Category: MG37 effectors
  REGION 1..438: note = Description: MG37-155 effector
  source 1..438: note = uncultivated organism sequence
MSSSSTASTSQGSWTRTRSCATGLACHRCDRQYSLTDTVFACPDCGKGLDIVYDYELAARHFKEVPSAERPQNIWHFEELLPIVDASAQARVGRYAGYTPLIHADRLGAELGLSNLYLKDDSTSRPSLSYKDRVVSMSIARLLELGREEIGCVSTGNVGTAVASLAAKAGVDAYVFYPNRLEDTKARACAALGAKGCQGGGNYDEANRRCREVAAATGLEFANITLRPFYAEGAKTAAFEIVEQLDWQSPDHIVTAAAGGTLSSRLHKGLGELQLLGLAETDPTRIHIAQPSGCNPIATAILAEEAEVHPVTPETAAHSLAIGAPGDGYLVIDAVRKRGGTGGFASDPEIFAGIDLLAATEGLLTEPAGGTTIAVLEKLAGEGKFAPDDTVVAMITGNGLKTLDDHPEKPWPAKIACELDAMLAALEGLGRKPSPIAA

SEQ ID NO: 404 - protein, 437 aa, unidentified
  REGION 1..437: note = Category: MG37 effectors
  REGION 1..437: note = Description: MG37-156 effector
  source 1..437: note = uncultivated organism sequence
MSDAVDPHLTGPEGPRTRSCATELVCRDCGYRTPLLDTAFKCPACGEGLDVDYDYERAKEAINARGLEGRPGNVWRFEELLPITNLRAQQQVAQFAGKTPLIHAERLGAELGLSNLYLKDDSTNRPSLSYKDRVVGMAIARLLELGKDEVGCVSTGNVGTAVASLAAQAGARPYIFYPGNMEKGKAKACRAMGAQVIQLDANYDQANRACRELAITNGMEFANITLRPFYAEGAKTMAFEVVEELGWQAPDHFVIPAAGGTLSSRVHKGLVELETVGLAETAGSKINIAQASGCSPIATAIVGGGEIEPQMPETAAHSLAIGAPGDGTLVVDAVRSRGGSAATASDDEIWNAIDLLGATEGILTEPAGGTTIASTARLAQEGKIGPDETVVAVISGNGLKTLHEHPEKDWPEGVPCEVGAMEQILNDFRQAAATALH

SEQ ID NO: 405 - protein, 444 aa, unidentified
  REGION 1..444: note = Category: MG37 effectors
  REGION 1..444: note = Description: MG37-157 effector
  source 1..444: note = uncultivated organism sequence
MSLQTAPRAAQDSRQRTRSCATALVCHRCDNSYSLEESIFACPDCNKGLDVVYDYEHAAQHFRDVPSSERPQNIWHFEELLPIVDARAQARVGQHTGYTPLIRADRLGAEIGIANLYIKDDSSNRPSLSYKDRVVSMSVARLLERGGTEIGCVSTGNVGTAVASLAAKAGVDAYVFYPNRLEDTKARACMALGAKVCQVEGNYDEANKRCRELAEATGMDFANITLRPFYAEGAKTASFEIVEQLDWQAPDHIITAAAGGTLSSRLHKGLVELQLLELAETDSTRIHIAQPSGCNPIATAIVAEEAEIRAVTPETAAHSLAIGNPGDGYLVIDAVLKRGGTGGFASDPEIFAGIDLLAATEGLLTEPAGGTTIAVLEKLAASGRFGPDETVVAIITGNGLKTLDDHPPKPGPAKVDCELDAMEAALAELKQSGTLVDSARQLLH

SEQ ID NO: 406 - protein, 450 aa, unidentified
  REGION 1..450: note = Category: MG37 effectors
  REGION 1..450: note = Description: MG37-158 effector
  source 1..450: note = uncultivated organism sequence
MNAHRSRSAELGSAAAAPQQRTRSCATALTCARCAVEFPLEQRVFACPDCGKGLDIAYDYELARQRLQELPRAQRPANIWRFEELLPIRDARAQARVGRTAGCTPLIPADRLGAELGIANLYLKDDSTSRPSLSYKDRVVAMSIARLLELGEDEIGCVSTGNVGTAVASYASKAGVAAYVFYPNRLEDMKARACRALAAKVCQVEGNYDEANRRCRELAQTTGMEFANITLRPFYAEGAKTDAFEIVEQLDWRPPDHIITAAAGGTLSSRLHKGLRELQILELADTDATRIHIAQPSGCNPIASAILAEEAEIHPVTPETAAHSLAIGAPGDGYLVIDAVRKRGGTGGFASDPEIFAGIDLLAATEGILTEPAGGTTVAVLEKLAAAGRFGPDDTVVAIVTGNGLKTLDDHPAKPSPAKIECELDAMLAALEELRRGGEPTQSARERLPA

SEQ ID NO: 407 - protein, 447 aa, unidentified
  REGION 1..447: note = Category: MG37 effectors
  REGION 1..447: note = Description: MG37-159 effector
  source 1..447: note = uncultivated organism sequence
MNAHGSRSGELGSAVAAPQQRTRSCATALVCNRCAVEFPLEQRVFACPDCGKGLDIAYDYELARQRLQELPRAQRPANIWRFEELLPIVDATAQARVGRTAGYTPLIRADRLGSELGLSNLYLKDDSTSRPSLSYKDRVVAMSVARLLELGGEEIGCVSTGNVGTAVASYAAKAGVDAYVFYPNRLEDMKARACRALGANVCQVQGNYDEANRCCREVAAATGMDFANITLRPFYAEGAKTDAYEIVEQLDWQAPDHIVTAAAGGTLSSRLHKGLHELALLELAPTEGTRIHIAQPSGCNPIASAILAEEAEIQPVMPETAAHSLAIGAPGDGYLVIDAVRKRGGTGGLASDPEIFAGIDLLAATEGLLTEPAGGTTIAVLEKLAAAGRFAADDVIVAIVTGNGLKTLDDHPEKPWPAKIDCELDAMLAALAELRGAGRITAERMPA

SEQ ID NO: 408 - protein, 442 aa, unidentified
  REGION 1..442: note = Category: MG37 effectors
  REGION 1..442: note = Description: MG37-160 effector
  source 1..442: note = uncultivated organism sequence
MSPQTAQSPIRQRTRSCATGLACHRCGNHYPLESSVFACPDCGKGLDILYDYELAARHFLDVPAAERPHNIWHFEELLPIVDASAQAAVGTHSGYTPLIRADRLGAELGLGNLYLKDDSTSRPSLSYKDRVVSMSIARLLERGGSEIGCVSTGNVGTAVASLAAKAGVDAYVFYPNRLEDMKARACMALGAKVCQVEGNYDEANRRCRELAEATGMDFTNITLRPFYAEGAKTAAFEIVEQLGWQAPEHIITAAAGGTLSSRIHKGLIELQLLGLSETDSTRLHIAQPSGCNPIASAIVAEEAEVHPVVPETAAHSLAIGAPGDGYLVIDAVLKRGGSGGYATDPEIFAGIDLLAATEGLLTEPAGGTTIAVLEKMAAAGTFDTDETVVAIITGNGLKTLDDHPAKPWPAKVACERDAMMAALEQLKEGPSLTESARGRLNI

SEQ ID NO: 409 - protein, 437 aa, unidentified
  REGION 1..437: note = Category: MG37 effectors
  REGION 1..437: note = Description: MG37-162 effector
  source 1..437: note = uncultivated organism sequence
MSDAVDPHRTEPYGLRTDSCATELTCRDCGYRTPLLDKAFKCPACGEGLDVDYDYDLAKKRISERGLDERPWNIWRFEELLPILNRRAQQRVAQFAGKTPLIHAERLGAELGLSNLYIKDDSTNRPSLSYKDRVVGMAIARLLELGKDEVGCVSTGNVGTAVAALAAQAGARPYIFYPGNMEKGKAKACRAMGAQVIQLDANYDGANRACRELALATGMEFANITLRPFYAEGAKTMAFEVVEELGWQPPDHFVIPAAGGTLSSRVHKGLLELEKVGLAETAGAKIDIAQASGCSPISTAILEGGELVPQTPETAAHSIAIGAPGDGALVVDAVRSRNGSAAMVSDEEIFGAIDLLGATEGILTEPAGGTTIASTARLAQEGKIGPDETVVAVISGNGLKTLHEHPEKTWPEGVPCEVGAMEEVLNDFRRAVAAAPH

SEQ ID NO: 410 - protein, 444 aa, unidentified
  REGION 1..444: note = Category: MG37 effectors
  REGION 1..444: note = Description: MG37-163 effector
  source 1..444: note = uncultivated organism sequence
MSPSSTASPQGTRQRTRSCATDLVCHRCDHRYPLTDTVFACPDCGKGLDIVYDYELAASHFRDFPSSERPQNIWHFEELLPILDASAQARVGQHSGYTPLIRADRLGAELGVNNLYLKDDSSNRPSLSYKDRVVSMSVARLLERGKTEIGCVSTGNVGTAVASMAATAGVDAFIFYPNRLEETKARVCMALGAKVVQVEGNYDEANRRCREVAAETGMDFANITLRPFYAEGAKTAAFEIVEQLQWASPDHIVSPAAGGTLSSRMHKGLGELQLLGLAETEATQIHIAQPSGCNPIASAILAEEAEVHPVMPETAAHSLAIGAPGDGYLVIDAVHKRGGTAAFASDPEIFAGIDLLAATEGLLTEPAGGTTIAVLEKLAAAGRFAPEDTVVALITGNGLKTLDEHPPKAWPAKIDCELESMLEALDELKRTPTLMQTAHEQLRA

SEQ ID NO: 411 - protein, 437 aa, unidentified
  REGION 1..437: note = Category: MG37 effectors
  REGION 1..437: note = Description: MG37-164 effector
  source 1..437: note = uncultivated organism sequence
MSDAVDPHRTEPYGLRTRSCATELNCRECGYRTPLLDKAFKCPACGEGLDVDYDYELARERIAERSHDERPWNIWRFEELLPILNRRAQERVAQFAGKTPLIHAERLGAELGLSNLYLKDDSTNRPSLSYKDRVVGMAIARLLELGKKEVGCVSTGNVGTAVAALAAQAGARPYIFDPGNMEKGKAKACRAMGAQVIQLDANYDQANRACRELALATGMEFANITLRPFYAEGAKTMAFEVVEELGWKAPDHFVIPAAGGTLSSRVHKGLVELETVGLAETAAAKINIAQASGCSPIATAITGGGEIVTQTPETAAHSLAIGAPGDGNLVVDAVRSRDGSAATASDEEIWSAIDLLGTTEGILTEPAGGTTIASTARLAQEGKIGPDDVVVAIISGNGLKTLQEHPDKPWPEMVTCEVGPMEEILNDFRQAAAAALH

SEQ ID NO: 412 - protein, 430 aa, unidentified
  REGION 1..430: note = Category: MG37 effectors
  REGION 1..430: note = Description: MG37-165 effector
  source 1..430: note = uncultivated organism sequence
MSPFAEETRSCATELVCRDCGQRLPLMDTTFKCLGCGQGLDIDYDYELAKARLGELPMSEREINIWRFEELLPILDARAQRRVGFYSGRTPLIHADRLGAELGLRKLYLKDDSTQRPSLSYKDRVVSMAVARLLELGKEEIGCVSTGNVGTAVASLAAKAGVTAYVFYPSNLEPGKARTCRALGAAVIQLDGNYDQANRACRELALASGVQFANITLRPFYAEGAKTVAYEVVEKLDWISPDHFVIPAAGGTLSSRVHKGLQELEKVGLSETAATKIHAAQPDGCGPIAGAILDGSGEIQPQTPHTAAHSLAIGAPGDGPLVVDAVMSRGGSAATVTDEEIFEAIDLLGATEGILTEPAGGTTVASTAKLAAEGKFGPDETVVAVISGNGYKTLDEHPEKPWPSMVSCDVESMGEMLAEFRQHGVGATLS

SEQ ID NO: 413 - protein, 430 aa, unidentified
  REGION 1..430: note = Category: MG37 effectors
  REGION 1..430: note = Description: MG37-166 effector
  source 1..430: note = uncultivated organism sequence
MLNGEDRTRSCATELVCRDCGRRLPLLDTTFKCLGCGQGLDVDYDYEMATARLAELPPAERPLNIWRFEELLPILDGRAQARVGRNSGRTPLIHADRLGAELGLRNLYLKDDSTARPSLSYKDRVVSMAVARLLELGKEEIGCVSTGNVGTAVASLAAKAGVTAYVFYPSNLEKGKARACRALGAAVCQLDGNYDEANRACRELALTSGIQFANITLRPFYAEGAKTVAYEVVEQLDWRSPDHFVIPAAGGTLSSRVHKGLTELEKVGLAETGATKISVAQADGCGPIAGAILDGSGEIEPQTPHTAAHSLAIGAPGDGPLVVDAVLSRGGSAATATDAEIFDAIDLLGATEGILTEPAGGTTVAATMKLAGEGKLRPDDTVVAVISGNGYKTLDEHPDKPWPEMVACDVESMGEMLAEFRQHGVGAALT

SEQ ID NO: 414 - protein, 445 aa, unidentified
  REGION 1..445: note = Category: MG37 effectors
  REGION 1..445: note = Description: MG37-167 effector
  source 1..445: note = uncultivated organism sequence
MSSSSTTASSQGTRQRTRSCATELVCHRCDHRYPLTDTVFACPDCGKGLDIAYDYELAGTHFRDFPISERPQNIWHFEELLPILDANAQARVGQYSGYTPLIRADRLGAELGLNNLYLKDDSTSRPSLSYKDRVVSMSVARLLERGKTEIGCVSTGNVGTAVASMAAKAGVDAFIFYPNRLEEMKARACMALGAKVVQVEGNYDEANRRCREVAAETGMDFANITLRPFYAEGAKTAAFEIVEQLQWASPDHIVSPAAGGTLSSRMHKGLGELQLLGLSETEGTQIHIAQPSGCNPIASAILAEEAEVVPVMPETAAHSLAIGAPGDGYLVIDAVHKRGGTAAFASDPEIFAGIDLLAATEGLLTEPAGGTTIAVLEKLAAAGRFAPEDTVVALITGNGLKTLDEHPSKAWPAKIDCELDPMLGALAELKRTPTLMQTAREQLRA

SEQ ID NO: 415 - protein, 437 aa, unidentified
  REGION 1..437: note = Category: MG37 effectors
  REGION 1..437: note = Description: MG37-168 effector
  source 1..437: note = uncultivated organism sequence
MSDAVEPHQGEAVGPRTTSCATELVCRDCGYRTPLLDTAFKCPACGEGLDIDYDYERATSLIAERGLADRPDNIWRFEELLPILSQRAQAKVGQFAGQTPLIKADRLGAELGLKNLYLKDDSTNRPSLSYKDRVVSMAVARMLALGKNEIGCVSTGNVGTAVAALAAKAGATAYNFYPRNMEKGKAKACRALGAQVCQLDGNYDQANRACRELSLASGIEFANITLRPFYAEGAKTMAFEVVEQLDWAAPDHFVIPAAGGTLSSRVHKGLNELEIVGLAETAGTKINIAQASGCGPIATAILGGGEIEPQTPDTAAHSIAIGAPGDGALVLDAVRTRGGSAATASDAEIFAAIDLLGATEGILTEPAGGTTVAATARLAAEGKIGADDTVVAVISGNGLKTLQDHPEKQWPEMVSCDVETMGELLAEFRQTAAAALR

SEQ ID NO: 416 - protein, 430 aa, unidentified
  REGION 1..430: note = Category: MG37 effectors
  REGION 1..430: note = Description: MG37-169 effector
  source 1..430: note = uncultivated organism sequence
MSLPADQRTRSCATELVCPDCGIGLPLSDTTFRCPDCDKGLDVVYDYELARQRIAEIGPAQRPQNIWRYEELLPIVDRAASERVGAFAGQTPLIRADRLGAELGLRNLYVKDDSTNRPSLSYKDRVVSMAVARAIELGCTEIGCVSTGNVGTATAALANKAGLTPYIFYPANLERAKARSCRALGAEVCQLNGNYDQANKACRELAEASGMQFANITLRPFYSEGAKTLAYEVVEQLDWVSPDHIVMPAAGGTLSSRVHKGLNELEAVGLAQTAHTRAHIGQPSGCSPIATAIVEDAAEIVHQVPETLAQSLAIGAPGDGPLVVDAVRSRRGSAAAVPDGEIITAMELLAATEGVLTEPAGGTTLAATMKLAQQGVIRPDDTVVVVISGNGLKTLSEQPVRPWPERIPCDPAAMEEVVRGFRRSGVGAAL

SEQ ID NO: 417 - protein, 445 aa, unidentified
  REGION 1..445: note = Category: MG37 effectors
  REGION 1..445: note = Description: MG37-170 effector
  source 1..445: note = uncultivated organism sequence
MSTVTSQKRAPEPARRTRSCAKALACHRCDLEYPLQERVFACPQCAKGLDVIYDYELAARRFEEVPREARPHNIWHFEELLPIVDAAAQARVGLTAGYTPLIAANRLGAELGLSNLYLKDDSTSRPSLSYKDRVVAMSVARLLELGEQEMGCVSTGNVGTAVASYAAKAGVDAYVFYPNRLEDTKARACRALGAKVCQVEGNYDEANRRCREVAEATGLEFANITLRPFYAEGAKTSAFEICEQLDWRAPDHIVTAAAGGTLSSRMHKGLRELAQLGLADTDPTRIHIAQPSGCNPIASAIIAEEAEIRAVTPETAAHSLAIGAPGDGYLVIDAVLKRGGTGGFASDPEIFAGIDLLAATEGILTEPAGGTTIAVLEKLAAAGRFGADESVVAIVTGNGLKTLDDHPEKPWPAKIDCELDAMLAALEDLRRGGSPSASERERLPA

SEQ ID NO: 418 - protein, 445 aa, unidentified
  REGION 1..445: note = Category: MG37 effectors
  REGION 1..445: note = Description: MG37-171 effector
  source 1..445: note = uncultivated organism sequence
MSPSSTASPQGTRKRTRSCATDLVCHRCEHRYPLNDTVFACPDCGKGLDIAYDYELAASHFRASPSSERPQNIWHFEELLPILDASAQARVGQHSGYTPLIRADRLGAELGLSNLYLKDDSSNRPSLSYKDRVVSMSLARLLERGKTEIGCVSTGNVGTAVASMAAKAGVDAFIFYPNRLEEMKARACMALGAQVVQVQGNYDEANRRCREVAAETGMDFANITLRPFYAEGAKTAAFEIVEQLQWASPDHIVSPAAGGTLSSRMHKGLGELQLLGLSETDATQIHIAQPSGCNPIASAILAEEAEVHPVMPETAAHSLAIGAPGDGYLVIDAVHKRGGTAAFASDPEIFAGIDLLAATEGLLTEPAGGTTIAVLEKLAAAGRFAPEDTVVALITGNGLKTTDCLQDAYEQNKAIRPRLTDFENFVEERNAVNEALRLVGESYVR

SEQ ID NO: 419 - protein, 445 aa, unidentified
  REGION 1..445: note = Category: MG37 effectors
  REGION 1..445: note = Description: MG37-172 effector
  source 1..445: note = uncultivated organism sequence
MSTPTAQSPHQGSRQRTRSCATGLVCHRCGHSYPLEDTVFACPDCGKGLDVEYDYELAARRFEEVPRSQRPQNIWRFEELLPIVDATAQARVAQHAGWTPLIRADRLGAELGLANLYLKDDSTSRPSLSYKDRVVSMSVARLLEKGKQEIGCVSTGNVGTAVASMAAKAGVDAYVFYPNRLEDMKARACRALGAKVCQVEGNYDEANKRCREVALATGMDFANITLRPFYAEGAKTAAFEIVGQLEWQAPEHIITAAAGGTLSSRLHKGLGELQLLGLAETDPTRIHIAQPSGCNPIASAILAEEAEVHAVTPETAAHSLAIGAPGDGYLVIDAVLKRGGTAGFASDPEIFAGIDLLAATEGLLTEPAGGTTIAVLEKLAAAGRFDPGDTVVAIITGNGLKTLDDHPAKPWPDKIDCELDAMLEALATLKGSGSLVDDAREQLQA

SEQ ID NO: 420 - protein, 358 aa, unidentified
  REGION 1..358: note = Category: MG37 effectors
  REGION 1..358: note = Description: MG37-173 effector
  source 1..358: note = uncultivated organism sequence
MSEAVDPRLGGPGGPRTSSCATELVCRECGYRAPLSDTAFRCPTCDAGLDVDYDYERAKASIAARGLAERPWNIWRFEELLPIAGRRAAGTVAQFAGQTPLIPARRLGAELGLRNLYVKDDSTNRPSLSYKDRVVGMAVARALELGAGEIGCVSTGNVGTATASLAAAAGLKPYVFYPANLERAKARGCRALGAQVCQVDGNYDEANRACRELTEATGIPFANISLRPFYAEGAKTLAYELVEGLGWRSPDHVVMPAAGGTLSSRVHKGLLEFEILDLAETAATKLHVGQPTGCSPIVTTIVAGAKETVPQQPETLAHSLAIGAPGDGDLVVEAVRSRGGSAAAVPDGRSPLTTSSSS

SEQ ID NO: 421 - protein, 439 aa, unidentified
  REGION 1..439: note = Category: MG37 effectors
  REGION 1..439: note = Description: MG37-174 effector
  source 1..439: note = uncultivated organism sequence
MSDAADPHLGEAIGPRTSSCATELVCRDCGYRTPLLDTAFKCPACGEGLDIDYDYERAKSLIAKRGLAERPDNIWRFEELLPILSQRAQGMVGQFSGQTPLIKADRLGAELGLKNLYLKDDSTNRPTLSYKDRVVSMAIARMLALGKDEIGCVSTGNVGTAVAALAAKAGAMAYIFYPGNMEKGKAKACRALGAQVCQLDGNYDEANRACRELSLASGIEFANITLRPFYAEGAKTVAYEVVEKLDWVSPDHFVIPAAGGTLSSRVHKGLVELEKVGLSETAQTKIHAAQADGCGPIAAAILDGSGEIEPQTPHTAAHSLAIGAPGDGPLVVDAVMSRGGSAATASDPEIFEALDLLGATEGILTEPAGGTTVASTAKLAAEGKLGPDDTVVAVISGNGYKTLDEHPEKPWPSMVSCDVESMGVMLAEFRQHGAGATLS

SEQ ID NO: 422 - protein, 444 aa, unidentified
  REGION 1..444: note = Category: MG37 effectors
  REGION 1..444: note = Description: MG37-175 effector
  source 1..444: note = uncultivated organism sequence
MSTQTAHPTAGPRQRTRSCATGLVCHRCEHSYPLESTVFACPDCGKGLDIVYDYELAASHFRDVPSSERPQNIWHFEELLPIVDASAQARVGQHSGYTPLIRADRLGAELGLSNLYLKDDSSNRPSLSYKDRVVSMSVARLLERGETEMGCVSTGNVGTAVASLAAKAGVAAYVFYPNALEDTKARACMALGAKVCQVEGNYDEANKRCRELAEATGMDFANITLRPFYAEGAKTAAFEIVEQLDWQSPDHIITAAAGGTLSSRLHKGLVELQLLELAETDPTRIHIAQPSGCNPIATAIVAEEAEIHAVTPETAAHSLAIGNPGDGYLVIDAVLKRGGTGGFASDPEIFAGIDLLAATEGLLTEPAGGTTIAVLEKLAASGRFAPDDTVVAIITGNGLKTLDDHPRKPWPAKVDCELDAMMAALSELKSGGTLVESAREQLRF

SEQ ID NO: 423 - protein, 388 aa, unidentified
  REGION 1..388: note = Category: MG37 effectors
  REGION 1..388: note = Description: MG37-176 effector
  source 1..388: note = uncultivated organism sequence
MLLHADVRERLGEIPPAEREINIWRFEELLPIVDAKAQARVGRYSGRTPLIHADRLGAELGLKKLYLKDDSTSRPSLSYKDRVVSMAVARLLELGEDEIGCVSTGNVGTAVSSLASKAGVRAYVFYPSNMERGKARACRALGAAVCQLDGNYDEANRACRELALASGIQFANITLRPFYAEGAKTVAYEVVEQLEWEAPDHIVIPAAGGTLSSRVHKGLDELETVGLAETSGVKIDVAQAEGCSPIATAISDGSGRIEPQTPHTAAHSIAIGAPGDGRLVVDAVMSRGGSAATASDQEIFEAIDLLGATEGILTEPAGGTTIACTARLANEGKLGPEDTVVAIVSGNGYKTLDEHPDKPWAEGVACDVDAMSEMLEEFRQHGVGATLG

SEQ ID NO: 424 - protein, 445 aa, unidentified
  REGION 1..445: note = Category: MG37 effectors
  REGION 1..445: note = Description: MG37-177 effector
  source 1..445: note = uncultivated organism sequence
MSTHTAESPARGARQRTRSCATGLACHRCQHSYELADTVFACPDCGKGLDVVYDYELAARHFRDFPSSERPRNIWHFEELLPIVDAGAQARVGQHSGYTPLIRAERLGAELGLSNLYLKDDSTSRPSLSYKDRVVSMSVARLLERGKREIGCVSTGNVGTAVASLAATAGVDAYVVYPNRLEDMKARACRALGAKVFQVEGNYDEANRRCRELAEATGMDFANITLRPFYAEGAKTAAFEIVEQLGWQAPDHIVTAAAGGTLSSRLHKGLGELQLLGLSQTDPTRIHIAQPSGCNPIASAILAEEAEVHPVTPETAAHSLAIGAPGDGYLVVDAVRKRGGTGGFATDPEIFAGIDLLAATEGILTEPAGGTTIAVLEKLAAAGRFAPDDTVVAIVTGNGLKTLDDHPQKPWPDKVDCELDAMLAALAELKSGGTLMDTAREQLHA

SEQ ID NO: 425 - protein, 1341 aa, unidentified
  REGION 1..1341: note = Category: MG37 effectors
  REGION 1..1341: note = Description: MG37-178 effector
  source 1..1341: note = uncultivated organism sequence
MKKWGKRIISGVIVASLLTAAAISGSEQGTATVSSVVQAGTETSFMGKLLEGGYIDVFTSWTQEEQNKFYDRLSPKEKSVFLEVTNCQIIRELIKSERTKEELERFFDRLEPYFLMLKKGSQEKPDEEIVIECINQIEGKDYESLEQYLKQLVSEKHGYYLDFYTALKRVKDGKSEIESAVNDLYKNLGFLKEDKVPAKPDKVSPLPVQVQKKAAKAVSDGYSNFKAVSSLKALKDAVASVEKGEKIAVRVDKGFNVTSAIRTNGRHVKIYADGESAHNLNRAVGYKDAMLEVNGGSLTLGAYDGDGRAKNNLYINGKNVAASAPMIEVTSGQLYLNKYSRIIDGYFLADFAGGAGIAMNSGTSCYMFGGKIDSCRAKSSKDVSSSSPKSSHGGGVLVGNGASFYMFAGSIEHCQAIHGGGIMNYGTLRLYGGTVSDCAASNKKKDALGGAVKVQGAIETDGKVNSTKGDLGVWKYTRSGTWAVNGKDGYQQKSTTGVVLKNNQADAGGAVCLNNGSNGAIQDCNIYGNHSNGNGAGICLSNGSYKKGAALEIKTGAVIHGNESKGYGGGIYCADSVKGSLRGGSMYDNSAVYGAGVYHEAEFRMTGGTVRNNHSGNSGGGIYAKGKLSMTGGEISSNTAATYGGGAILKNAGGSLSGGSIKNNTASVNGGGLQIDGAVSFSNVSVSSNSASGKGGGISVSSAGTCSFSSGNVSGNTSKAGGGGIYIDGTCKANGSNFTGNQSYGDGGAVYIASGTFTTFQANQAVNIQGNSASGNGSGIYNRNTAILNNNAHILNNQCKNGTQRGIFHEGSLFSIEGHTEIQQEIYLAKDRFITVSNRYFSNSNSLTARISLDAANIRNGYAAVKGNISNSADSNYKTGDALLNNQSVNGRFMYAGSGYVMRPGNLKKSSSGCVPYSIVLSQAYQIRYDKNSKEEVMNMPTAAVKYWEEDIRLSALTPSGGSGVFVAWNTNADGTGDGYQPGNVYTANADATLFALWPHYRVEYLPGIQGAAGTTDSQEQNKSENILLRKNSFRSSEGKFIGWKQDISSARKRRELEPVGYKELKEERERGKSDHILAFAKSYKKVNASVNLDNKNSLLNAEDIFFMEGQWDSKPDIILHDKKTFLENEKIRKNDLLKAVKGCYDDEDGDLTEKVQIIKLDYGTSMEGYRPEPQNFSGGMNDTDVIDTYFMKLEKDETVEVKVIFQVEDSVGNVAEKEGTVYVTYNNPPKLHSQNLAFYQKDLDNNPQTVLKEILENYQVEDLEDDKSGLKVPVSVVDPIPMQIEKLNSVGEHKIVYQAIDSLGKKTKLDSTVYIAENNPFKDSYKYLSLIHISEPTRPY

SEQ ID NO: 426 - protein, 438 aa, unidentified
  REGION 1..438: note = Category: MG37 effectors
  REGION 1..438: note = Description: MG37-179 effector
  source 1..438: note = uncultivated organism sequence
MSPSTTSSSTQGARKLTRSCATGLICHRCDRRYPLTDAVFACPDCGKGLDIAYDYERAARHFKEVPSSERPQNIWHFEELLPIVDASAQARVGRYAGYTPLIHADRLGAELGLSNLYLKDDSTSRPSLSYKDRVVSMSVARLLELGKDEIGCVSTGNVGTAVASLAAKAGVDAYVFYPNRLEDMKARACRALGAKVCQVEGNYDEANRRCREVAEATGLEFANITLRPFYAEGAKTAAFEIVEQLDWQSPDHIVTAAAGGTLSSRLHKGLGELQLLGLSETDPTRIHIAQPSGCNPIATAILAEEAEIHAVMPETAAHSLAIGNPGDGYLVIDAVRKRGGTGGFASDPEIFAGIDLLAATEGLLTEPAGGTTIAVLEKLAREGKFAPDDTVVAIVTGNGLKTLDEHPAKPWPAKVDCELAAMLAALDGLGRKPSPVAA

SEQ ID NO: 427 - protein, 1004 aa, unidentified
  REGION 1..1004: note = Category: MG53 effectors
  REGION 1..1004: note = Description: MG53-1 effector
  source 1..1004: note = uncultivated organism sequence
MNRSFTARLSAKTPRRLRDYLWATHRIFNESLAYVLKHYFWMQNLNDRTAEQDRRNRLRNRFDDAQLDRLRMIYRDMMGLDLPKEKRAGRSQSAHAWMEPITFSTESKGSGPGESSKNLLPQVKEAIRQIRRRNTWLFDRELAFPLSPNKGFRRGLFEAAARRILNFEQNQDTHKSYLEEARSQYERWTGGEQRDVTDEEGADERRAGWRRTVLLRAWGKEQNAQREAEIDEIARLNWSDFERARVAFEAYEQERSEKRAREHGQQFDGTKVERINAAMTRGWRDIYERLMPPDAQGAPDRTTAEEVIKGYQMSEPRRIGDVNFFLWLADKPHLWRYVDTMRAYNTHQRKLQQYAKDIQFRYPRYNVRPDWFTFSETSPGYMYTIVSMSPLVVELSVLVPKEDEPILKKHAKGKPLTEDEQARLSQPIDWSTYHLTREALANRLDRYREDLTKKHADLIAKANLGPVHDWTNGMWQQLLDGFFRGDPPLDMARFTRVMVRYALSTDRRLRPFVPQPSEDSDLIGRLEVLSNERKKRHYQGTYEYWFGPLAEARGLLVERRRYLRRIPLTVGGIRLEYRGRLRSDAEPIFTLSCELDERLNGPEGKRVFPAPAHRIPPKSDTAETAEGSAASAANKRRISKKRPKMPVGLRVMAVDLGLRHPGTGAVVEFVDDGHGHGRLPEPLKPVAVEILDVAGTSLVHIQRHQDERRRKQKKACPRGSRRRFEIRGAHLAHGQEFARGLLNHVENLKDDRRKKAAHTILRAALKHKVDYIVFENLAGYRPEMEFGRKVNAALMTWNRRELVEFVKMEAAPLGIHVYEWVPPHHTSRFCHRCGAVGHRFSHIRSIDAKKDALAPAEPLLDNAGNPKLDSYGKPILRRKWTPQARRVRGTPLGLIAGMRQAIDGGRQFCCTECGLIVNADYNAAMNLARKLADEFHAYQRYAYDREKRTWTVNGETLPGRDFWERAKALVQQRLNQRFRQPPETPPAGGWPRSLEPSPIEPTPW

SEQ ID NO: 428 - protein, 1005 aa, unidentified
  REGION 1..1005: note = Category: MG53 effectors
  REGION 1..1005: note = Description: MG53-2 effector
  source 1..1005: note = uncultivated organism sequence
MNRSFTARLSRKTHRRLRDYLWATHRIFNESLAYLLKHYFWMQNLTDRELEQDKKNRLRQRFDAAQLDQLQLIYRDMMGLDLPKEKRAGRSQSAQAWMEPITFSTRSTGKGPGELSTNILPKVKVAIRTMRQQNLWVFDRELAFPIEPHNGFRRGLFGGAARRILNFEQNQETHRGYLEDAKRAYERWRGGQAREAAEDDTVDARRAGWRRTVLLRAWGEGQEPNREAEIDGIAQLQWADFQRAREEFSQYESQRAADRAREQKRPVTENAVEKINAAMTRGWRDVYQQRLMPPDADGPPDAATAGRLIKDYQAAEPTRIGDINFFLWLADKPHLWRFVDTMKAYNAHQRKLERYGRPIQFTYPRYNRRPEWFTFSETSPGHMYTIVSMTPLKVDLAVFVPNEDVPLLEKLSKGQPLTGEETRRLNEPLDWTAYRLTPERLVERRNAHRTKLTERIPDAIAKYGLDAVHAWTDGVWERLLGGFFREDPPLDMSRFTRVMVRYSLSTDVRLRPFAPEPASEEDLLGRLVVRSNDRQKPHWQGTYQYMFGPLTEPNDSLPDRRRHLRAMPMVVGGIRLEYRDCLRNDADPIFTLSCELDERVAGPEGKQVYPAPQHRIPKKAQPTEAAEEGTPQEGKKRKDAKKRPKMPVGLRVLSVDLGMRHIGTGAVVEFVDDGHGNGRLPHPLKPVGIEFLDAPGIALRHIDRHSDERRRKQRKACPRGSRRAFEIRGAHLPRGQVFARHLLDHTENLKDDRRKKAAHAILRAALKHNVDYIVFENLKGYRPDFEFGRRVNATLMKWNRRELVEFVKMEAQPFGIWVYDFVRPSHTSQFCHRCGAAGYRFSQITRREAAFDTPAPKEPLFDEHGNRKLDSNGKPLFRHRWTPQARRIRGTPLGLIAGMRQAIDGGKHFCCSECGLIVNADYNAAMNLARKLADDFSAYQKYSYNPEDKSWALSGKRMAGKTFWEHIKATVQQRLNTRFGQPVQTPPAGGWPKEFAPESIGLTPW

SEQ ID NO: 429 - protein, 784 aa, unidentified
  REGION 1..784: note = Category: MG54 effectors
  REGION 1..784: note = Description: MG54-1 effector
  source 1..784: note = uncultivated organism sequence
MGVRALRARIECDRETLLHLWRTHCAFNQRLLSILTKLFGMRRGELGETAARRALYQRVARFLLARDSKDAPYLLNSVSIQGWKPATALKMKVRMPAPDGTLAEVSADTWAPEAAKLSAHGTLAYDKEAVRDGLPDSLFQPMLRDAVAYISGHIELARNWEAEHADWLKAKAEWEEKDEHKKYLALRPRFDAFEQSVGGKAGKRRERWHLYLTWLRENPALAAWRGGPPAVHPLDAKATARVAKAKPWKKRSVEADEFWKANPELRELDKLHGYYEREFVRRRKTKKNPDGFDHRPTFTLPHAVLHPRWTLFNAPQTSPQGYADLRLPQRPGTLGSVKLRLLTGEKAPDGCPNEWVGVQFRADPRLSQFAERAEAQEIRKGKKKGTQKTVRVFRFVDQQLNCERPAQISGAKLIFKNVKLNDDGSLKSATPYLVFACTIDNLPLTEHARAIQWSETGEVTKTGKKRKAKKLPTGLVTCAVDLGLRNLAFLTLATSGEGPQNNTHDGIRVLRSRNQWLALEETAGTHPGRWSAGPDLAHIAAHKREIRRLRRLRGKPVKGQQSHVELQGHIDHMGQDRFKKAARAIVNFALNVDRAAGQSGQPYPRADLLIVEKLEGFIPDAARERGINRALVAWNRGQLVTRIKEVAADAGLKLFPVHPAGTSQCCSRCGALGRRYSIVRDQQTGVPAIRFGWVEKLFACPNRECPGRAPDKPDQPFTCNADHNASLNLHRRFVLDDRAVAAFFAWKNKTNAERERELTQMDQALRPELEKLHRLPLAELATPF

SEQ ID NO: 430 - protein, 784 aa, unidentified
  REGION 1..784: note = Category: MG54 effectors
  REGION 1..784: note = Description: MG54-2 effector
  source 1..784: note = uncultivated organism sequence
MGVRALRARIECDRETLLHLWRTHCAFNQRLLSILTKLFGMRRGELGETAARRALYQRVARFLLARDSKDAPYLLNSVSIQGWKPATALKMKVRMPAPDGTLAEVSADTWAPEAAKLSAHGTLAYDKEAVRDGLPDSLFQPMLRDAVAYISGHIELARNWEAEHADWLKAKAEWEEKDEHKKYLALRPRFDAFEQSVGGKAGKRRERWHLYLTWLRENPALAAWRGGPPAVHPLDAKATARVAKAKPWKKRSVEADEFWKANPELRELDKLHGYYEREFVRRRKTKKNPDGFDHRPTFTLPHAVLHPRWTLFNAPQTSPQGYADLRLPQRPGTLGSVKLRLLTGEKAPDGCPNEWVGVQFRADPRLSQFAERAEAQEIRKGKKKGTQKTVRVFRFVDQQLNCERPAQISGAKLIFKNVKLNDDGSLKSATPYLVFACTIDNLPLTEHARAIQWSETGEVTKTGKKRKAKKLPTGLVTCAVDLGLRNLAFLTLATSGEGPQNNTHDGIRVLRSRNQWLALEETAGTHPGRWSAGPDLAHIAAHKREIRRLRRLRGKPVKGQQSHVELQGHIDHMGQDRFKKAARAIVNFALNVDRAAGQSGQPYPRADLLIVEKLEGFIPDAARERGINRALVAWNRGQLVTRIKEVAADAGLKLFPVHPAGTSQCCSRCGALGRRYSIVRDQQTGVPAIRFGWVEKLFACPNRECPGRAPDKPDQPFTCNADHNASLNLLRRFVLDDRAVAAFFAWKNKTNAERERELTQMDQALRPELEKLHRLPLAELATPF

SEQ ID NO: 431 - protein, 783 aa, unidentified
  REGION 1..783: note = Category: MG55 effectors
  REGION 1..783: note = Description: MG55-2 effector
  source 1..783: note = uncultivated organism sequence
GCKLMYELKHRIIDRLEQMFSFKTRGEWFREGVCPQCGKKELYTHAHNPRIVKCGRLNKCGYEEHVKDICEDLFKDWSKEFPKTEAKPHAAADAYLEHGRGFDLTKLKGRFTQEAFHNEQKFPGQVSATVRFELAPGVYWERLIDRPERFGRQKANFKGKYEGLSWTMWQLDDLCHAESIWITEGIFNSIALTLSGVPSIATMSSGNYPVKLLQQITDRCHELKKDKPRLCWAYDNDKEGRKKLKKFHLRALQEKWSSTAALPPNQIKGRSFDWNDLYMHDLLHSEERKKYRHYGELLIAESAEQAGLLIYNFKEGRTRTFFFNHEFRLYYFNLDIDKYNKALDIIEKNENLNHLLDEQKREQALRDSASCTEICNRQIKPLYFQRNEITDEHWYYAQIVSEDTEVNTTFTSSMIRNSDKFAERLLGVNEGAWWTGSTNQLVSYMKPRTEFIKRVKTIDYIGYTKEDKAWLFNDYAVHDGQIIPINEHDYFRIKRLDIKTLSNDPQIQLNPKAKFNPTWWKDFYRVRGNKGIVALAWWMGTYFAEQIRGLNSSYPFMEIVGQAGAGKSRLIEFMWKLSGRKDYEGFDPNKSTSVAVYRNFAKISNLPVVLIEGDRNDINGNAIQKAKFSWDELKDAFNGRAIRSKGVKNAGNDTYEPPFRGAILISQNTQIQASEAILTRTLLLEFDRSGQSLETKRIVDELDRMELEDACTFMTHCLRNEDKILETYASKLQSIEDHYHEIGITHTRIALCHAQVAALIEAMTKHVLPIDLEDMLEAQEMLE

SEQ ID NO: 432 - protein, 788 aa, unidentified
  REGION 1..788: note = Category: MG55 effectors
  REGION 1..788: note = Description: MG55-3 effector
  source 1..788: note = uncultivated organism sequence
GEWFREGVCPQCGKKELYTHAHNPRIVKCGRLNKCGYEEHVKDICEDLFKDWSKEFPKTEAKPHAAADAYLEHGRGFDLTKLKGRFTQEAFHNEQKFPGQVSATVRFELAPGVYWERLIDRPERFGRQKANFKGKYEGLSWTMWQLDDLCHAESIWITEGIFNSIALTLSGVPSIATMSSGNYPVKLLQQITDRCHELKKDKPRLCWAYDNDKEGRKKLKKFHLRALQEKWSSTAALPPNQIKGRSFDWNDLYMHDLLHSEERKKYRHYGELLIAESAEQAGLLIYNFKEGRTRTFFFNHEFRLYYFNLDIDKYNKALDIIEKNENLNHLLDEQKREQALRDSASCTEICNRQIKPLYFQRNEITDEHWYYAQIVSEDTEVNTTFTSSMIRNSDKFAERLLGVNEGAWWTGSTNQLVSYMKPRTEFIKRVKTIDYIGYTKEDKAWLFNDYAVHDGQIIPINEHDYFRIKRLDIKTLSNDPQIQLNPKAKFNPTWWKDFYRVRGNKGIVALAWWMGTYFAEQIRGLNSSYPFMEIVGQAGAGKSRLIEFMWKLSGRKDYEGFDPNKSTSVAVYRNFAKISNLPVVLIEGDRNDINGNAIQKAKFSWDELKDAFNGRAIRSKGVKNAGNDTYEPPFRGAILISQNTQIQASEAILTRTLLLEFDRSGQSLETKRIVDELDRMELEDACTFMTHCLRNEDKILETYASKLQSIYDHYHEIGITHTRIALCHAQVAALIEAMTKHVLPIDLEDMLEAQDMLEDMARERVAQLTGDHPDEEKFWDAYEYLQGN

SEQ ID NO: 433 - protein, 909 aa, unidentified
  REGION 1..909: note = Category: MG55 effectors
  REGION 1..909: note = Description: MG55-5 effector
  source 1..909: note = uncultivated organism sequence
MITYQDLLLPFGVKEKKGKKYAKCPFCKNGTLNINSNVFFCSKCGFRGSERDFLKKLNIKTTSDVIVSNTHPQVKINNPERPIFLVFDSELFKYLSDKFSNINLILNPIVSMKEVQNKILYICSEKQNIEYADIFFASAKLLKILNYDELFKCNTEEQLKELVLKSSFYDPYPINGLIISDDKKIVDYINKLKYTAVLAKTVSPSIIEENCNVFFLYKTATIYDIAKVINPLFQKTQNIFLFSAENITVNVFTDILSEKQKFTVQFKKIVYQTYEKIIINSDIFKKIPPNIFEQTMNEFYGCKKLIENMEFNSFLNLVLSKYDFLIKNIPWGKIEMSYLNIYEKYVGSIKKIGKSYMALCPFHPDTNPSMKIDPEKGFFYCFGCNVKGKLNNFLDKLKAECGVEVDKEDYENSKTNKKGFIKKEPINYDEVYTNKTYYSYVDLNGNLAYIKIRYDTPKENSPDVRPKTFVIEFHTQDKRLFFYNLQGLNYIKDEDKKNYEIWFAEGEKCVDVIERVLDPEPEEEYPCIVLGYNNPEREWEYLPESYKAIFKDRDIKIFVDNDEIGQKKALQLIEILKKYAKKISLIQFSDKPSGYDIADFLEEGNPIFDALAISNTVYEVRKFSGNVLDILEYEVPEQKYVLQDNLHIPTGILSIIAGSGGLGKSYLSLYFALELMAEGKNVSMITLEDPIEKIIERIQRLLRKYQKTIDKSVKFTVYEYQEQDLLELTKNILENESDVLFIDPIGSVFEDENDNAETSRFMRKLAQIAISTKKNIFLVHHIRKMMQKPKEKETTKEDLYDMVRGASAIPNTAKHVVYVRRWKEDKNVLEVITVKHNYHRTDIDLRVKNLFDRNVPVEIEKFEFEKKIERPTKELVESEVVAKNIDEQDKDFSLSKRKESKNGRRDKQL

SEQ ID NO: 434 - protein, 853 aa, unidentified
  REGION 1..853: note = Category: MG55 effectors
  REGION 1..853: note = Description: MG55-6 effector
  source 1..853: note = uncultivated organism sequence
MKTIYITEEQKNNIKNIELLTEARGERALRKYIIDYTNSYVAQFLDIPLTEIPQNLIAICNPGEGESEMFSSVKNNSSGNNKFIDFLRVNFYEQFGMLHNGPTKKYMEGIARIALGELGFYSFDNRLQGSKIVNLGRVIKIISNNEDLLRSNNINLDGNLNNLSYNELMEYLNPVVQEYIDNSKNELNNSVYETPANYVIHEIKDVSVNNYGTPMKTPTRESYDYLESLAPYCDWCIVGNRHPGMYGQYTSNGGKFYICEKEGFKDIPREQGENCPLDEYGLSLICVLVAPDGFPENITTRWNHDFNGENNPNLENAIQLQNILKVKYLDVFKPRNEEEVNSMTRTGIQESEKPAAQDQVDNKVNAGIMDAVTAGGTMEEGAEPESDKYEIGSEKDGDINPYYHVNESDDKEESELKKYCGEIADFMKKIGINVYPYPKLNLDWSEQDGLFIKTGFYAPDEKAITIFCKDRHPKDILRTFSHEMIHHSQNLNGKDLNFSSDDDVKDNDKLKDIEAEAYLKGNIYFRQWTEYKNSERDSLNESKTNKKVINDEGKVVPEKCEKCGGKIGVYICGEPIYKCSECGEYYGTVKFNLKESEIFEETNPDNIDLSSFNIKKELNPKFWKNGLLDSRIRLKLMDIADDFIDFLGIDWVKPDDIIMTGSLANFNWNKKYSDIDLHILIDFSKVDKRKDFVKKYFDSLKNSWNEQHEGLSIFGFPVEVYVQDTNESHTSTGVYSLDKNEWIKEPERKKLATSKVNKSLIRNKVANYINQIDDLEEKYNTNKDNEFKVRKISEKLEKLWDTIKNERKSELNNDKGKEISNGNIIFKCLRRLNYIDKLYDLKTKTYDKMNSLP

SEQ ID NO: 435 - protein, 881 aa, unidentified
  REGION 1..881: note = Category: MG55 effectors
  REGION 1..881: note = Description: MG55-7 effector
  source 1..881: note = uncultivated organism sequence
MNNDAMEHTLGGGILTTSGSKQRKTSKFVMGKYTLYETKDRMYIVGSNKRETMFRILEIDLTVPRGELTVLEDNVFFTRNEIMNVLASLEEATEDGLHKKITGYGLLGFIKFTCWYYLIMVTKYSQVAVIGGHGIYHIDGIDIIPITNNYKKPEKSSDEARLLNIFKDLDLTKTFYFSYTYDITNTLQTNILREKLKAVDRCDITIPCGITDYNEMFVWNNNLLSPIFACIDTVFDWFQCIIHGFIDQVNVSVLGKSIYITLIARRSHHFAGARFLKRGVNNKGHVANEVETEQIVTDMILTPFHQPGNGFFDSDRYTSFVQHRGSIPLYWTQDASNLTTKPPIRINVVDPFFSPAALHFDNLFQRYGGGTIQILNLIKTKEKTPRETKLLWEFEQCIDYLNEFLPTLKKLDYTSWDMSRASKQDGQGVIEFLEKYAVNTVTTTGIFHNGPDFASTKIQEGICRSNCIDCLDRTNAAQFVIGKRALGCQLKSLGIIDNSYLEYDSDIVNILTELFHDLGDTIALQYGGSHLVNTMETYRKINQWSSHSRDMIESIKRFYSNSFVDAQRQDAINLFLGHYSWREGFPSLWEMNTDFYLHNAYSLNMPKRSYTHWWNDYNIKSIKELINEELIATGNDVTREKIIKNVRGYPGAFDNYWNEYYLPRSVTWIRDLFAYNMNSTRRYHNAVSKQDKAMSPFTSRKQSWLNNKLKMITSSKSLEKAEGRVVETTDLDRDTSPKQELELYEHYLHIISDRSQKLEEKMNSFSYSKYPIFISHESSEIPPMRKVIGEPLVDIAEDFTDVYDDDDDDDGDDENDEMTTEALLIAPDHVSVDEKFYEKVLNVDDYKPALDDYSAVIHIKPDNLQLYRDLCFSKDIQLDFQ

SEQ ID NO: 436 - protein, 996 aa, unidentified
  REGION 1..996: note = Category: MG55 effectors
  REGION 1..996: note = Description: MG55-8 effector
  source 1..996: note = uncultivated organism sequence
MNRIYQGRVLSWSQAGEGEEAKPIKGMDNPLWVHHELFQAAVNYYYLALGALGQAATEGPFFGLQSRIKESWESDPIHKRKASGLRQLLMPYLKINESTTLDEVYSLVLGQGHAKPKTLFKVGLAVAKDLGGDSSIQMKGREYLPRLCDTKYKGKFPRETTSREKEQMKLLLPHWLHGDDVDNRIHEIIGKLKFHHFANKTGKDLSFDESKALLATGVKFLSEKSLITSSEQVKLVEKIEKLPQDFSIPTYAGGSVNKEALQVRFYAYLITINFWSSKRGLKLLRDAYPKPKTTKIPDVTLSDEETFMLVDEDDPVKMARGKRGYVFRAFTSLPVWGGKSAADIQWKEFDIAAFKEALTTFNLYKQKTEERKDRLAKVEVSLDRMNGGEKYLQADKEIRDEAADLPVMKGDPRVEKLRELLYKKIPGVDGDRFDVGVTLRSLRHYDDLVKVWQSTSRNNSDKGDAEIRDLLIDCVTQSQQKNKRTFGDVNLFRALCEPENWIVWENSDEDFLKQKNAKSWADNVVDAFRIQLKLLDDQEYLQQPIKFRPAHPIDSPRQFRFSDLVTKNHTLHKPENHLQVSVAHRDEASGLFSKQGLSLHYSAPRIYRDAIGSSGEESDHGVWLQPMMKALGIPDLPKVDIKSAAVVLNMKIDRDKTDVRAYVDFPIDLKDAAKALSDYMGKQDLWDKQFNTNKDKEKLGLYWKGMTNAPEKLWHSKKEVKENGMQILGVDLGQRTAFAYSLIDCRGDKDFSKKQNGSKRNIITAIGHDGNNTWEAALLHSGMGRLPGEDSKQFDKNGNWVTERGGKKGRKANADDIVLAKCLLKEMEVDEEGSLSEDLLKVEYAPELWDRMLRYCKCMRNRLGRYYYSAVDLLSEKPDDREKMIQYLKSHPLPGVKENDELSETWKEFAIRCLEKYETDLQKFREILLAITDEILPVRGKRWKWVPHPDFPEHGYHLLINESDESTKGKKIRGQRGLSFDRMEQLENLRKLFQAL

SEQ ID NO: 437 - protein, 912 aa, unidentified
  REGION 1..912: note = Category: MG55 effectors
  REGION 1..912: note = Description: MG55-9 effector
  source 1..912: note = uncultivated organism sequence
MSEIKHRIINRLENMFSFKTRGEWFREGVCPQCGKKELYTHAHNPRIVKCGRLVKCGYEEHVKDICEDLFKDWSEYHPQTDTNPNAAADAFLSEGRGFDISNLIGKYTQQFYKDSNTGESSATVRFMLDDKNYWERLIDRPERFGNKKARFNFGFKNAGQAWSMHELDEICRLGEKGEAIWITEGIFDAIALSQSGVKAISCLSCVNYPSAFLKQIADRCHELKIDKPRLRWAFDNDSAGKGYTVKWHERSRAEGWSSTAAQPPANGGKKLDWNDLFQWDKLNPDQFPKYKHYGELLIAESAEDAGLLIYNFKQGRLKSFYFEYNYAMYHFNLDIEKYTKKLEKIEEDENQDHLLDKQKREMALRECQSIRQICSSSIQPLYFVRDNITDQSFYYIKVQSEKQQIVVNFTSDQISSPAKLKPRLLGVLSGTNWKGNQNDVDYLIDRMKDLKTVHTVDFIGYSREYQTYLFEKYAIHKGQIIPINEHNFFKVKRKELKTLAVSPAITLNPKQEFKPSWWNDFHRVRGAKGIVALAWWMGSYFAEQIRAMHSSYPFMEIVGEAGAGKSRLIEMMWKLSGRKDYEGFDANKSTNVAVYRNFAQIANLPVVLIEGDRNDVNGNAVQKSKFSWDELKDAFNGRAIRSKGLKTAGNETYEPPFRGAILISQNTAIQASEAILTRTLHLYFDRKGQSLETKRIVDELDRMELEDACAFMTHCLRNEDKILQTYASKLQSIEDHYHEIGITHTRIALCHAQVAALIEAMTKHVLPIDLEDMLEAQEMLEQMARERVEQLNGDHPDVEKFWDVYEYLQGNRSPEWGLNHHPADAQTVAINLNEIYKVAARNYQQLPEINEMKKLLRTSRKYKFIESNKQVYSDRFPADDVAAVNKSREAPGKPSRNVKCWIFTNPNLGAKK

SEQ ID NO: 438 - protein, 909 aa, unidentified
  REGION 1..909: note = Category: MG55 effectors
  REGION 1..909: note = Description: MG55-10 effector
  source 1..909: note = uncultivated organism sequence
MSELKHRIIERLEKTFNFKKRDEWFREGLCPSCGKKEVFTHAINPRIVKCGRLNKCGYEEHVKDICEDLFKDWSKEFPKTEAKPHAAADAYLQHGRGFDLSKINGLYTQEAFHNEKKFPGLVSATVRFKLAPGIYWERLIDRPERFGRQKANFIGKYEGYSWTMMELDALCNADSIWFTEGIFNAIALTLSNVPAVATMSSGNYPTKLLQQITDRCHELKKDKPRLCWAFDNDKAGKKAIKKFHLRAIQEKWSSTAALPPHQIKDKNFDWNDLYMHDLLHSEERKKYRHYGELLIAETAEQAGLLIYNFKEGRTRTFYYNHDFRLYYFNLDIDKFNKSLEHIEKNEDMDHLLEQQKREQALRDSASCTELCTRQIQPLYFQRNEITDDHWYYVQIISEDSEINTTFTSSMIRNSDKFAERLLGVHEGAWWTGSTNQLISYMKPRTEFIKRVKTIDYVGYTKEDKAWLFNDYAVHDGQIIPINKHDYFRIKRMDIKTLSNDPHIQLNPQGKFTPTWWNDFYRVRGTKGIIALAWWMGSYFAEQIRAEHSSYPFIEIVGEAGAGKSRLIEFMWKLSGRKDYEGFDPNKSTSVSVYRNLSKVSNLPVVLIEGDRNDANGNAVQKAKFSWDELKDAFNGRSIRSKGLKTSGNETYEPPFRGAVLISQNTAIQASEAILTRTLHLYFDRKGQSLETKRIVDELDRMELEDACTFMTHCLRNESKILETYKNSLQEIEAEYHEMGITHTRIALCHAQVASLITAMAQHVLPIDLEEVIKAQNMLQVMARDRVDQLNGDHPDVEKFWDVYEYLEGNRSAAWSLNHHDSDNQTVAINLNEVYKVAARNFQQLPEINEMKKLLRTSRKYKFIESNRQCHSERFPADEVSGVAKDREPTVKPKRNVKCWIFTNPNLGGK

SEQ ID NO: 439 - protein, 909 aa, unidentified
  REGION 1..909: note = Category: MG55 effectors
  REGION 1..909: note = Description: MG55-11 effector
  source 1..909: note = uncultivated organism sequence
MSELKHRIIERLEKTFNFKKRDEWFREGLCPSCGKKEVFTHAINPRIVKCGRLNKCGYEEHVKDICEDLFKDWSKEFPKTEAKPHAAADAYLQHGRGFDLSKINGLYTQEAFHNEKKFPGLVSATVRFKLAPGIYWERLIDRPERFGRQKANFIGKYEGYSWTMMELDALCNADSIWFTEGIFNAIALTLSNVPAVATMSSGNYPTKLLQQITDRCHELKKDKPRLCWAFDNDKAGKKAIKKFHLRAIQEKWSSTAALPPHQIKDKNFDWNDLYMHELLHSEERKKYRHYGELLIAETAEQAGLLIYNFKEGRTRTFYYNHDFRLYYFNLDIDKFNKSLEHIEKNEDMDHLLEQQKREQALRDSASCTELCTRQIQPLYFQRNEITDEHWYYVQIISEDNEINTTFTSSMIRNSDKFAERLLGVHEGAWWTGSTNQLISYMKPRTEFIKRVKTIDYVGYTKEDKAWLFNDYAVHDGQIIPINKHDYFRIKRMDIKTLSNDPHIQLNPQGKFTPTWWNDFYRVRGTKGIIALAWWMGSYFAEQIRAEHSSYPFIEIVGEAGAGKSRLIEFMWKLSGRKDYEGFDPNKSTSVSVYRNLSKVSNLPVVLIEGDRNDANGNAVQKAKFSWDELKDAFNGRSIRSKGLKTSGNETYEPPFRGAVLISQNTAIQASEAILTRTLHLYFDRKGQSLETKRIVDELDRMELEDACTFMTHCLRNESKILETYKNSLQEIEAEYHEMGITHTRIALCHAQVASLITAMAQHVLPIDLEEVIKAQNMLQVMARDRVDQLNGDHPDVEKFWDVYEYLEGNRSAAWSLNHHDSDNQTVAINLNEVYKVAARNFQQLPEINEMKKLLRTSRKYKFIESNRQCHSERFPADEVSGVAKDREPTVKPKRNVKCWIFTNPNLGGK

SEQ ID NO: 440 - protein, 906 aa, unidentified
  REGION 1..906: note = Category: MG55 effectors
  REGION 1..906: note = Description: MG55-13 effector
  source 1..906: note = uncultivated organism sequence
MSNIHVLIDEKLNQLFSFKRVGEWYRQGICPNCGKKELYTHAVNPRVVKCARLNKCGYEEHVKEICEDLFKDWSKDFPRTKENPNAAADAYLLHARGFDPNILKGLYTQELFRNDLKYPNEVTATIRFKLANGIYWERFIDRPERFGRQKANFIGKYEGHAWTLEQLDTLCNAQSIWITEGIFNAIALSFSKQPSIATLSTSNYPSLILKQITDRCIELKKDRPRLRWAFDNDKAGKKAIKKFHLRALQEKWNSTAALPSGQLDWNDLYQRDQLHSEYRDQYKHYGELHIAESPEQAGLLIYNYKDARRKTFWFIHNFRLYWFNLDMDKYTKELERIEADPERDLLLDSQKRELALQQCAAVSEICNRQLNPLYFQRNEITDESWYYFQILNPESEAKATFTADQISARGKFAPRLLSVQVGAWWTGNDHQLLTFMKNQTERLREVKTIDFIGYSKEYQAYIFNKHAVYKGQVIDINDHDFYKVGRIELKTLANSPNVQLNPKSTFKPTWWKDFYRVRGAKGLVALAWWTGSYFAEQIRSMHSSFPFIEIVGEAGAGKSRLIEFMWKLSGRPDYEGFDANKSTNVAVYRNFAQISNLPVVLIEGDRNDQNGNSVGKPKFSWDELKDAYNGRAIRSKGLKTAGNETYEPPFRGAIMISQNTAIQASEAILTRTLHLYFDRKGQSLETKRIVDDLDRMNIEEACTYMTHCLRHENAFLKTYAEKLEQTEKEFHNNGITHTRIALCHAQVSALIDAVAKHILHDVIDLEEVCAAQNMLLDMAHERVKQLNGDHPLVEQFWDVYEYLNSSRSTEFSINHFEHDAHQIAINLNEVYKVAAKNYQQLPDIKEMKNLLTASRRYKFVDKSRVVKSHRYPADEVKNALEDKTLREHTVRCWIFQNPAISGSPNS

SEQ ID NO: 441 - protein, 906 aa, unidentified
  REGION 1..906: note = Category: MG55 effectors
  REGION 1..906: note = Description: MG55-14 effector
  source 1..906: note = uncultivated organism sequence
MSNIHVLIDEKLNQLFSFKRVGEWYRQGICPNCGKKELYTHAVNPRVVKCARLNKCGYEEHVKEICEDLFKDWSKDFPRTKENPNAAADAYLLHARGFDPNILKGLYTQELFRNDLKYPNEVTATIRFKLANGIYWERFIDRPERFGRQKANFIGKYEGHAWTLEQLDTLCNAQSIWITEGIFNAIALSFSKQPSIATLSTSNYPSLILKQITDRCIELKKDRPRLRWAFDNDKAGKKAIKKFHLRALQEKWNSTAALPSGQLDWNDLYQRDQLHSEYRDQYKHYGELHIAESPEQAGLLIYNYKDARRKTFWFIHNFRLYWFNLDMDKYTKELERIEADPERDLLLDSQKRELALQQCAAVSEICNRQLNPLYFQRNEITDESWYYFQILNPESEAKATFTADQISARGKFAPRLLSVQVGAWWTGNDHQLLTFMKNQTERLREVKTIDFIGYSKEYQAYIFNKHAVYKGQVIDINDHDFYKVGRIELKTLANSPNVQLNPKSTFKPTWWKDFYRVRGAKGLVALAWWTGSYFAEQIRTMHSSFPFIEIVGEAGAGKSRLIEFMWKLSGRPDYEGFDANKSTNVAVYRNFAQISNLPVVLIEGDRNDQNGNSVGKPKFSWDELKDAYNGRAIRSKGLKTAGNETYEPPFRGAIMISQNTAIQASEAILTRTLHLYFDRKGQSLETKRIVDDLDRMNIEEACTYMTHCLRHENAFLKTYAEKLEQTEKEFHNNGITHTRIALCHAQVSALIDAVAKHILHDVIDLEEVCAAQNMLLDMAHERVKQLNGDHPLVEQFWDVYEYLNSSRSTEFSINHFEHDAHQIAINLNEVYKVAAKNYQQLPDIKEMKNLLTASRRYKFVDKSRVVKSHRYPADEVKNALEDKTLREHTVRCWIFQNPAISGSPNS

SEQ ID NO: 442 - protein, 769 aa, unidentified
  REGION 1..769: note = Category: MG55 effectors
  REGION 1..769: note = Description: MG55-15 effector
  source 1..769: note = uncultivated organism sequence
MYELKHRIIDRLEQMFSFKTRGEWFREGLCPSCGKKEVFTHAINPRIVKCGRLNKCGYEEHVKDICEDLFKDWSKEFPKTEAKPHAAADAYLQHGRGFDLSKINGLYTQEAFHNEKKFPGLVSATVRFKLAPGIYWERLIDRPERFGRQKANFIGKYEGYSWTMMELDALCNADSIWFTEGIFNAIALTLSNVPAVATMSSGNYPTKLLQQITDRCHELKKDKPRLCWAFDNDKAGKKAIKKFHLRAIQEKWSSTAALPPHQIKDKNFDWNDLYMHELLHSEERKKYRHYGELLIAETAEQAGLLIYNFKEGRTRTFYYNHDFRLYYFNLDIDKFNKSLEHIEKNEDMDHLLEQQKREQALRDSASCTELCTRQIQPLYFQRNEITDEHWYYVQIISEDNEINTTFTSSMIRNSDKFAERLLGVHEGAWWTGSTNQLISYMKPRTEFIKRVKTIDYVGYTKEDKAWLFNDYAVHDGQIIPINKHDYFRIKRMDIKTLSNDPHIQLNPQGKFTPTWWNDFYRVRGTKGIIALAWWMGSYFAEQIRAEHSSYPFIEIVGEAGAGKSRLIEFMWKLSGRKDYEGFDPNKSTSVSVYRNLSKVSNLPVVLIEGDRNDANGNAVQKAKFSWDELKDAFNGRSIRSKGLKTSGNETYEPPFRGAVLISQNTAIQASEAILTRTLHLYFDRKGQSLETKRIVDELDRMELEDACTFMTHCLRNEDKILETYASKLQSIEDHYHAIGITHTRIALCHAQVAALIEAMTKHVLPIDLE

SEQ ID NO: 443 - protein, 882 aa, unidentified
  REGION 1..882: note = Category: MG55 effectors
  REGION 1..882: note = Description: MG55-16 effector
  source 1..882: note = uncultivated organism sequence
MYELKHRIIDRLEQMFSFKTRGEWFREGVCPQCGKKELYTHAHNPRIVKCGRLNKCGYEEHVKDICEDLFKDWSKEFPKTEAKPHAAADAYLEHGRGFDLTKLKGRFTQEAFHNEQKFPGQVSATVRFELAPGVYWERLIDRPERFGRQKANFKGKYEGLSWTMWQLDDLCHAESIWITEGIFNSIALTLSGVPSIATMSSGNYPVKLLQQITDRCHELKKDKPRLCWAYDNDKEGRKKLKKFHLRALQEKWSSTAALPPNQIKGRSFDWNDLYMHDLLHSEERKKYRHYGELLIAESAEQAGLLIYNFKEGRTRTFFFNHEFRLYYFNLDIDKYNKALDIIEKNENLNHLLDEQKREQALRDSASCTEICNRQIKPLYFQRNEITDEHWYYAQIVSEDTEVNTTFTSSMIRNSDKFAERLLGVNEGAWWTGSTNQLVSYMKPRTEFIKRVKTIDYIGYTKEDKAWLFNDYAVHDGQIIPINEHDYFRIKRLDIKTLSNEPQIQLNPKAKFNPTWWKDFYRVRGNKGIVALAWWMGTYFAEQIRGLNSSYPFMEIVGQAGAGKSRLIEFMWKLSGRKDYEGFDPNKSTSVAVYRNFAKISNLPVVLIEGDRNDINGNAIQKAKFSWDELKDAFNGRAIRSKGVKNAGNDTYEPPFRGAILISQNTQIQASEAILTRTLLLEFDRSGQSLETKRIVDELDRMELEDACTFMTHCLRNEDKILETYASKLQSIEDHYHEIGITHTRIALCHAQVAALIEAMTKHVLPIDLEDMLEAQEMLEDMARERVEQLNGDHPDVEKFWDAYEYLQGNRSPEWGLNHHDNDAQTIAINLNEIYKVAARNYQQLPEINEMKKLLRTSRKYKFIESNKQVYSDRFPADDVAAV

SEQ ID NO: 444 - protein, 751 aa, unidentified
  REGION 1..751: note = Category: MG55 effectors
  REGION 1..751: note = Description: MG55-17 effector
  source 1..751: note = uncultivated organism sequence
MYELKHRIIDRLEQMFSVKTRGEWFREGVCPQCGKKELYTHAHNPRIVKCGRLNKCGYEEHVKDICEDLFKDWSKEFPKTEAKPHAAADAYLEHGRGFDLTKLKGRFTQEAFHNEQKFPGQVSATVRFELAPGVYWERLIDRPERFGRQKANFKGKYEGLSWTMWQLDDLCHAESIWITEGIFNSIALTLSGVPSIATMSSGNYPVKLLQQITDRCHELKKDKPRLCWAYDNDKEGRKKLKKFHLRALQEKWSSTAALPPNQIKGRSFDWNDLYMHDLLHSEERKKYRHYGELLIAESAEQAGLLIYNFKEGRTRTFFFNHEFRLYYFNLDIDKYNKALDIIEKNENLNHLLDEQKREQALRDSASCTEICNRQIKPLYFQRNEITDEHWYYAQIVSEDTEVNTTFTSSMIRNSDKFAERLLGVNEGAWWTGSTNQLVNYMKPRTEFIKRVKTIDYIGYTKEDKAWLFNDYAVHDGQIIPINEHDYFRIKRLDIKTLSNDPQIQLNPKAKFNPTWWKDFYRVRGNKGIVALAWWMGTYFAEQIRGLNSSYPFMEIVGQAGAGKSRLIEFMWKLSGRKDYEGFDPNKSTSVAVYRNFAKISNLPVVLIEGDRNDINGNAIQKAKFSWDELKDAFNGRAIRSKGVKNAGNDTYEPPFRGAILISQNTQIQASEAILTRTLLLEFDRSGQSLETKRIVDELDRMELEDACTFMTHCLRNEDKILETYASKLQSIEDHYHAIGITHTRIALCHAQ

SEQ ID NO: 445 - protein, 753 aa, unidentified
  REGION 1..753: note = Category: MG55 effectors
  REGION 1..753: note = Description: MG55-18 effector
  source 1..753: note = uncultivated organism sequence
NRRNKISGRKLMSELKHRIIDRLENMFSFKTRGEWFREGICPQCGKKELYTHAHNPRIVKCGRLVKCGYEEHVKDICEDLFKDWSEFHPQTDTNPNAAADAFLSEGRGFDISNLIGKYTQQFYKDSNTGESSATVRFMLDDKNYWERLIDRPERFGNKKARFNFGFKNAGQAWSVHELDEICRLGEKGEAIWITEGIFDAIALSQSGVKAISCLSCVNYPSAFLKQIADRCHELKIDKPRLRWAFDNDSAGKGYTVKWHERSRAEGWSSTAAQPPANGGKKLDWNDLFQWDKLNPDQFPKYKHYGELLIAESAEDAGLLIYNFKQGRLKSFYFEHHFSMYHFNLDIEKYTKKLEKIEEDETQDHLLDKQKRELALRECQSIRQICSASIQPLYFVRDSVTDQAFYYFKITSKKQETIVNFTSEQISSPAKLKTRLLSVLSGANWTGNQNDLDHFITRIEDLKTVLTIDFVGYSREHETYIFEKYAVHKGQVIPINEHDFFKVKRKEIKTLASSPEISLNPKKQFDPSWWNDFHKIRGAKGIVALAWWMGSYFAEQIRAMHSSYPFMEIVGEAGAGKSRLIELMWKLSGRKDYEGFDPNKGSFAGIYRNFGKVSNLPTVLIEADRNDVNGNSVQKSKFSWDELKDMFNGRTIRTMGVKTSGNETHEPPFRSSILISQNTQIQASEAILTRTLHLYFDRKGQSLETKRIVDELDRMELEDACTFMTHCLRNEDKILETYASKLQSIEDHYHEIGI

SEQ ID NO: 446 - protein, 777 aa, unidentified
  REGION 1..777: note = Category: MG55 effectors
  REGION 1..777: note = Description: MG55-19 effector
  source 1..777: note = uncultivated organism sequence
REGVCPQCGKKELYTHAHNPRIVKCGRLVKCGYEEHVKDICDDLFKDWSEYHPQTDTNPNAAADAFLSEGRGFDISNLIGKYTQQFYTDKDSKESSATVRFMLDDKNYWERLIDRPERFGNKKARFNFGFKNAGQAWSVHELDEICRLGEKGEAIWITEGIFDAIALSQSGVKAISCLSCVNYPSAFLKQIADRCHELKIDKPRLRWAFDNDSAGKGYTVKWHERSRAEGWSSTAAQPPANGGKKLDWNDLFQWDKLNPDQFPKYKHYGELLIAETAEDAGLLIYNFKQGRLKSFYFEHHFSMYHFNLDIEKYTKKLEKIEEDETQDHLLDKQKRELALRECQSIRQICSASIQPLYFVRDSVTDQAFYYFKITSKKQETIVNFTSEQISSPAKLKTRLLSVLSGANWTGNQNDLDHFITRIEDLKTVLTIDFVGYSREHETYIFEKYAVHKGQVIPINEHDFFKVKRKEIKTLASSPEISLNPKKQFDPSWWNDFHKVRGAKGIVALAWWMGSYFAEQIRAMHSSYPFMEIVGEAGAGKSRLIELMWKLSGRKDYEGFDPNKGSFAGIYRNFGKVSNLPTVLIEADRNDVNGNSVQKSKFSWDELKDMFNGRTIRTMGVKTSGNETHEPPFRSSILISQNTQIQASEAILTRTLHLYFDRKGQSLETKRIVDELDRMELEDACTFMTHCLRNEDKILETYASKLQSIEDHYHEIGITHTRIALCHAQVAALIEAMTKHVLPIDLEDMLEAQEMLEDMARERVEQLNGDHPDVEKFW

SEQ ID NO: 447 - protein, 793 aa, unidentified
  REGION 1..793: note = Category: MG55 effectors
  REGION 1..793: note = Description: MG55-20 effector
  source 1..793: note = uncultivated organism sequence
SGCKLMYELKHRIIDRLEQMFSFKTRGEWFREGVCPQCGKKELYTHAHNPRIVKCGRLNKCGYEEHVKDICEDLFKDWSKEFPKTEAKPHAAADAYLEHGRGFDLTKLKGRFTQEAFHNEQKFPGQVSATVRFELAPGVYWERLIDRPERFGRQKANFKGKYEGLSWTMWQLDDLCHAESIWITEGIFNSIALTLSGVPSIATMSSGNYPVKLLQQITDRCHELKKDKPRLCWAYDNDKEGRKKLKKFHLRALQEKWSSTAALPPNQIKGRSFDWNDLYMHDLLHSEERKKYRHYGELLIAESAEQAGLLIYNFKEGRTRTFFFNHEFRLYYFNLDIDKYNKALDIIEKNENLNHLLDEQKREQALRDSASCTEICNRQIKPLYFQRNEITDEHWYYAQIVSEDTEVNTTFTSSMIRNSDKFAERLLGVNEGAWWTGSTNQLVSYMKPRTEFIKRVKTIDYIGYTKEDKAWLFNDYAVHDGQIIPINEHDYFRIKRLDIKTLSNDPQIQLNPKAKFNPTWWKDFYRVRGNKGIVALAWWMGTYFAEQIRGLNSSYPFMEIVGQAGAGKSRLIEFMWKLSGRKDYEGFDPNKSTSVAVYRNFAKISNLPVVLIEGDRNDINGNAIQKAKFSWDELKDAFNGRAIRSKGVKNAGNDTYEPPFRGAILISQNTQIQASEAILTRTLLLEFDRSGQSLETKRIVDELDRMELEDACTFMTHCLRNEDKILETYASKLQSIEDHYHEIGITHTRIALCHAQVAALIEAMTKHVLPIDLEDMLEAQEMLEDMARERVEQ

SEQ ID NO: 448 - protein, 840 aa, unidentified
  REGION 1..840: note = Category: MG55 effectors
  REGION 1..840: note = Description: MG55-21 effector
  source 1..840: note = uncultivated organism sequence
MIFLLYHVIFIYNYTLMNFRKTLQKCKEKLQNNIINQNDSIWMPLDVRVCDNYHFKTDSFNLIVKYDSEHLEHNNTFHFNNYEHLQAKIVNVFFDKVQKSIIKTWMKLYKYTYDTVIQIFSHVYNLCNIYYKINFYDARKILTNFISYNCKNNYKFNYFYKLNKHTIRKFYFYRNNKLCNKEIKILKKQFTKIKFNNIYNSDNYINLFKILKEYRSEYVKYVKFYSANPIHFLNKLHFTDFYNKLQDEYKQLFINLKCPIEEIILQEKNINIPIFKYDDYNPYMKKYTDFIKNRDNINNYEEHNKIYRLYVNYENKLINKQKRLLEIRSKLIYTKLSVIVKLIDNVINTFYKHIYKIIEEKLPQQVNNFVDQVKLYKTNEQFRNKKNAILQKYGYKTTINYKNTINEMRKSSVGKKIIINEKKLLYKDIIKTNHVSIFEPKYTNSLRNNTNVSRHTIDLAVEKACANYKTCLTNLKNRNIDNFNLREIKLRKMIIDIEPNEFSKEGIRKNILGTTTGFYNGILFDFTTINKATILKYNEKLNKYTLHVPYINKNLSEDEKKEKIKILEKKLKMTKKQKKRNKRRRKEKIKKRNNKNKKKETIKNIKKEIKRIKKNNMEKTGEGTISLDPGVRKYLTGYSSEKKKNIEIRENIKIKKNCYKIYETTKKYGLSSGKKKKVKKKEKKEKKEKKVKREIKVISEKEKEKVKRKLENRSKKVYRQMTDFHNKVIKYLTENYASILIGDMSLKGILNKKTSKLKKKTKYLCTRLRIGMLRTKLKKKCEEKNLKYKLVNEAYTSKTCTKCGTINENLKSKETFNCNECKIIIDRDLNGARNIHLASL

SEQ ID NO: 449 - protein, 719 aa, unidentified
  REGION 1..719: note = Category: MG55 effectors
  REGION 1..719: note = Description: MG55-22 effector
  source 1..719: note = uncultivated organism sequence
MQVVKRDGKLVDFDQSKIRVAIEKANREVRPRERATKEEINQIIDYVEDLDKKRILVEDIQDIIEEQLMSFGKYLLAKKYITYRYTRELVRKANTTDQSIKELIDGESDYWNNENSNKNARVVTTQRDYLAGITSTDITRRFLLPEDVVKAHDEGIIHFHDADYFAQNALTNCELINLEDMLQNGTIMNGVMIEKPHRFLTAMTIATQIILGVTSSTYGGATVSLTHLAPFVKSSYDRYYKKYKKRGLSEAQCKEYAEQDTKKEVSDGVQTFNYQVNSMTNTNGQAPFLSVCMYLGETDEYKKELAMIIEEFLKQRIEGFKNEKGVYITPAFPKLLYVLEEDNIHKDSKYWYLTELAAKCTAKRLVPDYISEKKMKELKIDKNGNGNCYPCMGCRSFLTPYVDPETNKPKYYGRFNQGVVTINLVDVALSSKQDEEKFWKIFDERLELCHKALQIRHERLSKVTSDVAPILWQHGALARLEKGESIHKLLHDGYSTISLGYAGLYECVKYMTGHSHTDNGEGEEFAIKVMQKLNDKCKEWKEAEKIDYSVYGTPIESTTYKFAKCLKKRFGTVEGITDRSYITNSYHVPVFEDIDAFSKLKLESKFQKLSPGGAISYVETPNLQDNLEVVLQIINFIYDNIMYAELNTKSDYCQKCGFDGEILIDENLEWYCPNCGNRDHNTLNVARRTCGYIGSQFWNKGRTQEIKERVLHIDNKDDE

SEQ ID NO: 450 - protein, 719 aa, unidentified
  REGION 1..719: note = Category: MG55 effectors
  REGION 1..719: note = Description: MG55-23 effector
  source 1..719: note = uncultivated organism sequence
MQVVKRDGKLVDFDQSKIRVAIEKANREVRPRERATKEEINQIIDYVEDLDKKRILVEDIQDIIEEQLMSFGKYLLAKKYITYRYTRELVRKANTTDQSIKELIDGESDYWNNENSNKNARVVTTQRDYLAGITSTDITRRFLLPEDVVKAHDEGIIHFHDADYFAQNALTNCELINLEDMLQNGTIMNGVMIEKPHRFLTAMTIATQIILGVTSSTYGGATVSLTHLAPFVKSSYDRYYKKYKKRGLSEAQCKEYAEQDTKKEVSDGVQTFNYQVNSMTNTNGQAPFLSVCMYLGETDEYKKELAMIIEEFLKQRIEGFKNEKGVYITPAFPKLLYVLEEDNIHKDSKYWYLTELAAKCTAKRLVPDYISEKKMKELKIDKNGNGNCYPCMGCRSFLTPYVDPETNKPKYYGRFNQGVVTINLVDVALSSKQDEEKFWKIFDERLELCHKALQIRHERLSKVTSDVAPILWQHGALARLKKGESIHKLLHDGYSTISLGYAGLYECVKYMTGHSHTDNGEGEEFAIKVMQKLNDKCKEWKEAEKIDYSVYGTPIESTTYKFAKCLKKRFGTVEGITDRSYITNSYHVPVFEDIDAFSKLKLESKFQKLSPGGAISYVETPNLQDNLEVVLQIINFIYDNIMYAELNTKSDYCQKCGFDGEILIDENLEWYCPNCGNRDHNTLNVARRTCGYIGSQFWNKGRTQEIKERVLHIDNKDDE

SEQ ID NO: 451 - protein, 719 aa, unidentified
  REGION 1..719: note = Category: MG55 effectors
  REGION 1..719: note = Description: MG55-24 effector
  source 1..719: note = uncultivated organism sequence
MQVVKRDGKLVDFDQSKIRVAIEKANREVRPRERATKEEINQIIDYVEDLDKKRILVEDIQDIIEEQLMSFGKYLLAKKYITYRYTRELVRKANTTDQSIKELIDGESDYWNNENSNKNARVVTTQRDYLAGITSTDITRRFLLPEDVVKAHDEGIIHFHDADYFAQNALTNCELINLEDMLQNGTIMNGVMIEKPHRFLTAMTIATQIILGVTSSTYGGATVSLTHLAPFVKSSYDRYYKKYKKRGLSEAQCKEYAEQDTKKEVSDGVQTFNYQVNSMTNTNGQAPFLSVCMYLGETDEYKKELAMIIEEFLKQRIEGFKNEKGVYITPAFPKLLYVLEEDNIHKDSKYWYLTELAAKCTAKRLVPDYISEKKMKELKIDKNGNGNCYPCMGCRSFLTPYVDPETNKPKYYGRFNQGVVTINLVDVALSSKQDEEKFWKIFDERLELCHKALQIRHERLSKVTSDVAPILWQHGALARLEKGESIHKLLHDGYSTISLGYAGLYECVKYMTGHSHTDNGEGEEFAIKVMQKLNDKCKEWKEAEKIDYSVYGTPIESTTYKFAKCLKKRFGTVEGITDRNYITNSYHVPVFEDIDAFSKLKLESKFQKLSPGGAISYVETPNLQDNLEVVLQIINFIYDNIMYAELNTKSDYCQKCGFDGEILIDENLEWYCPNCGNRDHNTLNVARRTCGYIGSQFWNKGRTQEIKERVLHIDNKDDE

SEQ ID NO: 452 - protein, 719 aa, unidentified
  REGION 1..719: note = Category: MG55 effectors
  REGION 1..719: note = Description: MG55-25 effector
  source 1..719: note = uncultivated organism sequence
MQVVKRDGKLVDFDQSKIRVAIEKANREVKPRERATKEEINQIIDYVEDLDKKRILVEDIQDIIEEQLMSFGKYLLAKKYITYRYTRELVRKANTTDQSIKELIDGESDYWNNENSNKNARVVTTQRDYLAGITSTDITRRFLLPEDVVKAHDEGIIHFHDADYFAQNALTNCELINLEDMLQNGTIMNGVMIEKPHRFLTAMTIATQIILGVTSSTYGGATVSLTHLAPFVKSSYDRYYKKYKKRGLSEAQCKEYAEQDTKKEVSDGVQTFNYQVNSMTNTNGQAPFLSVCMYLGETDEYKKELAMIIEEFLKQRIEGFKNEKGVYITPAFPKLLYVLEEDNIHKDSKYWYLTELAAKCTAKRLVPDYISEKKMKELKIDKNGNGNCYPCMGCRSFLTPYVDPETNKPKYYGRFNQGVVTINLVDVALSSKQDEEKFWKIFDERLELCHKALQIRHERLSKVTSDVAPILWQHGALARLKKGESIHKLLHDGYSTISLGYAGLYECVKYMTGHSHTDNGEGEEFAIKVMQKLNDKCKEWKEAEKIDYSVYGTPIESTTYKFAKCLKKRFGTVEGITDRSYITNSYHVPVFEDIDAFSKLKLESKFQKLSPGGAISYVETPNLQDNLEVVLQIINFIYDNIMYAELNTKSDYCQKCGFDGEILIDENLEWYCPNCGNRDHNTLNVARRTCGYIGSQFWNKGRTQEIKERVLHIDNKDDE

SEQ ID NO: 453 - protein, 719 aa, unidentified
  REGION 1..719: note = Category: MG55 effectors
  REGION 1..719: note = Description: MG55-26 effector
  source 1..719: note = uncultivated organism sequence
MQVVKRDGKLVDFDQSKIRVAIEKANREVKPRERATKEEINQIIDYVEDLDKKRILVEDIQDIIEEQLMSFGKYLLAKKYITYRYTRELVRKANTTDQSIKELIDGESDYWNNENSNKNARVVTTQRDYLAGITSTDITRRFLLPEDVVKAHDEGIIHFHDADYFAQNALTNCELINLEDMLQNGTIMNGVMIEKPHRFLTAMTIATQIILGVTSSTYGGATVSLTHLAPFVKSSYDRYYKKYKKRGLSEAQCKEYAEQDTKKEVSDGVQTFNYQVNSMTNTNGQAPFLSVCMYLGETDEYKKELAMIIEEFLKQRIEGFKNEKGVYITPAFPKLLYVLEEDNIHKDSKYWYLTELAAKCTAKRLVPDYISEKKMKEYKIDKNGNGNCYPCMGCRSFLTPYVDPETNKPKYYGRFNQGVVTINLVDVALSSKQDEEKFWKIFDERLELCHKALQIRHERLSKVTSDVAPILWQHGALARLKKGESIHKLLHDGYSTISLGYAGLYECVKYMTGHSHTDNGEGEEFAIKVMQKLNDKCKEWKEAEKIDYSVYGTPIESTTYKFAKCLKKRFGTVEGITDRNYITNSYHVPVFEDIDAFSKLKLESKFQKLSPGGAISYVETPNLQDNLEVVLQIINFIYDNIMYAELNTKSDYCQKCGFDGEILIDENLEWYCPNCGNRDHNTLNVARRTCGYIGSQFWNKGRTQEIKERVLHIDNKDDE

SEQ ID NO: 454 - protein, 719 aa, unidentified
  REGION 1..719: note = Category: MG55 effectors
  REGION 1..719: note = Description: MG55-27 effector
  source 1..719: note = uncultivated organism sequence
MQVVKRDGKLVDFDQSKIRVAIEKANREVRPRERATKEEINQIIDYVEDLDKKRILVEDIQDIIEEQLMSFGKYLLAKKYITYRYTRELVRKANTTDQSIKELIDGESDYWNNENSNKNARVVTTQRDYLAGITSTDITRRFLLPEDVVKAHDEGIIHFHDADYFAQNALTNCELINLEDMLQNGTIMNGVMIEKPHRFLTAMTIATQIILGVTSSTYGGATVSLTHLAPFVKSSYDRYYKKYKKRGLSEAQCKEYAEQDTKKEVSDGVQTFNYQVNSMTNTNGQAPFLSVCMYLGETDEYKKELAMIIEEFLKQRIEGFKNEKGVYITPAFPKLLYVLEEDNIHKESKYWYLTELAAKCTAKRLVPDYISEKKMKELKIDKNGNGNCYPCMGCRSFLTPYVDPETNKPKYYGRFNQGVVTINLVDVALSSKQDEEKFWKIFDERLELCHKALQIRHERLSKVTSDVAPILWQHGALARLEKGESIHKLLHDGYSTISLGYAGLYECVKYMTGHSHTDNGEGEEFAIKVMQKLNDKCKEWKEAEKIDYSVYGTPIESTTYKFAKCLKKRFGTVEGITDRSYITNSYHVPVFEDIDAFSKLKLESKFQKLSPGGAISYVETPNLQDNLEVVLQIINFIYDNIMYAELNTKSDYCQKCGFDGEILIDENLEWYCPNCGNRDHNTLNVARRTCGYIGSQFWNKGRTQEIKERVLHIDNKDDE

SEQ ID NO: 455 - protein, 719 aa, unidentified
  REGION 1..719: note = Category: MG55 effectors
  REGION 1..719: note = Description: MG55-28 effector
  source 1..719: note = uncultivated organism sequence
MQVVKRDGKLVDFDQSKIRVAIEKANREVRPRERATKEEINQIIDYVEDLDKKRILVEDIQDIIEEQLMSFGKYLLAKKYITYRYTRELVRKSNTTDQSIKELIDGESDYWNNENSNKNARVVTTQRDYLAGITSTDITRRFLLPEDVVKAHDEGIIHFHDADYFAQNALTNCELINLEDMLQNGTIMNGVMIEKPHRFLTAMTIATQIILGVTSSTYGGATVSLTHLAPFVKSSYDRYYKKYKKRGLSEAQCKEYAEQDTKKEVSDGVQTFNYQVNSMTNTNGQAPFLSVCMYLGETDEYKKELAMIIEEFLKQRIEGFKNEKGVYITPAFPKLLYVLEEDNIHKESKYWYLTELAAKCTAKRLVPDYISEKKMKELKIDKNGNGNCYPCMGCRSFLTPYVDPETNKPKYYGRFNQGVVTINLVDVALSSKQDEEKFWKIFDERLELCHKALQIRHERLSKVTSDVAPILWQHGALARLKKGESIHKLLHDGYSTISLGYAGLYECVKYMTGHSHTDNGEGEEFAIKVMQKLNDKCKEWKEAEKIDYSVYGTPIESTTYKFAKCLKKRFGTIEGITDRSYITNSYHVPVFEDIDAFSKLKLESKFQKLSPGGAISYVETPNLQDNLEVVLQIINFIYDNIMYAELNTKSDYCQKCGFDGEILIDENLEWYCPNCGNRDHNTLNVARRTCGYIGSQFWNKGRTQEIKERVLHIDNKDDE

SEQ ID NO: 456 - protein, 719 aa, unidentified
  REGION 1..719: note = Category: MG55 effectors
  REGION 1..719: note = Description: MG55-29 effector
  source 1..719: note = uncultivated organism sequence
MQVIKRDGKVVDFDQSKIKIAIEKANKEVKPRERASKDEINQIIGYVEDLDKKRILVEDIQDIIEEQLMSFGKYVLAKKYITYRYTRELVRKANTTDQSIKELIDGESDYWNNENSNKNAQVVTTQRDYLAGITSTDITRRFLLPEDVVKAHDEGIIHFHDADYFAQNALTNCELINLEDMLQNGTIMNGVMIEKPHRFLTAMTIATQIILGVTSSTYGGATVSLTHLAPFVRSSYDRYYKKYKQRGLSEKQCKEYAEQDTKKEVSDGVQTFNYQVNSMTNTNGQAPFLSVCMYLGETDEYKQELAMIIEEFLKQRIEGFKNEKGVYITPAFPKLLYVLEEDNIHKDSKYWYLTELAAKCTAKRLVPDYISEKKMKEYKIDKNGNGNCYPCMGCRSFLTPYVDPETNKPKYYGRFNQGVVTINLVDVALSSKQDEEKFWKIFDERLELCHKALQIRHERLSKVTSDVAPILWQHGALARLKKGESIHKLLHDGYSTISLGYAGLYECVKYMTGNSHTDNGIGEEFALRVMQKLNDKCKEWKEAEKIDYSVYGTPIESTTYKFAKCLKKRFGTIEGITDRSYITNSYHVPVFEDIDAFSKLKLESKFQKLSPGGAISYVETPNLQNNLEVVLQIIHFIYDNIMYAELNTKSDYCQKCGFDGEILIDENLEWYCPNCGNRDHNTLNVARRTCGYIGSQFWNKGRTQEIKERVLHIDNKDDE

SEQ ID NO: 457 - protein, 708 aa, unidentified
  REGION 1..708: note = Category: MG55 effectors
  REGION 1..708: note = Description: MG55-30 effector
  source 1..708: note = uncultivated organism sequence
MKVIKRDGTTVSYDRNKIKIAIQKANSEVEPAEKVTDETIEYIISCIETKNRSRMLVEDIQDIIEQKLMDEKKFVLAKTYIIYRYSRELVRKANTTDDSILSLIQNRNKDVMEENSNKNATVASTQRDLIAGEVSKDLTKRILLPEKISKAHEEGILHFHDADYFLQPIFNCCLINIGDMLDNGTVMNGKLIESPKSFQVACTVMTQVIAAVASSQYGGQSVDVRHLGKYLRKSYNKFKTKMTAEFGDTVPEEIIEKMVQERLQDELRSGVQTIQYQINTLMTTNGQSPFVTLFLNLDKDDEYIKENAMIIEEILRQRLEGIKNEKGVYVTPAFPKLIYVLDEHNCLKGGKYDYITELAVKCSAKRLYPDYISAKKMRENYEGNVFSCMGCRSFLTPWKDENGNYKFEGRFNQGVVSLNLPQIGIIAAGDEETFWDLLEERLELCYEALMCRHNALMGVTSDVSPVHWQYGAIARLEKGEPIDKLLLDGYSTISLGYIGLYEVTKLMKGCSHTEPAGQDFALRVMNRLRAATDKWKAETGIGFGLYGSPAESLCYRFARIDLERFGSIPDVTDKGYYTNSYHVDVRENIDAFSKFRFESQFQKISSGGAISYVEIPNMRNNLDALAEVVRFIYDNIQYAEFNTKSDYCHVCGYDGEIMINDDNEWECPQCGNKDHAKMNVTRRTCGYLGENFWNVGKTKEIKARVLHL

SEQ ID NO: 458 - protein, 724 aa, unidentified
  REGION 1..724: note = Category: MG55 effectors
  REGION 1..724: note = Description: MG55-31 effector
  source 1..724: note = uncultivated organism sequence
MKIIKRSGAENTFDKEKIENAVAKANITVEEKDRLSEGEIGEIAQNIEDKCSEMNRAMDVETIQDWVEADIMRHGKYTVAKHYITYRYERSIVRQANTTDKQILSLLNFENEEVKQENSNKNPTVNSVQRDYMAGEVSKDITRRFLLPDDIVEAHEKGLIHFHDADYFAQHMHNCCLVNLEDMLQNGTVISEVMIEKPHSFSTACNIATQSIAQIASSQYGGQSITLSHLAPFVQISRDKYRREVKKEFAELNIPADEDTINKVAEMRVKAEIVQGVQMIQYQVITLMTTNGQAPFVTVFMYLDEVPEGQTRDDLAAIIEEMLRQRIQGVKNEKGVYITPAFPKLIYVLEEDNIREGSKYWELTKLAAKCTAKRMVPDYISEKKMKELKVDKNGNGQCYPCMGCRSFLTTYLDENGKPKYYGRFNQGVVTINLVDVACSSYKDMDKFWKIFDERLELCRRALMLRHERLKGTPSDVAPILWQNGALARLKKGETIDKLLFGGYSTISLGYAGLCECVRYMTGKSHTDPSATPFALEVMQHLNDACTKWRAETNIDFSLYGTPLESTTYKFARCLQKRFGVIEGVTDRNYITNSYHIHVTENIDAFDKLTFESQFQALSPGGAISYVEVPNMQNNIEAVLAVMQHIYDNIMYAELNTKSDYCQKCGFDGEIKIVEDDGKLVWECPNCGNRDQNTLNVARRTCGYIGTQFWNQGRTQEIKERVLHL

SEQ ID NO: 459 - protein, 719 aa, unidentified
  REGION 1..719: note = Category: MG55 effectors
  REGION 1..719: note = Description: MG55-32 effector
  source 1..719: note = uncultivated organism sequence
MQVIKRDGKVVDFDQSKIKIAIEKANKEVKPRERATKEEINQIISYIEELDKKRILVEDIQDIIEEQLMTFGKYILAKKYITYRYTRELVRKSNTTDQSIKELIDGESDYWNNENSNKNARVVTTQRDYLAGITSTDITRRFLLPEDVVKAHDEGIIHFHDADYFAQNALTNCELINLEDMLQNGTIMNGVMIEKPHRFLTAMTIATQIILGVTSSTYGGATVSITHLAPFVKSSYEKYYKKYKQRGLNEKQCKEYAEQDTRKEVSDGVQTFNYQVNSMTNTNGQAPFLSVCMYLGETDEYKQELAMIIEEFLKQRIEGFKNEKGVYITPAFPKLLYVLEEDNIHKDSKYWYLTELAAKCTAKRLVPDYISEKKMKEYKIDKNGNGNCYPCMGCRSFLTPYVDPETNKPKYYGRFNQGVVTINLVDVALSSKQDEEKFWKIFDERLELCHKALQIRHERLSKVTSDVAPILWQHGALARLKKGESIHKLLHDGYSTISLGYAGLYECVKYMTGNSHTDNGIGEEFALKVMQKLNDKCKEWKEAEKIDYSVYGTPIESTTYKFAKCLRKRFGTIEGITDRSYITNSYHVPVFEDIDAFSKLKLESKFQKLSPGGAISYVETPNLQNNLEVVLQIIHFIYDNIMYAELNTKSDYCQKCGFDGEILIDENLEWYCPNCGNRDHNTLNVARRTCGYIGSQFWNKGRTQEIKERVLHIDNKDDE

SEQ ID NO: 460 - protein, 404 aa, unidentified
  REGION 1..404: note = Category: MG55 effectors
  REGION 1..404: note = Description: MG55-33 effector
  source 1..404: note = uncultivated organism sequence
MAKVKKANTGLNRTVVFEVSVANNNIKKQVMASIDKYRAVARKMYSSVAMAATAGATIEVKNGDVRVKPYTQNSKDILSKAYNVSGKAQFYELRNFVLKDHANTWQSVIWDSCRLAVAGTWNHADPEFSKGEKKVGRGWLSLQGARAFGFFNRCGIGLPNTKSIQFGSKSMTMKWDKEIDDVTFFVDSKLPGNTFWKFKNIRDGVWERGTCYIGWKYKNIGGGKKVKTLYITMTYKLPENYFNEESGEGVMIVEFTDDPENGIVMYSDDKFHYSDKISVYEAIAWNKQLNVVKDYYKKQRASVGGRDKQWGLNQSLMVISNKSENLTKRRINGKKHRNHIWANRIVARVRQWGMGVVVLKDFPDGLLIDQEWSMFELKEILKYKLREIGCELKTYNTPKEEEAA

SEQ ID NO: 461 - protein, 724 aa, unidentified
  REGION 1..724: note = Category: MG55 effectors
  REGION 1..724: note = Description: MG55-34 effector
  source 1..724: note = uncultivated organism sequence
MKIIKRSGAENTFDKEKIENAVAKANITVEEKDRLSEGEIGEIAQNIEDKCSEMNRAMDVETIQDWVEADIMRHGKYTVAKHYITYRYERSIVRQANTTDKQILSLLNFENEEVKQENSNKNPTVNSVQRDYMAGEVSKDITRRFLLPDDIVEAHEKGLIHFHDADYFAQHMHNCCLVNLEDMLQNGTVISEVMIEKPHSFSTACNIATQSIAQIASSQYGGQSITLSHLAPFVQISRDKYRREVKKEFAELNIPADEDTINKVAEMRVKAEIVQGVQMIQYQVITLMTTNGQAPFVTVFMYLDEVPKGQTRDDLAAIIEEMLRQRIQGVKNEKGVYITPAFPKLIYVLEEDNIREGSKYWELTKLAAKCTAKRMVPDYISEKKMKELKVDKNGNGQCYPCMGCRSFLTTYLDENGKPKYYGRFNQGVVTINLVDVACSSYKDMDKFWKIFDERLELCRRALMLRHERLKGTPSDVAPILWQNGALARLKKGETIDKLLFGGYSTISLGYAGLCECVRYMTGKSHTDPSATPFALEVMQHLNDACAKWRAETNIDFSLYGTPLESTTYKFARCLQKRFGVIEGVTDRNYITNSYHIHVTENIDAFDKLTFESQFQALSPGGAISYVEVPNMQNNIEAVLAVMQHIYDNIMYAELNTKSDYCQKCGFDGEIKIVEDDGKLVWECPNCGNRDQNTLNVARRTCGYIGTQFWNQGRTQEIKERVLHL

SEQ ID NO: 462 - protein, 719 aa, unidentified
  REGION 1..719: note = Category: MG55 effectors
  REGION 1..719: note = Description: MG55-35 effector
  source 1..719: note = uncultivated organism sequence
MQVIKRDGKVVDFDQSKIKIAIEKANKEVKPRERATKEEINQIISYIEELDKKRILVEDIQDIIEEQLMTFGKYILAKKYITYRYTRELVRKSNTTDQSIKELIDGESDYWNNENSNKNARVVTTQRDYLAGITSTDITRRFLLPEDVVKAHDEGIIHFHDADYFAQNALTNCELINLEDMLQNGTIMNGVMIEKPHRFLTAMTIATQIILGVTSSTYGGATVSITHLAPFVRSSYDRYYKKYKQRGLSEKQCKEYAEQDTKKEISDGVQTFNYQVNSMTNTNGQAPFLSVCMYLGETDEYKQELAMIIEEFLKQRIEGFKNEKGVYITPAFPKLLYVLEEDNIHKDSKYWYLTELAAKCTAKRLVPDYISEKKMKELKIDKNGNGNCYPCMGCRSFLTPYVDPETNKPKYYGRFNQGVVTINLVDVALSSKQDEEKFWKIFDERLELCHKALQIRHERLSKVTSDVAPILWQHGALARLKKGESIHKLLHDGYSTISLGYAGLYECVKYMTGNSHTDNGIGEEFALKVMQKLNDKCKEWKEAEKIDYSVYGTPIESTTYKFAKCLRKRFGTIEGITDRSYITNSYHVPVFEDIDAFSKLKLESKFQKLSPGGAISYVETPNLQNNLEVVLQIIHFIYDNIMYAELNTKSDYCQKCGFDGEILIDENLEWYCPNCGNRDHNTLNVARRTCGYIGSQFWNKGRTQEIKERVLHIDNKDDE

SEQ ID NO: 463 - protein, 707 aa, unidentified
  REGION 1..707: note = Category: MG55 effectors
  REGION 1..707: note = Description: MG55-36 effector
  source 1..707: note = uncultivated organism sequence
MQVIKRDGSVVEYDRTKIAIAIGKANAEVEKKERASKEEIETILAAVEEKKKKRMLVEDIQDIIEEKLMELGHYELAKTYIIYRYNRALVRKANTTDEAILSLISNSNKDVMEENSNKNALAAATQRDLIAGEVSKDLTRRILLPEKISKAHDEGILHFHDADYFIQPIFNCCLINIGDMLDNGTVMNGKLIESPKSFQVACTVVTQIIAAVACSQYGGQSVDIRHLGKYLRKSRVKFEKHFRETCPELAEEEVKKLVDDRIQDELKSGVQTIQYQINTLMTTNGQSPFVTLFLYLDKDDEYLEENAQIVMEILRQRYEGIKNEKGVYVTPAFPKLVYVLDEINCLKGGKYDYITEFAVKCSAKRLYPDYISAKKMRETYEGNVFSPMGCRSFLSPWKDENGNYKFEGRFNQGVVSINLPQIGIIAKGDEEKFWKLFDERLDLCREALMCRHRALLGTKSDVSPIHWQYGAIARLDKGEVIDKLLFNGYSTLSLGYIGLYEVTKLMTGVTQTDPKGEEFALRVMQHMRDKTDEWKMETGLGFALYGTPAESLCYRFARIDKEKFGTIEDVTDKGYYTNSYHVDVREHIDAFSKFSFEAQFQRISSGGCISYVEIPNMQNNLEAMQEIVRFIYDNIQYAEFNTKSDYCHVCGWDGEIIINDDNEWECPNCHNKDHRKMNVTRRTCGYLGENFWNLGKTKEIKARVLHL

SEQ ID NO: 464 - protein, 719 aa, unidentified
  REGION 1..719: note = Category: MG55 effectors
  REGION 1..719: note = Description: MG55-37 effector
  source 1..719: note = uncultivated organism sequence
MQVIKRDGKVVDFDQSKIKIAIEKANKEVKPRERASKDEINQIIGYVEDLDKKRILVEDIQDIIEEQLMSFGKYVLAKKYITYRYTRELVRKANTTDQSIKELIDGESDYWNNENSNKNAQVVTTQRDYLAGITSTDITRRFLLPEDVVKAHDEGIIHFHDADYFAQNALTNCELINLEDMLQNGTIMNGVMIEKPHRFLTAMTIATQIILGVTSSTYGGATVSLTHLAPFVRSSYDRYYKKYKQRGLSEKQCKEYAEQDTKKEVSDGVQTFNYQVNSMTNTNGQAPFLSVCMYLGETDEYKQELAMIIEEFLKQRIEGFKNEKGVYITPAFPKLLYVLEEDNIHKDSKYWYLTELAAKCTAKRLVPDYISEKKMKEYKIDKNGNGNCYPCMGCRSFLTPYVDPETNKPKYYGRFNQGVVTINLVDVALSSKQDEEKFWKIFNERLELCHKALQIRHERLSKVTSDVAPILWQHGALARLKKGESIHKLLHDGYSTISLGYAGLYECVKYMTGNSHTDNGIGEEFALRVMQKLNDKCKEWKEAEKIDYSVYGTPIESTTYKFAKCLKKRFGTIEGITDRSYITNSYHVPVFEDIDAFSKLKLESKFQKLSPGGAISYVETPNLQNNLEVVLQIIHFIYDNIMYAELNTKSDYCQKCGFDGEILIDENLEWYCPNCGNRDHNTLNVARRTCGYIGSQFWNKGRTQEIKERVLHIDNKDDE

SEQ ID NO: 465 - protein, 730 aa, unidentified
  REGION 1..730: note = Category: MG55 effectors
  REGION 1..730: note = Description: MG55-38 effector
  source 1..730: note = uncultivated organism sequence
MQVIKRDGRIVDFDRQKIAAAIGKANAEVKPRERASKEDIKGIIEYVEGLDKKRILVEDIQDIIEEKLMECEKYLLAKKYITYRYTRELVRKANTTDQSIKELIDGESDYWNNENSNKNARVVTTQRDYLAGITSTDITRRFLLPKDVVEAHDEGIIHFHDADYFAQNALTNCELINLDDMLQNGTIMNGVMIEKPHRFLTAMTIATQIILAVTSSTYGGATVSLTHLAPFVRSSYERYYKKYKERGLSEKQCKEYAEQDTKKEIADGVQTFNYQVNSMTNTNGQAPFLSVNMYLGETKEYKKELAMVIEEFLKQRIEGFKNEKGVYITPAFPKLLYVLEKDNITEDSPYWYLTELAAKCTAKRMVPDYISEKKMLELKIDKNGNGNCYPCMGCRSFLTPYVDPKTNKPKYYGRFNQGVVTINLVDVALSSDKDMDKFWKIFDERLELCHRALQVRHERLSKVTSDVAPILWQNGALARLKKGESIHPLLHGGYSTISLGYAGLYECVKYMTDHSHTDNGEGKDFGIKVMQKLNDKCKEWKAAEDIDYSVYGTPIESTTYKFAKCLKKRFGVIEGITDRDYITNSYHIPVFEEIDAFSKLSIESQFQQLSPGGAISYIETPNLQNNIESVLQIIKFIYDNIMYAELNTKSDYCQVCGFDGEILIDDNLEWYCPNCGNRNHDTLNVARRTCGYIGSQFWNKGRTQEIKERVLHIDNKDAEMPKKEKTKVAV

SEQ ID NO: 466 - protein, 719 aa, unidentified
  REGION 1..719: note = Category: MG55 effectors
  REGION 1..719: note = Description: MG55-39 effector
  source 1..719: note = uncultivated organism sequence
MQVVKRDGKLVDFDQSKIRVAIEKANREVKPRERATKEEINQIIDYVEDLDKKRILVEDIQDIIEEQLMSFGKYLLAKKYITYRYTRELVRKANTTDQSIKELIDGESDYWNNENSNKNARVVTTQRDYLAGITSTDITRRFLLPEDVVKAHDEGIIHFHDADYFAQNALTNCELINLEDMLQNGTIMNGVMIEKPHRFLTAMTIATQIILGVTSSTYGGATVSLTHLAPFVKSSYDRYYKKYKKRGLSEAQCKEYAEQDTKKEVSDGVQTFNYQVNSMTNTNGQAPFLSVCMYLGETDEYKKELAMIIEEFLKQRIEGFKNEKGVYITPAFPKLLYVLEEDNIHKDSKYWYLTELAAKCTAKRLVPDYISEKKMKEYKIDKNGNGNCYPCMGCRSFLTPYVDPETNKPKYYGRFNQGVVTINLVDVALSSKQDEEKFWKIFDERLELCHKALQIRHERLSKVTSDVAPILWQHGALARLEKGESIHKLLHDGYSTISLGYAGLYECVKYMTGHSHTDNGEGEEFAIKVMQKLNDKCKEWKEAEKIDYSVYGTPIESTTYKFAKCLKKRFGTVEGITDRNYITNSYHVPVFEDIDAFSKLKLESKFQKLSPGGAISYVETPNLQDNLEVVLQIINFIYDNIMYAELNTKSDYCQKCGFDGEILIDENLEWYCPNCGNRDHNTLNVARRTCGYIGSQFWNKGRTQEIKERVLHIDNKDDE

SEQ ID NO: 467 - protein, 724 aa, unidentified
  REGION 1..724: note = Category: MG55 effectors
  REGION 1..724: note = Description: MG55-40 effector
  source 1..724: note = uncultivated organism sequence
MKIIKRNGAEATFDISKIIMAITKANAAVEECDRMTPRQIQRIAESVELACQELGRSAAVEEIQDMVEKQIMAHGAFEVAKAYITYRYTRSLVRRANTTDDRILSLIECNNEEAKQENSNKNPIVNSTQRDYMAGEVSRDITSRLLLPKDIVEAHEEGIIHFHDADYYAQHMHNCDLVNLEDMLENGTVITGTLIERPHSFSTACNIATQIIAQVASNQYGGQSISLTHLAPFVQVSRERIRREVEAEMQAIDAHPGEEKLAELVENRVREEIRRGVQTIQYQVVTLLTTNGQAPFVTVFMYLGEAKNEQERHDLAMIIEETLRQRYQGVKNEKGVWVTPAFPKLIYVLEEDNIHEDSPYWYLTELAARCTAKRMVPDYISEKKMLELKVDKNGEGHCYTCMGCRSFLTPYVDENGKPKYYGRFNQGVVTINLPDVALSSGGNMEKFWKIFDERLELCHRALMCRHERLKGTLSDAAPILWQYGALARLKKGEPIDKLLYGGYSTISLGYAGLYECVKYMTGKSHTDPSATPFALEIMQHMNDACAKWKQMHNIDFSLYGTPLESTTYKFAKCLQKRFGIIPGVTDKGYITNSYHIHVTEHIDAFSKLAFESKFQALSPGGAISYVEVPNMQNNIPAVLEVMKFIYDNIMYAELNTKSDYCQVCGYDGEIEIVEHDGKLIWRCPNCGNTDQDKMNVARRTCGYIGTQFWNQGRTQEIKERVLHL

SEQ ID NO: 468 - protein, 712 aa, unidentified
  REGION 1..712: note = Category: MG55 effectors
  REGION 1..712: note = Description: MG55-41 effector
  source 1..712: note = uncultivated organism sequence
MISKVRKRDGRIKDFDSRRIIEALRKAFEELGYTSSYEYINVAGSVVSELSKLDSEICDVEAIQDIVVKVLQESHPEVAKKYEEYRLKRTEIREENSKLIKSVEGLLNFSNDEVMLENSNKQAQLISTTRDLMAGEVSKFIVRKMIPKDILELHDRGVIHIHDMDYGANDMFNCELVNLQDMLDNGTVINKKMIHSPHTLRTAMTIATQISAQVASYQYGGQTMTLSHLAPYVRKSESVIRREIESDYPELSKERKDKIVERRLRKEIKDSVQLFNYQISTIQSTNGQAPFISLAIYLSERPGYEREVAMLAEEFFNQRIEGIENENGVKATQTFPKLLYFLDENNTYEGSEYFWLTQLAVKSTSLRMNPDYISAKKMKENVGHVFSCMGCRAFLSPFQDKDGNWIFYGRGNLGVCTINLPHVALSAKGDINKFWEILDERLEACRWVGEWRYNKMKGVKAKEAPILWQHGAISRLNPEDDVIKAIDERGFTVTLGYSGIYETVKVLIGKSHTTDNGFDLAEKIMIHLRDKCTEWKTEKPWLRFALYGTPQESTTETFSKALIRDFGEIEGICGKGKLWVTNSYHVDIQEEINAFDKLAIEGELQKYSTGGAVSYVETYNMSKNQEALLQVVQYMYETIMYAEINFESDVCGECGYSGVMDNDPKTLEWVCPNCGNRNQDTLSVVRRTCGYLAETKWTPGRLLDILNRVKHL

SEQ ID NO: 469 - protein, 724 aa, unidentified
  REGION 1..724: note = Category: MG55 effectors
  REGION 1..724: note = Description: MG55-42 effector
  source 1..724: note = uncultivated organism sequence
MKIIKRSGAENTFDKEKIENAVAKANITVEEKDRLSEGEIGEIAQNIEDKCSEMNRAMDVETIQDWVEADIMRHGKYTVAKHYITYRYERSIVRQANTTDKQILSLLNFENEEVKQENSNKNPTVNSVQRDYMAGEVSKDITRRFLLPDDIVEAHEKGLIHFHDADYFAQHMHNCCLVNLEDMLQNGTVISEVMIEKPHSFSTACNIATQSIAQIASSQYGGQSITLSHLAPFVQISRDKYRREVKKEFAELNIPADEDTINKVAEMRVKAEIVQGVQMIQYQVITLMTTNGQAPFVTVFMYLDEVPEGQTRDDLAAIIEEMLRQRIQGVKNEKGVYITPAFPKLIYVLEEDNIREGSKYWELTKLAAKCTAKRMVPDYISEKKMKELKVDKNGNGQCYPCMGCRSFLTTYLDENGKPKYYGRFNQGVVTINLVDVACSSYKDMDKFWKIFDERLELCRRALMLRHERLKGTPSDVAPILWQNGALARLKKGETIDKLLFGGYSTISLGYAGLCECVRYMTGKSHTDPSATPFALEVMQHLNDACAKWRAETNIDFSLYGTPLESTTYKFARCLQKRFGVIEGVTDRNYITNSYHIHVTENIDAFDKLTFESQFQALSPGGAISYVEVPNMQNNIEAVLAVMQHIYDNIMYAELNTKSDYCQKCGFDGEIKIVEDDGKLVWECPNCGNRDQNTLNVARRTCGYIGTQFWNQGRTQEIKERVLHL

SEQ ID NO: 470 - protein, 463 aa, unidentified
  REGION 1..463: note = Category: MG55 effectors
  REGION 1..463: note = Description: MG55-43 effector
  source 1..463: note = uncultivated organism sequence
MEQITLTRKIELFVNEEGNKKNECYDLLHYLNNNLYKIANDSVNYLHIKKNLPEFILKHNKEDYEKYVNNLNKMSEIKNFKSTEFIELKNQNRDIINKYSNNEEYKKMIYNDSKETTLVYHNINKRLPKGLSSISASLSKKIENDYKIKEKEYFLGKSTLNIYKRGLPIPFNISGKLVKDPSLFFKFDNGKYYINLFGYNFGLFFGPDRSNNKAIIEHIINDTDKYKLCDSAIQFKDKKIFLLLSFKQPLDNTIKLDDNKVLGVDLGVNAPVYLAINDNDYYKKQIGDIHHFDSHKLQYKKRYTSLIKNLEISNGGRGRKKKLSALDKLKKVEKNWTNTEQHKISNSVIKEALNNNCKYINIENLENYKENLTENKKYIMRIWGYYGIQEKIMYKAKKHNIVVRKINPAYTSQKCHKCGNIEKTARNKQIFTCLNEKCSIFGKEIHADFNGAKNISLSTEFKK

SEQ ID NO: 471 - protein, 1231 aa, unidentified
  REGION 1..1231: note = Category: MG55 effectors
  REGION 1..1231: note = Description: MG55-44 effector
  source 1..1231: note = uncultivated organism sequence
MSVFSKYRNFFPVKKSISLGAIPTPVTVSNMKKDRILENDIIREERASRMEDVYDEEYKKLIEKILSSMDNKKELKELISAYEKRKEDRNGYADAENDFVESISKALSESEEYKNLCNAEYFSKELPKKVSSEIADLISKLNFGSFETHRKTRTTLFGVKDGSVAKRIGHDNFLIYMDNCAKLENALSILGKETLEKYVAEMGDASDITEELIYGYAEKENYISLFSQKAIDDYNLLINGYTVGKRTKIKGINELINEHNQQEKEKEMKLAFLSKLQKLPLFDATSYSVIPESFSSDSELIESIDMLYNKDIGERKSLKSVIENAAKIFLGFSEVYDLSHIYINPKKNNAFSKNFLGKWNILERLFKEDFAKKNESPKLKGKKLDKLVEDAYKNKVFSFTDVEKIADMCDGFEEFSIEKAYIRDILDKALAVSNAYNEYKAYMEEREKMENAPAIKRDNRAAAVIRELCLAVKECERSLIYILHGEELIEVGAEGDAVFYEKFNSLAETIKDSDRLYNKIRNFVSQTKVSEDKTRLMFNNDEFLKGWSDSSKKGGAIIRDGKEYYLICIMKGFKGIENIQSDGNDLDLMEYNFTGDVSKCLGKNLMYTGMKNKSGAGSKYVYNENSKIVADYGLTEDVFNAYQNGIHTKGYADQGYTEEEHKDALRKIIRYFNKALPLAYSGFDAEGLRDDYETFNEYCNELNKRNFTLGFRKASRTKIDEYEKAGYIYKFRIWCRDFSEKAYGIKQNYALIFNALFNEKNEYYSKIRLCGSAKLIFVKASIKDEDKVVHKAGQPIRNKNPKSGKPTSTYSYDIIKDRRKLKDHYIIQLPYEINRQALGNPVNLNAVVLDDIRNGNLKSIVSIKTGQDNLLWVCVTDMEGNIKKQYPLNVIDNNDYREKISARQNEMKSGNKEWRPGADIKSLKEGYLTLAIRKIVDAVFENDAILLLESSNGNKKEKTFGVDTRLYDRLADMLQVKLHYCFSKRKPFLEEGGLLNAYQLCGALPTGDKKKKVFQNGIVFFTNTAYTKNTDPITGFVPPVIGEYLNLKSAISIISNIKEIGYEKGQYYLLIDKKMYKNNYEGKTDWKCYIAGERIVAIRDDSLARGRRYEKADIGKIFADFLKENGIDANKNIKEQILERDDKPFFASLLEILNNVFRMNNGHGDENFFVSPVKNDKGLFFDSRISKEIPCTDANAAYNMARKMVISIEKIKNEETKTIPTTAEYLERIQK

SEQ ID NO: 472 - protein, 724 aa, unidentified
  REGION 1..724: note = Category: MG55 effectors
  REGION 1..724: note = Description: MG55-45 effector
  source 1..724: note = uncultivated organism sequence
MKIIKRSGAENTFDREKIENAVAKANITVEEKDRLSEGEIEEIAQNIENKCSEMNRAMDVETIQDWVEADIMRHGKYTVAKHYITYRYERSIVRQANTTDKQILSLLNFENEEVKQENSNKNPTVNSVQRDYMAGEVSKDITRRFLLPDDIVEAHEKGMIHFHDADYFAQHMHNCCLVNLEDMLQNGTVISEVMIEKPHSFSTACNIATQSIAQIASSQYGGQSITLSHLAPFVQISRDKYRREVKKEFAELNIPADEDTINKVAEMRVKAEIVQGVQMIQYQVITLMTTNGQAPFVTVFMYLDEVPEGQTRDDLAAIIEEMLRQRIQGVKNEKGVYITPAFPKLIYVLEEDNIREGSKYWELTKLAAKCTAKRMVPDYISEKKMKELKVDENGNGQCYPCMGCRSFLTTYLDENGKPKYYGRFNQGVVTINLVDVACSSYKDMDKFWKIFDERLELCRRALMLRHERLKGTPSDVAPILWQNGALARLKKGETIDKLLYGGYSTISLGYAGLCECVRYMTGKSHTDPSATPFALKVMQHLNDACAKWRAETNIDFSLYGTPLESTTYKFARCLQKRFGIIEGVTDRNYITNSYHIHVTENIDAFDKLTFESQFQALSPGGAISYVEVPNMQNNIEAVLAVMQHIYENIMYAELNTKSDYCQKCGFDGEIKIAEDDGKLVWECPNCGNRDQNTMNVARRTCGYIGTQFWNQGRTQEIKERVLHL

SEQ ID NO: 473 - protein, 730 aa, unidentified
  REGION 1..730: note = Category: MG55 effectors
  REGION 1..730: note = Description: MG55-46 effector
  source 1..730: note = uncultivated organism sequence
MQVIKRDGRIIDFDRQKIVSAIGKANAEVKPKERASKDDIKSIIEYIEGLGKKRILVEDIQDIIEEKLMELDKYSLAKKYITYRYTRELVRKANTTDQSIKELIDGESEYWNNENSNKNAKVVTTQRDYLAGITSTDITRRFLLPKDIVEAHDEGIIHFHDADYFAQNALTNCELINLEDMLQNGTIMNGVMIEKPHRFLTAMTIATQIILAVTSSTYGGATVSLAHLAPFVRSSYDRYYKKYKDRGLKEEQCKEFAMQDTKKEVADGVQTFNYQVNSMTNTNGQAPFLSVCMYLGETKEYKKELAMVIEEFLKQRIEGFKNEKGVYITPAFPKLLYVLEKDNVTEDSKYWYLTELAAKCTAKRMVPDYISEKKMLELKIDKNGNGNCYPCMGCRSFLTPYVDPKTNKPKYYGRFNQGVVTINLVDVALSSDKDMDKFWKIFDERLELCHRALQVRHERLSKVTSDVAPILWQHGALARLKKGESIHPLLHGGYSTISLGYAGLYECVKYMTEHSHTDNGEGKDFGIQVMQRLNDKCKEWKAAEDIDYSVYGTPIESTTYKFAKCLKKRFGVIKGITDRDYITNSYHIPVFEEIDAFSKLSIESQFQQLSPGGAISYVETPNLQNNIEAVIQIIKFIYDNIMYAELNTKSDYCQECGFDGEILIDDNLEWYCPNCGNRNHDTLNVARRTCGYIGSQFWNKGRTQEIKERVLHIDNKDAEMPKKEKTKVAV

SEQ ID NO: 474 - protein, 724 aa, unidentified
  REGION 1..724: note = Category: MG55 effectors
  REGION 1..724: note = Description: MG55-47 effector
  source 1..724: note = uncultivated organism sequence
MKIIKRSGAENTFDKEKIENAVAKANITVEEKDRLSEGEIGEIAQNIEDKCSEMNRAMDVETIQDWVEADIMRHGKYTVAKHYITYRYERSIVRQANTTDKQILSLLNFENEEVKQENSNKNPTVNSVQRDYMAGEVSKDITRRFLLPDDIVEAHEKGLIHFHDADYFAQHMHNCCLVNLEDMLQNGTVISEVMIEKPHSFSTACNIATQSIAQIASSQYGGQSITLSHLAPFVQISRDKYRREVKKEFAELNIPTDEDTINKVAEMRVKAEIVQGVQMIQYQVITLMTTNGQAPFVTVFMYLDEVPEGQTRDDLAAIIEEMLRQRIQGVKNEKGVYITPAFPKLIYVLEEDNIREGSKYWELTKLAAKCTAKRMVPDYISEKKMKELKVDKNGNGQCYPCMGCRSFLTTYLDENGKPKYYGRFNQGVVTINLVDVACSSYKDMDKFWKIFDERLELCRRALMLRHERLKGTPSDVAPILWQNGALARLKKGETIDKLLFGGYSTISLGYAGLCECVRYMTGKSHTDPSATPFALEVMQHLNDACAKWRAETNIDFSLYGTPLESTTYKFARCLQKRFGVIEGVTDRNYITNSYHIHVTENIDAFDKLTFESQFQALSPGGAISYVEVPNMQNNIEAVLAVMQHIYDNIMYAELNTKSDYCQKCGFDGEIKIVEDDGKLVWECPNCGNRDQNTLNVARRTCGYIGTQFWNQGRTQEIKERVLHL

SEQ ID NO: 475 - protein, 724 aa, unidentified
  REGION 1..724: note = Category: MG55 effectors
  REGION 1..724: note = Description: MG55-48 effector
  source 1..724: note = uncultivated organism sequence
MKIIKRNGAEENFDISKIIMAVTKANAAVEECDRMTPRQIQRIAESVELACQELGRSAAVEEIQDMVEKQIMAHGAFEVAKAYITYRYTRSLVRRANTTDDRILSLIECNNEEAKQENSNKNPIVNSTQRDYMAGEVSRDITSRLLLPKDIVEAHEEGIIHFHDADYYAQHMHNCDLVNLEDMLENGTVITGTLIERPHSFSTACNIATQIIAQVASNQYGGQSISLTHLAPFVQVSRERIRREVEAEMQAIDAHPGEEKLAELVENRVREEIRRGVQTIQYQVVTLLTTNGQAPFVTVFMYLGEAKNEQERHDLAMIIEETLRQRYQGVKNEKGVWVTPAFPKLIYVLEEDNIHEDSPYWYLTELAARCTAKRMVPDYISEKKMLELKVDKNGEGHCYTCMGCRSFLTPYVDENGKPKYYGRFNQGVVTINLPDVALSSGGNMEKFWKIFDERLELCHRALMCRHERLKGTLSDAAPILWQYGALARLKKGEPIDKLLYGGYSTISLGYAGLYECVKYMTGKSHTDPSATPFALEIMQHMNDACAKWKQMHNIDFSLYGTPLESTTYKFAKCLQKRFGIIPGVTDKGYITNSYHIHVTEKIDAFSKLAFESKFQALSPGGAISYVEVPNMQNNIPAVLEVMKFIYDNIMYAELNTKSDYCQVCGYDGEIEIVEHDGKLIWRCPNCGNTDQDKMNVARRTCGYIGTQFWNQGRTQEIKERVLHL

SEQ ID NO: 476 - protein, 712 aa, unidentified
  REGION 1..712: note = Category: MG55 effectors
  REGION 1..712: note = Description: MG55-49 effector
  source 1..712: note = uncultivated organism sequence
MISKVRKRDGRIKDFDSRRIIEALRKAFEELGYTSSYEYINVAGSVVSELSKLDSEICDVEAIQDIVVKVLQESHPEVAKKYEEYRLKRTEIREENSKLIKSVEGLLNFSNDEVMLENSNKQAQLISTTRDLMAGEVSKFIVRKMIPKDILELHDRGVIHIHDMDYGANDMFNCELVNLQDMLDNGTVINKKMIHSPHTLRTAMTIATQISAQVASYQYGGQTMTLSHLAPYVRKSESVIRREIESDYPELSKERKDKIVERRLKKEIKDSVQLFNYQISTIQSTNGQAPFISLAIYLSERPGYEREVAMLAEEFFNQRIEGIENENGVKATQTFPKLLYFLDENNTYEGSEYFWLTQLAVKSTSLRMNPDYISAKKMKENVGHVFSCMGCRAFLSPFQDKDGNWIFYGRGNLGVCTINLPHVALSAKGDINKFWEILDERLEACRWVGEWRYNKMKGVKAKEAPILWQHGAISRLNPEDDVIKAIDERGFTVTLGYSGIYETVKVLIGKSHTTDNGFDLAEKIMIHLRDKCTEWKTEKPWLRFALYGTPQESTTETFSKALIRDFGEIEGICGKGKLWVTNSYHVDIQEEINAFDKLAIEGELQKYSTGGAVSYVETYNMSKNQEALLQVVQYMYETIMYAEINFESDVCGECGYSGVMDNDPKTLEWVCPNCGNRNQDTLSVVRRTCGYLAETKWTPGRLLDILNRVKHL

SEQ ID NO: 477 - protein, 724 aa, unidentified
  REGION 1..724: note = Category: MG55 effectors
  REGION 1..724: note = Description: MG55-50 effector
  source 1..724: note = uncultivated organism sequence
MKIIKRNGAEATFDISKIIMAITKANAAVEEGDRMTPRQIQRIAESVELACQELGRSAAVEEIQDMVEKQIMAHGAFEVAKAYITYRYTRSLVRRANTTDDRILSLIECNNEEAKQENSNKNPIVNSTQRDYMAGEVSRDITSRLLLPKDIVEAHEEGIIHFHDADYYAQHMHNCDLVNLEDMLENGTVITGTLIERPHSFSTACNIATQIIAQVASNQYGGQSISLTHLAPFVQVSRERIRREVAAEMQAINADPGEEKLAELVENRVREEIRRGVQTIQYQVVTLLTTNGQAPFVTVFMYLGEAKNEQERHDLAMIIEETLRQRYQGVKNEKGVWVTPAFPKLIYVLEEDNIHEDAPYWYLTELAARCTAKRMVPDYISEKKMLELKVDKNGEGHCYTCMGCRSFLTPYVDENGKPKYYGRFNQGVVTINLPDVALSSGGNMEKFWKIFDERLELCHRALMCRHERLKGTLSDAAPILWQYGALARLKKGEPIDKLLYGGYSTISLGYAGLYECVKYMTGKSHTDPSATPFALEVMQHMNDACKHWKQMHNIDFSLYGTPLESTTYKFAKCLQKRFGIIPGVTDKGYITNSYHIHVTENIDAFSKLAFESKFQALSPGGAISYVEVPNMQNNIPAVLEVMKFIYDNIMYAELNTKSDYCQVCGYDGEIEIVERDGKLIWRCPNCGNTDQDKMNVARRTCGYIGTQFWNQGRTQEIKERVLHL

SEQ ID NO: 478 - protein, 463 aa, unidentified
  REGION 1..463: note = Category: MG55 effectors
  REGION 1..463: note = Description: MG55-51 effector
  source 1..463: note = uncultivated organism sequence
MARRIKNVASNNYTLGIDIGSTTAKLALMCDGKIVYSKYQRHRSRIISTTLDMLREMKEIYPVDKVRVTISGSAGMGMAEKAGIDFIQEVYATGEVVYKLAPDTGVVIELGGEDAKVIFFKGGVDERMNGSCAGGTGAFIDQMAVLLNMSVDDMDKASLEAKRIYPIASRCGVFAKTDIQPLLNQGASKSDIAASIFQAVVNQTITGLIQGRKIEGKVMFLGGPLYYCEGLKKRFYETLSLTEETAVFPEYALYAVAMGASMYAQNSEEISFEELEKRIENSAKCESRGLDTLPPLFASKEEYDYFVQRHNKATVPQKDINTYIGNAWLGIDCGSTTTKLVLISDDRSILYSFYSSNKGNPVKLVKEQLEIIYSLCQNRIKICGSSVTGYGEELIRHAFRTDEGVVETIAHYTAAKYFRPDVDFILDIGGQDIKCFKIRNGAIDSIIFRVRFFCRDIRKGNGI

SEQ ID NO: 479 - protein, 420 aa, unidentified
  REGION 1..420: note = Category: MG55 effectors
  REGION 1..420: note = Description: MG55-52 effector
  source 1..420: note = uncultivated organism sequence
MVTSSMKIKIIPVDVISKNWIFDIFNVSYKILNRAYDISRMLHQYPVIMSPVTPPKSQVYNLTTQEFPKVITTYLRDWVYQAENNYKSDVKAGLLSGKRSPRLYKKYGATRFQFLKNSNPKLIKENGDFFILINSRTNIKFKIIFDKKTGHLKTMLNRFLDLENKKYNLNSTFLIKYTNRKELMLILSYEQDIQGYVGIDNRVMGIDMGVRRFISLRINDIPSYQKSIHSEKLVQQKYGIAMKNKRVQESSVLAKSGHGRTRKMQVYNKVKDSETSFTDNVLDKLSKEVIESAAKLKVQQINMERLDKNSMKEQNSYLGRYWGVMTLMNLIEQKAIKRGIIIKYIDPYHTSQICSCCGSIGERNGAEFKCLSSKCDDFNKVIDSDYNAAMNIATSVDYLDDASKGKYYLNKTEKVLEEVL

SEQ ID NO: 480 - protein, 724 aa, unidentified
  REGION 1..724: note = Category: MG55 effectors
  REGION 1..724: note = Description: MG55-53 effector
  source 1..724: note = uncultivated organism sequence
MKIIKRNGAEVGFDITKIIIAITKANEAVEEADRMTPMQIQRIAESVELQCQKMNRAPTVEEIQDMVEHYIMAHGAFEVAKHYITYRYTRSLVRKSNTTDDKILSLIECNNEEAKQENSNKNPVVNSTQRDYMAGEVSRDLSERILLPQDIVEAHREGIIHFHDSDYYAQHMHNCDLVNLEDMLQNGTVITGTLIEKPHSFATACNIATQIVAQVASNQYGGQSISLTHLAPFVQVSRDKIRASVRSEFDAVGVAVTEDDINAIAEKRLREEIRRGVQTIQYQVVTLLTTNGQAPFVTVFMYLGEAKNQQEKDDLALIIEETLLQRYQGVKNEKGVWVTPAFPKLIYVLEEDNVHEDSKYWYLTKLAAKCTAKRMVPDYISEKKMLELKVDKNGNGHCYPCMGCRSFLTPYVDENGQPKYYGRFNQGVVTVNLPDIALSSGGNIEKFWRIFDERMELCHRALLCRHERLKGTLSDAAPILWQYGACARLKKGEPIDKLLYGGYSTISLGYAGLYECVKYMTGKSHTDPAATPFALEIMNALNAACKKWKAQHNIDFSLYGTPLESTTYKFAKCLQKRFGVIKGITDKGYITNSYHVHVTEPIDAFKKLEFEAQFQHLSPGGAISYVEVPDMQNNLDAVLEVMKFIYDHIIYAELNTKSDYCQVCGWDGEIEVVEEDGKLIWKCPQCGNTDQDKMNVARRTCGYIGTQFWNQGRTQEIKDRVLHL

SEQ ID NO: 481 - protein, 719 aa, unidentified
  REGION 1..719: note = Category: MG55 effectors
  REGION 1..719: note = Description: MG55-54 effector
  source 1..719: note = uncultivated organism sequence
MQVVKRDGKLVDFDQSKIRVAIEKANREVRPRERATKEEINQIIDYVEDLDKKRILVEDIQDIIEEQLMSFGKYLLAKKYITYRYTRELVRKANTTDQSIKELIDGESDYWNNENSNKNARVVTTQRDYLAGITSTDITRRFLLPEDVVKAHDEGIIHFHDADYFAQNALTNCELINLEDMLQNGTIMNGVMIEKPHRFLTAMTIATQIILGVTSSTYGGATVSLTHLAPFVKSSYDRYYKKYKKRGLSEAQCKEYAEQDTKKEVSDGVQTFNYQVNSMTNTNGQAPFLSVCMYLGETDEYKKELAMIIEEFLKQRIEGFKNEKGVYITPAFPKLLYVLEEDNIHKDSKYWYLTELAAKCTAKRLVPDYISEKKMKEYKIDKNGNGNCYPCMGCRSFLTPYVDPETNKPKYYGRFNQGVVTINLVDVALSSKQDEEKFWKIFDERLELCHKALQIRHERLSKVTSDVAPILWQHGALARLEKGESIHKLLHDGYSTISLGYAGLYECVKYMTGHSHTDNGEGEEFAIKVMQKLNDKCKEWKEAEKIDYSVYGTPIESTTYKFAKCLKKRFGTVEGITDRNYITNSYHVPVFEDIDAFSKLKLESKFQKLSPGGAISYVETPNLQDNLEVVLQIINFIYDNIMYAELNTKSDYCQKCGFDGEILIDENLEWYCPNCGNRDHNTLNVARRTCGYIGSQFWNKGRTQEIKERVLHIDNKDDE

SEQ ID NO: 482 - protein, 724 aa, unidentified
  REGION 1..724: note = Category: MG55 effectors
  REGION 1..724: note = Description: MG55-55 effector
  source 1..724: note = uncultivated organism sequence
MKIIKRSGAENTFDKEKIENAVAKANITVEEKDRLSEGEIGEIAQNIEDKCSEMNRAMDVETIQDWVEADIMRHGKYTVAKHYITYRYERSIVRQANTTDKQILSLLNFENEEVKQENSNKNPTVNSVQRDYMAGEVSKDITRRFLLPDDIVEAHEKGLIHFHDADYFAQHMHNCCLVNLEDMLQNGTVISEVMIEKPHSFSTACNIATQSIAQIASSQYGGQSITLSHLAPFVQISRDKYRREVKKEFAELNIPADEDTINKVAEMRVKAEIVQGVQMIQYQVITLMTTNGQAPFVTVFMYLDEVPEGQTRDDLAAIIEEMLRQRIQGVKNEKGVYITPAFPKLIYVLEEDNIREGSKYWELTKLAAKCTAKRMVPDYISEKKMKELKVDKNGNGQCYPCMGCRSFLTTYLDENGKPKYYGRFNQGVVTINLVDVACSSYKDMDKFWKIFDERLELCRRALMLRHERLKGTPSDVAPILWQNGALARLKKGETIDKLLFGGYSTISLGYAGLCECVRYMTGKSHTDPSATPFALEVMQHLNDACTKWRAETNIDFSLYGTPLESTTYKFARCLQKRFGVIEGVTDRNYITNSYHIHVTEDIDAFDKLTFESQFQALSPGGAISYVEVPNMQNNIEAVLAVMQHIYDNIMYAELNTKSDYCQKCGFDGEIKIVEDDGKLVWECPNCGNRDQNTLNVARRTCGYIGTQFWNQGRTQEIKERVLHL

SEQ ID NO: 483 - protein, 711 aa, unidentified
  REGION 1..711: note = Category: MG55 effectors
  REGION 1..711: note = Description: MG55-56 effector
  source 1..711: note = uncultivated organism sequence
MGIIVEKRDGVSRVAFDSNRIRNAVMKANEQVGEEDRASEAEIDLIVDEVIEKFGGLGYASVEEIQDVVEENLLSMKRKVGIKYHDFRRARAKTRNAAKESILQLVGGANKDVMEENSNKKATVASTQRDLIAGEVSKDITMSDILPTKIAKAHKEGVIHFHDMDYFIQPMFNCCLVNIKDMLDNGTVMNGKMIESPKSFQVACTVTTQIIASVASNQYGGQSVNVKHLAKYIRVSEKKYRKRFEALGMTGETLENLVEAELKAEISAGIQTMQYQINTLMTTNGQTPFVTLFLELEEGSEYEVEQAKLIEEILKQRLEGIKNNKGVYVTPAFPKLIYVLDEHNCLKGGKYDYLTKLAVKCSAKRMYPDYISAKKMRENHEGEVFSCMGCRSFLSEWKDEDGNYKWEGRFNQGVVSINLPQIAILSQTEEGADELRFWQLLDERLAICFEALMLRHKRLLGTKSDVSPIHWQDGAIARLKPGEVIDPLLKDGYSTISLGYIGIYETTKLMTGESNTTEKGRAFALKVMKYLRDTCDRWKSVTGLGFGLYGTPAESLCYRFARIDKKRFGEIKDVTDKGYYTNSYHVDVREPIDAFAKLQYEAEFQKISSGGAISYIEIPNMSKNLDALEAVVSYIYDNIQYAEVNTKSDYCQECGYDGEIIINDDNEWECPCCGNKNHETMNVVRRTCGYLGENFWNVGKTKEIKARVTHL

SEQ ID NO: 484 - protein, 724 aa, unidentified
  REGION 1..724: note = Category: MG55 effectors
  REGION 1..724: note = Description: MG55-57 effector
  source 1..724: note = uncultivated organism sequence
MKVIKRNGTEVVFDISKILVAVGKANNNVKEEHRMTPMQIQRIAESVELNCIELGRSPSVEEIQDMVEHQIMAHGAFEVAKEYITYRYTRSLVRRSNTTDDKILSLIECSNEEAKQENSNKNPIVNSTQRDYMAGEVSRDITNRLLLPKDIVQAHEEGIIHFHDADYYAQHMHNCDLVNLEDMLQNGTVITGTLIERPHSFSTACNIATQIIAQVASNQYGGQSISLAHLAPFVQVSREKIRRIVRTEMEKIHATPSEEEFNDLVESRLRDEVARGVQTIQYQVLTLLTTNGQAPFVTVFMYLNEARNEQEKKDLALIIEETLKQRYQGVKNEAGVWITPAFPKLIYVLEEDNIHDDSPYYYLTKLAAKCTAKRMVPDYISEKMMFQLKIDKNGEGHCYPCMGCRSFLTPYVDENGKPKYYGRFNQGVVTINLPDVALSSGGDIEKFWQIFDERLELCHRALMERHNRLKGTPSDVAPILWQYGACARLKKGEPIDKLLYGGYSTISLGYAGLYECVKYMTGKSHTDPAATPFALQIMNTMNAACKKWKEMHNIDFSLYGTPLESTTYKFAKCLQKRFGVIPGITDKGYITNSYHVHVTEKINAFDKLAFEAQFQHLSPGGAISYVEVPDMQNNLDAVLEVMKFIYDHIIYAELNTKSDYCQVCGWDGEIKIEEEDGKLIWKCPNCGNTDQNKMNVARRTCGYIGTQFWNQGRTQEIRDRVLHL

SEQ ID NO: 485 - protein, 719 aa, unidentified
  REGION 1..719: note = Category: MG55 effectors
  REGION 1..719: note = Description: MG55-58 effector
  source 1..719: note = uncultivated organism sequence
MQVVKRDGKLVDFDQSKIRVAIEKANREVRPRERATKEEINQIIDYVEDLDKKRILVEDIQDIIEEQLMSFGKYLLAKKYITYRYTRELVRKANTTDQSIKELIDGESDYWNNENSNKNARVVTTQRDYLAGITSTDITRRFLLPEDVVKAHDEGIIHFHDADYFAQNALTNCELINLEDMLQNGTIMNGVMIEKPHRFLTAMTIATQIILGVTSSTYGGATVSLTHLAPFVKSSYDRYYKKYKKRGLSEAQCKEYAEQDTKKEVSDGVQTFNYQVNSMTNTNGQAPFLSVCMYLGETDEYKKELAMIIEEFLKQRIEGFKNEKGVYITPAFPKLLYVLEEDNIHKDSKYWYLTELAAKCTAKRLVPDYISEKKMKELKIDKNGNGNCYPCMGCRSFLTPYVDPETNKPKYYGRFNQGVVTINLVDVALSSKQDEEKFWKIFDERLELCHKALQIRHERLSKVTSDVAPILWQHGALARLKKGESIHKLLHDGYSTISLGYAGLYECVKYMTGHSHTDNGEGEEFAIKVMQKLNDKCKEWKEAEKIDYSVYGTPIESTTYKFAKCLKKRFGTIEGITDRSYITNSYHVPVFEDIDAFSKLKLESKFQKLSPGGAISYVETPNLQDNLEVVLQIINFIYDNIMYAELNTKSDYCQKCGFDGEILIDENLEWYCPNCGNRDHNTLNVARRTCGYIGSQFWNKGRTQEIKERVLHIDNKDDE

SEQ ID NO: 486 - protein, 724 aa, unidentified
  REGION 1..724: note = Category: MG55 effectors
  REGION 1..724: note = Description: MG55-59 effector
  source 1..724: note = uncultivated organism sequence
MKVIKRNGTEVVFDISKILIAVGKANNNVKEEHRMTPMQIQRIAESVELNCIELGRSPSVEEIQDMVEHQIMAHGAFEVAKEYITYRYTRSLVRRSNTTDDKILSLIECSNEEAKQENSNKNPIVNSTQRDYMAGEGSRDITNRLLLPKDIVQAHEEGIIHFHDADYYAQHMHNCDLVNLEDMLQNGTVITGTLIERPHSFSTACNIATQIIAQVASNQYGGQSISLAHLAPFVQVSREKIRRIVRTEMEKIHATPSEEEFNDLVESRLRDEVARGVQTIQYQVLTLLTTNGQAPFVTVFMYLNEARNEQEKKDLALIIEETLKQRYQGVKNEAGVWITPAFPKLIYVLEEDNIHDDSPYYYLTKLAAKCTAKRMVPDYISEKMMFQLKIDKNGEGHCYPCMGCRSFLTPYVDENGKPKYYGRFNQGVVTINLPDVALSSGGDIEKFWQIFDERLELCHRALMERHNRLKGTPSDVAPILWQYGACARLKKGEPIDKLLYGGYSTISLGYAGLYECVKYMTGKSHTDPAATPFALQIMNTMNAACKKWKEMHNIDFSLYGTPLESTTYKFAKCLQKRFGVIPGITDKGYITNSYHVHVTEKINAFDKLAFEAQFQHLSPGGAISYVEVPDMQNNLDAVLEVMKFIYDHIIYAELNTKSDYCQVCGWDGEIKIEEEDGKLIWKCPNCGNTDQNKMNVARRTCGYIGTQFWNQGRTQEIRDRVLHL

SEQ ID NO: 487 - protein, 712 aa, unidentified
  REGION 1..712: note = Category: MG55 effectors
  REGION 1..712: note = Description: MG55-60 effector
  source 1..712: note = uncultivated organism sequence
MISKVRKRDGRIKDFDSRRIIEALRKAFEELGYTSSYEYINVAGSVVSELSKLDSEICDVEAIQDIVVKVLQESHPEVAKKYEEYRLKRTEIREENSKLIKSVEGLLNFSNDEVMLENSNKQAQLISTTRDLMAGEVSKFIVRKMIPKDILELHDRGVIHIHDMDYGANDMFNCELVNLQDMLDNGTVINKKMIHSPHTLRTAMTIATQISAQVASYQYGGQTMTLSHLAPYVRKSESVIRREIESDYPELSKERKDKIVERRLRKEIKDSVQLFNYQISTIQSTNGQAPFISLAIYLSERPGYEREVAMLAEEFFNQRIEGIENENGVKATQTFPKLLYFLDENNTYEGSEYFWLTQLAVKSTSLRMNPDYISAKKMKENVGHVFSCMGCRAFLSPFQDKDGNWIFYGRGNLGVCTINLPHVALSAKGDINKFWEILDERLEACRWVGEWRYNKMKGVKAKEAPILWQHGAISRLNPEDDVIKAIDERGFTVTLGYSGIYETVKVLTGKSHTTDNGFDLAEKIMIHLRDKCTEWKTEKPWLRFALYGTPQESTTETFSKALIRDFGEIEGICGKGKLWVTNSYHVDIQEEINAFDKLAIEGELQKYSTGGAVSYVETYNMSKNQEALLQVVQYMYETIMYAEINFESDVCGECGYSGVMDNDPKTLEWVCPNCGNRNQDTLSVVRRTCGYLAETKWTPGRLLDILNRVKHL

SEQ ID NO: 488 - protein, 722 aa, unidentified
  REGION 1..722: note = Category: MG55 effectors
  REGION 1..722: note = Description: MG55-61 effector
  source 1..722: note = uncultivated organism sequence
MEVIKRDGSKVAFDGSKIENAILKAMRYGSGIVKPEIASKISHEIEDWHKSSGAASISIYRIEGQVFEKLIEKGEVLTAKAYEGYRKVREFQRETNTIDNAIYGIVNQTNKEAMDENSNKDATVLATQRDLIAGEFSRDYCRRLLLPPKIVQAHDDGIIHFHDMDYYIQKMHNCDLVNLKDMFANGTVINDKLIETPKSLQTACTVATQIVQQVANGQYGGQTISISHLAPYVRVSYKKHLKAVRKEGKEVGIDYTEEQIEKIAKSRLHEEIKAGVQTIQYQINTFSTTNGQAPFLSIFMYLREEPDYIEETALLIEEILKQRYIGMKNPVGAYVTPAFPKLLYVLDDNNVPDDSQYRYLTDLAVKCVSKRMMPDFISAKIMRENYEGQVFPCMGCRSFLSPWKNEKGEYQWYGRFNQGVVTLNLTDVGLSANKNMDSFWKILDERLDLCYEALMLRHESLKGTPSDISPIHWQYGAIARLKPGEKIDSLLDTCYSTLSLGYIGLYECVVALIGQSHTTEEGDALALEIMQKLRNTCDKWKKDTGLGFALYGTPAESTTYTLARALKKRFGIVPGVTDKDYITNSYHVNVREHIDAFSKLGFEAKFQKISSGGAISYVEVTNMTNNFDAMKELINYMYETIQYAEINTKSDYCQECGFSGEILLDENNEWYCPNCGNRNHKTLNVCRRTCGYLGDNFWNKGRTQEIKERFVHLDNRVYQENN

SEQ ID NO: 489 - protein, 724 aa, unidentified
  REGION 1..724: note = Category: MG55 effectors
  REGION 1..724: note = Description: MG55-62 effector
  source 1..724: note = uncultivated organism sequence
MKIIKRNGAEENFDISKIIMAVTKANAAVEECDRMTPRQIQRIAESVELACQELGRSAAVEEIQDMVEKQIMAHGAFEVAKAYITYRYTRSLVRRANTTDDRILSLIECNNEEAKQENSNKNPIVNSTQRDYMAGEVSRDITSRLLLPKDIVEAHEEGIIHFHDADYYAQHMHNCDLVNLEDMLENGTVITGTLIERPHSFSTACNIATQIIAQVASNQYGGQSISLTHLAPFVQVSRERIRREVEAEMQAIDAHPGEEKLAELVENRVREEIRRGVQTIQYQVVTLLTTNGQAPFVTVFMYLGEAKNEQERHDLAMIIEETLRQRYQGVKNEKGVWVTPAFPKLIYVLEEDNIHEDSPYWYLTELAARCTAKRMVPDYISEKKMLELKVDKNGDGHCYTCMGCRSFLTPYVDENGKPKYYGRFNQGVVTINLPDVALSSGGNMEKFWKIFDERLELCHRALMCRHERLKGTLSDAAPILWQYGALARLKKGEPIDKLLYGGYSTISLGYAGLYECVKYMTGKSHTDPSATPFALEIMQHMNDACAKWKQMHNIDFSLYGTPLESTTYKFAKCLQKRFGIIPGVTDKGYITNSYHIHVTEHIDAFSKLAFESKFQALSPGGAISYVEVPNMQNNIPAVLEVMKFIYDNIMYAELNTKSDYCQVCGYDGEIEIVEHDGKLIWRCPNCGNTDQDKMNVARRTCGYIGTQFWNQGRTQEIKERVLHL

SEQ ID NO: 490 - protein, 724 aa, unidentified
  REGION 1..724: note = Category: MG55 effectors
  REGION 1..724: note = Description: MG55-63 effector
  source 1..724: note = uncultivated organism sequence
MKIIKRNGAEATFDISKIIMAITKANAAVEEGDRMTPRQIQRIAESVELACQELGRSAAVEEIQDMVEKQIMAHGAFEVAKAYITYRYTRSLVRRANTTDDRILSLIECNNEEAKQENSNKNPIVNSTQRDYMAGEVSRDITSRLLLPKDIVEAHEEGIIHFHDADYYAQHMHNCDLVNLEDMLENGTVITGTLIERPHSFSTACNIATQIIAQVASNQYGGQSISLTHLAPFVQVSRERIRREVAAEMQAINADPGEEKLAELVENRVREEIRRGVQTIQYQVVTLLTTNGQAPFVTVFMYLGEAKNEQERHDLAMIIEETLRQRYQGVKNEKGVWVTPAFPKLIYVLEEDNIHEDAPYWYLTELAARCTAKRMVPDYISEKKMLELKVDKNGEGHCYTCMGCRSFLTPYVDENGKPKYYGRFNQGVVTINLPDVALSSGGNMEKFWKIFDERLELCHRALMCRHERLKGTLSDAAPILWQYGALARLKKGEPIDKLLYGGYSTISLGYAGLYECVKYMTGKSHTDPSATPFALEIMQHMNDACKHWKQMHNIDFSLYGTPLESTTYKFAKCLQKRFGIIPGVTDKGYITNSYHIHVTENIDAFSKLAFESKFQALSPGGAISYVEVPNMQNNIPAVLEVMKFIYDNIMYAELNTKSDYCQVCGYDGEIEIVERDGKLIWRCPNCGNTDQDKMNVARRTCGYIGTQFWNQGRTQEIKERVLHL

SEQ ID NO: 491 - protein, 341 aa, unidentified
  REGION 1..341: note = Category: MG55 effectors
  REGION 1..341: note = Description: MG55-64 effector
  source 1..341: note = uncultivated organism sequence
MAATMKDIARRTGLGLATISSYFNGGNVREKNRVKIEEAIQELHYEVNEVARGLKTNATKTIGVVIPELNNTFCAEIITGMEDVLRSHGYATIVCDCRTDKKLERDAVEFLSRKRVDGIISMPVDAEGNHLKKFQKTGKPIVLIDRRIRELFCDSVLVDNEKAAEDAMRVFFQAGHRKIGIIGGPEEISTAQERLQGYRNAYEKENIPVRESLIYHGDYTIQGGVQGIEKLVADNPDMTAVFVTNYEMTMGAVIGMNELGLKIPEQLSMIGFDNLQFARACNPKLTIVAQPTQGIAGEVAGIMLKRLEGAASEETEPITEKLGAEIIMGKSVRVLDEKEKL

SEQ ID NO: 492 - protein, 724 aa, unidentified
  REGION 1..724: note = Category: MG55 effectors
  REGION 1..724: note = Description: MG55-65 effector
  source 1..724: note = uncultivated organism sequence
MKIIKRNGAEVGFDITKIIIAITKANEAVEEADRMTPMQIQRIAESVELQCQKMNRAPTVEEIQDMVEHYIMAHGAFEVAKHYITYRYTRSLVRKSNTTDDKILSLIECNNEEAKQENSNKNPVVNSTQRDYMAGEVSRDLSERILLPQDIVEAHREGIIHFHDSDYYAQHMHNCDLVNLEDMLQNGTVITGTLIEKPHSFATACNIATQIVAQVASNQYGGQSISLTHLAPFVQVSRDKIRASVRSEFDAVGVAVTEDDINAIAEKRLREEIRRGVQTIQYQVVTLLTTNGQAPFVTVFMYLGEAKSQQEKDDLALIIEETLLQRYQGVKNEKGVWVTPAFPKLIYVLEEDNIHEDSKYWYLTKLAAKCTAKRMVPDYISEKKMLELKVDKNGNGHCYPCMGCRSFLTPYVDENGQPKYYGRFNQGVVTVNLPDIALSSGGNIEKFWRIFDERMELCHRALLCRHERLKGTLSDAAPILWQYGACARLKKGEPIDKLLYGGYSTISLGYAGLYECVKYMTGKSHTDPAATPFALEIMNALNAACKKWKAQHNIDFSLYGTPLESTTYKFAKCLQKRFGVIKGITDKGYITNSYHVHVTEPIDAFKKLEFEAQFQHLSPGGAISYVEVPDMQNNLDAVLEVMKFIYDHIIYAELNTKSDYCQVCGWDGEIEVVEEDGKLIWKCPQCGNTDQDKMNVARRTCGYIGTQFWNQGRTQEIKDRVLHL

SEQ ID NO: 493 - protein, 707 aa, unidentified
  REGION 1..707: note = Category: MG55 effectors
  REGION 1..707: note = Description: MG55-66 effector
  source 1..707: note = uncultivated organism sequence
MQVIKRDGSVVDYDRAKIAIAIGKANAEVEKGERASKEEIGAILDHIESKKKKRMLVEDIQDIIEEKLMEQGHYELAKTYIIYRYNRALVRKANTTDEAILSLISNSNKDVMEENSNKNALAAATQRDLIAGEVSKDLTRRILLPEKISKAHDDGILHFHDADYFIQPIFNCCLINIGDMLDNGTVMNGKLIESPKSFQVACTVVTQIIAAVACSQYGGQSVDIRHLGKYLRKSRTKFENHYREACPELSDDEVKKLVDDRIQDELKSGVQTIQYQINTLMTTNGQSPFVTLFLYLDKDDEYLEENAQIVMEILRQRYEGIKNEKGVYVTPAFPKLVYVLDEINCLKGGKYDYITEFAVKCSAKRLYPDYISAKEMRETYEGNVFSPMGCRSFLSPWKDENGNYKFEGRFNQGVVSINLPQIGIIAQGDEEKFWKLFDERLDLCREALMCRHRALLGTKSDVSPIHWQYGAIARLDKGETIDKLLMGGYSTLSLGYIGLYEVTKLMTGVTQTDPKGEEFAVRVMQHMRDKTDQWKKETGLGFALYGTPAESLCYRFARIDKERFGTIEDVTDKGYYTNSYHVDVREHIDAFSKFSFEAQFQKISSGGCISYVEIPNMQNNLEAMQEIVRFIYDNIQYAEFNTKSDYCHVCGWDGEIIINDDNEWECPNCHNKDHKKMNVTRRTCGYLGENFWNLGKTKEIKARVLHL

SEQ ID NO: 494 - protein, 720 aa, unidentified
  REGION 1..720: note = Category: MG55 effectors
  REGION 1..720: note = Description: MG55-67 effector
  source 1..720: note = uncultivated organism sequence
MKIMKRSGIEADFDVTKISAAIKKANCEVAAVDQLSEEQIEEISTNVEKICSDIGRTLGVEEIQDLVEDQIMNKRAFVLARKYITYRYTRALVRKSNSTDKQILSLLECNNEEAKQENSNKNPTVNSVQRDYMAGEVSKDITKRFLLPEDIVAAHEQGIIHFHDSDYFAQHMHNCCLVNLEDMLQNGTVISETMIERPKSFSTACNIATQSIAQIASSQYGGQSISLAHLAPFVDVSRQKFRLQVRDEFEKANIAASEEQINNVAEQRVRDEIKRGVQMIQYQVITLMTTNGQAPFVTVFMYLDEVPEGRLRDDLALVTEEILRQRIQGVKNEKGVYITPAFPKLIYVLEEDNITEGSKYWELTKLAAKCTAKRMVPDYISEKIMRKLKDGNCYPCMGCRSFLTVYHDENDKPKFYGRFNQGVVTINLVDVACSSGKDMDKFWQIFDERLDLCYRALMCRHKRLLDTPSDVAPILWQYGALARLKKGETINKLLYNGYSTISLGYAGLCECTRYMTGHSHTDPESTPFALQVMQHMNDACAKWREETNIDFSLYGTPLESTTYKFAKCLQKRFGIIEGVTDRGYITNSYHVHVTEEINAFDKLKFEAQFQELSPGGAISYVEVPNMENNIEAVLNVMKYIYDNIMYAELNTKSDYCQCCGYTGQIQIVTDEHGKLIWECPNCGNTDQNKMNVARRTCGYIGTQFWNQGRTQEIKERVLHL

SEQ ID NO: 495 - protein, 732 aa, unidentified
  REGION 1..732: note = Category: MG55 effectors
  REGION 1..732: note = Description: MG55-68 effector
  source 1..732: note = uncultivated organism sequence
MKVIKRDGKIVEYDREKIRIAIGKANNEVSKKYRATEEEIKDIIEYIEELKKSRILVEDIQDIIEQKLMEMGKYELAKEYITYRYTRALVRKANTTDQSIKELIEGESEYWNNENSNKNAKVVTTQRDYLAGITSTDITRRFLLPDDVVKAHDEGIIHFHDADYFAQNALHNCDLINLEDMLQNGTNINGVLIEKPHKFLTAMTIATQIITAVTSSQYGGATVTMTHLAPFVRDSYNAYLKKYRERHLSKEQCEKFAKEDLKKEIQDGVQTFQYQINSMTTTNGQSPFLSVCMYLGETTEYKEELAMIIEEILKQRILGMKNEKGVYVTPAFPKLLYVLEEDNIHEDSKYYYLTKLAAKCTAKRMVPDYISEKIMKELKVDKNGNGQCYPCMGCRSFLTPYIDPETNKPKYYGRFNQGVVTINLVDVALSSGKDMNKFWKIYEERLELCHKALKVRHERLAKATSDVAPILWQYGALARLKKGESIHKLLHGGYSTISLGYAGLYECVKYMTGNSHTDGAKGEEFGLEVMQKLNDKCKEWKEAEDIDYSVYGTPIESTTYKFAKCLQRRFGKIKGITDRNYITNSYHVPVFEEIDAFSKLKLESKFQRLSPGGAISYVETPNLQDNLEVVLQIIKFIYDNIMYAELNTKSDYCQKCGFDGEILLDDNLEWYCPNCGNRDHSTLNVARRTCGYIGSNFWNKGRTQEIKERVLHIDNKDDTKKVEKEAKKDEIQ

SEQ ID NO: 496 - protein, 724 aa, unidentified
  REGION 1..724: note = Category: MG55 effectors
  REGION 1..724: note = Description: MG55-69 effector
  source 1..724: note = uncultivated organism sequence
MKIIKRNGAEVGFDITKIIIAITKANEAVEEADRMTPMQIQRIAESVELQCQKMNRAPTVEEIQDMVEHYIMAHGAFEVAKHYITYRYTRSLVRKSNTTDDKILSLIECNNEEAKQENSNKNPVVNSTQRDYMAGEVSRDLSERILLPQDIVEAHREGIIHFHDSDYYAQHMHNCDLVNLEDMLQNGTVITGTLIEKPHSFATACNIATQIVAQVASNQYGGQSISLTHLAPFVQVSRDKIRASVRSEFDAVGVAVTEDDINAIAEKRLREEIRRGVQTIQYQVVTLLTTNGQAPFVTVFMYLGEAKSQQEKDDLALIIEETLLQRYQGVKNEKGVWVTPAFPKLIYVLEEDNVHEDSKYWYLTKLAAKCTAKRMVPDYISEKKMLELKVDKNGNGHCYPCMGCRSFLTPYVDENGQPKYYGRFNQGVVTVNLPDIALSSGGNIEKFWRIFDERMELCHRALLCRHERLKGTLSDAAPILWQYGACARLKKGEPIDKLLYGGYSTISLGYAGLYECVKYMTGKSHTDPAATPFALEIMNALNAACKKWKAQHNIDFSLYGTPLESTTYKFAKCLQKRFGVIKGITDKGYITNSYHVHVTEPIDAFKKLEFEAQFQHLSPGGAISYVEVPDMQNNLDAVLEVMKFIYDHIIYAELNTKSDYCQVCGWDGEIEVVEEDGKLIWKCPQCGNTDQDKMNVARRTCGYIGTQFWNQGRTQEIKDRVLHL

SEQ ID NO: 497 - protein, 719 aa, unidentified
  REGION 1..719: note = Category: MG55 effectors
  REGION 1..719: note = Description: MG55-70 effector
  source 1..719: note = uncultivated organism sequence
MQVIKRDGKVVDFDQSKIKIAIEKANKEVKPRERATKEEINQIISYIEELDKKRILVEDIQDIIEEQLMTFGKYILAKKYITYRYTRELVRKSNTTDQSIKELIDGESDYWNNENSNKNARVVTTQRDYLAGITSTDITRRFLLPEDVVKAHDEGIIHFHDADYFAQNALTNCELINLEDMLQNGTIMNGVMIEKPHRFLTAMTIATQIILGVTSSTYGGATVSITHLAPFVKSSYEKYYKKYKQRGLNEKQCKEYAEQDTRKEVSDGVQTFNYQVNSMTNTNGQAPFLSVCMYLGETDEYKQELAMIIEEFLKQRIEGFKNEKGVYITPAFPKLLYVLEEDNIHKDSKYWYLTELAAKCTAKRLVPDYISEKKMKELKIDKNGNGNCYPCMGCRSFLTPYVDPETNKPKYYGRFNQGVVTINLVDVALSSKQDEEKFWKIFDERLELCHKALQIRHERLSKVTSDVAPILWQHGALARLKKGESIHKLLHDGYSTISLGYAGLYECVKYMTGNSHTDNGIGEEFALKVMQKLNDKCKEWKEAEKIDYSVYGTPIESTTYKFAKCLRKRFGTIEGITDRSYITNSYHVPVFEDIDAFSKLKLESKFQKLSPGGAISYVETPNLQNNLEVVLQIIHFIYDNIMYAELNTKSDYCQKCGFDGEILIDENLEWYCPNCGNRDHNTLNVARRTCGYIGSQFWNKGRTQEIKERVLHIDNKDDE

SEQ ID NO: 498 - protein, 722 aa, unidentified
  REGION 1..722: note = Category: MG55 effectors
  REGION 1..722: note = Description: MG55-71 effector
  source 1..722: note = uncultivated organism sequence
MEVIKRDGSKVAFDGTKIENAILKAMRYGSGIVKPEIASKISHEIEDWHKSSGAASISIYRIEGQVFEKLIEKGEVLTAKAYEGYRKVREFQRETNTIDNAIYGIVNQTNKEAMDENSNKDATVLATQRDLIAGEFSRDYCRRLLLPPKIVQAHDDGIIHFHDMDYYIQKMHNCDLVNLKDMFANGTVINDKLIETPKSLQTACTVATQIVQQVANGQYGGQTISISHLAPYVRVSYKKHLKAVRKEGEEVGIDYTEEQIEKIAKSRLHEEIKAGVQTIQYQINTFSTTNGQAPFLSIFMYLREEPDYIEETALLIEEILKQRYIGMKNPVGAYVTPAFPKLLYVLDDNNVPDGSQYRYLTDLAVKCVSKRMMPDFISAKIMRENYEGQVFPCMGCRSFLSPWKNEKGEYQWYGRFNQGVVTLNLTDVGLSANKNMDSFWKILDERLDLCYEALMLRHESLKGTPSDISPIHWQYGAIARLKPGEKIDSLLDTCYSTLSLGYIGLYECVVALIGQSHTSEEGDALALEIMQKLRNACDKWKKDTGLGFALYGTPAESTTYTLARALKKRFGVVPGVTDKDYITNSYHVNVREQIDAFAKLGFEAKFQKISSGGAISYVEVTNMTNNFDAMKELINYMYETIQYAEINTKSDYCQECGFSGEILLDENNEWYCPNCGNRNHKTLNVCRRTCGYLGDNFWNKGRTQEIKERFVHLDNRVYQENN

SEQ ID NO: 499 - protein, 724 aa, unidentified
  REGION 1..724: note = Category: MG55 effectors
  REGION 1..724: note = Description: MG55-72 effector
  source 1..724: note = uncultivated organism sequence
MKIIKRSGAENTFDKEKIENAVAKANITVEEKDRLSEGEIGEIAQNIEDKCSEMNRAMDVETIQDWVEADIMRHGKYTVAKHYITYRYERSIVRQANTTDKQILSLLNFENEEVKQENSNKNPTVNSVQRDYMAGEVSKDITRRFLLPDDIVEAHEKGLIHFHDADYFAQHMHNCCLVNLEDMLQNGTVISEVMIEKPHSFSTACNIATQSIAQIASSQYGGQSITLSHLAPFVQISRDKYRREVKKEFAELNIPADEDTINKVAEMRVKAEIVQGVQMIQYQVITLMTTNGQAPFVTVFMYLDEVPEGQTRDDLAAIIEEMLRQRIQGVKNEKGVYITPAFPKLIYVLEEDNIREGSKYWELTKLAAKCTAKRMVPDYISEKKMKELKVDKNGNGQCYPCMGCRSFLTTYLDENGKPKYYGRFNQGVVTINLVDVACSSYKDMDKFWLIFDERLELCRRALMLRHERLKGTPSDVAPILWQNGALARLKKGETIDKLLFGGYSTISLGYAGLCECVRYMTGKSHTDPSATPFALEVMQHLNDACAKWRAETNIDFSLYGTPLESTTYKFARCLQKRFGVIEGVTDRNYITNSYHIHVTENIDAFDKLTFESQFQALSPGGAISYVEVPNMQNNIEAVLAVMQHIYDNIMYAELNTKSDYCQKCGFDGEIKIVEDDGKLVWECPNCGNRDQNTLNVARRTCGYIGTQFWNQGRTQEIKERVLHL

SEQ ID NO: 500 - protein, 1253 aa, unidentified
  REGION 1..1253: note = Category: MG55 effectors
  REGION 1..1253: note = Description: MG55-73 effector
  source 1..1253: note = uncultivated organism sequence
MGIFENYTNLYAVKKSIQIGAIPTERTKKTLATMGIVEKDRQRVENISKFCQVFDRFHKERAGKILEETSFKTLPAYESAYDAYHKALVEKAEDADAIRDELVNRTDEVLKEISDAFLKNDSITELFTGDFLNKEMPALLTDKKEKKLAEELSKSAGGFIRYHQARSLLYSVKHGSIAFRLINDNYPFFYKNCEIIEKFRAVSGRTEEFLEGMRKLDWFRDSYLDEISDRDNYGSCFTQAAIDRYNVMLNGFTMPDRVKIKGLNEYINEYNHTLSAAEKREKGLRLLDPLYKLPLFNDNSFSVIPEKFETDGELLDTVDRIFNDTIYTKALGEAIDEACRLFDKDLGEYDASGIYIAPRQLTAFSLMAFDKWNAIEKLFNLDYDNKNYKKLVLDNPKANEDKYEKDRRNVLNRNIFSLEDIRKLALLDEEESGDAVEALCRNVREKKAEVLAAYNEYTEARKERKEKEEREEEVVSVRRDVRLRSAIKGLCDSIKEFERSLNFILSGRSLTETGLAGDADFINAFNELHDIIREYDAAYNKIRNFISRTKTKSDSVELLFGNSSFLGGWSDMSVKGGTFIKDGDKIFFVAASHGATKLLDDEYLTYEDGEETVEVMDYYLLADAAKSIGRIFIYNGMKNKDGGPAKYKYNPDAVPAKEYGLTEELFNAYAKGMHKSNYKENGFTDEDNRKTLDALTEYLGKAMPKYFTKLDFQLEKHYDTYRDICDDLKKKASFALSFKKVSKDYIQKLENNGDICLFRLWCKDFSEHSSGREGNYTVILKNLFNTDKDAVSTIRLSGNAALRFEKASLKKEDLVVHKAGTWVENKNPNSENRKRKLEYDIIKDRRFHHDRFRLMLPYALNYTEGDFCPVNEKVREDIKAGKFKYITSVKGGMDNLLWVCVTDLKGNIVEQFPINTIGNTDWREKISIRQQEMKEGNKNWTPGTDIRTLKEGYLSLAIKLVYDTIMKYESLVVLEDNAPNFKGNKFGIDTRLYEVFTEALRQKLRYAFSRTEGERDYGGVLKGFQLVNPEKPKGMQDGIIFLINPAYTSNIDPATGFISYIRPRYENITRTKNMIEKIDGFAVKNGMFCMDIDFSRFGDVLKGTRSEWTVWANGSRIIWKRDEDLAKGGKFVEISINEAFLDFFKKNRIDIKGDIKAQLLSNNSKAFYSEFCELFGALLKLSNGKNDDNFIISPVKNKKGQFFNSKTSDTVTCSDSNSAYNLCRKMAICVRNISNDVKKPVPKSEEFIKEIQG

SEQ ID NO: 501 - protein, 573 aa, unidentified
  REGION 1..573: note = Category: MG55 effectors
  REGION 1..573: note = Description: MG55-74 effector
  source 1..573: note = uncultivated organism sequence
MPFNIEKLRPDYRTKNFQIPITSINLPEEFWTEAKTYKNCWNEIVAEFISFGEEHDALIVRYRELKTEKADLTGIKEELEALRDKRRDAVKAKWKAQSEHLFNNDLEVMLTGVEKSLKENSFRFKRGLDSIIFTKRYGKGGVKFSDLFTVEDSRSDSLKRKPFIVRKGIKRDSKRAEHKTPLHGSFLVGKNRVRLNFYGLWTYADFLDDCFIKRVSLNGKRDFQGWKWYLTVAAEMPPTEHLINRTLPVAGLDLGYRIFPEYIRFGVVSDSAGNIFEFRLPHGNMENQYLRRKNVFLEKNYGRKIDFVRDLYDYFAKDSAQGKTLEEAKQAVKKIYDTAQSEKINLPEEYKQAFTGFVKMRNHGLLKIKRVCGELIENLPDDKNQEVLIALTETKILIEEWSEKNDQFEQEKYFFRQKFIGRRKQLYRNIAVWLSTNYSKVIFEKDLNLAKLATKSKKSSRVTDAALLESNKFRQWTSLSELVRYLGETDQDFVGNWLTAGTTAYSTYFCDECGAGRASVPEDLIAVCDNGHRRDQDVKASRNLLAEAEIKPEKNSVKIPDYLKKNIVRITEK

SEQ ID NO: 502 - protein, 720 aa, unidentified
  REGION 1..720: note = Category: MG55 effectors
  REGION 1..720: note = Description: MG55-75 effector
  source 1..720: note = uncultivated organism sequence
MKIMKRSGIEADFDVTKISAAIKKANCEVAAVDQLSEEQIEEISTNVEKICSDIGRTLGVEEIQDLVEDQIMNKRAFVLARKYITYRYTRALIRKSNSTDKQILSLLECNNEEAKQENSNKNPTVNSVQRDYMAGEVSKDITKRFLLPEDIVAAHEQGIIHFHDSDYFAQHMHNCCLVNLEDMLQNGTVISETMIERPKSFSTACNIATQSIAQIASSQYGGQSISLAHLAPFVDVSRQKFRLQVRDEFEKANIAASEEQINNVAEQRVRDEIKRGVQMIQYQVITLMTTNGQAPFVTVFMYLDEVPEGRLRDDLALVTEEILRQRIQGVKNEKGVYITPAFPKLIYVLEEDNITEGSKYWELTKLAAKCTAKRMVPDYISEKIMRKLKDGNCYPCMGCRSFLTVYHDENDKPKFYGRFNQGVVTINLVDVACSSGKDMDKFWQIFDERLDLCYRALMCRHKRLLDTPSDVAPILWQYGALARLEKGETINKLLYNGYSTISLGYAGLCECTRYMTGHSHTDPESTPFALQVMQHMNDACAKWREETNIDFSLYGTPLESTTYKFAKCLQKRFGIIEGVTDRGYITNSYHVHVTEEINAFDKLKFEAQFQELSPGGAISYVEVPNMENNIEAVLNVMKYIYDNIMYAELNTKSDYCQCCGYTGQIQIVTDEHGKLIWECPNCGNTDQNKMNVARRTCGYIGTQFWNQGRTQEIKERVLHL

SEQ ID NO: 503 - protein, 724 aa, unidentified
  REGION 1..724: note = Category: MG55 effectors
  REGION 1..724: note = Description: MG55-76 effector
  source 1..724: note = uncultivated organism sequence
MKIIKRSGAENTFDKEKIENAVAKANITVEEKDRLSEGEIGEIAQNIEDKCSEMNRAMDVETIQDWVEADIMRHGKYTVAKHYITYRYERSIVRQANTTDKQILSLLNFENEEVKQENSNKNPTVNSVQRDYMAGEVSKDITRRFLLPDDIVEAHEKGLIHFHDADYFAQHMHNCCLVNLEDMLQNGTVISEVMIEKPHSFSTACNIATQSIAQIASSQYGGQSITLSHLAPFVQISRDKYRREVKKEFAELNIPADEDTINKVAEMRVKAEIVQGVQMIQYQVITLMTTNGQAPFVTVFMYLDEVPEGQTRDDLAAIIEEMLRQRIQGVKNEKGVYITPAFPKLIYVLEEDNIREGSKYWELTKLAAKCTAKRMVPDYISEKKMKELKVDKNGNGQCYPCMGCRSFLTTYLDENGKPKYYGRFNQGVVTINLVDVACSSYKDMDKFWKIFNERLELCRRALMLRHERLKGTPSDVAPILWQNGALARLKKGETIDKLLFGGYSTISLGYAGLCECVRYMTGKSHTDPSATPFALEVMQHLNDACAKWRAETNIDFSLYGTPLESTTYKFARCLQKRFGVIEGVTDRNYITNSYHIHVTENIDAFDKLTFESQFQALSPGGAISYVEVPNMQNNIEAVLAVMQHIYDNIMYAELNTKSDYCQKCGFDGEIKIVEDDGKLVWECPNCGNRDQNTLNVARRTCGYIGTQFWNQGRTQEIKERVLHL

SEQ ID NO: 504 - protein, 723 aa, unidentified
  REGION 1..723: note = Category: MG55 effectors
  REGION 1..723: note = Description: MG55-77 effector
  source 1..723: note = uncultivated organism sequence
MKVIKRDKKEVEFDSTKIEAAIKKARNACTSSNLSDENIADIADYITYKCKKLDHSVSVEDIQDMVEDQLMAHGEFALAKEYVKYRYNRQLVRKSNTTDEKILSLIELQNEEVKQENSNKNPTINSTQRDYMAGEVSRDLTNRILLPKDIVEAHEKGIIHFHDSDYFAQHMHNCDLVNLEDMLQNGTVISGTLIEKPHSFHTACNVATQIVAQVASAQYGGQSISLAHLAPFVDISRKKIYNKFRKNFEELGINVTEDKLSELVEKEVKEEINRGVQTIQYQVVTLMTTNGQTPFVTVFMYLGEAKNEREKADLALIIEEVLRQRIQGVKNEKGAWITPAFPKLIYVLEEQNITEDAPYFYLTELAAKCTAKRMVPDYISEKIMLELKKDKNGEGHCYTCMGCRSFLTPYLDKNGKPKYYGRFNQGVVTINLVDVACSSHKDINKFWEIFDERLELCHRALMCRHKRLKGTPSDVAPILWQHGALARLKKGEAIDKLLYGGYSTISLGYAGLCECTRYMTGKSHTDPSATPFALEVMKHMNDACAKWKEEENIDFSLYGTPLESTTYKFAKCLQKRFGIIKGVTDKAYITNSYHVHVTEEIDAFTKLAFESQFQKLSPGGAISYVEVPNMQNNIPAVIQVIQFIYDNIMYAELNTKSDYCQKCGYDGEIKLFKEDGKYVWKCPNCGNTDQNFLNIARRTCGYIGVNFWNFGRTEEIAERKLHL

SEQ ID NO: 505 - protein, 730 aa, unidentified
  REGION 1..730: note = Category: MG55 effectors
  REGION 1..730: note = Description: MG55-78 effector
  source 1..730: note = uncultivated organism sequence
MQVIKRDGRIVDFDRQKIAAAIGKANAEVKPRERASKEDIKGIIEYVEGLDKKRILVEDIQDIIEEKLMECEKYLLAKKYITYRYTRELVRKANTTDQSIKELIDGESDYWNNENSNKNARVVTTQRDYLAGITSTDITRRFLLPKDVVEAHDEGIIHFHDADYFAQNALTNCELINLDDMLQNGTIMNGVMIEKPHRFLTAMTIATQIILAVTSSTYGGATVSLTHLAPFVRSSYERYYKKYKERGLSEKQCKEYAEQDTKKEIADGVQTFNYQVNSMTNTNGQAPFLSVNMYLGETKEYKKELAMVIEEFLKQRMEGFKNEKGVYITPAFPKLLYVLEKDNITEDSPYWYLTELAAKCTAKRMVPDYISEKKMLELKIDKNGNGNCYPCMGCRSFLTPYVDPKTNKPKYYGRFNQGVVTINLVDVALSSDKDMDKFWKIFDERLELCHRALQVRHERLSKVTSDVAPILWQNGALARLKKGESIHPLLHGGYSTISLGYAGLYECVKYMTDHSHTDNGEGKDFGIKVMQKLNDKCKEWKAAEDIDYSVYGTPIESTTYKFAKCLKKRFGVIEGITDRDYITNSYHIPVFEEIDAFSKLSIESQFQQLSPGGAISYVETPNLQNNIESVLQIIKFIYDNIMYAELNTKSDYCQVCGFDGEILIDDNLEWYCPNCGNRNHDTLNVARRTCGYIGSQFWNKGRTQEIKERVLHIDNKDAEMPKKEKTKVAV

SEQ ID NO: 506 - protein, 736 aa, unidentified
  REGION 1..736: note = Category: MG55 effectors
  REGION 1..736: note = Description: MG55-79 effector
  source 1..736: note = uncultivated organism sequence
MENRDHMDVIHVKTNVIKRNGQEVSFDISKIINAIGKANKEVESIHQMNEFQIRAVADNIARKIASYPHAVNVEDIQDMVETGIMEMRGYEVAQKYVRYRYKREISRKSNTTDDGILSLIDLSNEEVKQENSNKNPVINSTQRDYMAGEVSKDLTKRLLLPEEIVKAHEEGIIHFHDADYFAQREHNCDLINLEDMLQNGTVISQTLIEKPHSFFTACNVTTQIVAQVASNQYGGQSFTLAHLAPFVDISRKKITKEVIEERKETGESMDESIIEKIVERRLKEEIKSGIQTIQYQLITLMTCNGQAPFVTMFMYLDEVPDGQTRKDLAMIIEEVLRQRMQGVKNEKGVWITPAFPKLIYVLDEDNIHDDSPYYYLTKLAAECTAKRMVPDYISAKIMKSLKNGDVYPCMGCRSFLTPDTEGLGPHGEHKYYGRFNQGVVTINLVDVACSSDGDMDRFWKILEDRLELCHRALRCRHERLLGTVSDVAPILWQYGALARLKKGETIDKLLFNNYSTISLGYAGLYEMCVRMLGVSHTTEEGRKFALAVMQKLNDKCAEWRKAENISYSVYGTPMESTTYKFAKCLQKRFGIIPGVTDKNYITNSYHVHVAEKIDAFHKLKFESDFQKLSPGGAISYIEVPNMQTNIPAVLTVMKYIYENIMYAELNTKSDYCMVCGYDGEIKIVEDENGKLVWECPNCGNRDQHKMSVARRTCGYIGTQFWNQGRTQEIKDRVLHL

SEQ ID NO: 507 - protein, 734 aa, unidentified
  REGION 1..734: note = Category: MG55 effectors
  REGION 1..734: note = Description: MG55-80 effector
  source 1..734: note = uncultivated organism sequence
MIYNKCILKQGEDMEMKIIKRDGSIVDYNPEKIRIAIKKANNEVSRKERATETEIEEIITYIEDLKKSRILVEDIQDIIEQKLMSLEKYQLAKTYITYRYTRALVRKANTTDQSIKELIEGESEYWNNENSNKNATVVTTQRDYLAGITSTDITRRFLLPEDIVKAHDEGIIHFHDADYFAQNALTNCELINLEDMLQNGTIMNGVMIEKPHRFITACTIATQIILAVTSSTYGGATISLSHLAPFVKSSYDKYYKKYKDRGLTEKQCEEYAKQDTRKEVSDGVQTFNYQVNSMTNTNGQAPFLSVCMYLGETEEYKEELAMIIEEFLKQRIEGFKNEKGVYVTPAFPKLLYVLEEDNVHEDSKFWYLTELAAKCTAKRMVPDYISEKKMLELKVDKNGEGHCYPCMGCRSFLTPYVDPETNKPKYYGRFNQGVVTINLVDVALTSGKDKNKFWKIYDERLELCHRALQARHERLSKVTSDVAPILWQNGAFARLPKGAPIHPLLHGGYSTISLGYAGLYECVKYMTDKSHTDNGEGKEFAIEVMKKLNEKCKEWKEKEDIDYSVYGSPIESTTYKFAKCLKERFGVVEGITDKNYITNSYHVPVFEEIDAFSKLKLESEFQVLSPGGAISYVETPNLQDNLEVVLQIIRFIYDNIMYAELNTKSDYCQKCGFDGEILIDDNLEWYCPNCGNRDHNTLNVARRTCGYIGSNFWNKGRTQEIKERVLHIDNKDDE

SEQ ID NO: 508 - protein, 420 aa, unidentified
  REGION 1..420: note = Category: MG55 effectors
  REGION 1..420: note = Description: MG55-81 effector
  source 1..420: note = uncultivated organism sequence
MNKYISAVKIRIVPLNKNTFDYINNLMYQTNKIYNDAYSHEWVFIKQKLSESIIPVKSAKTTKVYHSVRDLHPTFPTAILSNICHRVKKDFSNDIKNGLFKGKRTPRLYKYGAPIIYQFNSGGINPNFHNVNDDIILRIKNGLDFKLLFGKDKSGNKKLLERLMDKNDKSLNINRVFNVTYNKRDKHYYIIFTYETESEDYEKVKGRVCGIDLGVRRFVSIRLNDNIHVQKSIHSDDLIRVKMDINKKRREYQKSMVMAKGGHGRNRKLKYLDTIRKKEINFTNTALHKLSKQVIDFCIKYKVEQINMELLNRNIDKNSFFSRYWPISNFIDKLKYKVDSYGINLKFVDPYHTSQICSICGEIGERNGDTFICQNDKCKIHNENIDSDYNAAYNIAKSKLYVDKYENTQYYKLKNKEKVL

SEQ ID NO: 509 - protein, 739 aa, unidentified
  REGION 1..739: note = Category: MG55 effectors
  REGION 1..739: note = Description: MG55-82 effector
  source 1..739: note = uncultivated organism sequence
MNIIKRDGSVVEYDANKIRTAIGKANAEVQKNEKASKEEIEEIIKYIQELNKKRMLVEDIQDIIEEKLMSYNHYQLAKAYITYRYTRSLVRQANTTDQSIKELIDGTSEYWNTENSNKNARVVTTQRDYLAGITSTDISRRFLIPKEVVDAHDEGLIHFHDMDYFAQNALHNCDLIDLEDMLQNGTCINGVMIEKPHRFITAMTIATQIITAVNSSQYGGVTITLTHLAPFVRDSYLRYVKKYEERGFSKEDVEKYAKEDLQKEVVDGVQTFQYQINSMTTTNGQAPFLSVCMYLGETEEYKPELAMIIEEVLRQRTEGMKNEKGIYVTPAFPKLLYVLEEDNIKEGSKYYYLTKLAAKCTAKRLVPDYISEKKMKEYKIDSNGDGQCYPCMGCRSFLTPYVDPKTKKAKYYGRFNQGVVTINLPDVALSSGKDVEKFWKIMDERLELCHRGLKTRYERLSHATSDVAPILWQNGALARLPKGASIKPLLHGGYSTISLGYAGLYECVKYMTGDSHTDGAKGEEFGLAVMQYLNDKCAQWKKEENMDYSVYGTPIESTTYKFSKCLQKRFGKIEGITDRGYITNSYHVPVFEKIDAFKKLSIESKFQRLSPGGAISYIETPNLQNNLDAVMQVIQYIYDNIVYAELNTKSDYCQKCGFDGEILLGDDLEWHCPNCGNKDHNTLNVARRTCGYIGTNFWNKGRTQEIKERVLHLENTDDENDKTKVTKAEAKVRVANQQQ

SEQ ID NO: 510 - protein, 724 aa, unidentified
  REGION 1..724: note = Category: MG55 effectors
  REGION 1..724: note = Description: MG55-83 effector
  source 1..724: note = uncultivated organism sequence
MKIIKRSGAENTFDKEKIENAVAKANITVEEKDRLSEGEIGEIAQNIEDKCSEMNRAMDVETIQDWVEADIMRHGKYTVAKHYITYRYERSIVRQANTTDKQILSLLNFENEEVKQENSNKNPTVNSVQRDYMAGEVSKDITRRFLLPDDIVEAHEKGLIHFHDADYFAQHMHNCCLVNLEDMLQNGTVISEVMIEKPHSFSTACNIATQSIAQIASSQYGGQSITLSHLAPFVQISRDKYRREVKKEFAELNIPADEDTINKVAEMRVKAEIVQGVQMIQYQVITLMTTNGQAPFVTVFMYLDEVPEGQTRDDLAAIIEEMLRQRIQGVKNEKGVYITPAFPKLIYVLEEDNIREGSKYWELTKLAAKCTAKRMVPDYISEKKMKELKVDKNGNGQCYPCMGCRSFLTTYLDENGKPKYYGRFNQGVVTINLVDVACSSYKDTDKFWKIFDERLELCRRALMLRHERLKGTPSDVAPILWQNGALARLKKGETIDKLLFGGYSTISLGYAGLCECVRYMTGKSHTDPSATPFALEVMQHLNDACAKWRAETNIDFSLYGTPLESTTYKFARCLQKRFGVIEGVTDRNYITNSYHIHVTENIDAFDKLTFESQFQALSPGGAISYVEVPNMQNNIEAVLAVMQHIYDNIMYAELNTKSDYCQKCGFDGEIKIVEDDGKLVWECPNCGNRDQNTLNVARRTCGYIGTQFWNQGRTQEIKERVLHL

SEQ ID NO: 511 - protein, 724 aa, unidentified
  REGION 1..724: note = Category: MG55 effectors
  REGION 1..724: note = Description: MG55-84 effector
  source 1..724: note = uncultivated organism sequence
MKIIKRSGAENTFDKEKIENAVAKANITVEEKDRLSEGEIGEIAQNIEDKCSEMNRAMDVETIQDWVEADIMRHGKYTVAKHYITYRYERSIVRQANTTDKQILSLLNFENEEVKQENSNKNPTVNSVQRDYMAGEVSKDITRRFLLPDDIVEAHEKGLIHFHDADYFAQHMHNCCLVNLEDMLQNGTVISEVMIEKPHSFSTACNIATQSIAQIASSQYGGQSITLSHLAPFVQISRDKYRREVKKEFAELNIPADEDTINKVAEMRVKAEIVQGVQMIQYQVITLMTTNGQAPFVTVFMYLDEVPEGQTRDDLAAIIEEMLRQRIQGVKNEKGVYITPAFPKLIYVLEEDNIREGSKYWELTKLAAKCTAKRMVPDYISEKKMKELKVDKNGNGQCYPCMGCRSFLTTYLDENGKPKYYGRFNQGVVTINLVDVACSSYKDMDKFWKIFDERLELCRRALMLRHERLKGTPSDVAPILWQNGALARLKKGETIDKLLFGGYSTISLGYAGLCECVRYMTGKSHTDPSATPFALEVMQHLNDACAKWRAETNIDFSLYGTPLESTTYKFARCLQKRFGVIEGVTDRSEVTNSYHIHVTENIDAFDKLTFESQFQALSPGGAISYVEVPNMQNNIEAVLAVMQHIYDNIMYAELNTKSDYCQKCGFDGEIKIVEDDGKLVWECPNCGNRDQNTLNVARRTCGYIGTQFWNQGRTQEIKERVLHL

SEQ ID NO: 512 - protein, 327 aa, unidentified
  REGION 1..327: note = Category: MG55 effectors
  REGION 1..327: note = Description: MG55-85 effector
  source 1..327: note = uncultivated organism sequence
MITAIQRLKEENERLNHRAGHDWLTGLYDREGAEEKINRLIRERGCGVMILLDVDRFRRINSRHGHIVGDHVLSSIAAVLDSMVFRHDVVGRVDDDEFVVFMPVDQDEKFLQQRCRQIRDRLKTMELPGGAEISISLSTGGAICGKDDTYRSLFARAYGELDKDKVSAREQTADSEARKGNFMVDLKQVRGELAEQSLIPGAYCQDYETFKHIYRFVERRLRRAEISSYILLITLTDGNGDFPPLTRREEQMAVLKDEIQISLRSGDVFTQYSSCQYLVMISDASAENVEMIADRICTAFYKAIGGACQGVLLHHCYPMWPAGEKEP

SEQ ID NO: 513 - protein, 722 aa, unidentified
  REGION 1..722: note = Category: MG55 effectors
  REGION 1..722: note = Description: MG55-87 effector
  source 1..722: note = uncultivated organism sequence
MEVIKRDGSKVAFDGSKIENAILKAMRYGSGIVKPEIASKISHEIEDWHKSSGAASISIYRIEGQVFEKLIEKGEVLTAKAYEGYRKVREFQRETNTIDNAIYGIVNQTNKEAMDENSNKDATVLATQRDLIAGEFSRDYCRRLLLPPKIVQAHDDGIIHFHDMDYYIQKMHNCDLVNLKDMFANGTVINDKLIETPKSLQTACTVATQIVQQVANGQYGGQTISISHLAPYVRVSYKKHLKAVRKEGKEVGIDYTEEQIEKIAKSRLHEEIKAGVQTIQYQINTFSTTNGQAPFLSIFMYLREEPDYIEETALLIEEILNQRYIGMKNPVGAYVTPAFPKLLYVLDDNNVPDDSQYRYLTDLAVKCVSKRMMPDFISAKIMRENYEGQVFPCMGCRSFLSPWKNEKGEYQWYGRFNQGVVTLNLTDVGLSANKNMDSFWKILDERLDLCYEALMLRHESLKGTPSDISPIHWQYGAIARLKPGEKIDSLLDTCYSTLSLGYIGLYECVVALIGQSHTTEEGDALALEIMQKLRNTCDKWKKDTGLGFALYGTPAESTTYTLARALKKRFGIVPGVTDKDYITNSYHVNVREHIDAFSKLGFEAKFQKISSGGAISYVEVTNMTNNFDAMKELINYMYETIQYAEINTKSDYCQECGFSGEILLDENNEWYCPNCGNRNHKTLNVCRRTCGYLGDNFWNKGRTQEIKERFVHLDNRVYQENN

SEQ ID NO: 514 - protein, 309 aa, unidentified
  REGION 1..309: note = Category: MG55 effectors
  REGION 1..309: note = Description: MG55-88 effector
  source 1..309: note = uncultivated organism sequence
MTTIINQFNSGGINPNFHNVNDDIILRIKNGLDFKLLFGKDKSGNKKLLERLMDKNDKSLNINRVFNVTYNKRDKHYYIIFTYETESEDYEKVKGRVCGIDLGVRRFVSIRLNDNIHVQKSIHSDDLIRVKMDINKKRREYQKSMVMAKGGHGRNRKLKYLDTIRKKEINFTNTALHKLSKQVIDFCIKYKVEQINMELLNRNIDKNSFFSRYWPISNFIDKLKYKVDSYGINLKFVDPYHTSQICSICGEIGERNGDTFICQNDKCKIHNENIDSDYNAAYNIAKSKLYVDKYENTQYYKLKNKEKVL

SEQ ID NO: 515 - protein, 724 aa, unidentified
  REGION 1..724: note = Category: MG55 effectors
  REGION 1..724: note = Description: MG55-89 effector
  source 1..724: note = uncultivated organism sequence
MKIIKRNGAEENFDISKIIMAVTKANAAVEECDRMTPRQIQRIAESVELACQELGRSAAVEEIQDMVEKQIMAHGAFEVAKAYITYRYTRSLVRRANTTDDRILSLIECNNEEAKQENSNKNPIVNSTQRDYMAGEVSRDITSRLLLPKDIVEAHEEGIIHFHDADYYAQHMHNCDLVNLEDMLENGTVITGTLIERPHSFSTACNIATQIIAQVASNQYGGQSISLTHLAPFVQVSRERIRREVEAEMQAIDAHPGEEKLAELVENRVREEIRRGVQTIQYQVVTLLTTNGQAPFVTVFMYLGEAKNEQERHDLAMIIEETLRQRYQGVKNEKGVWVTPAFPKLIYVLEEDNIHEDSPYWYLTELAARCTAKRMVPDYISEKKMLELKVDKNGEGHCYTCMGCRSFLTPYVDENGKPKYYGRFNQGVVTINLPDVALSSGGNMEKFWKIFDERLELCHRALMCRHERLKGTLSDAAPILWQYGALARLKKGEPIDKLLYGGYSTISLGYAGLYECVKYMTGKSHTDPSATPFALEIMQHMNDACAKWKQMHNIDFSLYGTPLESTTYKFAKCLQKRFGIIPGVTDKGYITNSYHIHVTEHIDAFSKLAFESKFQALSPGGAISYVEVPNMQNNIPAVLEVMKFIYDNIMYAELNTKSDYCQVCGYDGEIEIVEHDGKLIWRCPNCGNTDQDKMNVARRTCGYIGTQFWNQGRTQEIKERVLHL

SEQ ID NO: 516 - protein, 99 aa, unidentified
  REGION 1..99: note = Category: MG55 effectors
  REGION 1..99: note = Description: MG55-90 effector
  source 1..99: note = uncultivated organism sequence
MMSLIKRSYKYRMYPNKTQEELLAKTFGCVRVIWNACVDSFNSYDKETNPNPKFPTKSDLVIEKLWLNEVSAATLQQKQRDFIEFSKQYFNKNRKEKNR

SEQ ID NO: 517 - protein, 405 aa, unidentified
  REGION 1..405: note = Category: MG55 effectors
  REGION 1..405: note = Description: MG55-91 effector
  source 1..405: note = uncultivated organism sequence
MRLGVRMQRTNVIQLMPNKKQERILRECMLLSSCVYNSANYIVRQQFFNKESVSNFRDLQVKLQKSDDYRLLGRSYALPRLQIYGETNSARFKLIKANVQDKVGLPKYLKNRKTNTTIPSYLVIDGCQYSLSKTKATIPLSRAMRKKYDIKYFKIAYNGILKHKGKQQRGQIHYKNKKFYLYQSVEVTTPIMKSGNIAGLDLGIKNLLTVTTNTNQEKIIGSKRFFKQWQHYTDLIAQEQEKLSKINRKASNNLSRLYYKRSVYQDNLFNNVVAKMFRFLKRNNISTLVIGDIKGIREHNDKGKKLNTMMHNYWSFDKLLHKIENNAEASGIEIVMTTEEYTSRTCPICYDNSKENVKDRIFQCTFCGYIDHRDIIGARNIMIKGMHDQSNQSVHRQEILPLEVL

SEQ ID NO: 518 - protein, 724 aa, unidentified
  REGION 1..724: note = Category: MG55 effectors
  REGION 1..724: note = Description: MG55-92 effector
  source 1..724: note = uncultivated organism sequence
MKIIKRNGAEATFDISKIIMAVTKANAAVEEGDRMTPRQIQRIAESVELACQELGRSAAVEEIQDMVEKQIMAHGAFEVAKAYITYRYTRSLVRRANTTDDRILSLIECNNEEAKQENSNKNPIVNSTQRDYMAGEVSRDITSRLLLPKDIVEAHEEGIIHFHDADYYAQHMHNCDLVNLEDMLENGTVITGTLIERPHSFSTACNIATQIIAQVASNQYGGQSISLTHLAPFVQVSRERIRREVAAEMQAIDAHPGEEKLAELVENRVREEIRRGVQTIQYQVVTLLTTNGQAPFVTVFMYLGEAKNEQERHDLAMIIEETLRQRYQGVKNEKGVWVTPAFPKLIYVLEEDNIHEDSPYWYLTELAARCTAKRMVPDYISEKKMLELKVDKNGEGHCYTCMGCRSFLTPYVDENGKPKYYGRFNQGVVTINLPDVALSSGGNMEKFWKIFDERLELCHRALMCRHERLKGTLSDAAPILWQYGALARLKKGEPIDKLLYGGYSTISLGYAGLYECVKYMTGKSHTDPSATPFALEVMQHMNDACKQWKQMHNIDFSLYGTPLESTTYKFAKCLQKRFGIIPGVTDKGYITNSYHIHVTENIDAFSKLAFESKFQALSPGGAISYVEVPNMQNNIPAVLEVMKFIYDNIMYAELNTKSDYCQVCGYDGEIEIVEHDGKLIWRCPNCGNTDQDKMNVARRTCGYIGTQFWNQGRTQEIKERVLHL

SEQ ID NO: 519 - protein, 509 aa, unidentified
  REGION 1..509: note = Category: MG55 effectors
  REGION 1..509: note = Description: MG55-93 effector
  source 1..509: note = uncultivated organism sequence
MGQTITLAHLSPFIEDTRKDIKAHFPNFNDDEIEELVKRDIEVGVQTLQYQILTLLTTNGQTPFITIFANLAEVPEGKERTNLALVIEEVLRQRIQGVKNEKGVYITPAFPKIIYGLDECNINDDSKYFYLTKLAAECTSKRMVPDYQSNKIQRELKDGDIYPCMGCRSFLSKDGTKKNYARALNYSKHKGHKYYGRFNKGVVTINLPDVALSSKKDKDAFWKIFNERLELCHRALQYRYKRLAGTKSDIAPILWQYGAYARLNKDEKIDELLRHGYSTLSLGYAGLYECVKYMTGVSHTDENGKDFALAVMKYMNDCCDKWNKEENLGYSVYGSPIESTTYSFAKCLRKRFGKIKDITDHDYITNSYHVNVREDIDAFSKLKLESEFQKLSQGGAISYIEVPDLHKNIPAVIDILRFIYNNIMYAELNCKFDYCQKCGYSGEIQIKGEPGNLYWECPNCGNTDQKTMNIARRTCGYIGTNFWNQGRTEEIKDRVLHMDTLSKLKDRKK

SEQ ID NO: 520 - protein, 331 aa, unidentified
  REGION 1..331: note = Category: MG55 effectors
  REGION 1..331: note = Description: MG55-94 effector
  source 1..331: note = uncultivated organism sequence
MCRSFLTPYVDANGEPKYYGRFNQGVVTINLPDIALSSNGDIETFWDIFDERTELCHKALQMRHKRLEGTPSDVAPILWRYGALARLEKGETIDRLLHNGYSTLSLGYAGLYECVKYMTGKSHTDGDNGEKFGLEVMQALNDKCNKWKNEENIDYSLYGSPIESTTYKFAKCLKKRFGVIEGITDRDYITNSYHVPVFEKIDPFTKLSIESKFQKLSPGGAISYIECTDLTYNIDAVLEVMQFIYNNIMYAELNTKSDYCQVCGYDGEIKIVDEDGELIWECPNCGNRDKNKMNVARRTCGYIGSNFWNKGRTEEIAERYVHLDDHEYKEK

SEQ ID NO: 521 - protein, 707 aa, unidentified
  REGION 1..707: note = Category: MG55 effectors
  REGION 1..707: note = Description: MG55-95 effector
  source 1..707: note = uncultivated organism sequence
MKVIKRDGSTVEFNKSKIRDAITKSMKNGSGILLPDIARLIANDAEKYFAKEEDVATIYKIEKYVYDRLVHYGQAETARAYEGYRAVQEFKRNTNTTDDSILELLSKKNEDVMKENSNKNPVVSATQRDLIAGEVSKDIARRKLIPAHIVQAHDEGAIHWHDMDYTISPMFNCCLINLEDMFTNGTVINEKLVEEPKSFGTACTVATQIIAQVSSNQYGGQSITIKHLSKYLKVTEEKAFNHYMEMFNDESLATKLAKDIKMKELKDGVQTIRYQLSTLQTTNGQAPFSTIYLEIEDGNPYEEEMAMICEEMIRQRLEGMKNYKGQEIGEAFPKLVYLLDEHNCLEGGKYDYITKLAAKCTAKRLVPDYQSAKIMRENYEGNTFPPMGCRSHLSPWKDEKGNYKFYGRFNQGVVSLNLPQIAIMADKDMEMFWEMLDRRLELCKDALMTRHKMLLGVTSDSSPIHWQHGAIARLKKGEKIDKLLKDGYSTISLGYVGIAEMVQAMLGVTHTSKEGEKFALEVMNYMKEKCDKWKAETGLGFGLYGTPAESLIYRFCRIDKARFGEIQNVTDKLYYTNSYHVHVCEEIDAFSKLKFESQFHSISNGGCISYIEVPDMNKNVEAVEDIINFIYHNIQYAEINTKSDVCYKCGFNGEMELDRESLTWHCPSCGNDDESELQVMRRTCGYIGSSYWNKGRTAEIGDRVLHL

SEQ ID NO: 522 - protein, 729 aa, unidentified
  REGION 1..729: note = Category: MG55 effectors
  REGION 1..729: note = Description: MG55-96 effector
  source 1..729: note = uncultivated organism sequence
MKIVKRDGHIVDYDPEKIRVAIGKANEEVRGREKATKEEIKEIIKYIEDLNKKRILVEDIQDIIEQKLMEFDKYQLAKKYITYRYTRELVRKANTTDKSIKELIEGENEYWNSENSNKNAEVVTTQRDYLAGITSTDITRRFLLPEDIVEAHDAGIIHFHDADYFAQNALHNCELINLDDMLQNGTVINGVMIEKPHRFLTAATIATQIILAVTSSSYGGATVSLTHLAPFVRLSYEKYLKKYQARNFSKKDCEKYAMQDTKKEVEDGVQTFNYQVNSMTNTNGQAPFLSVNMYLGETEEYKDELAMIIEEFLKQRMLGFKNEKGVYITPAFPKLLYVLEEDNIHEGSKYWYLTKLAAECTAKRMVPDYISEKMMLKYKKNILGDGDCYPCMGCRSFLTPDRMLNIGNISKAKNYVEGKGKYYGRFNQGVVTINLPDVALSADGDMDEFWKIFDERLELCHRALQIRHKRLSNVTSDVAPILWQHGALARLEKGESIHELLHHGYSTISLGYAGLYECVKVMTGHSHTDNGPGKEFGIKVMQHLNDATNKWKKEEDIDYSVYGTPIESTTYKFAKCLKERFGTVKGITDRGYITNSYHVPVFEEIDAFSKLKLESEFQVLSPGGAISYVETPNLQGNIDAVIEVIQFIYDNIMYAELNTKSDYCQNCGYTGEILIDDDLEWYCPNCGNRDHNTLNVARRTCGYIGTNFWNKGRTQEIKERVLHIDNKEA

SEQ ID NO: 523 - protein, 707 aa, unidentified
  REGION 1..707: note = Category: MG55 effectors
  REGION 1..707: note = Description: MG55-97 effector
  source 1..707: note = uncultivated organism sequence
MKVIKRDGSTVEFNKSKIRDAITKSMKNGSGILLPDIARLIANDAEKYFAKEEDVATIYKIEKYVYDRLVHYGQAETARAYEGYRAVQEFKRNTNTTDDSILELLSKKNEDVMKENSNKNPVVSATQRDLIAGEVSKDIARRKLIPAHIVQAHDEGAIHWHDMDYTISPMFNCCLINLEDMFTNGTVINEKLVEEPKSFGTACTVATQIIAQVSSNQYGGQSITIKHLSKYLKVTEEKAFNHYMEMFNDESLATKLAKDIKIKELKDGVQTIRYQLSTLQTTNGQAPFSTIYLEIEDGNPYEEEMAMICEEMIRQRLEGMKNYKGQEIGEAFPKLVYLLDEHNCLEGGKYDYITKLAAKCTAKRLVPDYQSAKIMRENYEGNTFPPMGCRSHLSPWKDEKGNYKFYGRFNQGVVSLNLPQIAIMADKDMEMFWEMLDRRLELCKDALMTRHKMLLGVTSDSSPIHWQHGAIARLKKGEKIDKLLKDGYSTISLGYVGIAEMVQAMLGVTHTSKEGEKFALEVMNYMKEKCDKWKAETGLGFGLYGTPAESLIYRFCRIDKARFGEIQNVTDKLYYTNSYHVHVCEEIDAFSKLKFESQFHSISNGGCISYIEVPDMNKNVEAVEDIINFIYHNIQYAEINTKSDVCYKCGFNGEMELDRESLTWHCPSCGNDDESELQVMRRTCGYIGSSYWNKGRTAEIGDRVLHL

SEQ ID NO: 524 - protein, 318 aa, unidentified
  REGION 1..318: note = Category: MG55 effectors
  REGION 1..318: note = Description: MG55-98 effector
  source 1..318: note = uncultivated organism sequence
MCRSFLSNWKDPETGKYKWAGRFNCGVVSLNLPQIAILADKDLNKFWSLLDERLEMCHKALKFRHDLLLGTVSDVSPIHWQYGAIARLKPGEVIDKYLKDGYSTLSLGFVGVYEAVLALTGETHTKHQNLALEIVRRMKQKTIDWNIEENLGYGLYGSPAESLISRFAKIDKEKFGNIKGVTDKGYYTNSYHVFVGEEIDAFKKLTFEAPFHQYASGGCLSYIEMPNMEHNLDAVETLIQFIYDNVRYAEFNTKSDYCKACGFEGEIGFDKNHKWTCPKCGNQDQSKMTVTRRSCGYLGSNFWNEGRTKEIQSRVLHI

SEQ ID NO: 525 - protein, 724 aa, unidentified
  REGION 1..724: note = Category: MG55 effectors
  REGION 1..724: note = Description: MG55-99 effector
  source 1..724: note = uncultivated organism sequence
MKIIKRNGAEATFDISKIIMAITKANAAVEECDRMTPRQIQRIAESVELACQELGRSAAVEEIQDMVEKQIMAHGAFEVAKAYITYRYTRSLVRRANTTDDRILSLIECNNEEAKQENSNKNPIVNSTQRDYMAGEVSRDITSRLLLPKDIVEAHEEGIIHFHDADYYAQHMHNCDLVNLEDMLENGTVITGTLIERPHSFSTACNIATQIIAQVASNQYGGQSISLTHLAPFVQVSRERIRREVEAEMKAIDAHPGEEKLAELVENRVREEIRRGVQTIQYQVVTLLTTNGQAPFVTVFMYLGEAKNEQERHDLAMIIEETLRQRYQGVKNEKGVWVTPAFPKLIYVLEEDNIHEDSPYWYLTELAARCTAKRMVPDYISEKKMLELKVDKNGEGHCYTCMGCRSFLTPYVDENGKPKYYGRFNQGVVTINLPDVALSSGGNMEKFWKIFDERLELCHRALMCRHERLKGTLSDAAPILWQYGALARLKKGEPIDKLLYGGYSTISLGYAGLYECVKYMTGKSHTDPSATPFALEIMQHMNDACAKWKQMHNIDFSLYGTPLESTTYKFAKCLQKRFGIIPGVTDKGYITNSYHIHVTEHIDAFSKLAFESKFQALSPGGAISYVEVPNMQNNIPAVLEVMKFIYDNIMYAELNTKSDYCQVCGYDGEIEIVEHDGKLIWRCPNCGNTDQDKMNVARRTCGYIGTQFWNQGRTQEIKERVLHL

SEQ ID NO: 526 - protein, 722 aa, unidentified
  REGION 1..722: note = Category: MG55 effectors
  REGION 1..722: note = Description: MG55-100 effector
  source 1..722: note = uncultivated organism sequence
MEVIKRDGSKVAFDGSKIENAILKAMRYGSGIVKPEIASKISHEIEDWHKSSGAASISIYRIEGQVFEKLIEKGEVLTAKAYEGYRKVREFQRETNTIDNAIYGIVNQTNKEAMDENSNKDATVLATQRDLIAGEFSRDYCRRLLLPPKIVQAHDDGIIHFHDMDYYIQKMHNCDLVNLKDMFANGTVINDKLIETPKSLQTACTVATQIVQQVANGQYGGQTISISHLAPYVRVSYKKHLKAVRKEGEEVGIDYTEEQIEKIAKSRLHEEIKAGVQTIQYQINTFSTTNGQAPFLSIFMYLREEPDYIEETALLIEEILKQRYIGMKNPVGAYVTPAFPKLLYVLDDNNVPDDSQYRYLTDLAVKCVSKRMMPDFISAKIMRENYEGQVFPCMGCRSFLSPWKNEKGEYQWYGRFNQGVVTLNLTDVGLSANKNMDSFWKILDERLDLCYEALMLRHESLKGTPSDISPIHWQYGAIARLKPGEKIDSLLDTCYSTLSLGYIGLYECVVALIGQSHTTEEGDALALEIMQKLRNTCDKWKKDTGLGFALYGTPAESTTYTLARALKKRFGVVPGVTDKDYITNSYHVNVREHIDAFSKLGFEAKFQKISSGGAISYVEVTNMTNNFDAMKELINYMYETIQYAEINTKSDYCQECGFSGEILLDENNEWYCPNCGNRNHKTLNVCRRTCGYLGDNFWNKGRTQEIKERFVHLDNRVYQGNN

SEQ ID NO: 527 - protein, 722 aa, unidentified
  REGION 1..722: note = Category: MG55 effectors
  REGION 1..722: note = Description: MG55-101 effector
  source 1..722: note = uncultivated organism sequence
MEVIKRDGSKVAFDGSKIENAILKAMRYGSGIVKPEIASKISHEIEDWHKSSGAASISIYRIEGQVFEKLIEKGEVLTAKAYEGYRKVREFQRETNTIDNAIYGIVNQTNKEAMDENSNKDATVLATQRDLIAGEFSRDYCRRLLLPPKIVQAHDDGIIHFHDMDYYIQKMHNCDLVNLKDMFANGTVINDKLIETPKSLQTACTVATQIVQQVANGQYGGQTISISHLAPYVRVSYKKHLKAVRKEGKEVGIDYTEEQIEKIAKSRLHEEIKAGVQTIQYQINTFSTTNGQAPFLSIFMYLREEPDYIEETALLIEEILKQRYIGMKNPVGAYVTPAFPKLLYVLDDNNVPDDSQYRYLTDLAVKCVSKRMMPDFISAKIMRENYEGQVFPCMGCRSFLSPWKNEKGEYQWYGRFNQGVVTLNLTDVGLSANKNMDSFWKILDERLDLCYEALMLRHESLKGTPSDISPIHWQYGAIARLKPGEKIDSLLDTCYSTLSLGYIGLYECVVALIGQSHTTEEGDALALEIMQKLRNTCDKWKKDTGLGFALYGTPAESTTYTLARALKKRFGIVPGVTDKDYITNSYHVNVREQIDAFSKLGFEAKFQKISSGGAISYVEVTNMTNNFDAMKELINYMYETIQYAEINTKSDYCQECGFSGEILLDENNEWYCPNCGNRNHKTLNVCRRTCGYLGDNFWNKGRTQEIKERFVHLDNRVYQENN

SEQ ID NO: 528 - protein, 378 aa, unidentified
  REGION 1..378: note = Category: MG55 effectors
  REGION 1..378: note = Description: MG55-102 effector
  source 1..378: note = uncultivated organism sequence
MIAHKVLLYPNQEAEAFLQKQFEYARRDYNRQLETIVRGIQSGKVDLFNLKKWMDAVCAQAKKAPDFYDGESYHYPDIIGWNKKRVQAAAEDYLANPLNKPKYLKHSRYRKIFRLTSAPLDAQRFSVSEDHHLLLGGMHRIKMAEPLRFQTRPIACEISLRNDRYYASFLFAENLKPYLLTGKTAGVTVGSASLVAVADSDGKKVRFALDAKKRTRIHKRIRHLEKVLSHKEIGSAQYEKTRAKLMRAKRKEEDVIRNFVEQTSHTLVKAYDRIGIDDASTQIRLIQHAYAKPYLQEPFSALSNRLQSKAKSHGKTVVKVKDRRSSAPICSQCGERNRKTKGLSNRRWACPHCGAVHDSDLEGAERLCKEALKQERRI

SEQ ID NO: 529 - protein, 722 aa, unidentified
  REGION 1..722: note = Category: MG55 effectors
  REGION 1..722: note = Description: MG55-103 effector
  source 1..722: note = uncultivated organism sequence
MEVIKRDGSKVAFDGSKIENAILKAMRYGSGIVKPEIASKISHEIEDWHKSSGAASISIYRIEGQVFEKLIEKGEVLTAKAYEGYRKVREFQRETNTIDNAIYGIVNQTNKEAMDENSNKDATVLATQRDLIAGEFSRDYCRRLLLPPKIVQAHDDGIIHFHDMDYYIQKMHNCDLVNLKDMFANGTVINDKLIETPKSLQTACTVATQIVQQVANGQYGGQTISISHLAPYVRVSYKKHLKAVRKEGKEVGIDYTEEQIEKIAKSRLHEEIKAGVQTIQYQINTFSTTNGQAPFLSIFMYLREEPDYIEETALLIEEILKQRYIGMKNPVGAYVTPAFPKLLYVLDDNNVPDDSQYRYLTDLAVKCVSKRMMPDFISAKIMRENYEGQVFPCMGCRSFLSPWKNEKGEYQWYGRFNQGVVTLNLTDVGLSANKNMDSFWKILDERLDLCYEALMLRHESLKGTPSDISPIHWQYGAIARLKPGEKIDSLLDTCYSTLSLGYIGLYECVVALIGQSHTTEEGDALALEIMQKLRNTCDKWKKDTGLGFALYGTPAESTTYTLARALKKRFGVVPGVTDKDYITNSYHVNVREHIDAFSKLGFEAKFQKISSGGAISYVEVTNMTNNFDAMKELINYMYETIQYAEINTKSDYCQECGFSGEILLDENNEWYCPNCGNRNHKTLNVCRRTCGYLGDNFWNKGRTQEIKERFVHLDNRVYQENN

SEQ ID NO: 530 - protein, 335 aa, unidentified
  REGION 1..335: note = Category: MG55 effectors
  REGION 1..335: note = Description: MG55-104 effector
  source 1..335: note = uncultivated organism sequence
MNIWGCRSFLTPDRIKGNPARALNYKEGKGKYYGRFNMGVATINLVDVALSSGGDFDKFWELFEERTELCHQGLLVRIKRLEHMTTDVAPILWQHGAFARLEKGEHITDLIYGGYATASLGYAGLYECVRYMTGKSHTDNGEGCDFGIQVMQALNNKCNQWKAEENIDYSVYGTPIESTTYKFAKCLKKRFGEIEEVTNHDYITNSYHVNVREEIDAFTKLTLESKFQKLSPGGAISYVEVANLQNNIDAVLAIMKHIYDNIMYAEINTKSDYCQVCGYEGEIQIVEDENHKLVWECPNCKNRNQDKMNVARRTCGYIGTKFWNRAICSITMLFK

SEQ ID NO: 531 - protein, 724 aa, unidentified
  REGION 1..724: note = Category: MG55 effectors
  REGION 1..724: note = Description: MG55-105 effector
  source 1..724: note = uncultivated organism sequence
MKIIKRNGAEATFDISKIIMAVTKANAAVEEGDRMTPRQIQRIAESVELACQELGRSAAVEEIQDMVEKQIMAHGAFEVAKAYITYRYTRSLVRRANTTDDRILSLIECNNEEAKQENSNKNPIVNSTQRDYMAGEVSRDITSRLLLPKDIVEAHEEGIIHFHDADYYAQHMHNCDLVNLEDMLENGTVITGTLIERPHSFSTACNIATQIIAQVASNQYGGQSISLTHLAPFVQVSRERIRREVAAEMRAINADPGEEKLAELVENRVREEIRRGVQTIQYQVVTLLTTNGQAPFVTVFMYLGEAKNEQERHDLAMIIEETLRQRYQGVKNEKGVWVTPAFPKLIYVLEEDNIHEDSPYWYLTELAARCTAKRMVPDYISEKKMLELKVDKNGEGHCYTCMGCRSFLTPYVDENGKPKYYGRFNQGVVTINLPDVALSSGGNMEKFWKIFDERLELCHRALMCRHERLKGTLSDAAPILWQYGALARLKKGEPIDKLLYGGYSTISLGYAGLYECVKYMTGKSHTDPSATPFALEVMQHMNDACKQWKQMHNIDFSLYGTPLESTTYKFAKCLQKRFGIIPGVTDKGYITNSYHIHVTENIDAFSKLAFESKFQALSPGGAISYVEVPNMQNNIPAVLEVMKFIYDNIMYAELNTKSDYCQVCGYDGEIEIVEHDGKLIWRCPNCGNTDQDKMNVARRTCGYIGTQFWNQGRTQEIKERVLHL

SEQ ID NO: 532 - protein, 729 aa, unidentified
  REGION 1..729: note = Category: MG55 effectors
  REGION 1..729: note = Description: MG55-106 effector
  source 1..729: note = uncultivated organism sequence
MKIVKRDGHIVDYDSDKIRVAIGKANNEVKGKEKATKDEIEGIIKYIEDLNKKRILVEDIQDIIEEKLMELDRYQLAKKYITYRYTRELVRKANTTDQTIKELIEGENEYWNSENSNKNARVVTTQRDYLAGITSTDITRRFLLPDDIVKAHDEGIIHFHDADYFAQNALHNCELINLEDMLQNGTILNGVMIEKPHRFLTAATIATQIILAVSSSSYGGATVSLTYLAPFVRDSYNYYYKKYKAMNMSESDCKKYAEIDTKKEVADGVQTFNYQVNSMTSTNGQAPFLSVCMYLGETDEYKEELALIIEEFLNQRILGFKNEAGVYITPAFPKLLYILEEDNIREDSKYWYLTVLAAKCTAKRMVPDYISEKIMKQLKVNEKGVSECYPCMGCRSFLTPDRTMSLGNIAHAKNYVEGKGKYYGRFNQGVVTINLPDIALSSKRDMDKFWKIFDERLELCHRALQIRHKRLSNATSDVAPILWQHGALARLKEGESIHELLHHGYSTISLGYAGLYECVKYMTGHSHTDNGEGKKLGLEVMQHLNDAANKWKVEEDIDYSVYGSPIESTTYKFARCLKERFGVVKGITDRDYITNSYHVPVFEEIDAFEKLKLESEFQRLSPGGAVSYIETPNLQNNIESITEVMKFIYDNIMYAELNTKSDYCQKCGYTGEILVDDDMQWYCPNCGNRDHNSLNVARRTCGYIGTNFWNRGRTQEIKERVLHLDNKEA

SEQ ID NO: 533 - protein, 722 aa, unidentified
  REGION 1..722: note = Category: MG55 effectors
  REGION 1..722: note = Description: MG55-107 effector
  source 1..722: note = uncultivated organism sequence
MEVIKRDGSKVAFDGSKIENAILKAMRYGSGIVKPEIASKISHEIEDWHKSSGAASISIYRIEGQVFEKLIEKGEVLTAKAYEGYRRVREFQRETNTIDNAIYGIVNQTNKEAMDENSNKDATVLATQRDLIAGEFSRDYCRRLLLPPKIVQAHDDGIIHFHDMDYYIQKMHNCDLVNLKDMFANGTVINDKLIETPKSLQTACTVATQIVQQVANGQYGGQTISISHLAPYVRVSYKKHLKAVRKEGKEVGIDYTEEQIEKIAKSRLHEEIKAGVQTIQYQINTFSTTNGQAPFLSIFMYLREEPDYIEETALLIEEILKQRYIGMKNPVGAYVTPAFPKLLYVLDDNNVPDDSQYRYLTDLAVKCVSKRMMPDFISAKIMRENYEGQVFPCMGCRSFLSPWKNEKGEYQWYGRFNQGVVTLNLTDVGLSANKNMDSFWKILDERLDLCYEALMLRHESLKGTPSDISPIHWQYGAIARLKPGEKIDSLLDTCYSTLSLGYIGLYECVVALIGQSHTTEEGDALALEIMQKLRNACDKWKKDTGLGFALYGTPAESTTYTLARALKKRFGVVPGVTDKDYITNSYHVNVREHIDAFSKLGFEAKFQKISSGGAISYVEVTNMTNNFDAMKELINYMYETIQYAEINTKSDYCQECGFSGEILLDENNEWYCPNCGNRNHKTLNVCRRTCGYLGDNFWNKGRTQEIKERFVHLDNRVYQENN

SEQ ID NO: 534 - protein, 491 aa, unidentified
  REGION 1..491: note = Category: MG55 effectors
  REGION 1..491: note = Description: MG55-108 effector
  source 1..491: note = uncultivated organism sequence
MQVSRERIRREVEAEMKAIDAHPGEEKLAELVENRVREEIRRGVQTIQYQVVTLLTTNGQAPFVTVFMYLGEAKNEQERHDLAMIIEETLRQRYQGVKNEKGVWVTPAFPKLIYVLEEDNIHEDSPYWYLTELAARCTAKRMVPDYISEKKMLELKVDKNGEGHCYTCMGCRSFLTPYVDENGKPKYYGRFNQGVVTINLPDVALSSGGNMEKFWKIFDERLELCHRALMCRHERLKGTLSDAAPILWQYGALARLKKGEPIDKLLYGGYSTISLGYAGLYECVKYMTGKSHTDPSATPFALEIMQHMNDACAKWKQMHNIDFSLYGTPLESTTYKFAKCLQKRFGIIPGVTDKGYITNSYHIHVTEHIDAFSKLAFESKFQALSPGGAISYVEVPNMQNNIPAVLEVMKFIYDNIMYAELNTKSDYCQVCGYDGEIEIVEHDGKLIWRCPNCGNTDQDKMNVARRTCGYIGTQFWNQGRTQEIKERVLHL

SEQ ID NO: 535 - protein, 729 aa, unidentified
  REGION 1..729: note = Category: MG55 effectors
  REGION 1..729: note = Description: MG55-110 effector
  source 1..729: note = uncultivated organism sequence
MKIVKRDGHIVDYDSDKIRVAIGKANNEVKGKEKATKDEIEGIIKYIEDLNKKRILVEDIQDIIEEKLMELDRYQLAKKYITYRYTRELVRKANTTDQTIKELIEGENEYWNSENSNKNARVVTTQRDYLAGITSTDITRRFLLPDDIVKAHDEGIIHFHDADYFAQNALHNCELINLEDMLQNGTILNGVMIEKPHRFLTAATIATQIILAVSSSSYGGATVSLTYLAPFVRDSYNYYYKKYKAMNMSESDCKKYAEIDTKKEVADGVQTFNYQVNSMTSTNGQAPFLSVCMYLGETDEYKEELALIIEEFLNQRILGFKNEAGVYITPAFPKLLYILEEDNIREDSKYWYLTVLAAKCTAKRMVPDYISEKIMKQLKVNEKGVSECYPCMGCRSFLTPDRTMSLGNIAHAKNYVEGKGKYYGRFNQGVVTINLPDIALSSKRDMDKFWKIFDERLELCHRALQIRHKRLSNATSDVAPILWQHGALARLKEGESIHELLHHGYSTISLGYAGLYECVKYMTGHSHTDNGEGKKLGLEVMQHLNDAANKWKAEEDIDYSVYGSPIESTTYKFARCLKERFGVVKGITDRDYITNSYHVPVFEEIDAFEKLKLESEFQRLSPGGAVSYIETPNLQNNIESITEVMKFIYDNIMYAELNTKSDYCQKCGYTGEILVDEDMQWYCPNCGNRDHNSLNVARRTCGYIGTNFWNRGRTQEIKERVLHLDNKEA

SEQ ID NO: 536 - protein, 417 aa, unidentified
  REGION 1..417: note = Category: MG55 effectors
  REGION 1..417: note = Description: MG55-111 effector
  source 1..417: note = uncultivated organism sequence
MIRALVLRHEFDLQKLLSASIEVARKGFEWRQLPGRFSDKPRLGCKEVKNISTGNARTDETILRYYKTANVNMKEFHPSNVKVLINKQSIKVNDNNVITIVPFKLTIKNTDGRYNLAEKLCGDTIYVKKKQAKISIPEGSWQIIQAKLDETNIYLTLEKENCSVLNSNYFLGIDCNASGWAAIAASPKRIDSSGNEIKGIVKKFGSGIDHVHKKYRDLNRSFQQKDLLNKLTDRAADIVLDIQRKEAVVIVQCALDNKLAIKMENLTGILSRANSKIYSKELRARLNSWGYYQMQQLIVLQAEEMGVPVFFVNPAFTSQTCSVCGKLGVRESKSVFKCSDENCRYHKGTDADVNAAYNISKSELIVSPGEKGVKEMQGWWKQYWIDNPPLPKPVKIRKSRKKKDPKVENNQEFEAIN

SEQ ID NO: 537 - protein, 729 aa, unidentified
  REGION 1..729: note = Category: MG55 effectors
  REGION 1..729: note = Description: MG55-112 effector
  source 1..729: note = uncultivated organism sequence
MKIVKRDGHIVDYDPEKIRVAIGKANEEVRGREKATKEEIKEIIKYIEDLNKKRILVEDIQDIIEQKLMEFDKYQLAKKYITYRYTRELVRKANTTDKSIKELIEGESEYWNSENSNKNAEVVTTQRDYLAGITSTDITRRFLLPEDIVEAHDAGIIHFHDADYFAQNALHNCELINLDDMLQNGTVINGVMIEKPHRFLTAATIATQIILAVTSSSYGGATVSLTHLAPFVRLSYEKYLKKYQARNFSKKDCEKYAMQDTKKEVEDGVQTFNYQVNSMTNTNGQAPFLSVNMYLGETEEYKDELAMIIEEFLKQRMLGFKNEKGVYITPAFPKLLYVLEEDNIHEGSKYWYLTKLAAECTAKRMVPDYISEKMMLKYKKNILGDGDCYPCMGCRSFLTPDRMLNIGNISKAKNYVEGKGKYYGRFNQGVVTINLPDVALSADGDMDEFWKIFDERLEICHRALQIRHKRLSNVTSDVAPILWQHGALARLEKGESIHELLHHGYSTISLGYAGLYECVKVMTGHSHTDNGPGKEFGIKVMQHLNDATNKWKKEEDIDYSVYGTPIESTTYKFAKCLKERFGTVKGITDRGYITNSYHVPVFEEIDAFSKLKLESEFQVLSPGGAISYVETPNLQGNIDAVIEVIQFIYDNIMYAELNTKSDYCQNCGYTGEILIDDDLEWYCPNCGNRDHNTLNVARRTCGYIGTNFWNKGRTQEIKERVLHIDNKEA

SEQ ID NO: 538 - protein, 707 aa, unidentified
  REGION 1..707: note = Category: MG55 effectors
  REGION 1..707: note = Description: MG55-113 effector
  source 1..707: note = uncultivated organism sequence
MKVIKRDGSTVEFNKSKIRDAITKSMKNGSGILLPDIARLIANDAEKYFAKEEDVATIYKIEKYVYDRLVHYGQAETARAYEGYRAVQEFKRNTNTTDDSILELLSKKNEDVMKENSNKNPVVSATQRDLIAGEVSKDIARRKLIPAHIVQAHDEGAIHWHDMDYTISPMFNCCLINLEDMFTNGTVINEKLVEEPKSFGTACTVATQIIAQVSSNQYGGQSITIKHLSKYLKVTEEKAFNHYMEMFNDESIATKLAKDIKMKELKDGVQTIRYQLSTLQTTNGQAPFSTIYLEIEDGNPYEEEMAMICEEMIRQRLEGMKNYKGQEIGEAFPKLVYLLDEHNCLEGGKYDYITKLAAKCTAKRLVPDYQSAKIMRENYEGNTFPPMGCRSHLSPWKDEKGNYKFYGRFNQGVVSLNLPQIAIMADKDMEMFWEMLDRRLELCKDALMTRHKMLLGVTSDSSPIHWQHGAIARLKKGEKIDKLLKDGYSTISLGYVGIAEMVQAMLGVTHTSKEGEKFALEVMNYMKEKCDKWKAETGLGFGLYGTPAESLIYRFCRIDKARFGEIQNVTDKLYYTNSYHVHVCEEIDAFSKLKFESQFHSISNGGCISYIEVPDMNKNVEAVEDIINFIYHNIQYAEINTKSDVCYKCGFNGEMELDRESLTWHCPSCGNDDESELQVMRRTCGYIGSSYWNKGRTAEIGDRVLHL

SEQ ID NO: 539 - protein, 724 aa, unidentified
  REGION 1..724: note = Category: MG55 effectors
  REGION 1..724: note = Description: MG55-114 effector
  source 1..724: note = uncultivated organism sequence
MKIIKRNGAEENFDISKIIMAVTKANAAVEECDRMTPRQIQRIAESVELACQELGRSAAVEEIQDMVEKQIMAHGAFEVAKAYITYRYTRSLVRRANTTDDRILSLIECNNEEAKQENSNKNPIVNSTQRDYMAGEVSRDITSRLLLPKDIVEAHEEGIIHFHDADYYAQHMHNCDLVNLEDMLENGTVITGTLIERPHSFSTACNIATQIIAQVASNQYGGQSISLTHLAPFVQVSRERIRREVAAEMQAIDAHPGEEKLAELVENRVREEIRRGVQTIQYQVVTLLTTNGQAPFVTVFMYLGEAKNEQERHDLAMIIEETLRQRYQGVKNEKGVWVTPAFPKLIYVLEEDNIHEDSPYWYLTELAARCTAKRMVPDYISEKKMLELKVDKNGEGHCYTCMGCRSFLTPYVDENGKPKYYGRFNQGVVTINLPDVALSSGGNMEKFWKIFDERLELCHRALMCRHERLKGTLSDAAPILWQYGALARLKKGEPIDKLLYGGYSTISLGYAGLYECVKYMTGKSHTDPSATPFALEVMQHMNDACKHWKQMHNIDFSLYGTPLESTTYKFAKCLQKRFGIIPGVTDKGYITNSYHIHVTEHIDAFSKLAFESKFQALSPGGAISYVEVPNMQNNIPAVLEVMKFIYDNIMYAELNTKSDYCQVCGYDGEIEIVEHDGKLIWRCPNCGNTDQDKMNVARRTCGYIGTQFWNQGRTQEIKERVLHL

SEQ ID NO: 540 - protein, 729 aa, unidentified
  REGION 1..729: note = Category: MG55 effectors
  REGION 1..729: note = Description: MG55-115 effector
  source 1..729: note = uncultivated organism sequence
MKIVKRDGHIVDYDPQKIRIAIGKANNEVRGKEKVSKEQIDEIIKYIEELNKKRILVEDIQDIIEEKLMSYGKYTLAKKYITYRYTRELVRKANTTDKSIKELIEGENEYWNSENSNKNAEVVTTQRDYLAGITSTDITRRFLLPEDIVEAHDKGIIHFHDADYFAQNALHNCELINLDDMLQNGTVINGVMIEKPHRFITAATIATQIILAVTSSSYGGATVSLTHLAPFVRLSYEKYLKKYQSRNLSKKDCEKFAMQDTRKEVEDGVQTFNYQVNSMTNTNGQAPFLSVCMYLGETDEYKEELAMIIEEFLKQRILGFKNEKGVYITPAFPKLLYVLEEDNIHEDSKYWYLTKLAAECTAKRMVPDYISEKVMKELKKNELGNGECYPCMGCRSFLTPDRTMSLGNIAHAKNYVEGKGKYYGRFNQGVVTINLPDVALSADGDMDKFWKIFDERLELCHRALQIRHKRLSNATSDVAPILWQHGALARLKKGESIHELLHHGYSTISLGYAGLYECVKVMTGHSHTDNGEGKEFGLKVMQHLNDATAKWKAEEDIDYSVYGSPIESTTYKFAKCLKERFGTIKGITDRGYVTNSYHVPVFEEIDAFSKLKLESEFQRLSPGGAISYIETPNLQNNLDAVLEVIQFIYDNIMYAELNTKSDYCQKCGYTGEILIDDNLEWYCPNCGNRDHNTLNVARRTCGYIGTNFWNKGRTQEIKERVLHLDNKNA

SEQ ID NO: 541 - protein, 399 aa, unidentified
  REGION 1..399: note = Category: MG55 effectors
  REGION 1..399: note = Description: MG55-116 effector
  source 1..399: note = uncultivated organism sequence
MESRAWCNFILVQKKKIDRREAYPPRYLKGYPGFPGSQRYAAAAVLADSLTKLEQAAREQSAKTPVRFANLSSEDWTAIQERFSPATPNEANEKLRPRTARQTVSRRFAALRKANPQWSPAQLSEEILAGIFRCAEKLKTHLVAKGFDDRRAVIKLANLYNVAVALALEPVRAAGDYVSFYQEEAPKRKAFGDVRGGLHQPSDDSAAIQITGFSVGEDGTPNYNGLLVCKQADDRKEDSWVFLYCHQEGQAFQLADPNAKPRGKLLTDWIGFASRGGSRKKAQASVKQLVRGQVWVSEKTPPTVLPLAFGSRQGREYLWHFDRNLRSEGEWVLGNPADGVLLNAEGRKEFFGKWFPFMHEEKRSLPGFVVGLTFREAIFAHTRTFAKWLRGEADNWPPE

SEQ ID NO: 542 - protein, 729 aa, unidentified
  REGION 1..729: note = Category: MG55 effectors
  REGION 1..729: note = Description: MG55-117 effector
  source 1..729: note = uncultivated organism sequence
MKIVKRDGHIVDYDQQKIRIARGKSNNEVRGKEKVSKEQIDEIIKYIEELNKKRILVEDIQDIIEEKLMSYGKYTLAKKYITYRYTRELVRKANTTDKSIKELIEGENEYWNSENSNKNAEVVTTQRDYLAGITSTDITRRFLLPEDIVEAHDKGIIHFHDADYFAQNALHNCELINLDDMLQNGTVINGVMIEKPHRFITAATIATQIILAVTSSSYGGATVSLTHLAPFVRLSYEKYLKKYQSRNLSKKDCEKFAMQDTRKEVEDGVQTFNYQVNSMTNTNGQAPFLSVCMYLGETDEYKEELAMIIEEFLKQRILGFKNEKGVYITPAFPKLLYVLEEDNIHEDSKYWYLTKLAAECTAKRMVPDYISEKVMKELKKNELGNGECYPCMGCRSFLTPDRTMSLGNIAHAKNYVEGKGKYYGRFNQGVVTINLPDVALSADGDMDKFWKIFDERLELCHRALQIRHKRLSNATSDVAPILWQHGALARLKKGESIHELLHHGYSTISLGYAGLYECVKVMTGHSHTDNGEGKEFGLKVMQHLNDATAKWKAEEDIDYSVYGSPIESTTYKFAKCLKERFGTIKGITDRGYVTNSYHVPVFEEIDAFSKLKLESEFQRLSPGGAISYIETPNLQNNLDAVLEVIQFIYDNIMYAELNTKSDYCQKCGYTGEILIDDNLEWYCPNCGNRDHNTLNVARRTCGYIGTNFWNKGRTQEIKERVLHLDNKNA

SEQ ID NO: 543 - protein, 729 aa, unidentified
  REGION 1..729: note = Category: MG55 effectors
  REGION 1..729: note = Description: MG55-118 effector
  source 1..729: note = uncultivated organism sequence
MKIVKRDGHIVDYDPEKIRVAIGKANEEVRGREKATKEEIKEIIKYIEDLNKKRILVEDIQDIIEQKLMEFDKYQLAKKYITYRYTRELVRKANTTDKSIKELIEGENEYWNSENSNKNAEVVTTQRDYLAGITSTDITRRFLLPEDIVEAHDAGIIHFHDADYFAQNALHNCELINLDDMLQYGTVINGVMIEKPHRFLTAATIATQIILAVTSSSYGGATVSLTHLAPFVRLSYEKYLKKYQARNFSKKDCEKYAMQDTKKEIEDGVQTFNYQVNSMTNTNGQAPFLSVCMYLGETEEYKDELAMIIEEFLKQRILGFKNEKGVYITPAFPKLLYVLEEDNIREGSKYWYLTKLAAECTAKRMVPDYISEKMMLKYKKNILGDGDCYPCMGCRSFLTPDRMLNIGNIAKAKNYVEGKGKYYGRFNQGVVTINLPDVALSADGDMDEFWKIFDERLELCHRALQIRHKRLSNVTSDVAPILWQHGALARLEKGESIHELLHHGYSTISLGYAGLYECVKVMTGHSHTDNGPGKEFGLKVMQHLNDATSKWKAEEDLDYSVYGTPIESTTYKFAKCLKERFGTVKGITDRNYITNSYHVPVFEEIDAFSKLKLESEFQVLSPGGAISYVETPNLQGNIDAVIEIIQFIYDNIMYAELNTKSDYCQQCGYTGEILIDDNLEWYCPNCGNRDHNTLNVARRTCGYIGTNFWNKGRTQEIKERVLHIDNKEA

SEQ ID NO: 544 - protein, 724 aa, unidentified
  REGION 1..724: note = Category: MG55 effectors
  REGION 1..724: note = Description: MG55-119 effector
  source 1..724: note = uncultivated organism sequence
MKIIKRNGAEATFDISKIIMAITKANAAVEECDRMTPRQIQRIAESVELACQELGRSAAVEEIQDMVEKQIMAHGAFEVAKAYITYRYTRSLVRRANTTDDRILSLIECNNEEAKQENSNKNPIVNSTQRDYMAGEVSRDITSRLLLPKDIVEAHEEGIIHFHDADYYAQHMHNCDLVNLEDMLENGTVITGTLIERPHSFSTACNIATQIIAQVASNQYGGQSISLTHLAPFVQVSRERIRREVEAEMQAIDAHPGEEKLAELVENRVREEIRRGVQTIQYQVVTLLTTNGQAPFVTVFMYLGEAKNEQERHDLAMIIEETLRQRYQGVKNEKGVWVTPAFPKLIYVLEEDNIHEDSPYWYLTELAARCTAKRMVPDYISEKKMLELKVDKNGEGHCYTCMGCRSFLTPYVDENGKPKYYGRFNQGVVTINLPDVALSSGGNMEKFWKIFDERLELCHRALMCRHERLKGTLSDAAPILWQYGALARLKKGEPIDKLLYGGYSTISLGYAGLYECVKYMTGKSHTDPSATPFALEIMQHMNDACAKWKQMHNIDFSLYGTPLESTTYKFAKCLQKRFGIIPGVTDKGYITNSYHIHVTEKIDAFSKLAFESKFQALSPGGAISYVEVPNMQNNIPAVLEVMKFIYDNIMYAELNTKSDYCQVCGYDGEIEIVEHDGKLIWRCPNCGNTDQDKMNVARRTCGYIGTQFWNQGRTQEIKERVLHL

SEQ ID NO: 545 - protein, 722 aa, unidentified
  REGION 1..722: note = Category: MG55 effectors
  REGION 1..722: note = Description: MG55-120 effector
  source 1..722: note = uncultivated organism sequence
MRMKIIKRSGSEDTFDARKITAAVTKANYEVPTKERLSKEQIESITADVENICLDMNRALSVEEIQDLVEEQIMDRRAFAVARKYITYRYNRALLRKANSTDKQILSLLECNNEMVKQENSNKNPTVNSVQRDYMAGEVSKDITKRFLLPSEIVRAHEQGIIHFHDSDYFAQHMHNCCLVNLEDMLQNGTVISETMIEKPKSFSTACNIATQSIAQIASSQYGGQSISLTHLAPFVDISRQKYKKQVENELKEAGLSYNSKQVDEIAEIRVRDEIKRGVQMIQYQVITLMTTNGQAPFVSVFMYLDEAPEGRLREDLALIMEEILRQRMQGVKNEKGVYITPAFPKLLYVLEEDNVREGSKYWYLTQLAAKCTAKRMVPDYISEKIMKKMKDGNCYPCMGCRSFLTVYHDEKDRPKFYGRFNQGVVTINLVDVACSSDGDEEAFWKILDKRLELCKKALMYRHNRLKGTPSDVAPILWQYGALARLKKGEVIDKLLYNGYSTISLGYAGLCECTRYMTGKSHTDPSATPFALKVMEKLNDACSRWREEENIDFSLYGTPLESTTYKFAKCLQKRFGIIKGVTDKNYITNSYHVHVTEEINAFDKLKFEAQFQNLSPGGAVSYVEVPNMENNIDAVLQVMQFIYDNIMYAELNTKSDYCQVCDYSGQIEIVNDEHGKLIWKCPNCGNTDQDKMNVARRTCGYIGTQFWNQGRTQEIKERVLHL

SEQ ID NO: 546 - protein, 708 aa, unidentified
  REGION 1..708: note = Category: MG55 effectors
  REGION 1..708: note = Description: MG55-121 effector
  source 1..708: note = uncultivated organism sequence
MKVIKRDGSTADFDSSKIIVAIQKANQVVEPEDRIDQERIEAIAHYVESKNRMRLLVEDIQDMVEHQLMDEGKFNLAKSYIIYRYTRALVRKANTTDESILSLIRNSNKDVMEENSNKNAVMASTQRDLIAGEVSKDLTRRLILPEKISKAHDEGAIHFHDADYFVQPIFNCCLINVGDMLDNGTVMNGKLIESPKSFQVACTVMTQIIASVASSQYGGQSVDIRHLGKYLRRSYEKFKLTIKAEVGDSVADEVVERLTKRRLQDELRSGVQTIQYQINTLMTTNGQSPFVTIFLNLQADDEYLEENAMIVEEILRQRLEGIKNDKGVFVTPAFPKLVYVLDEHNCLKGGKYDYITKLAVKCSAKRLYPDYISAKKMRENYEGNVFAPMGCRSFLAAWKDDEGNYKFEGRFNQGVVSLNLPQVAILAHGDEEKFWPLLDERLQLCYEALMCRHNSLKGIRSDVSPVHWQYGAIARLEKGEVIDKYLEKGYSTISLGYIGLYEMTKLMKDVSHTTPEGEEFALRVMKYLRAACDKWKKETGLGFALYGTPAESLCYRFARIDKERFGTIADVTDKGYYTNSYHVDVREDIDAFSKFNFESQFQRISSGGAISYVEIPNMRHNLEAMEDVVRFIYDNIQYAEFNTKSDYCHVCGFDGEIIINDDLEWECPNCGNKNQTLMNVTRRTCGYLGENFWNVGKTKEIKSRVLHL

SEQ ID NO: 547 - protein, 708 aa, unidentified
  REGION 1..708: note = Category: MG55 effectors
  REGION 1..708: note = Description: MG55-122 effector
  source 1..708: note = uncultivated organism sequence
MRVIKRDGRTVEYDRNKILIAIRKANAEVDTFERVNDDMIDGIVAGIENMKRDTMQVEDIQDIIEQKLMAAGKFDLAKKYIIYRYTRELVRKANTTDDSIMSLLQNSNKDVMEENSNKNAYVASTQRDLIAGEVSKDLTKRILLPEKITKAHEDGVLHFHDMDYFIQPIFNCCLINIGDMLDNGTVMNGKLIESPKSFQVACTVMTQIISAVASSQYGGQSVDTRHLGKYLRKSADKYRKHYTERYAGKIAPDVIEEFVKERVNDELRSGVQTIQYQINTLMTTNGQSPFVTLFLNLDPKDEYIKENAMIIEEILRQRLEGIKNEKGVYVTPAFPKLIYVLDEHNALKGGEYDYITKLAVRCSAKRMYPDYISAKKMRENYEGNVFSCMGCRSFLTPWKDENGNYKFEGRFNQGVVSLNLPQIGILAKGDMEYFWQLLEERLSLCFEALMCRHRALEGVTSDVSPIHWQYGAIARLQKGEKIDKLLHGGYSTISLGYIGLYEVTKLMTGESQTTEKGSQFAKALMNRLRRATDTWKEETGIHFGLYGTPAESLCYRFAEIDKKRFGEIEDVTDKGYYTNSYHVDVREKIDAFSKFEFEAQFQVISSGGAISYVEVPNMQNNLPALEEVVKYIYEHIQYAEFNTKSDYCHVCGYDGEIIINDNLEWECPNCGNKDHDKMNVTRRTCGYLGENFWNVGKTKEINARVLHL

SEQ ID NO: 548 - protein, 708 aa, unidentified
  REGION 1..708: note = Category: MG55 effectors
  REGION 1..708: note = Description: MG55-123 effector
  source 1..708: note = uncultivated organism sequence
MRVIKRDGRTVEYDRNKILIAIRKANAEVDTFERVNDDMIDGIVAGIENMKRDTMQVEDIQDIIEQKLMAAGKFDLAKKYIIYRYTRELVRKANTTDDSIMSLLQNSNKDVMEENSNKNAYVASTQRDLIAGEVSKDLTKRILLPEKITKAHEEGVLHFHDMDYFIQPIFNCCLINIGDMLDNGTVMNGKLIESPKSFQVACTVMTQIISAVASSQYGGQSVDTRHLGKYLRKSADKYRKHYTERYAGKIAPDIIEEFVKERVNDELRSGVQTIQYQINTLMTTNGQSPFVTLFLNLDPKDEYIKENAMIIEEILRQRLEGIKNEKGVYVTPAFPKLIYVLDEHNALKGGEYDYITKLAVRCSAKRMYPDYISAKKMRENYEGNVFSCMGCRSFLTPWKDENGNYKFEGRFNQGVVSLNLPQIGILAKGDMEYFWQLLEERLSLCFEALMCRHRALEGVTSDVSPIHWQYGAIARLQKGEKIDKLLHGGYSTISLGYIGLYEVTKLMTGESQTTEKGSQFAKALMNRLRRATDTWKEETGIHFGLYGTPAESLCYRFAEIDKKRFGEIEDVTDKGYYTNSYHVDVREKIDAFSKFEFEAQFQVISSGGAISYVEVPNMQNNLPALEEVVKYIYEHIQYAEFNTKSDYCHVCGYDGEIIINDNLEWECPNCGNKDHDKMNVTRRTCGYLGENFWNVGKTKEINARVLHL

SEQ ID NO: 549 - protein, 720 aa, unidentified
  REGION 1..720: note = Category: MG55 effectors
  REGION 1..720: note = Description: MG55-124 effector
  source 1..720: note = uncultivated organism sequence
MKIIKRSGAEAVFDISKIIIAINKANHEVVEAERLTADQIKEIAQYIEDSCKDANHALNVEDIQDLVEDQLMDKRAFSVARKYITYRYKRALVRKSNSTDEQILSLIECNNEEVKQENSNKDSTVNSVQRDYMAGEVSKDITRRFLLPEDIVEAHEQGIIHFHDADYFAQHMHNCDLVNLEDMLQNGTVISGTRIDKPHSFSTACNIATQIIAQVASSQYGGQSISLAHLVPFVQISREKIHAELVQTLKESDVELSEEKINSIVERRLHAEIERGVQVIQYQVVTLMTTNGQSPFVTVFMYLNEAKNEQEKKDLAMIIEEVLDQRYQGVKNEDGVWITPAFPKLIYVLEEDNIHEDSEYYYLTKKAAKCTAKRMVPDYISEKKMKELKDGNCYTCMGCRSFLTVYHDEDGKPKFYGRFNQGVVTLNLVDLACSSGGDFEKFWKLFDERLDLCYRALMARHNRLKGTPSDVAPILWQYGALARLKKGETIDKLLYGGYSTISLGYAGLCECTRYMTGKPHTDPAATPFALKVMQRLNDACKEWKEKENIDFSVYGTPLESTTYKFAKCLQKRFGVIPGVTDKNYITNSYHVHVTENIDAFTKLKFESQFQALSPGGAISYVEVPNMQDNLDAVLSVMKFIYENIMYAELNTKSDYCQVCGYDGEIQIVKDDDGKLVWECPHCHNRDQDKMNVARRTCGYIGSQFWNQGRTQEIKERVLHL

SEQ ID NO: 550 - protein, 720 aa, unidentified
  REGION 1..720: note = Category: MG55 effectors
  REGION 1..720: note = Description: MG55-125 effector
  source 1..720: note = uncultivated organism sequence
MKIIKRSGTEAVFDISKIIIAINKANHEVVEAERLTADQIKEIAQYIEDSCKDANHALNVEDIQDLVEDQLMDKRAFSVARKYITYRYKRALVRKSNSTDEQILSLIECNNEEVKQENSNKDSTVNSVQRDYMAGEVSKDITRRFLLPEDIVEAHEQGIIHFHDADYFAQHMHNCDLVNLEDMLQNGTVISGTRIDKPHSFSTACNIATQIIAQVASSQYGGQSISLAHLVPFVQISREKIHAELVQTLKESDVELSEEKINSIVERRLHAEIERGVQVIQYQVVTLMTTNGQSPFVTVFMYLNEAKNEQEKKDLAMIIEEVLDQRYQGVKNEDGVWITPAFPKLIYVLEEDNIHEDSEYYYLTKKAAKCTAKRMVPDYISEKKMKELKDGNCYTCMGCRSFLTVYHDEDGKPKFYGRFNQGVVTLNLVDLACSSGGDFEKFWKLFDERLDLCYRALMARHNRLKGTPSDVAPILWQYGALARLKKGETIDKLLYGGYSTISLGYAGLCECTRYMTGKPHTDPAATPFALKVMQRLNDACKEWKEKENIDFSVYGTPLESTTYKFAKCLQKRFGVIPGVTDKNYITNSYHVHVTENIDAFTKLKFESQFQALSPGGAISYVEVPNMQDNLDAVLSVMKFIYENIMYAELNTKSDYCQVCGYDGEIQIVKDDDGKLVWECPHCHNRDQDKMNVARRTCGYIGSQFWNQGRTQEIKERVLHL

SEQ ID NO: 551 - protein, 720 aa, unidentified
  REGION 1..720: note = Category: MG55 effectors
  REGION 1..720: note = Description: MG55-126 effector
  source 1..720: note = uncultivated organism sequence
MKIIKRSGAEAVFDISKIIIAINKANHEVVEAERLTADQIKEIAQYIEDSCKDANHALNVEDIQDLVEDQLMDKRAFSVARKYITYRYKRALVRKSNSTDEQILSLIECNNEEVKQENSNKDSTVNSVQRDYMAGEVSKDITRRFLLPEDIVAAHEQGIIHFHDADYFAQHMHNCDLVNLEDMLQNGTVISGTRIDKPHSFSTACNIATQIIAQVASSQYGGQSISLAHLVPFVQISREKIHAELVQTLKESDVELSEEKINSIVERRLHAEIERGVQVIQYQVVTLMTTNGQSPFVTVFMYLNEAKNEQEKKDLAMIIEEVLDQRYQGVKNEDGVWITPAFPKLIYVLEEDNIHEDSEYYYLTKKAAKCTAKRMVPDYISEKKMKELKDGNCYTCMGCRSFLTVYHDEDGKPKFYGRFNQGVVTLNLVDLACSSGGDFEKFWKLFDERLDLCYRALMARHNRLKGTPSDVAPILWQYGALARLKKGETIDKLLYGGYSTISLGYAGLCECTRYMTGKPHTDPAATPFALKVMQRLNDACKEWKEKENIDFSVYGTPLESTTYKFAKCLQKRFGVIPGVTDKNYITNSYHVHVTENIDAFTKLKFESQFQALSPGGAISYVEVPNMQDNLDAVLSVMKFIYENIMYAELNTKSDYCQVCGYDGEIQIVKDDDGKLVWECPHCHNRDQDKMNVARRTCGYIGSQFWNQGRTQEIKERVLHL

SEQ ID NO: 552 - protein, 720 aa, unidentified
  REGION 1..720: note = Category: MG55 effectors
  REGION 1..720: note = Description: MG55-127 effector
  source 1..720: note = uncultivated organism sequence
MKIIKRSGAEAVFDISKIIIAINKANHEVVEAERLTADQIKEIAQYIEDSCKDANHALNVEDIQDLVEDQLMDKRAFSVARKYITYRYKRALVRKSNSTDEQILSLIECNNEEVKQENSNKDSTVNSVQRDYMAGEVSKDITRRFLLPEDIVAAHEQGIIHFHDADYFAQHMHNCDLVNLEDMLQNGTVISGTRIDKPHSFSTACNIATQIIAQVASSQYGGQSISLAHLVPFVQISREKIHAELVQTLKESDVELSEEKINSIVERRLHAEIERGVQVIQYQVVTLMTTNGQSPFVTVFMYLNEAKNEQEKKDLAMIIEEVLDQRYQGVKNEDGVWITPAFPKLIYVLEEDNIHEDSEYYYLTKKAAKCTAKRMVPDYISEKKMKELKEGNCYTCMGCRSFLTVYHDEDGKPKFYGRFNQGVVTLNLVDLACSSGGDFEKFWKLFDERLDLCYRALMARHNRLKGTPSDVAPILWQYGALARLKKGETIDKLLYGGYSTISLGYAGLCECTRYMTGKPHTDPAATPFALKVMQRLNDACKEWKEKENIDFSVYGTPLESTTYKFAKCLQKRFGVIPGVTDKNYITNSYHVHVTENIDAFTKLKFESQFQALSPGGAISYVEVPNMQDNLDAVLSVMKFIYENIMYAELNTKSDYCQVCGYDGEIQIVKDDDGKLVWECPHCHNRDQDKMNVARRTCGYIGSQFWNQGRTQEIKERVLHL

SEQ ID NO: 553 - protein, 720 aa, unidentified
  REGION 1..720: note = Category: MG55 effectors
  REGION 1..720: note = Description: MG55-128 effector
  source 1..720: note = uncultivated organism sequence
MKIIKRSGAEAVFDISKIIIAINKANHEVVEAERLTADQIKAIAQYIEDSCKDANHALNVEDIQDLVEDQLMDKRAFSVARKYITYRYKRALVRKSNSTDEQILSLIECNNEEVKQENSNKDSTVNSVQRDYMAGEVSKDITRRFLLPEDIVEAHEQGIIHFHDADYFAQHMHNCDLVNLEDMLQNGTVISGTRIDKPHSFSTACNIATQIIAQVASSQYGGQSISLAHLVPFVQISREKIHAELVQTLKESDVELSEEKINSIVERRLHAEIERGVQVIQYQVVTLMTTNGQSPFVTVFMYLNEAKNEQEKKDLAMIIEEVLDQRYQGVKNEDGVWITPAFPKLIYVLEEDNIHEDSEYYYLTKKAAKCTAKRMVPDYISEKKMKELKDGNCYTCMGCRSFLTVYHDEDGKPKFYGRFNQGVVTLNLVDLACSSGGDFEKFWKLFDERLDLCYRALMARHNRLKGTPSDVAPILWQYGALARLKKGETIDKLLYGGYSTISLGYAGLCECTRYMTGKPHTDPAATPFALKVMQRLNDACKEWKEKENIDFSVYGTPLESTTYKFAKCLQKRFGVIPGVTDKNYITNSYHVHVTENIDAFTKLKFESQFQALSPGGAISYVEVPNMQDNLDAVLSVMKFIYENIMYAELNTKSDYCQVCGYDGEIQIVKDDDGKLVWECPHCHNRDQDKMNVARRTCGYIGSQFWNQGRTQEIKERVLHL

SEQ ID NO: 554 - protein, 720 aa, unidentified
  REGION 1..720: note = Category: MG55 effectors
  REGION 1..720: note = Description: MG55-129 effector
  source 1..720: note = uncultivated organism sequence
MKIIKRSGTEAVFDISKIIIAINKANHEVVEAERLTADQIKEIAQYIEDSCKDANHALNVEDIQDLVEDQLMDKRAFSVARKYITYRYKRALVRKSNSTDEQILSLIECNNEEVKQENSNKDSTVNSVQRDYMAGEVSKDITRRFLLPEDIVEAHEQGIIHFHDADYFAQHMHNCDLVNLEDMLQNGTVISGTRIDKPHSFSTACNIATQIIAQVASSQYGGQSISLAHLVPFVQISREKIHAELVQTLKESDVELSEEKINSIVERRLHAEIERGVQVIQYQVVTLMTTNGQSPFVTVFMYLNEAKNEQEKKDLAMIIEEVLDQRYQGVKNEDGVWITPAFPKLIYVLEEDNIHEDSEYYYLTKKAAKCTAKRMVPDYISEKKMKELKDGNCYTCMGCRSFLTVYHDEDGKPKFYGRFNQGVVTLNLVDLACSSGGDFEKFWKLFDERLDLCYRALMARHNRLKGTPSDVAPILWQYGALARLKKGETIDKLLYGGYSTISLGYAGLCECTRYMTGKPHTDPAAAPFALKVMQRLNDACKEWKEKENIDFSVYGTPLESTTYKFAKCLQKRFGVIPGVTDKNYITNSYHVHVTENIDAFTKLKFESQFQALSPGGAISYVEVPNMQDNLEAVLSVMKFIYENIMYAELNTKSDYCQVCGYDGEIQIVKDDDGKLVWECPHCHNRDQDKMNVARRTCGYIGSQFWNQGRTQEIKERVLHL

SEQ ID NO: 555 - protein, 972 aa, unidentified
  REGION 1..972: note = Category: MG55 effectors
  REGION 1..972: note = Description: MG55-130 effector
  source 1..972: note = uncultivated organism sequence
MQIGLDIGSTTIKIAVLDDAGQLQFSKYERHYSQIAEKMQQLLAELHIKMPLLKTARLAISGSAGIGIADSCGLQFVQEVFAEKVCTERLNPGTEAVIELGGEDAKLLFLGRHFDARMNDSCAGGTGAFIDQMASLLSVPTEAMNELAQQASTRYTIASRCGVFAKSDIQPLLNQGAAKADLAASIFDAVASQAVTGLAKGRPITGKVLYLGGPLTFMSELRHSFDKILKIEGYCPENSLYYVAMGAAFCAENKVDLTELPAKLAAVGAQRDFDHLEPLFANPAEYDEFMERHSKERIEPGDISAATEAYIGMDAGSTTIKIAVISPSGQLLDSSYQGNKGNPVIAIKEYLQNFYIKYPHCRILGSAVTGYGEDLIRNGFSVDYGIVETMAHFIAAKTLQPDVDFILDIGGQDIKCLKIHNGCIDNIFLNEACSSGCGSFLQTFAEILGYSAEEFARIGLFADKPVDLGSRCTVFMNSSVKQAQKDGATVANISAGLSLSIVKNALYKVIRPGSKESIGKHIVVQGGTFLNDCVLRAFEKEMGLKVVRPNIAGLMGAYGAAIYARSRHQETGHVSTLADAAALENFVHEVKAVTCGLCSNHCHLTVNTFASGKRFISGNRCERPVTHCAPDDTFNLYRQKLQLLESLKGVPGKRGKIGLPMGLNMYELLPFWHAFFTRLGFEVITSPIYDKTIFQKGQNTIPSDTVCYPAKLMHGHIKWLLENGINTIFYPCMTYNVDENSAENCYNCPVVAYYPEVLHANMHDLDNATYIFDYLGLGHKKVLLKKLQQICKEHFPDIGSSELKAALQEAYAAYNKFEAQVKELGQTIINTARSQHKPIVVLAGRPYHIDPKVNHSIDRLITTMGAALVSEDAVSSHISMQELNEDLQVLNQWTYHSRLYAAAKYVSRSSDMYMVHLVSFGCGCDAITADECRRILEEHGQIYTQIKIDDIDNLGAAKIRLRSLFAAAGLES

SEQ ID NO: 556 - protein, 708 aa, unidentified
  REGION 1..708: note = Category: MG55 effectors
  REGION 1..708: note = Description: MG55-131 effector
  source 1..708: note = uncultivated organism sequence
MRVIKRDGRTVEYDRNKILIAIRKANAEVDTFERVNDDMIDGIVAGIENMKRDTMQVEDIQDIIEQKLMAAGKFDLAKKYIIYRYTRELVRKANTTDDSIMSLLQNSNKDVMEENSNKNAYVASTQRDLIAGEVSKDLTKRILLPEKITKAHEEGVLHFHDMDYFIQPIFNCCLINIGDMLDNGTVMNGKLIESPKSFQVACTVMTQIISAVASSQYGGQSVDTRHLGKYLRKSADKYRKHYTERYAGKIAPDVIEEFVKERVNDELRSGVQTIQYQINTLMTTNGQSPFVTLFLNLDPKDEYIKENAMIIEEILRQRLEGIKNEKGVYVTPAFPKLIYVLDEHNALKGGEYDYITKLAVRCSAKRMYPDYISAKKMRENYEGNVFSCMGCRSFLTPWKDENGNYKFEGRFNQGVVSLNLPQIGILAKGDMEYFWQLLEERLSLCFEALMCRHRALEGVTSDVSPIHWQYGAIARLQKGEKIDKLLHGGYSTISLGYIGLYEVTKLMTGESQTTEKGSQFAKALMNRLRRATDTWKEETGIHFGLYGTPAESLCYRFAEIDKKRFGEIEDVTDKGYYTNSYHVDVREKIDAFSKFEFEAQFQVISSGGAISYVEVPNMQNNLPALEEVVKYIYEHIQYAEFNTKSDYCHVCGYDGEIIINDNLEWECPNCGNKDHDKMNVTRRTCGYLGENFWNVGKTKEINARVLHL

SEQ ID NO: 557 - protein, 723 aa, unidentified
  REGION 1..723: note = Category: MG55 effectors
  REGION 1..723: note = Description: MG55-132 effector
  source 1..723: note = uncultivated organism sequence
MRIIKRNGSEEDFNIEKIINAVKKANGSGEHKFLTDEQIEDVADYVEYKCNKIRRAVSVEEIQDMVEDQLMAKGAFELARRYVRYRYNRSLVRKANTTDNRILSLIECNNEEVKQENSNKNPTVNSVQRDYMAGEVSRDLTRRMLLPADIVEADKEGIIHFHDSDYFAQHMHNCDLVNLEDMLQNGTVISDTLIERPHSFSTACNIATQIIAQVASNQYGGQSISLAHLAPFVQVSREKIRRETLAEIEELGVHPTEEKINDIVEQRLRKEVNRGVQTIQYQVVTLLTTNGQAPFVTVFMYLNEAKNEQEKHDLAMIIEETLKQRHKGVKNEKGVWITPAFPKLIYVLEEDNITEDSKYWYLTELAAKCTAKRMVPDYISEKVMLQSKIDKNGEGHCFTCMGCRSFLTPYVDENGKPKYYGRFNQGVVTVNLIDIGLSAGKDLDKFWKIFDERMELCHRALQCRHERLTGTLSDAAPILWQYGALARLKKGEKIDKLLHGGYSTLSLGYAGLWECVYSLIGKKLTEKEGKELGLEIMQKLNDYCAKWKKEEDIDYSIYGTPLESTTYKFAKCLQKRFGIIKGVTDKNYITNSYHVHVTENIDAFSKLKLESEFQALSPGGAISYVEVPNMQDNIPAVLQVIKFIYDNIMYAELNTKSDYCQVCGYDGEIKIVHDDGKLVWECPNCGNRDQDKMNVARRTCGYIGTQFWNQGRTQEIEERVLHL

SEQ ID NO: 558 - protein, 708 aa, unidentified
  REGION 1..708: note = Category: MG55 effectors
  REGION 1..708: note = Description: MG55-133 effector
  source 1..708: note = uncultivated organism sequence
MKVIKRDGSTADFDSSKIIVAIQKANQVVEPEDRIDQERIEAIAHYVESKNRMRLLVEDIQDMVEHQLMDEGKFNLAKSYIIYRYTRALVRKANTTDESILSLIRNSNKDVMEENSNKNAVMASTQRDLIAGEVSKDLTRRLILPEKISKAHDEGAIHFHDADYFVQPIFNCCLINVSDMLDNGTVMNGKLIESPKSFQVACTVMTQIIASVASSQYGGQSVDIRHLGKYLRRSYEKFKLTIKAEVGDSVADEVVERLTKRRLQDELRSGVQTIQYQINTLMTTNGQSPFVTIFLNLQADDEYLEENAMIVEEILRQRLEGIKNDKGVFVTPAFPKLVYVLDEHNCLKGGKYDYITKLAVKCSAKRLYPDYISAKKMRENYEGNVFAPMGCRSFLAAWKDDEGNYKFEGRFNQGVVSLNLPQVAILAHGDEEKFWPLLDERLQLCYEALMCRHNSLKGIRSDVSPVHWQYGAIARLEKGEVIDKYLEKGYSTISLGYIGLYEMTKLMKDVSHTTPEGEEFALRVMKYLRAACDKWKKETGLGFALYGTPAESLCYRFARIDKERFGTIADVTDKGYYTNSYHVDVREDIDAFSKFNFESQFQRISSGGAISYVEIPNMRHNLEAMEDVVRFIYDNIQYAEFNTKSDYCHVCGFDGEIIINDDLEWECPNCGNKNQTLMNVTRRTCGYLGENFWNVGKTKEIKSRVLHL

SEQ ID NO: 559 - protein, 1416 aa, unidentified
  REGION 1..1416: note = Category: MG55 effectors
  REGION 1..1416: note = Description: MG55-134 effector
  source 1..1416: note = uncultivated organism sequence
MKLDFNTLGIDIGSTTVKIAILNKDGEIIFSDYQRHYANIQETLAKIIDEAYEEFGDIPVSPMITGSGGLTLSKHMEIPFVQEVVAVATSLKDYAPRTDVAIELGGEDAKIIYFTGGIDQRMNGICAGGTGSFIDQMATLLKTDAAGLNEYAKNYKAIYPIAARCGVFAKTDIQPLINEGATKEDLSASIFQAVVNQTISGLACGKPIKGNVAFLGGPLHFLTELKQAFIRTLGLEGDAIIAPEHSHLFAASGAAMNAHADVQSSLGELKEKLSHKIELEFEVTRMEPLFASEKEYEDFTERHNKHNVRKGDFASYKGDLFLGIDAGSTTTKVAVIGDDGSLLYSFYSSNNGSPLKTALKAMKDIYSKMPEGARIVRSCSTGYGEALLKSALLLDEGEVETVAHYTAAAFFDPNVDCILDIGGQDMKCIKIKNNSVDKVQLNEACSSGCGSFIETFAKSLNYEVADFAKIALFAENPIDLGSRCTVFMNSKVKQAQKEGASVADISAGLAYSVIKNALLKVIKLTDPKDLGKQVVVQGGTFYNDAVLRSFERISGCEAIRPDIAGIMGAFGAALIAKDRYTGQKSTMLSFKEINELRFKTSMTRCQGCINHCLLTVNEFTGDRKFISGNRCEKGLGLEKNKEQIPNLFEYKNERVFRHYKPLKKADAPRGVVGIPRVLNMYENYPFWFTFFTKLGYSVKLSPVSSRKIYELGIESIPSESECYPAKLAHGHVTWLIRQGLEYIFYPCIPYERVEVPDAGNHYNCPIVTSYGENIKNNIEELRDDKIKYQNPFISLESEEILTKRLVDFFRKENGIPAAEIKAAAHEGWLEMQAVREDMTKKGKEVLQYLKETGRHGIVLAGRPYHSDPEINHGIPDLITSYGVAVLTEDSISELSEVDRPTIVMDQWMYHSRLYKAASFVAKNDNLDLIQLNSFGCGLDAVTTDQVNDILTKQNKIYTVLKIDEVNNLGAARIRIRSLLAAVKDRERKKIEAKRVDTAHHRVIFTEQMRKDYTILVPDMSPIHFEILESALASCGYNVEVLKADSKCIDYGLKYVNNDACYPSLIVVGQFMQALLSGKYDLHKVALIITQTGGGCRATNYIGFIRRALEKAGMGYIPVISMSAGIEKNPGLKVNLEMANKALQALIYGDVFMRVLYKTRPYEKVKGSANALHEKWKKIAIESVKKANKKQFKKNIQNIVKEFDELELVDIKKPKVGIVGEILVKFMPLANNFIVELLEEEGAEAVCPDLIDFFMYSLYNANFKAEYLGKKKSSAKINNFLIWFIERYRKCANDALAASKRFHPTVPIQKLAEYASPIVSCGNQTGEGWFLTGEMIELIKSGVPNIVCTQPFGCLPNHVVGKGVIKELRHQYPDSNIVAVDYDPGASEVNQLNRIKLMLSTAGKNLIAESKDNEETA

SEQ ID NO: 560 - protein, 972 aa, unidentified
  REGION 1..972: note = Category: MG55 effectors
  REGION 1..972: note = Description: MG55-135 effector
  source 1..972: note = uncultivated organism sequence
MQIGLDIGSTTIKIAVLDDAGQLQFSKYERHYSQIAEKMQQLLAELHVKMPLLKTARLAISGSAGIGIADSCGLQFVQEVFAEKVCTERLNPGTEAVIELGGEDAKLLFLGRHFDARMNDSCAGGTGAFIDQMASLLSVPTEAMNELAQQASTRYTIASRCGVFAKSDIQPLLNQGAAKADLAASIFDAVASQAVTGLAKGRPITGKVLYLGGPLTFMSELRHSFDKILKIEGYCPENSLYYVAMGAAFCAENKVDLTELPAKLAAVGAQRDFDHLEPLFASTAEYDEFMERHSKERIEPGDISAATEAYIGMDAGSTTIKIAVISPSGQLLDSSYQSNKGNPVIAIKEYLQNFYIKYPHCRILGSAVTGYGEDLIRNGFSVDYGIVETMAHFIAAKTLQPDVDFILDIGGQDIKCLKIHNGCIDNIFLNEACSSGCGSFLQTFAEILGYSAEEFARIGLFADKPVDLGSRCTVFMNSSVKQAQKDGATVANISAGLSLSIVKNALYKVIRPGSKESIGKHIVVQGGTFLNDCVLRAFEKEMGLKVVRPNIAGLMGAYGAAIYARSRHQETGHASTLADAAALENFVHEVKAVTCGLCSNHCHLTVNTFASGKRFISGNRCERPVTHCAPDDTFNLYRQKLQLLESLKGVPGKRGKIGLPMGLNMYELLPFWHAFFTRLGFEVITSPIYDKTIFQKGQNTIPSDTVCYPAKLMHGHIKWLLENGINTIFYPCMTYNVDENSAENCYNCPVVAYYPEVLHANMHDLDNATYIFDYLGLGHKKVLLKKLQQICKEHFPDIGSSELKAALQEAYAAYNKFEAQVKELGQTIINTARSQHKPIVVLAGRPYHIDPKVNHSIDRLITTMGAALVSEDAVSSHISMQELNDDLQVLNQWTYHSRLYAAAKYVSRSSDMYMVHLVSFGCGCDAITADECRRILEDHGQIYTQIKIDDIDNLGAAKIRLRSLFAAAGLES

SEQ ID NO: 561 - protein, 978 aa, unidentified
  REGION 1..978: note = Category: MG55 effectors
  REGION 1..978: note = Description: MG55-136 effector
  source 1..978: note = uncultivated organism sequence
MRVGLDIGSTTIKCVVLDDADKIVYSTYERHYSHILEKGQELLRRVAEQYLPGGRALLAISGSAGMGLADSCQVPFVQEVFATRVAANRLAPGTDCIIELGGEDAKILFLTHGTEVRMNGSCAGGTGAFIDQMATLLKMSADEMDKAAQGAQRTYTIASRCGVFAKSDIQPLINQGAQAGDIAASIYQAVVNQTIAGLAQGRPIEGKVLYLGGPLTFSSVLRQSFDNTLHLKGTCPENSLLYVALGAAFYADQECDLNAVIDRLGRYSATATYVSLPPLFATKQEYEEFHARHMKAAVPCVPFGAECGPVHIGIDSGSTTIKLAVIDQNDNILFTSYQPNLGNPIPLVRKVLTDLYKNHPNLEIASVTTTGYGEELVKNAFHCDRGLVETVAHFTAAKHFMPNVDFIIDIGGQDMKCFKIEDGAISNIFLNEACSSGCGSFLQTFAQALGYDVKKFAALGLFADRPVDLGSRCTVFMNSSVKQAQKDGATIENISAGLSISVVKNALYKVIRASSPEELGRNIVVQGGTFYNEAVLRAFEKEMGVEVIRPDIAGLMGAYGAALFGKAHARPGARSTVLTLPELEAFTQKVNTVQCQGCGNHCQLTVNIFADGKRFISGNRCDKPVTGKATDEDLDLYAYKLGLLLDYKPQNLENSRGTIGLPLCLNMYELLPFWHTLFTRLGFTVKTSPVSSRALYQEGQATIPSDTACFPAKLAHGHIAELVKMGVDAVFYPCMSYNVDEHLGDNHYNCPVVAYYPEVLAGNCHELANTTFIYDYLNLARRKDFTRRFPAVLDKYFPGLPRKAVAAAIDAAYAEYARHMEQVRAKGAEIIARARAEGRHIIVLAGRPYHVDPEVNHGIDKLIVRQGAAVVTEDAVSHLVERFPTSVLNQWTYHSRLYAAAKYCTTQPDMDLVQLVSFGCGLDAITTDETREILQEGGKLYTQLKIDEITNLGAVNIRLRSLFAALEERREEAEKRRN

SEQ ID NO: 562 - protein, 723 aa, unidentified
  REGION 1..723: note = Category: MG55 effectors
  REGION 1..723: note = Description: MG55-137 effector
  source 1..723: note = uncultivated organism sequence
MRIIKRNGSEEDFNIEKIINAVKKANGSGEHKFLTDEQIEDVADYVEYKCNKIRRAVSVEEIQDMVEDQLMAKGAFELARRYVRYRYNRSLVRKANTTDNRILSLIECNNEEVKQENSNKNPTVNSVQRDYMAGEVSRDLTRRMLLPADIVEADKEGIIHFHDSDYFAQHMHNCDLVNLEDMLQNGTVISDTLIERPHSFSTACNIATQIIAQVASNQYGGQSISLAHLAPFVQVSREKIRRETLAEIEELGVHPTEEKINDIVEQRLRKEVNRGVQTIQYQVVTLLTTNGQAPFVTVFMYLNEAKNEQEKHDLAMIIEETLKQRHKGVKNEKGVWITPAFPKLIYVLEEDNITEDSKYWYLTELAAKCTAKRMVPDYISEKVMLQSKIDKNGEGHCFTCMGCRSFLTPYVDENGKPKYYGRFNQGVVTVNLIDIGLSAGKDLDKFWKIFDERMELCHRALQCRHERLTGTLSDAAPILWQYGALARLKKGEKIDKLLHGGYSTLSLGYAGLWECVYSLIGKKLTEKEGKELGLEIMQKLNDYCAKWKKAENIDYSLYGTPLESTTYKFAKCLQKRFGIIKGVTDKNYITNSYHVHVTENIDAFSKLKLESEFQALSPGGAISYVEVPNMQDNIPAVLQVIKFIYDNIMYAELNTKSDYCQVCGYDGEIKIVHDDGKLVWECPNCGNRDQDKMNVARRTCGYIGTQFWNQGRTQEIEERVLHL

SEQ ID NO: 563 - protein, 720 aa, unidentified
  REGION 1..720: note = Category: MG55 effectors
  REGION 1..720: note = Description: MG55-138 effector
  source 1..720: note = uncultivated organism sequence
MKIIKRSGTEAVFDISKIIIAINKANHEVVEAERLTADQIKEIAQYIEDSCKDANHALNVEDIQDLVEDQLMDKRAFSVARKYITYRYKRALVRKSNSTDEQILSLIECNNEEVKQENSNKDSTVNSVQRDYMAGEVSKDITRRFLLPEDIVAAHEQGIIHFHDADYFAQHMHNCDLVNLEDMLQNGTVISGTRIDKPHSFSTACNIATQIIAQVASSQYGGQSISLAHLVPFVQISREKIHAELVQTLKESDVELSEEKINSIVERRLHAEIERGVQVIQYQVVTLMTTNGQSPFVTVFMYLNEAKNEQEKKDLAMIIEEVLDQRYQGVKNEDGVWITPAFPKLIYVLEEDNIHEDSEYYYLTKKAAKCTAKRMVPDYISEKKMKELKDGNCYTCMGCRSFLTVYHDEDGKPKFYGRFNQGVVTLNLVDLACSSGGDFEKFWKLFDERLDLCYRALMARHNRLKGTPSDVAPILWQYGALARLKKGETIDKLLYGGYSTISLGYAGLCECTRYMTGKPHTDPAATPFALKVMQRLNDACKEWKEKENIDFSVYGTPLESTTYKFAKCLQKRFGVIPGVTDKNYITNSYHVHVTENIDAFTKLKFESQFQALSPGGAISYVEVPNMQDNLDAVLSVMKFIYENIMYAELNTKSDYCQVCGYDGEIQIVKDDDGKLVWECPHCHNRDQDKMNVARRTCGYIGSQFWNQGRTQEIKERVLHL

SEQ ID NO: 564 - protein, 1438 aa, unidentified
  REGION 1..1438: note = Category: MG55 effectors
  REGION 1..1438: note = Description: MG55-139 effector
  source 1..1438: note = uncultivated organism sequence
MNKILHVGLDVGSTTVKIIVMDDNQNLIYENYQRHFSDTKNTVCQVLSDFANKYPDYVYTIALTGSGAMSATKFLDLPFIQEVVACKRAVEKYIPQTDVVIELGGEDAKIIYFGKSIEQRMNGTCAGGTGAFIDQMASLLNTDAAGLNELAKNYKMIYPIASRCGVFAKTDVQPLINEGANKEDIAASIFQAVVNQTISGLACGRPIRGNIAFLGGPLNYLSELRNRFIETLNLDDNSAIIPQDAHLLVAKGAALDSVNNSAISNEKLKAKIEVLKASHDTTSTPLAPLFVTNAEYEAFKERHDKDTVPKKDLKTYKGDCFIGIDAGSTTTKLVVTDCDDNLLYSLYQSNEGNPLKSVINMLKELYEIIPQTATIRYSGVTGYGEQLIQSALNVDLNEIETIAHYTAAKRFMPNVTSIVDIGGQDMKYIKIKNGTINNIMLNEACSSGCGSFIETFAKSLNISINDFVESALDSRSPVDLGSRCTVFMNSKIKQAQKEGATVGDISAGLSYSVIKNAIQKVMKVRDISTLGDHIVVQGGTFYNDAVLRAFELIVGKDVVRPDIAGLMGAYGVAILARKQYEANLDMEYISKLSTLDEIENLQIETSHVRCGGCENHCLLTINKFNNGQKHISGNRCEKGAGITSKSKDLPNIYKYKNERLFSYKPLSEKSAIRGTIGIPRVLNMYEDYPFWFTFLTNLGFRVIISEKSTRKTYEKGMESMPSESVCYPAKLAHGHIMSLINQGIKTIFYPCIPYSRKEYKQADNHYNCPIVISYSEVLKNNVEELKNVKFLNPFLPFEPKKLAEAILSLPEFDEYHFTKKELIKAAQEAEKEYQNFKTDIRNKGQEALNYMKENNLRGIVLAGRPYHVDPEINHGIDTLITSLGLCVLSEDSISNQVTLDKKLRVVNQWVYHSRLYAAADFVGRHANLELVQLNSFGCGVDAVTTDQVEEILSSYDKMYTLIKIDEVNNLGAVRIRIRSLLASMNKRIEKNSNNSDSLGNYELQRKIFTKEMRNDYTILIPQMAPIHFELLESAVQACGYNVHLLRECTPHTVEVGLKYVNNDACYPSILTTGQMIEALESGKYDLNKTALIMSQTGGGCRATNYIGFIRKALKDAGYSDIPVISFNVVGMEKMPGFKLSPKMAEGLLKSVVYGDLLQKMLTKNRAYEKNKGETQKKYEYWLEKCKKLVSKSSLKEFNQSIYDMVNDFEKIELDTTVEKPKVGIVGEVLIKYHPFGNNFVADKLEQEGAEVILPDFMGFIKFIATHKITFNQLIKTDSGKAKIFKFAIKLIDLLEKNEINALKNSKKGYLLPCNIFELEENVKDILSIGNQTGEGWFLTAEMVEYMQHDIPNIVCVQPFACLPNHVVGKGVIKTIRDKYPEANIAAIDYDPGASEANQTNRIKLLMAVAKDNLKIKNSKNKLLLKENNKINSKNKIYQ

SEQ ID NO: 565 - protein, 708 aa, unidentified
  REGION 1..708: note = Category: MG55 effectors
  REGION 1..708: note = Description: MG55-140 effector
  source 1..708: note = uncultivated organism sequence
MKVIKRDGSTADFDSSKIIVAIQKANQVVEPEDRIDQERIEAIAHYVESKNRMRLLVEDIQDMVEHQLMDEGKFNLAKSYIIYRYTRALVRKANTTDESILSLIRNSNKDVMEENSNKNAVMASTQRDLIAGEVSKDLTRRLILPEKISKAHDEGAIHFHDADYFVQPIFNCCLINVGDMLDNGTVMNGKLIESPKSFQVACTVMTQIIASVASSQYGGQSVDIRHLGKYLRRSYEKFKLTIKAEVGDSVADEVVERLTKRRLQDELRSGVQTIQYQINTLMTTNGQSPFVTIFLNLQADDEYLEENAMIVEEILRQRLEGIKNDKGVFVTPAFPKLVYVLDEHNCLKGGKYDYITKLAVKCSAKRLYPDYISAKKMRENYEGNVFAPMGCRSFLAAWKDDEGNYKFEGRFNQGVVSLNLPQVAILAHGDEEKFWPLLDERLHLCYEALMCRHNSLKGIRSDVSPVHWQYGAIARLEKGEVIDKYLEKGYSTISLGYIGLYEMTKLMKDVSHTTPEGEEFALRVMKYLRAACDKWKKETGLGFALYGTPAESLCYRFARIDKERFGTIADVTDKGYYTNSYHVDVREDIDAFSKFNFESQFQRISSGGAISYVEIPNMRHNLEAMEDVVRFIYDNIQYAEFNTKSDYCHVCGFDGEIIINDDLEWECPNCGNKNQTLMNVTRRTCGYLGENFWNVGKTKEIKSRVLHL

SEQ ID NO: 566 - protein, 724 aa, unidentified
  REGION 1..724: note = Category: MG55 effectors
  REGION 1..724: note = Description: MG55-141 effector
  source 1..724: note = uncultivated organism sequence
MKIIKRNGAEENFDISKIIMAVTKANAAVEESARMTPRQIQRIAESVELACQELGRSAAVEEIQDMVEKQIMAHGAFEVAKAYITYRYTRSLVRRANTTDDRILSLIECNNEEAKQENSNKNPIVNSTQRDYMAGEVSRDITNRILLPKDIVEAHEEGIIHFHDADYYAQHMHNCDLVNLEDMLQNGTVITGTLIERPHSFSTACNIATQIIAQVASNQYGGQSISLTHLAPFVQVSRERIRREVAAEMQAIDAHPGEEKLAELVENRVREEIRRGVQTIQYQVVTLLTTNGQAPFVTVFMYLGEAKNEQERHDLAMIIEETLRQRYQGVKNEKGVWVTPAFPKLIYVLEEDNIHEDSPYWYLTELAARCTAKRMVPDYISEKKMLELKVDKNGEGHCYTCMGCRSFLTPYVDENGKPKYYGRFNQGVVTINLPDVALSSGGNMEKFWQIFDERLELCHRALMCRHERLKGTLSDAAPILWQYGALARLKKGEPIDKLLYGGYSTISLGYAGLYECVKYMTGKSHTDPSATPFALEVMQHMNDACKHWKQMHNIDFSLYGTPLESTTYKFAKCLQQRFGIIPGVTDKGYITNSYHIHVTENIDAFSKLAFESKFQALSPGGAISYVEVPNMQNNIPAVLEVMKFIYDNIMYAELNTKSDYCQVCGFDGEIEIVEHDGKLIWRCPNCGNTDQDKMNVARRTCGYIGTQFWNQGRTQEIKERVLHL

SEQ ID NO: 567 - protein, 1005 aa, unidentified
  REGION 1..1005: note = Category: MG55 effectors
  REGION 1..1005: note = Description: MG55-142 effector
  source 1..1005: note = uncultivated organism sequence
MSEIKLQQKAAYTLGIDVGSTTVKTVILDADHHVLHSTYQRHFSKVKEAVSEQLQAIIKEHPATLFSVHMTGSAGLGLATAAKIPFVQEVHAAFLAVKERYPEADAVIELGGEDAKIIFLTGGVEQRMNGSCAGGTGAFIDQMATLLDVTVDELDQMALQADRTYPIAARCGVFAKSDIQPLLNQGAKRENVAASIYQAVVDQTVSGLAQGRKIQGYVLFLGGPLSFLQGLRNAFMQTLHLDAEHAIFPVDGRTFVAYGCALAAENSADKPVTGEALLKQIESAETNHTVIADKPLFGYQEEYDRFRERHAQNDVVHGDLHTYQGNAYLGVDAGSTTTKVALIGEDNSLLYSFYETNKGQPLECVKRALETLYQKKNPNLKICGSAVTGYGEEMLKAGLGIDFGIVETVAHFRAAAFFCPDVDFIIDIGGQDIKCFQIKNGAIDSIMLNEACSSGCGSFIQAFANALGYDVAEFAKLGLFAERPVDLGSRCTVFMNSSVKQAQKDGATVADISAGLSGSIVKNAIYKVIRAKSPEDLGKHIVVQGGTFLNDAVLRCFEREMGRDVIRPAISGLMGAFGAAIYAKEHTSGSSTLLSLMDLHTLTYRTQNTTCNGCTAHCNLQILRFSNGKRFIAGNRCERGAGVSKKDQIPNLVDWKYETLRSLTDRQPEQPKATVGLPMALHYYDQLPLWHTFFTDLGFAVKLSEESTRKTYYKGQSTIPSDTVCYPAKLAHGHIESLLEQNVDFIFYPCMTYNLDEGDSDNHYNCPVVAYYPELLLANNEKLNEQNFLHPFLDLNRRKHLITVLYACLSDYATKKEIAAALEHGFAALEQYHNQIAQTAQEIVRQARAAGKTILVLAGRPYHIDPEINHGIHKLISSLGMAVITEDSIAGLAHTPELQALNQWTYHSRMYRAAQYVTTQPDFQLVQLVSFGCGIDAITTDEVRRILEQSGKLYTQLKIDEISNLGAAKIRLRSLKAAIGADVPPKPTAAPSEVAPKNEKEPVSV

SEQ ID NO: 568 - protein, 972 aa, unidentified
  REGION 1..972: note = Category: MG55 effectors
  REGION 1..972: note = Description: MG55-143 effector
  source 1..972: note = uncultivated organism sequence
MQIGLDIGSTTIKIAVLDDAGQLQFSKYERHYSQIAEKMQQLLAELHVKMPLLKTARLAISGSAGIGIADSCGLQFVQEVFAEKVCTERLNPGTEAVIELGGEDAKLLFLGRHFDARMNDSCAGGTGAFIDQMASLLSVPTEAMNELAQQASTRYTIASRCGVFAKSDIQPLLNQGAAKADLAASIFDAVASQAVTGLAKGRPITGKVLYLGGPLTFMSELRHSFDKILKIEGYCPENSLYYVAMGAAFCAENKVDLTELPAKLAAVGAQRDFDHLEPLFASTAEYDEFMERHSKERIEPGDISAATEAYIGMDAGSTTIKIAVISPSGQLLDSSYQSNKGNPVIAIKEYLQNFYIKYPHCRILGSAVTGYGEDLIRNGFSVDYGIVETMAHFIAAKTLQPDVDFILDIGGQDIKCLKIHNGCIDNIFLNEACSSGCGSFLQTFAEILGYSAEEFARIGLFADKPVDLGSRCTVFMNSSVKQAQKDGATVANISAGLSLSIVKNALYKVIRPGSKESIGKHIVVQGGTFLNDCVLRAFEKEMGLKVVRPNIAGLMGAYGAAIYARSRHQETGHASTLADAAALENFVHEVKAVTCGLCSNHCHLTVNTFASGKRFISGNRCERPVTHCAPDDTFNLYRQKLQLLENLKGVPGKRGKIGLPMGLNMYELLPFWHAFFTRLGFEVITSPIYDKTIFQKGQNTIPSDTVCYPAKLMHGHIKWLLENGINTIFYPCMTYNVDENSAENCYNCPVVAYYPEVLHANMHDLDNATYIFDYLGLGHKKVLLKKLQQICKEHFPDIGSSELKAALQEAYAAYNKFEAQVKELGQTIINTARSQHKPIVVLAGRPYHIDPKVNHSIDRLITTMGAALVSEDAVSSHVSMQELNDDLQVLNQWTYHSRLYAAAKYVSRSSDMYMVHLVSFGCGCDAITADECRRILEEHGQIYTQIKIDDIDNLGAAKIRLRSLFAAAGLES

SEQ ID NO: 569 - protein, 720 aa, unidentified
  REGION 1..720: note = Category: MG55 effectors
  REGION 1..720: note = Description: MG55-144 effector
  source 1..720: note = uncultivated organism sequence
MKIIKRSGTEAVFDISKIIIAINKANHEVVEAERLTADQIKEIAQYIEDSCKDANHALNVEDIQDLVEDQLMDKRAFSVARKYITYRYKRALVRKSNSTDEQILSLIECNNEEVKQENSNKDSTVNSVQRDYMAGEVSKDITRRFLLPEDIVEAHEQGIIHFHDADYFAQHMHNCDLVNLEDMLQNGTVISGTRIDKPHSFSTACNIATQIIAQVASSQYGGQSISLAHLVPFVQISREKIHAELVQTLKESDVELSEEKINSIVERRLHAEIERGVQVIQYQVVTLMTTNGQSPFVTVFMYLNEAKNEQEKKDLAMIIEEVLDQRYQGVKNEDGVWITPAFPKLIYVLEEDNIHEDSEYYYLTKKAAKCTAKRMVPDYISEKKMKELKDGNCYTCMGCRSFLTVYHDEDGKPKFYGRFNQGVVTLNLVDLACSSGGDFEKFWKLFDERLDLCYRALMARHNRLKGTPSDVAPILWQYGALARLKKGETIDKLLYGGYSTISLGYAGLCECTRYMTGKPHTDPAATPFALKVMQRLNDACKEWKEKENIDFSVYGTPLESTTYKFAKCLQKRFGVIPGVTDKNYITNSYHVHVTENIDAFTKLKFESQFQALSPGGAISYVEVPNMQDNLEAVLSVMKFIYENIMYAELNTKSDYCQVCGYDGEIQIVKDDDGKLVWECPHCHNRDQDKMNVARRTCGYIGSQFWNQGRTQEIKERVLHL

SEQ ID NO: 570 - protein, 1416 aa, unidentified
  REGION 1..1416: note = Category: MG55 effectors
  REGION 1..1416: note = Description: MG55-145 effector
  source 1..1416: note = uncultivated organism sequence
MKLDFNTLGIDIGSTTVKIAILNKDGEIIFSDYQRHYANIQETLAKIIDEAYEEFGDIPVSPMITGSGGLTLSKHMEIPFVQEVVAVATSLKDYAPRTDVAIELGGEDAKIIYFTGGIDQRMNGICAGGTGSFIDQMATLLKTDAAGLNEYAKNYKAIYPIAARCGVFAKTDIQPLINEGATKEDLSASIFQAVVNQTISGLACGKPIKGNVAFLGGPLHFLTELKQAFIRTLGLEGDAIIAPEHSHLFAASGAAMNAHADVQSSLGELKEKLSHKIELEFEVTRMEPLFASEKEYEDFTERHNKHNVRKGDFASYKGDLFLGIDAGSTTTKVAVIGDDGSLLYSFYSSNNGSPLKTALKAMKDIYSKMPEGARIVRSCSTGYGEALLKSALLLDEGEVETVAHYTAAAFFDPNVDCILDIGGQDMKCIKIKNNSVDKVQLNEACSSGCGSFIETFAKSLNYEVADFAKIALFAENPIDLGSRCTVFMNSKVKQAQKEGASVADISAGLAYSVIKNALLKVIKLTDPKDLGKQVVVQGGTFYNDAVLRSFERISGCEAIRPDIAGIMGAFGAALIAKDRYTGQKSTMLSFKEINELRFKTSMTRCQGCINHCLLTVNEFTGDRKFISGNRCEKGLGLEKNKEQIPNLFEYKNERVFRHYKPLKKADAPRGVVGIPRVLNMYENYPFWFTFFTKLGYSVKLSPVSSRKIYELGIESIPSESECYPAKLAHGHVTWLIRQGLEYIFYPCIPYERVEVPDAGNHYNCPIVTSYGENIKNNIEELRDDKIKYQNPFISLESEEILTKRLVDFFRKENGIPAAEIKAAAHEGWLEMQAVREDMTKKGKEVLQYLKETGRHGIVLAGRPYHSDPEINHGIPDLITSYGVAVLTEDSISELSEVDRPTIVMDQWMYHSRLYKAASFVAKNDNLDLIQLNSFGCGLDAVTTDQVNDILTKQNKIYTVLKIDEVNNLGAARIRIRSLLAAVKDRERKKIEAKRVDTAHHRVIFTEQMRKDYTILVPDMSPIHFEILESALASCGYKVEVLKADSKCIDYGLKYVNNDACYPSLIVVGQFMQALLSGKYDLHKVALIITQTGGGCRATNYIGFIRRALEKAGMGYIPVISMSAGIEKNPGLKVNLEMANKALQALIYGDVFMRVLYKTRPYEKVKGSANALHEKWKKIAIESVKKANKKQFKKNIQNIVKEFDELELVDIKKPKVGIVGEILVKFMPLANNFIVELLEEEGAEAVCPDLIDFFMYSLYNANFKAEYLGKKKSSAKINNFLIWFIERYRKCANDALAASKRFHPTVPIQKLAEYASPIVSCGNQTGEGWFLTGEMIELIKSGVPNIVCTQPFGCLPNHVVGKGVIKELRHQYPDSNIVAVDYDPGASEVNQLNRIKLMLSTAGKNLIAESKDNEETA

SEQ ID NO: 571 - protein, 1439 aa, unidentified
  REGION 1..1439: note = Category: MG55 effectors
  REGION 1..1439: note = Description: MG55-146 effector
  source 1..1439: note = uncultivated organism sequence
MIKTLHVGLDVGSTTVKIIVMDENLNTIYTDYKRHFSDTKNTICNVLENLIIMYPDTEFTIALTGSGAISAAKFLDLPFIQEVVSCKRAVEKYIPETDVVIELGGEDAKIIYFDKFIEQRMNGTCAGGTGAFIDQMASLLNTDPTGLNELAKSHKLIYPIASRCGVFAKTDIQPLLNEGAAKEDIAASIFQAVVNQTISGLACGRPIRGNVAFLGGPLNYLSELRNRFIETLNLKDNEIIVPNEAHLLVAKGAALDSLNSHTITIEKLKSKIEVLKSSHDDTSNPLNPLFSIDAEYDEFKKRHEKDKVKRADFKTFKGNCFLGIDAGSTTTKLVVISEDGTLLYSLYGSNEGNPLQSVINMLKKLYAEKPSEAIIRFSGVTGYGEKLIQTALNVDLNEIETIAHYTAAKEFMPNVTSIVDIGGQDMKYIKMKNGAIDNIMLNEACSSGCGSFIETFAKSLGLSIQDFVQSALEARRPVDLGSRCTVFMNSKIKQAQKEGYSVGDISAGLSYSVIKNAIQKVMKVRDVKKLGAHIVVQGGTFYNDAVLRAFELIVGRNVVRPDIAGLMGAYGVALLAKEQYENNLDMDYVSSISNINELDKLEINITHIRCQGCENHCLLTINKFSNGTKYISGNRCEKGAGIVDKTLDRPNLIKYKFERTFNYTPLEEKNAPRGTIGIPRVLNMYEDYPFWFTFLTNLGFRVILSEKSNRKTYEKGMESMPSESVCFPAKLSHGHIIGLINSGIKTIFYPCIPYSRKEYQKADNHYNCPIVISYSEVLKNNVEELKDKNIKFLNPFLPFEPDKLAEIIMNLPEFKEYNFTKKELLSAAKKAETEYQNYKSDIHNKGQETLKFMEENNLKGIVLAGRPYHVDPEVNHGIDTLITSLGLCVLTEDSISNLTEAKRPLRVVDQWVFHARLYAAADFVGKHDNLELVQLNSFGCGVDAVTTDQVEEILTSYEKMYTLIKIDEINNLGAIRIRIRSLLASMNKRIKDNNSSMCNGNYEVNKKIFTKEMRKDYTILMPQMAPIHFEFLESAMKNSGYKMELLKDCTQHTVETGLKYVNNDACYPSILVTGQMIEALESGKYDLNKTALIMSQTGGGCRATNYIGFIRKALKDAGFENVPVISFNVVGMEKMPGFKLTIPLIERLIKSCIYADLLQKMLTKNRAYEINKGKTKELFDYWMEKCKKLVNKSSIKEFKQSIFDIVSDFEKIEIDTSVIKPKVGIVGEVLIKYHPFGNNFVADKLEQEGAEVILPDFMGFIKFIATHKITFNKLIKTDAIKAKLFKTAIKLIDLLEKPVISALNNSKKGYLLPCNIWDLEEKVNDILSIGNQTGEGWFLTAEMIEYIEHDIPNIVCVQPFACLPNHVVGKGVIKTIRSKFPEANIAPIDYDPGASEANQTNRIKLMMTVAKDNLKNKNNINKAIKKENYIIDEKNKISN

SEQ ID NO: 572 - protein, 727 aa, unidentified
  REGION 1..727: note = Category: MG55 effectors
  REGION 1..727: note = Description: MG55-147 effector
  source 1..727: note = uncultivated organism sequence
MKVIKRDGHMVDYCPEKIEQAIMKANNEVEEEDQASSTQIKNIIKYIEKLGKKRILVEDIQDIIEMKLMSQGKYELAKHYITYRYTRELVRRSNTTDQSIKELIDGESEYWNTENSNKNAKVVTTQRDYLAGITSTDITRRFLLPEDIVEAHDAGIIHFHDADYFAQNALHNCDLVNLEDMLQNGTSINGVMIEKPHRFLTAMTIATQIITAVSSSQYGGVTITLTHLAPFVRESYNRYLDKYKKRKLSKEQCEKFAMEDTKKEIVDGVQTFQYQVNSMTTTNGQAPFLSVCMYLGETTEYKEELSWIIEEFLKQRILGMKNEQGVYITPAFPKLLYVLEEDNINKNGKYYYLTKLAAECTAKRMVPDYISEKIMKELKIDKNGNGNCYPCMGCRSFLTPYVDENGKPKYYGRFNQGVVTINLVDAALSSDKDMDTFWQIFEERLELCHKALQIRHKRLSKATSDVAPILWQHGALARLKKGESIHELLHNGYSTISLGYAGLYECVKYMTGHSHTDNGKGKEFALEVMEKMNAKCKEWKEVENIDYSVYGTPIESTTYKFAKCLKDRFGVVKGITDRDYITNSYHVPVFEEIDAFTKLKLESEFQKLSPGGAISYIETPNLCNNLDAVMEVITFIYNNIMYAELNTKSDYCQECGYTGEILIDDNMEWYCPNCGNRDHNKLNVARRTCGYIGTNFWNKGRTQEIKERVLHIDNKEEKDTKKDKEEK

SEQ ID NO: 573 - protein, 720 aa, unidentified
  REGION 1..720: note = Category: MG55 effectors
  REGION 1..720: note = Description: MG55-148 effector
  source 1..720: note = uncultivated organism sequence
MFFVKENGTIVVFDKNKIKKAIVSAMKDGGIYLPDIARLISIDTEKYFLKEGGDQNVVTREQVDKYIFDRLIHYGQSLTAKSYEDFKVLRKYQKQTMDSDESILSLIGGNNEELQMENSNKAPSLAPTQRDLIAGEISKSIARRKMIPAHLIHAHDEGLIHIHDLDYFIQSINNCCLINLKDMLDNGTVINETLIETPHSFRTAATITTQIVAQVASCQYGGQTFSTSHLAPYVRKSYDNYIKEVASELYDCSFGNIDSEIFKENVEKIARKRLKKEIADGVQTIQYQLNTLMTTNGQSPFLSIAMWINEDPEYEKENAMIIEEILKQRITGVKDKEGHYISPAFPKLLYFLDDNNAYEGSKYFYLTELAAKCSAKRLVPDYISVKAMKENIGEVFPCMGCRSFLSPWYDENGKNKAYGRFNMGVVSLNLVDVGLSANGDLDLFWDILDERLNLCYEALMLRINKLKGTTTETAPILWEHGAFARLPKGSKIDSLLENGYATVSLGYHGLYECVYSLIEESHTSEAGQELALEIMKKLKDTCDKWKKETGYGFGLYGTPAESLTYRFARTTKNRFGVIPHVTDKLYLTNSYHVHVTEPIDAFSKLKFESQFQKLSSGGCISYVEVPNMNDNIPAVIQLIQFIYENIQYAEINTKSDLCENCGYEGEILINPDTLDWYCPNCGCTDHSKLHVTRRVCGYIGSNFFNRGKTQEINERVVHLD

SEQ ID NO: 574 - protein, 727 aa, unidentified
  REGION 1..727: note = Category: MG55 effectors
  REGION 1..727: note = Description: MG55-149 effector
  source 1..727: note = uncultivated organism sequence
MKVIKRDGHMVDYCPEKIEQAIMKANNEVEEEDQASSTQIKNIIKYIEKLGKKRILVEDIQDIIEMKLMSQGKYELAKHYITYRYTRELVRRSNTTDQSIKELIDGESEYWNTENSNKNAKVVTTQRDYLAGITSTDITRRFLLPEDIVEAHDAGIIHFHDADYFAQNALHNCDLVNLEDMLQNGTSINGVMIEKPHRFLTAMTIATQIITAVSSSQYGGVTITLTHLAPFVRESYNRYLDKYKNRKLSKEQCEKFAMEDTKKEIVDGVQTFQYQVNSMTTTNGQAPFLSVCMYLGETTEYKEELSWIIEEFLKQRILGMKNEQGVYITPAFPKLLYVLEEDNINKNGKYYYLTKLAAECTAKRMVPDYISEKIMKELKIDKNGNGNCYPCMGCRSFLTPYVDENGKPKYYGRFNQGVVTINLVDAALSSDKDMDTFWQIFEERLELCHKALQIRHKRLSKATSDVAPILWQHGALARLKKGESIHELLHNGYSTISLGYAGLYECVKYMTGHSHTDNGKGKEFALEVMEKMNAKCKEWKEVENIDYSVYGTPIESTTYKFAKCLKDRFGVVKGITDRDYITNSYHVPVFEEIDAFTKLKLESEFQKLSPGGAISYIETPNLSNNLDAVLEVITFIYNNIMYAELNTKSDYCQECGYTGEILIDDNMEWYCPNCGNRDHNKLNVARRTCGYIGTNFWNKGRTQEIKERVLHIDNKEEKDTKKDKEEK

SEQ ID NO: 575 - protein, 983 aa, unidentified
  REGION 1..983: note = Category: MG55 effectors
  REGION 1..983: note = Description: MG55-150 effector
  source 1..983: note = uncultivated organism sequence
MALRIGIDIGSTTVKVVVLDAQNKLLFRSYERHYSKTRERTCETLRGLRGLLGGQQVQLLITGSAGLGVAKAAGLDFVQEVYATAAAVREFIPGTDAVIELGGEDAKIIFFGNTLEERMNGSCAGGTGAFIDQMATLLNVSVDELDELSLRHEKIYPIASRCGVFAKSDIQPILNQGGRKEDVAASIFQAVVDQTVAGLTQGRELKGTIVFLGGPLHFLAGLRQRFVETLHLDQDHAIFPEDGDCFAAIGAALCTEDSQPRPFEELLDLLEHAATVSTPVDTMDPLFTSQADYEAFSARHQAMAVPTVDLATYTGPAYLGIDAGSTTTKMVLIDPDCNLLYSFYHSNQGNPVSIVLPQLREIYAQCGDRVTIQGAAVTGYGEDLIKNAFSCDLGLVETVAHLNAARHFTPDVDFIIDIGGQDMKCFKIRNGAVDSILLNEACSSGCGSFIETFAKALGYTIADFSKMGLFARHPVNLGSRCTVFMNSSVKQAQKDGASVEDISAGLSISVVKNAIYKVIRAASADDLGQHIVVQGGTFLNDAVLRSFELEIGREVTRPTISGMMGAYGAALAAKDAGLTRSALLSAEALAAFTHEARPATCKLCTNHCSLTINRFDGGRKFISGNRCSRPLGQEKVDIPDLLKFKYQYLRSLQGKGEGDGSRGKIGIPFGLNMYENLPFWFTLFTTLNFEVVLSPESTRSLYLKGQQTIPSDTVCYPAKLLHGHIMALLEEGIDTIFYPCMSYNFDEHLSDNHYNCPVVAYYPDLLGVNIPALEDIKYLHPNLGLHRPKDFEKKGAQLLETEFGIPKRASVKAIRKAYAAYEDFRRLVQKKGEEYISFARETGRKILVVAGRPYHMDPEINHGINDLITSFGFVLITEDAVFQHMDKQPRRVLNQWTYHARMYNAARYVCTQPDMAFIQLVSFGCGVDAITTDELRSILEEAGELYTQLKIDDISNLGAVKIRIRSLMAALDARDARNQKGGQ

SEQ ID NO: 576 - protein, 972 aa, unidentified
  REGION 1..972: note = Category: MG55 effectors
  REGION 1..972: note = Description: MG55-151 effector
  source 1..972: note = uncultivated organism sequence
MQIGLDIGSTTIKIAVLDDAGKLQFAKYERHYSQIAEKMQQLLAELHAKMPLLRTARLAISGSAGIGIAENCGLQFVQEVFAEKICTERLNPGTEAVIELGGEDAKLLFLGRHFDARMNDSCAGGTGAFIDQMASLLNVATEDMNELARQASTRYTIASRCGVFAKSDIQPLLNQGAAKADLAASIFDAVASQAVTGLAKGRPITGSILYLGGPLTFMSELRHSFDKILKITGVCPENSLYYVAMGAAFCAENKVDLTELPAKLAAAGAHRDFDHLEPLFKNKAEYEEFIARHSRERIEPGDIAAAAEAYIGIDAGSTTIKIAVISPDGQLLDSFYQSNKGNPVIAVKEYLQSFYQKYPGCRLLGSAVTGYGEDLIRNGFGVDYGIVETMAHFIAAKTLQPDVDFILDIGGQDIKCLKIHNGCIDNIFLNEACSSGCGSFLQTFAEILGYSAEEFAHIGLSADKPVNLGSRCTVFMNSSVKQAQKDGASVANISAGLSLSIVKNALYKVIRPGSKEAIGKHIVVQGGTFLNDCVLRAFEKEMGLEVVRPNIAGLMGAYGAALYARQRQQETGRVSSLADAKALKDFFHEVKAVTCGLCSNHCHLTVNTFASGKRFISGNRCERPVTHCAPDDTFNLYRQKLQLLEKLRGVPGKRGKIGLPMGLNMYELLPFWHAFFTSLGFEVVTSPINDKTIYQKGQNTIPSDTVCYPAKLMHGHIKWLLEHDITTIFYPCMTYNVDENSAENCYNCPVVAYYPEVLHANMHDLDNATYIFDYLGLTHKKVLLKKLQQIFRDKFPDVRGSEIKSALEEAFTAYHQFENKVKELGQTIINSARAEHKPIVVLAGRPYHIDPKVNHSIDRLITTMGAALVSEDAVSSHISMKELNEDLQVLNQWTYHSRLYAAAKYVSQSSDLYMVQLVSFGCGCDAITADECRRILEENGHIYTQIKIDDIDNLGAAKIRLRSLFAAEGLES

SEQ ID NO: 577 - protein, 708 aa, unidentified
  REGION 1..708: note = Category: MG55 effectors
  REGION 1..708: note = Description: MG55-152 effector
  source 1..708: note = uncultivated organism sequence
MQVIKRDGRAVTYDRNKIMVAIRKANAEVEPCEKISDEKIEEIVEGIEAKHRKRMLVEDIQDIIEQKLMEDGKFVLAKTYIIYRYSRELIRKANTTDDSILSLIQNRNKDVMEENSNKNATVASTQRDLIAGEVSKDLTKRMLLPEKISKAHEEGAIHFHDADYFLQPIFNCCLINIGDMLDNGTVMNGKLIESPKSFQVACTIVTQIIASVASSQYGGQSVDIRHLGKYLRKSHDKYQKKISAAVGDTIDQETIDTLVRERVNDELRSGVQTIQYQINTLMTTNGQSPFVTLFLNLDENDEYVEENAMIIEEILRQRIEGIKNEVGVYVTPAFPKLIYVLDEHNCLKGGKYDYLTKLAIKCSAKRMYPDYISAKKMRENYEGNVFSCMGCRSFLSPWKDENGNYKWEGRFNQGVVSLNLPQIAILSKGNEDKFWSLLDERLQLCYDALMCRHRALEGVTSDVSPVHWQYGAIARLKKGEVIDPLLHNGYSTISLGYIGVYEMTKLMTGVSHTDPKGEEFALKVMKHLRAACDKWKADTGLGFGLYGTPAESLCYRFARIDKERFGTIKDVTDKGYYTNSYHVDVREKIDAFSKFRFESQFQNISSGGAISYVEIPNMRNNLDALAEVVRYIYDNIQYAEFNTKSDYCHVCGYDGEIIINNEGEWECPQCGNKDHAKMNVTRRTCGYLGENFWNVGKTKELGARVLHL

SEQ ID NO: 578 - protein, 803 aa, unidentified
  REGION 1..803: note = Category: MG55 effectors
  REGION 1..803: note = Description: MG55-153 effector
  source 1..803: note = uncultivated organism sequence
MENNNQQTEKNNMEETKMHEEEIVTIAFIPEEEGRHVIKRNGQEVDFSIEKPIACIQKANATVPAVKQLSEVQILAIAESVKNKVFAHKHATSVEEIQDWIELGLMEMRGYEVAQSYTHYRAAKAEKRKTNTIDDKVIALIGNQNEEDKQENANKDPEINSTQRDYIAGHVSKDLTFRTILPDFNSFKELSPKGKEIIKKGDGEKIVTANAEGLIHFHDADYFIQPMTNCCLINADDMLQNGTMISGVKIDKPRSFLTAANVLTQIIAQVASSQYGGQTFTLSHLAPFVDVSRKKLTKEVIAEREELGESLDEDIIKKIVERRLRKEIKQGIQTIQYQLITLMTTNGQSPFVTMFLYINEVPDGQIKDDLIMLIEEVFEQRIKGVKNSSGVYVSPTFPKLIYVLDEDNIEEGSKYYHVTELAAKTSAKRLVPDYISAKIMKEQRNGDVYPCMGCRSFLTVDDGTTNAGNKAKALNYEEGAHQYYGRFNQGVVTINLVDVACTSGGNLEEFWKVFDERLELCHKALRLRHERLLGTKSDVAPILWQHGAYARLERGEVIDPLLYGNYSTLSLGYAGLYECVFRMLEKSHTTEEGRELGLKIMQYMSDKCTAWKKDEDISYSLYGTPLESTTYKFAKALQKRFGIIPEVTDRNYITNSYHINVRENIDAFSKIEQESSFQHLSPGGSISYVEVPNMQNNISAVVAILQCIYDNITYAEINTKSDYCHVCHYEGEAVLVDNGSGKLVWECPNCKNQDARKMTVVRRVCGYLGEAARGMNQGRLGDIHDRVLHVSQRIDPMSKKTIS

SEQ ID NO: 579 - protein, 724 aa, unidentified
  REGION 1..724: note = Category: MG55 effectors
  REGION 1..724: note = Description: MG55-154 effector
  source 1..724: note = uncultivated organism sequence
MKIIKRNGAEVAFDIEKIINAIKKANDEVTESSNRLTDEQIVDIAEKVSALAGDLKRAVSVEEIQDFVENQLMDQKAFVVARKYITYRYTRALVRQSNTTDAQILTLIECNNEEVKQENSNKNPTVNSVQRDYMAGEVSKDLTRRVLLPHDIVEAHDEGIIHFHDADYFAQHMHNCDLVNLEDMLQNGTVISGTFIEKPHSFSTACNIATQIIAQVASNQYGGQSISLTHLAPFVDISRQKIRSEVAEELSQVGISDEEHIARIAEKRLRDEIKKGIQTIQYQVVTLLTTNGQAPFVTVFMYLGEARNERERDDLAMIIEETLNQRIQGVKNEAGVWVTPAFPKLIYVLEEDNIREGSRYWYLTELSARCTAKRMVPDYISEKKMLEFKVDKNGEGHCYTCMGCRSFLTPYVDENGKPKYYGRFNQGVVTINLVDVALSSHGDMEAFWKIFDERLELCHRALMERHKRLKGTLSDAAPILWQYGALARLKKGETIDKLLYGGYSTISLGYAGLYECTKYMTGKSHTDAQAKPFALSVMQHMNDMCKKWKQEHNIDFSLYGTPLESTTYKFAKCLQKRFGIIEGVTDKNYITNSYHVHVSEPIDAFTKLKFESEFQQLSPGGAISYVEVPNMQGNIPAVLAVMQYIYDNIMYAELNTKSDYCQVCGYDGEIAIVEEDGKLLWECPHCHNRDQSKMNVARRTCGYIGTQYWNQGRTQEIRDRVLHL

SEQ ID NO: 580 - protein, 971 aa, unidentified
  REGION 1..971: note = Category: MG55 effectors
  REGION 1..971: note = Description: MG55-155 effector
  source 1..971: note = uncultivated organism sequence
MRIGLDIGSTTVKCVVLDEKNELVYKTYERHYSQITQKIADILNTVRKEVPGSDSALVALSGSAGMGVADSCGLDFIQEVYATRVAANTFIPGTDVIIELGGEDAKILFLSGGMEVRMNGSCAGGTGAFIDQMATLLNVPLEEMNDLAAQHEKTYTIASRCGVFAKTDIQPLLNQGARKSDVAESIFAAVVNQTVAGLAQGREITGKVVYLGGPLTFMPRLRLRFDKVLHTEGVCPENSLYYVAAGAALCAEKVIDFNAVVKKVEHYSGSGNFAFNPPLFESKADYEQFKERHEMAYVPKKEIKDYKGRVYIGMDAGSTTVKSVVMGENGELLYSKYLPNSGNPVPIIKQFLEELYELCPEIDIASSAVTGYGEEIIKNAFCADFGIVETVAHFTAAKSFMPQVEFVIDIGGQDIKCFKIHNGTIDNIFLNEACSSGCGSFLQTFANALGYSIEDFSKLGLLAKQPVDLGSRCTVFMNSSVKQAQKDGATIEDISAGLSISVVKNALYKVIRASSPKELGSHIVVQGGTFLNDAVLRAFEREMGVEVVRPTIAGLMGAYGAALYAKSRCKGGKSTLLDREALKTFTHEIQVVNCGLCSNNCRLTVNKFSDGRRFIGGNRCERPITKKTPDKTLDIYDYKLELLQSYKPKPGPRGKIGIPMGLNMYELLPFWHSFFTALGFEVVYSPVSDKKLYARGQQTIPSDTVCYPAKLMHGHVQALIDDGVQTVFYPCLSYNLDEGLGDNHYNCPVVAYYPEVISANMKDVKNITFIKDYLGIHRHKDFPVKAHEMLCKYFDGITLKEVKAAAKAAYSEYGEYFKKVRARGETIMEQAEKEGREIIVLSGRPYHVDPEINKGIDKLITSFHCAIISEDVVSCRVKKFRTSVLNQWTYHSRLYAAAKYIAGRDDMNLVQLVSFGCGVDAITTDEVREILESEGKIYTQIKIDEITNLGAVKIRIRSLLAAIAEQREDRK

SEQ ID NO: 581 - protein, 716 aa, unidentified
  REGION 1..716: note = Category: MG55 effectors
  REGION 1..716: note = Description: MG55-156 effector
  source 1..716: note = uncultivated organism sequence
MICTVIKRDGSLVPYDRSKISNAIYMANREVVESNRATDIEISQIIEEVEEKYRKEGIVQVEEIQDIIERNLISMHYELGKRFMVYRHTHSMMRRATQTNESVLAICRNENEEVGRENSNKNAVLCSTQRDLIAGEISKELTFDLLLPGKIAKAHREGAIHFHDADYFIQSMFNCCLVDIGDMLRNGTVMNGKLIEPPKSFQVACTVTTQIIASVSSNQYGGQSINLRHLAPFVEVSRKKITEKLSSFGLNGKQLKDAVDYELKKEIAAGCQTIQYQVNTLMTTNGQSPFVTLFMELHEDIENGETIADEAMIYEEILSQRLQGIKNENGVYITPPFPKLIYVLDDCNCLKGGDYDYLTELAIKCTAKRMYPDYISAKKMRENYDGNVFSCMGCRSFLSPWKDENGKYKWEGRFNQGVVSLNLPQIAILSCQTGKPDFNTFWSILDERCSIAFEALLCRHKHLIGTNADVSPIHFRHGAIARLASGEKIDKLLKDGYSTLSLGYIGIYETVKLMTGFSHTKEGVPKEFAIQIMEYLRSKCDSWKKITGLGFGLYGTPAESLCYRFAKIDKERFGNIKDVTDKGYYTNSYHVDVREHISAFEKLSFESEFQKISSGGAISYVEIPNMEHNLDALAEVVKFGYENIQYFEFNTKSDNCLVCGYSGEILLDDKCEWYCPNCGNRDHNKMSVVRRTCGYLGERFWNRGKTAEIKDRVTHL

SEQ ID NO: 582 - protein, 971 aa, unidentified
  REGION 1..971: note = Category: MG55 effectors
  REGION 1..971: note = Description: MG55-157 effector
  source 1..971: note = uncultivated organism sequence
MRIGLDIGSTTVKCVVLDEKNELVYKTYERHYSQITQKIADILNTVRKEVPGSDSALVALSGSAGMGVADSCGLDFIQEVYATRVAANTFIPGTDVIIELGGEDAKILFLSGGMEVRMNGSCAGGTGAFIDQMATLLNVPLEEMNDLAAQHEKTYTIASRCGVFAKTDIQPLLNQGARKSDVAESIFAAVVNQTVAGLAQGREITGKVVYLGGPLTFMPRLRLRFDKVLHTEGVCPENSLYYVAAGAALCAEKVIDFNAVVKKVEHYSGSGNFAFNPPLFESKADYEQFKERHEMAYVPKKEIKDYKGRVYIGMDAGSTTVKSVVMGENGELLYSKYLPNSGNPVPIIKQFLEELYELCPEIDIASSAVTGYGEEIIKNAFCADFGIVETVAHFTAAKSFMPQVEFVIDIGGQDIKCFKIHNGTIDNIFLNEACSSGCGSFLQTFANALGYSIEDFSKLGLLAKQPVDLGSRCTVFMNSSVKQAQKDGATIEDISAGLSISVVKNALYKVIRASSPKELGSHIVVQGGTFLNDAVLRAFEREMGVEVVRPTIAGLMGAYGAALYAKSRCKGGKSTLLDREALKTFTHEIQVVNCGLCSNNCRLTVNKFSDGRRFIGGNRCERPITKKTPDKTLDIYDYKLELLQSYKPKPGPRGKIGIPMGLNMYELLPFWHSFFTALGFEVVYSPVSDKKLYARGQQTIPSDTVCYPAKLMHGHVQALIDDGVQTVFYPCLSYNLDEGLGDNHYNCPVVAYYPEVISANMKDVKNITFIKDYLGIHRHKDFPVKAHEMLCKYFDGITLKEVKAAAKAAYSEYGEYFKKVRTRGETIMEQAEKEGREIIVLSGRPYHVDPEINKGIDKLITSFHCAIISEDVVSCRVKKFRTSVLNQWTYHSRLYAAAKYIAGRDDMNLVQLVSFGCGVDAITTDEVREILESEGKIYTQIKIDEITNLGAVKIRIRSLLAAIAEQREDRK

SEQ ID NO: 583 - protein, 983 aa, unidentified
  REGION 1..983: note = Category: MG55 effectors
  REGION 1..983: note = Description: MG55-158 effector
  source 1..983: note = uncultivated organism sequence
MALRIGIDIGSTTVKVVVLDAQNKLLFRSYERHYSKTRERTCETLRGLRGLLGGQQVQLLITGSAGLGVAKAAGLDFVQEVYATAAAVREFIPGTDAVIELGGEDAKIIFFGNTLEERMNGSCAGGTGAFIDQMATLLNVSVDELDELSLRHEKIYPIASRCGVFAKSDIQPILNQGGRKEDVAASIFQAVVDQTVAGLTQGRELKGTIVFLGGPLHFLAGLRQRFVETLHLDQDHAIFPEDGDCFAAIGAALCTEDSQPRPFEELLDLLEHAATVSTPVDTMDPLFTSQADYEAFSARHQAMAVPTVDLATYTGPAYLGIDAGSTTTKMVLIDPDCNLLYSFYHSNQGNPVSIVLPQLREIYAQCGGRVTIQGAAVTGYGEDLIKNAFSCDLGLVETVAHLNAARHFTPDVDFIIDIGGQDMKCFKIRNGAVDSILLNEACSSGCGSFIETFAKALGYTIADFSKMGLFARHPVNLGSRCTVFMNSSVKQAQKDGASVEDISAGLSISVVKNAIYKVIRAASADDLGQHIVVQGGTFLNDAVLRSFELEIGREVTRPTISGMMGAYGAALAAKDAGLTQSTLLSAEALASFTHEARPATCKLCTNHCSLTINRFDGGRKFISGNRCSRPLGQEKVDIPDLLKFKYQYLRSLQGKGEGDGSRGKIGIPFGLNMYENLPFWFTLFTTLNFEVVLSPESTRSLYLKGQQTIPSDTVCYPAKLLHGHIMALLEEGIDTIFYPCMSYNFDEHLSDNHYNCPVVAYYPDLLGVNIPALEDIKYLHPNLGLHRPKDFEKKGAQLLETEFGIPKRASVKAIRKAYAAYEDFRRLVQKKGEEYISFARETGRKILVVAGRPYHMDPEINHGINDLITSFGFVLITEDAVFQHMDKQPRRVLNQWTYHARMYNAARYVCTQPDMAFIQLVSFGCGVDAITTDELRSILEEAGELYTQLKIDDISNLGAVKIRIRSLMAALDARDAQNQKGGQ

SEQ ID NO: 584 - protein, 1409 aa, unidentified
  REGION 1..1409: note = Category: MG55 effectors
  REGION 1..1409: note = Description: MG55-159 effector
  source 1..1409: note = uncultivated organism sequence
MREFHIGMDVGSTTIKIVCLDEKDNIIYSIYQRHLSNVRETTKKMFDDFLEHMKNNFGEDIKYKISITGSSGMGISSWIGIDFVQEVIACIKSIETLIPETDVAIELGGEDAKITFLKNDMDQRMNGSCAGGTGAFIDQIATLLDTDASGLNELAKGFDSIYPIAARCGVFAKTDIQPLINEGVRKENIAVSVFQAVVNQTITGLACGKKITGKVAFLGGPLFFLSELRNRFIDTLKLAPEDVVFPENSQLFVAQGAAFLSKENDAVFSYEDLKTKVERLNEKDTSDTSRLQPLFETEDELNEFLERHEKEKIETRDLNTYEGNAYLGIDAGSTTIKVVLISEEKEILFSHYSHNKGNPLDNIIATLKELYSKMNKNIIIKGSCVTGYGETLIKAALRVDIGIVETMAHYKGSQFFQPDVDFILDIGGQDMKCLKIQDGIITSILLNEACSSGCGSFLETFAHSLGMDILEFSRLGMESKSPADLGTRCTVFMNSKVKQAQKDGVEVADISAGLSYSVVKNTLFKVIKIKNKDELGKNIVVQGGTFLNNSVLRAFELVSERSVIRPNVAGLMGAFGAALIAMEQAGESSSIMTLDELNNFSCTTNLTRCKLCNNHCLLTIHKFKNGENFISGNRCDNPLGKMKKNTAPNMFDYKYNRLFNYTPLEPSKAVRGEIGIPRVLNFYDSYPFWFTLLTNLGFRVIISDDSSKKLYEKGIDTISSDSICYPAKLVHGHIVDLIEKGVKRIFYPCVIFEEKEDEKSSNQFNCPIVMSYPEVINNNMDILKEKHIDLILPFFSFESKEILYKTVFEEFERFGISKSEAKIAVDAAWEEKYNFRKDMRNKALEIIADLEKTGKTGVVLCGRPYHCDKEIHHGIPNIINSFGIAVLTGDAVASLASLDEELRVIDQWTYHSRLYRAAAYVGKSKCLELIELNSFSCGIDAVTTDQVEEILANYGKVHTLLKIDEISNLGAVKIRIRSLLAALDYKKNALRSSIKKKIEYKRAQFTKKMKKEYTILAPQMAPMHFKLLKTAFKAEGYNLEVLDETQEALDCGLQYVNNDACYPSILVIGELIAALKSGKYDLDKTAVMISQTGGSCRATNYLGFLKKAIKDSGFEKIPILSLNASGFEKQEGFSITLPFAHKCLIAVSYGDILMKLLYHVRPYEKIKGSAFELYEKWNEKVKENIYNGKFSQFKNNINAIVNDFSKIEVSDEKKIRVGIVGEILVKFSPFANNNLADFIEAEGGEVYTSSLMSFVKYCIYSDIFITERFKGKIAAMKLKAALWIIDQYTKVLNNALQKNPRFGHEDSIQDLAKKTSQYISIGNQSGEGWFLMGEMIEFIEKDVPNIVCVQPFGCLPNHITGKGMIKKLRSEYSNVNIAPIDYDPAYSEVNQLNRIKLMLSVARKNLKNS

SEQ ID NO: 585 - protein, 983 aa, unidentified
  REGION 1..983: note = Category: MG55 effectors
  REGION 1..983: note = Description: MG55-160 effector
  source 1..983: note = uncultivated organism sequence
MALRIGIDIGSTTVKVVVLDAQNKLLFRSYERHYSKTRERTCETLRGLRGLLGGQQVQLLITGSAGLGVAKAAGLDFVQEVYATAAAVREFIPGTDAVIELGGEDAKIIFFGNTLEERMNGSCAGGTGAFIDQMATLLNVSVDELDELSLRHEKIYPIASRCGVFAKSDIQPILNQGGRKEDVAASIFQAVVDQTVAGLTQGRELKGTIVFLGGPLHFLAGLRQRFVETLHLDQDHAIFPEDGDCFAAIGAALCTEDSQPRPFEELLDLLEHAATVSTPVDTMDPLFTSQADYEAFSARHQAMAVPTVDLATYTGPAYLGIDAGSTTTKMVLIDPDCNLLYSFYHSNQGNPVSIVLPQLREIYAQCGGRVTIQGAAVTGYGEDLIKNAFSCDLGLVETVAHLNAARHFTPDVDFIIDIGGQDMKCFKIRNGAVDSILLNEACSSGCGSFIETFAKALGYTIADFSKMGLFARHPVNLGSRCTVFMNSSVKQAQKDGASVEDISAGLSISVVKNAIYKVIRAASADDLGQHIVVQGGTFLNDAVLRSFELEIGREVTRPTISGMMGAYGAALAAKDAGLTQSTLLSAEALASFTHEARPATCKLCTNHCSLTINRFDGGRKFISGNRCSRPLGQEKVDIPDLLKFKYQYLRSLQGKGEGDGSRGKIGIPFGLNMYENLPFWFTLFTTLNFEVVLSPESTRSLYLKGQQTIPSDTVCYPAKLLHGHIMALLEEGIDTIFYPCMSYNFDEHLSDNHYNCPVVAYYPDLLGVNIPALEDIKYLHPNLGLHRPKDFEKKGAQLLETEFGIPKRASVKAIRKAYAAYEDFRRLVQKKGEEYISFARETGRKILVVAGRPYHMDPEINHGINDLITSFGFVLITEDAVFQHMDKQPRRVLNQWTYHARMYNAARYVCTQPDMAFIQLVSFGCGVDAITTDELRSILEEAGELYTQLKIDDISNLGAVKIRIRSLMAALDARDARNQKGGQ

SEQ ID NO: 586 - protein, 731 aa, unidentified
  REGION 1..731: note = Category: MG55 effectors
  REGION 1..731: note = Description: MG55-161 effector
  source 1..731: note = uncultivated organism sequence
MAAAIEVNTRVIKRNGQEVTFDITKIINAIKKANVEVSGIYQLNEYQINAIADKIARKVSDAPHAVNVEDIQDMVEKGIMEMRGYEVAQKYVRYRYKRELSRKSNTTDNGILALINQENEEVKQENSNKNPVINSTQRDYMAGEVSKDLTKRILLPEDIVKAHEEGIIHFHDSDYYAQKEHNCDLINLEDMLQNGTVISQTMIEKPHSFFTACNVTTQIVAQVASNQYGGQSFTLSHLAPFVDVSRQKIRKSVIEERKECGEALDDAIIDKIVASRLQEEIRSGIQTIQYQLITLMTCNGQAPFVTMFMYLDEVPEGRTRDDLAMVIEEALKQRMQGVKNEKGVWITPAFPKIIYVLDEDNIYPDSKYYYLTELAAKCTAKRMVPDYISAKKMKEYKNGDVYPCMGCRSFLTPDTEGLGPNGQHKYYGRFNQGVVTINLVDVACSAHGDMDQFWKIFDERLELCHRALRCRHERLLGTPSDVAPILWQYGALARLKKGEKIDKLLYNNYSTISLGYAGLYEMCMRMLGVSHTDPKGKEFALKVMQHMDDKCAEWRKAENISYSLYGTPMESTTYKFAKCLQKRFGIIKNVTDHNYITNSYHVNVREKIDAFTKLKFEADFQKLSPGGAISYVEVPNMQQNIPAVLAVMRYIYDNIMYAELNTKSDYCEVCGYDGEIKIVEDKSGKLVWECPNCGNRDQSKMSVARRTCGYIGTQFWNQGRTQEIKDRVLHL

SEQ ID NO: 587 - protein, 1416 aa, unidentified
  REGION 1..1416: note = Category: MG55 effectors
  REGION 1..1416: note = Description: MG55-162 effector
  source 1..1416: note = uncultivated organism sequence
MKLDFNTLGIDIGSTTVKIAILNKDGEIIFSDYQRHYANIQETLAKIIDEAYEEFGDIPVSPMITGSGGLTLSKHMEIPFVQEVVAVATSLKDYAPRTDVAIELGGEDAKIIYFTGGIDQRMNGICAGGTGSFIDQMATLLKTDAAGLNEYAKNYKAIYPIAARCGVFAKTDIQPLINEGATKEDLSASIFQAVVNQTISGLACGKPIKGNVAFLGGPLHFLTELKQAFIRTLGLEGDAIIAPEHSHLFAASGAAMNAHADVQSSLGELKEKLSHKIELEFEVTRMEPLFASEKEYEDFTERHNKHNVRKGDFASYKGDLFLGIDAGSTTTKVAVIGDDGSLLYSFYSSNNGSPLKTALKAMKDIYSKMPEGARIVRSCSTGYGEALLKSALLLDEGEVETVAHYTAAAFFDPNVDCILDIGGQDMKCIKIKNNSVDKVQLNEACSSGCGSFIETFAKSLNYEVADFAKIALFAENPIDLGSRCTVFMNSKVKQAQKEGASVADISAGLAYSVIKNALLKVIKLTDPKDLGKQVVVQGGTFYNDAVLRSFERISGCEAIRPDIAGIMGAFGAALIAKDRYTGQKSTMLSFKEINELRFKTSMTRCQGCINHCLLTVNEFTGDRRFISGNRCEKGLGLEKNKEQIPNLFEYKNERVFRHYKPLKKADAPRGVVGIPRVLNMYENYPFWFTFFTKLGYSVKLSPVSSRKIYELGIESIPSESECYPAKLAHGHVTWLIRQGLEYIFYPCIPYERVEVPDAGNHYNCPIVTSYGENIKNNIEELRDDKIKYQNPFISLESEEILTKRLVDFFRKENGIPAAEIKAAAHEGWLEMQAVREDMNKKGKEVLQYLKETGRHGIVLAGRPYHSDPEINHGIPDLITSYGVAVLTEDSISELSEVDRPTIVMDQWMYHSRLYKAASFVAKNDNLDLIQLNSFGCGLDAVTTDQVSDILTKQNKIYTVLKIDEVNNLGAARIRIRSLLAAVKDRERKKIEAKRVDTAHHRVIFTEQMRKDYTILVPDMSPIHFEILESALASCGYNVEVLKADSKCIDYGLKYVNNDACYPSLIVVGQFMQALLSGKYDLHKVALIITQTGGGCRATNYIGFIRRALEKAGMGYIPVISMSAGIEKNPGLKVNLEMANKALQALIYGDVFMRVLYKTRPYEKVKGSANALHEKWKKIAIESVKKANKKQFKKNIQNIVKEFDELELVDIKKPKVGIVGEILVKFMPLANNFIVELLEEEGAEAVCPDLIDFFMYSLYNANFKAEYLGKKKSSAKINNFLIWFIERYRKCANDALAASKRFHPTVPIQKLAEYASPIVSCGNQTGEGWFLTGEMIELIKSGVPNIVCTQPFGCLPNHVVGKGVIKELRHQYPDSNIVAVDYDPGASEVNQLNRIKLMLSTAGKNLIAESKDNEETA

SEQ ID NO: 588 - protein, 1416 aa, unidentified
  REGION 1..1416: note = Category: MG55 effectors
  REGION 1..1416: note = Description: MG55-163 effector
  source 1..1416: note = uncultivated organism sequence
MKLDFNTLGIDIGSTTVKIAILNKDGEIIFSDYQRHYANIQETLAKIIDEAYEEFGDIPVSPMITGSGGLTLSKHMEIPFVQEVVAVATSLKDYAPRTDVAIELGGEDAKIIYFTGGIDQRMNGICAGGTGSFIDQMATLLKTDAAGLNEYAKNYKAIYPIAARCGVFAKTDIQPLINEGATKEDLSASIFQAVVNQTISGLACGKPIKGNVAFLGGPLHFLTELKQAFIRTLGLEGDAIIAPEHSHLFAASGAAMNAHADVQSSLGELKEKLSHKIELEFEVTRMEPLFASEKEYEDFTERHNKHNVKKGDFASYKGDLFLGIDAGSTTTKVAVIGDDGSLLYSFYSSNNGSPLKTALKAMKDIYSKMPEGARIVRSCSTGYGEALLKSALLLDEGEVETVAHYTAAAFFDPNVDCILDIGGQDMKCIKIKNNSVDKVQLNEACSSGCGSFIETFAKSLNYEVADFAKIALFAENPIDLGSRCTVFMNSKVKQAQKEGASVADISAGLAYSVIKNALLKVIKLTDPKDLGKQVVVQGGTFYNDAVLRSFERISGCEAIRPDIAGIMGAFGAALIAKDRYTGQKSTMLSFKEINELRFKTSMTRCQGCINHCLLTVNEFTGDRKFISGNRCEKGLGLEKNKEHIPNLFEYKNERVFKHYKPLKKADAPRGVVGIPRVLNMYENYPFWFTFFTKLGYSVKLSPVSSRKIYELGIESIPSESECYPAKLAHGHVTWLIRQGLEYIFYPCIPYERVEVPDAGNHYNCPIVTSYGENIKNNIEELRDDKIKYQNPFISLESEEILTKRLVDFFRKENGIPAAEIKAAAHEGWLEMQAVREDMNKKGKEVLQYLKETGRHGIVLAGRPYHSDPEINHGIPDLITSYGVAVLTEDSISELSEVDRPTIVMDQWMYHSRLYKAASFVAKNDNLDLIQLNSFGCGLDAVTTDQVSDILTKQNKIYTVLKIDEVNNLGAARIRIRSLLAAVKDRERKKIEAKRVDTAHHRVIFTEQMRKDYTILVPDMSPIHFEILESALASCGYNVEVLKADSKCIDYGLKYVNNDACYPSLIVVGQFMQALLSGKYDLHKVALIITQTGGGCRATNYIGFIRRALEKAGMGYIPVISMSAGIEKNPGLKVNLEMANKALQALIYGDVFMRVLYKTRPYEKVKGSANALHEKWKKIAIESVKKANKKQFKKNIQNIVKEFDELELVDIKKPKVGIVGEILVKFMPLANNFIVELLEEEGAEAVCPDLIDFFMYSLYNANFKAEYLGKKKSSAKINNFLIWFIERYRKCANDALAASKRFHPTVPIQKLAEYASPIVSCGNQTGEGWFLTGEMIELIKSGVPNIVCTQPFGCLPNHVVGKGVIKELRHQYPDSNIVAVDYDPGASEVNQLNRIKLMLSTAGKNLIAESKDNEETA

SEQ ID NO: 589 - protein, 979 aa, unidentified
  REGION 1..979: note = Category: MG55 effectors
  REGION 1..979: note = Description: MG55-164 effector
  source 1..979: note = uncultivated organism sequence
MSLRIGIDIGSTTVKVVVLDEQNKLLFRSYERHYSKTRERACETLRSISDMLAGRQVKMVITGSAGLGVANASGIDFVQEVYATAAAVNTYIPGTDAVIELGGEDAKIIFFGGALEERMNGSCAGGTGAFIDQMATLMNVSVDELDALSLKHEKIYPIASRCGVFAKSDIQPILNQGGRKEDVAASIFQAVVDQTVAGLTQGRELKGKIVFLGGPLHFLMGLRERFVETLKLDEEHAIFPEDGDCFAAMGAALCSSDYDTILFEDALKKLEESVDTTTLVDTMPPLFQDVAEYGAFCARHNAKRPPEVDIKTYEGPAWLGIDAGSTTTKLALITGDGGLLYTYYHSNLGNPVAIVLEQLREIYAQCGDRIEIRGVAVTGYGEDLIKNAFSCDLGLVETMAHYKAAAHFEPDVDFIIDIGGQDMKCFKIRNGAVDSIMLNEACSSGCGSFIETFAKALGYTIADFAKLGLFAQKPVNLGSRCTVFMNSSVKQAQKDGASVEEISAGLSISIVKNAIYKVIRAASADDLGKHIVVQGGTFLNDAVLRAFEQELGRDVTRPTISGIMGAFGAALAARDLHLEKSAVLTAQALEKFTHTAKPATCGLCTNHCALTVNTFDGGRRFVSGNRCSRPLGEEPTHLPDLMRYKYAKLRALQGKGQGDGSRGRIGIPFGLNMYENLPFWFELFTRLNFEVVLSPESSRKLYVKGQRTIPSDTVCYPAKLLHGHMEALVEQGVDAIFYPCMPYNFNEGVSDNNYNCPVVAYYPELLAANVPELKKTRYLYPYFGLHRPKDFEKHAAKWFEEEFGVPRKETVAAARAAYGAYDAYKNDLRATAQQYIAQARAEGRPILVVAGRPYHMDPEINHGINDLITNYGFILITEDAVAYLEDKAPRHVLNQWTYHARMYNAARYVCTQPDMELIQLVSFGCGIDAITGDEMRSILEEGGKLYTQLKIDDISNLGAVKIRIRSLMAAIEARKQSEE

SEQ ID NO: 590 - protein, 1439 aa, unidentified
  REGION 1..1439: note = Category: MG55 effectors
  REGION 1..1439: note = Description: MG55-165 effector
  source 1..1439: note = uncultivated organism sequence
MIKTLHVGLDVGSTTVKIIVMDENLNTIYTDYKRHFSDTKNTICNVLENLIIMYPNTEFTIALTGSGAISAAKFLDLPFIQEVVSCKRAVEKYIPETDVVIELGGEDAKIIYFDKFIEQRMNGTCAGGTGAFIDQMASLLNTDPTGLNELAKSHKLIYPIASRCGVFAKTDIQPLLNEGAAKEDIAASIFQAVVNQTISGLACGRPIRGNVAFLGGPLNYLSELRNRFIETLNLKDNEIIVPNEAHLLVAKGAALDSLNSHTITIEKLKSKIEVLKSSHDDTSNPLNPLFSIDAEYDEFKKRHEKDKVKRADFKTFKGNCFLGIDAGSTTTKLVVISEDGTLLYSLYGSNEGNPLQSVINMLKKLYAEKPSEAVIRFSGVTGYGEKLIQTALNVDLNEIETIAHYTAAKEFMPNVTSIVDIGGQDMKYIKMKNGAIDNIMLNEACSSGCGSFIETFAKSLGLSIQDFVQSALEARRPVDLGSRCTVFMNSKIKQAQKEGYSVGDISAGLSYSVIKNAIQKVMKVRDVKKLGAHIVVQGGTFYNDAVLRAFELIVGRNVVRPDIAGLMGAYGVALLAKEQYENNLDMDYVSSISNINELDKLEINITHIRCQGCENHCLLTINKFSNGAKYISGNRCEKGAGIVDKTLDRPNLIKYKFERTFNYTPLEEKNAPRGTIGIPRVLNMYEDYPFWFTFLTNLGFRVILSEKSNRKTYEKGMESMPSESVCFPAKLSHGHIIGLINSGIKTIFYPCIPYSRKEYQKADNHYNCPIVISYSEVLKNNVEELKDKNIKFLNPFLPFEPDKLAEIIMNLPEFKEYNFTKKELLSAAKKAETEYQNYKSDIHNKGQETLKFMEENNLKGIVLAGRPYHVDPEVNHGIDTLITSLGLCVLTEDSISNLTEAKRPLRVVDQWVFHARLYAAADFVGKHDNLELVQLNSFGCGVDAVTTDQVEEILTSYEKMYTLIKIDEINNLGAIRIRIRSLLASMNKRIKDNNSSMCNGNYEVNKKIFTKEMRKDYTILMPQMAPIHFEFLESAMKNSGYKMELLKDCTQHTVETGLKYVNNDACYPSILVTGQMIEALESGKYDLNKTALIMSQTGGGCRATNYIGFIRKALKDAGFENVPVISFNVVGMEKMPGFKLTIPLIERLIKSCIYADLLQKMLTKNRAYEINKGKTKELFDYWMEKCKKLVNKSSIKEFKQSIFDIVSDFEKIEIDTSVIKPKVGIVGEVLIKYHPFGNNFVADKLEQEGAEVILPDFMGFIKFIATHKITFNKLIKTDAIKAKLFKTAIKLIDLLEKPVISALNNSKKGYLLPCNIWDLEEKVNDILSIGNQTGEGWFLTAEMIEYIEHDIPNIVCVQPFACLPNHVVGKGVIKTIRSKFPEANIAPIDYDPGASEANQTNRIKLMMTVAKDNLKNKNNINKAIKKENYIIDEKNKISN

SEQ ID NO: 591 - protein, 983 aa, unidentified
  REGION 1..983: note = Category: MG55 effectors
  REGION 1..983: note = Description: MG55-166 effector
  source 1..983: note = uncultivated organism sequence
MALRIGIDIGSTTVKVVVLDAQNKLLFRSYERHYSKTRERTCETLRGLRGLLGGQQVQLLITGSAGLGVAKAAGLDFVQEVYATAAAVREFIPGTDAVIELGGEDAKIIFFGNTLEERMNGSCAGGTGSFIDQMATLLNVSVDELDELSLRHEKIYPIASRCGVFAKSDIQPILNQGGRKEDVAASIFQAVVDQTVAGLTQGRELKGTIVFLGGPLHFLAGLRQRFVETLHLDQDHAIFPEDGDCFAAIGAALCTEDSQPRPFEELLDLLEHAATVSTPVDTMDPLFTSQADYEAFSARHQAMAVPTVDLATYTGPAYLGIDAGSTTTKMVLIDPDCNLLYSFYHSNQGNPVSIVLPQLREIYAQCGGRVTIQGAAVTGYGEDLIKNAFSCDLGLVETVAHLNAARHFTPDVDFIIDIGGQDMKCFKIRNGAVDSILLNEACSSGCGSFIETFAKALGYTIADFSKMGLFARHPVNLGSRCTVFMNSSVKQAQKDGASVEDISAGLSISVVKNAIYKVIRAASADDLGQHIVVQGGTFLNDAVLRSFELEIGREVTRPTISGMMGAYGAALAAKDAGLTQSTLLSAEALASFTHEARPATCKLCTNHCSLTINRFDGGRKFISGNRCSRPLGQEKVDIPDLLKFKYQYLRSLQGKGEGDGSRGKIGIPFGLNMYENLPFWFTLFTTLNFEVVLSPESTRSLYLKGQQTIPSDTVCYPAKLLHGHIMALLEEGIDTIFYPCMSYNFDEHLSDNHYNCPVVAYYPDLLGVNIPALEDIKYLHPNLGLHRPKDFEKKGAQLLETEFGIPKRASVKAIRKAYAAYEDFRRLVQKKGEEYISFARETGRKILVVAGRPYHMDPEINHGINDLITSFGFVLITEDAVFQHMDKQPRRVLNQWTYHARMYNAARYVCTQPDMAFIQLVSFGCGVDAITTDELRSILEEAGELYTQLKIDDISNLGAVKIRIRSLMAALDARDARNQKGGQ

SEQ ID NO: 592 - protein, 747 aa, unidentified
  REGION 1..747: note = Category: MG55 effectors
  REGION 1..747: note = Description: MG55-167 effector
  source 1..747: note = uncultivated organism sequence
MEEKENVSVKINVIKRNGQEVDFDISKIVNAIRKANAEVSGIYQMNDYQINAVADNIAKKVQNSSHAVNVEDIQDMVETGIMEMRGYEVAQKYVRYRYKREISRKSNTTDNGILALINQQNEEVKQENSNKNPVINSTQRDYMAGEVSKDLTKRVLLPEDIVKAHEEGIIHFHDSDYYAQKEHNCDLINLEDMLQNGTVISETLIEKPHSFFTACNVTTQIVAQVASNQYGGQSFTLSHLAPFVDVSRKKLTKQVLEERRLTGETQDADIISKIVENRLDEEIKSGIQTIQYQLITLMTCNGQAPFVTMFMYLDEVPEGQTRDDLARIIREVLLQRMQGVKNEKGVWITPAFPKLIYVLDEDNIRPDSKYYSLTELAAKCTSRRMVPDYISAKKMKEYKNGDVYPCMGCRSFLTPDTEGLDPNGKHKYYGRFNQGVVTINLVDVACSSYGDMEAFWKIFDERLELCHRALRCRHERLLGTISDVAPILWQYGALARLGKGEKIDRLLYNNYSTISLGYAGLYEMCMRMLGVSHTDPKGKEFALQVMQHLNDKCAEWRKAENISYSLYGTPMESTTYKFAKCLQKRFGIIKDVTDHNYITNSYHVNVRENIDAFTKLRFEADFQKLSPGGAISYVEVPNMQNNIPAVLSVMQYIYDNIMYAELNTKSDYCEVCGYDGEIRIVEDENGKLVWECPNCGNRDQSKMSVARRTCGYIGTQFWNQGRTQEIKDRVLHLSNKSFGSEVSGVQS

SEQ ID NO: 593 - protein, 720 aa, unidentified
  REGION 1..720: note = Category: MG55 effectors
  REGION 1..720: note = Description: MG55-168 effector
  source 1..720: note = uncultivated organism sequence
MKIIKRSGAEAVFDISKIIIAINKANHEVVEAERLTADQIKEIAQYIEDSCKDANHALNVEDIQDLVEDQLMDKRAFSVARKYITYRYKRALVRKSNSTDEQILSLIECNNEEVKQENSNKDSTVNSVQRDYMAGEVSKDITRRFLLPEDIVEAHEQGIIHFHDADYFAQHMHNCDLVNLEDMLQNGTVISGTRIDKPHSFSTACNIATQIIAQVASSQYGGQSISLAHLVPFVQISREKIHAELVQTLKESDVELSEEKINSIVERRLHAEIERGVQVIQYQVVTLMTTNGQSPFVTVFMYLNEAKNEQEKKDLAMIIEEVLDQRYQGVKNEDGVWITPAFPKLIYVLEEDNIHEDSEYYYLTKKAAKCTAKRMVPDYISEKKMKELKDGNCYTCMGCRSFLTVYHDEAGKPKFYGRFNQGVVTLNLVDLACSSGGDFEKFWKLFDERLDLCYRALMARHNRLKGTPSDVAPILWQYGALARLKKGETIDKLLYGGYSTISLGYAGLCECTRYMTGKPHTDPAATPFALKVMQRLNDACKEWKEKENIDFSVYGTPLESTTYKFAKCLQKRFGVIPGVTDKNYITNSYHVHVTENIDAFTKLKFESQFQALSPGGAISYVEVPNMQDNLDAVLSVMKFIYENIMYAELNTKSDYCQVCGYDGEIQIVKDDDGKLVWECPHCHNRDQDKMNVARRTCGYIGSQFWNQGRTQEIKERVLHL

SEQ ID NO: 594 - protein, 1416 aa, unidentified
  REGION 1..1416: note = Category: MG55 effectors
  REGION 1..1416: note = Description: MG55-169 effector
  source 1..1416: note = uncultivated organism sequence
MKLDFNTLGIDIGSTTVKIAILNKDGEIIFSDYQRHYANIQETLAKIIDEAYEEFGDIPVSPMITGSGGLTLSKHMEIPFVQEVVAVATSLKDYAPRTDVAIELGGEDAKIIYFTGGIDQRMNGICAGGTGSFIDQMATLLKTDAAGLNEYAKNYKAIYPIAARCGVFAKTDIQPLINEGATKEDLSASIFQAVVNQTISGLACGKPIKGNVAFLGGPLHFLTELKQAFIRTLGLEGDAIIAPEHSHLFAASGAAMNAHADVQSSLGELKEKLSHKIELEFEVTRMEPLFASEKEYEDFTERHNKHNVRKGDFSSYKGDLFLGIDAGSTTTKVAVIGDDGSLLYSFYSSNNGSPLKTALKAMKDIYSKMPEGARIVRSCSTGYGEALLKSALLLDEGEVETVAHYTAAAFFDPNVDCILDIGGQDMKCIKIKNNSVDKVQLNEACSSGCGSFIETFAKSLNYEVADFAKIALFAENPIDLGSRCTVFMNSKVKQAQKEGASVADISAGLAYSVIKNALLKVIKLTDPKDLGKQVVVQGGTFYNDAVLRSFERISGCEAIRPDIAGIMGAFGAALIAKDRYTGQKSTMLSFKEINELRFKTSMTRCQGCINHCLLTVNEFTGDRKFISGNRCEKGLGLEKNKEQIPNLFEYKNERVFRHYKPLKKADAPRGVVGIPRVLNMYENYPFWFTFFTKLGYSVKLSPVSSRKIYELGIESIPSESECYPAKLAHGHVTWLIRQGLEYIFYPCIPYERVEVPDAGNHYNCPIVTSYGENIKNNIEELRDDKIKYQNPFISLESEEILTKRLVDFFRKENGIPAAEIKAAAHEGWLEMQAVREDMTKKGKEVLQYLKETGRHGIVLAGRPYHSDPEINHGIPDLITSYGVAVLTEDSISELSEVDRPTIVMDQWMYHSRLYKAASFVAKNDNLDLIQLNSFGCGLDAVTTDQVSDILTKQNKIYTVLKIDEVNNLGAARIRIRSLLAAVKDRERKKIEAKRVDTAHHRVIFTEQMRKDYTILVPDMSPIHFEILESALASCGYNVEVLKADSKCIDYGLKYVNNDACYPSLIVVGQFMQALLSGKYDLHKVALIITQTGGGCRATNYIGFIRRALEKAGMGYIPVISMSAGIEKNPGLKVNLEMANKALQALIYGDVFMRVLYKTRPYEKVKGSANALHEKWKKIAIESVKKANKKQFKKNIQNIVKEFDELELVDIKKPKVGIVGEILVKFMPLANNFIVELLEEEGAEAVCPDLIDFFMYSLYNANFKAEYLGKKKSSAKINNFLIWFIERYRKCANDALAASKRFHPTVPIQKLAEYASPIVSCGNQTGEGWFLTGEMIELIKSGVPNIVCTQPFGCLPNHVVGKGVIKELRHQYPDSNIVAVDYDPGASEVNQLNRIKLMLSTAGKNLIAESKDNEETA

SEQ ID NO: 595 - protein, 708 aa, unidentified
  REGION 1..708: note = Category: MG55 effectors
  REGION 1..708: note = Description: MG55-170 effector
  source 1..708: note = uncultivated organism sequence
MKVIKRDGSTADFDSSKIIVAIQKANQVVEPEDRIDQERIEAIAHYVESKNRMRLLVEDIQDMVEHQLMDEGKFNLAKSYIIYRYTRALVRKANTTDESILSLIRNSNKDVMEENSNKNAVMASTQRDLIAGEVSKDLTRRLILPEKISKAHDEGAIHFHDADYFVQPIFNCCLINVGDMLDNGTVMNGKLIESPKSFQVACTVMTQIIASVASSQYGGQSVDIRHLGKYLRRSYEKFKLTIKAEVGDSVADEVVERLTKRRLQDELRSGVQTIQYQINTLMTTNGQSPFVTIFLNLQADDEYLEENAMIVEEVLRQRLEGIKNDKGVFVTPAFPKLVYVLDEHNCLKGGKYDYITKLAVKCSAKRLYPDYISAKKMRENYEGNVFAPMGCRSFLAAWKDDEGNYKFEGRFNQGVVSLNLPQVAILAHGDEEKFWPLLDERLQLCYEALMCRHNSLKGIRSDVSPVHWQYGAIARLEKGEVIDKYLEKGYSTISLGYIGLYEMTKLMKDVSHTTPEGEEFALRVMKYLRAACDKWKKETGLGFALYGTPAESLCYRFARIDKERFGTIADVTDKGYYTNSYHVDVREDIDAFSKFNFESQFQRISSGGAISYVEIPNMRHNLEAMEDVVRFIYDNIQYAEFNTKSDYCHVCGFDGEIIINDDLEWECPNCGNKNQTLMNVTRRTCGYLGENFWNVGKTKEIKSRVLHL

SEQ ID NO: 596 - protein, 722 aa, unidentified
  REGION 1..722: note = Category: MG55 effectors
  REGION 1..722: note = Description: MG55-171 effector
  source 1..722: note = uncultivated organism sequence
MKIIKRNGAEVSFDVEKILNAVRKANNEVSEDNRLSEEQIEEIAKRVTALAGDLNRAVNVEEVQDFVENQIMDQKAFAVARKYITYRYTRALIRRANTTDAQILTLIECNNEEVKQENSNKNPTVNSVQRDYMAGEVSKDLTRRLLLPRDIVEAHDEGLIHFHDADYFAQHMHNCDLVNLEDMLQNGTVISGTFIEKPHSFSTACKIATQIIAQVASNQYGGQSISLTHLAPFVDISRQKIRAEVKEELADVGVMEDTIARIAEKRLREEIKKGIQTIQYQVVTLLTTNGQAPFVTVFMYLGEARNERERADLAMIIEETLNQRIQGVKNESGVWVTPAFPKLIYVLEEDNIREGSKYWYLTELAARCTAKRMVPDYISEKKMLEYKIDKNGEGHCYTCMGCRSFLTPYVDAEGKPKYYGRFNQGVVTINLVDVALSSGGDMDEFWKIFDERLELCHRALLERHNRLKGTLSDAAPILWQYGALARLKKGETIDKLLYGGYSTISLGYAGLYECTKYMTGKSHTDAAAKPFALSVMQHMNDKCKEWKGMHNIDFSLYGTPLESTTYKFAKALQKRFGINEGVTDKNYITNSYHGHVTEPIDAFTKLKFESEFQQLSPGGAISYVEVPNMQDNIPAVLSVMQYIYDNIMYAELNTKSDYCQVCGYDGEIGIVEEDGKLLWECPYCHNRDQSKMNVARRTCGYIGTQFWNQGRTQEIKDRVLHL

SEQ ID NO: 597 - protein, 1410 aa, unidentified
  REGION 1..1410: note = Category: MG55 effectors
  REGION 1..1410: note = Description: MG55-172 effector
  source 1..1410: note = uncultivated organism sequence
MKLDFNTLGIDIGSTTVKIAILNKDGEIIFSDYQRHYANIQETLAKIIDEAYEEFGDIPVSPMITGSGGLTLSKHMEIPFVQEVVAVATSLKDYAPRTDVAIELGGEDAKIIYFTGGIDQRMNGICAGGTGSFIDQMATLLKTDAAGLNEYAKNYKAIYPIAARCGVFAKTDIQPLINEGATKEDLSASIFQAVVNQTISGLACGKPIKGNVAFLGGPLHFLTELKQAFIRTLGLEGDAIIAPEHSHLFAASGAAMNAHADVQSSLGELKEKLSHKIELEFEVTRMEPLFASEKEYEDFTERHNKHNVRKGDFSSYKGDLFLGIDAGSTTTKVAVIGDDGSLLYSFYSSNNGSPLKTALKAMKDIYSKMPEGARIVRSCSTGYGEALLKSALLLDEGEVETVAHYTAAAFFDPNVDCILDIGGQDMKCIKIKNNSVDKVQLNEACSSGCGSFIETFAKSLNYEVADFAKIALFAENPIDLGSRCTVFMNSKVKQAQKEGASVADISAGLAYSVIKNALLKVIKLTDPKDLGKQVVVQGGTFYNDAVLRSFERISGCEAIRPDIAGIMGAFGAALIAKDRYTGQKSTMLSFKEINELRFKTSMTRCQGCINHCLLTVNEFTGDRKFISGNRCEKGLGLEKNKEQIPNLFEYKNERVFRHYKPLKKADAPRGVVGIPRVLNMYENYPFWFTFFTKLGYSVKLSPVSSRKIYELGIESIPSESECYPAKLAHGHVTWLIRQGLEYIFYPCIPYERVEVPDAGNHYNCPIVTSYGENIKNNIEELRDDKIKYQNPFISLESEEILTKRLVDFFRKENGIPAAEIKAAAHEGWLEMQAVREDMTKKGKEVLQYLKETGRHGIVLAGRPYHSDPEINHGIPDLITSYGVAVLTEDSISELSEVDRPTIVMDQWMYHSRLYKAASFVAKNDNLDLIQLNSFGCGLDAVTTDQVSDILTKQNKIYTVLKIDEVNNLGAARIRIRSLLAAVKDRERKKIEAKRVDTAHHRVIFTEQMRKDYTILVPDMSPIHFEILESALASCGYNVEVLKADSKCIDYGLKYVNNDACYPSLIVVGQFMQALLSGKYDLHKVALIITQTGGGCRATNYIGFIRRALEKAGMGYIPVISMSAGIEKNPGLKVNLEMANKALQALIYGDVFMRVLYKTRPYEKVKGSANALHEKWKKIAIESVKKANKKQFKKNIQNIVKEFDELELVDIKKPKVGIVGEILVKFMPLANNFIVELLEEEGAEAVCPDLIDFFMYSLYNANFKAEYLGKKKSSAKINNFLIWFIERYRKCANDALAASKRFHPTVPIQKLAEYASPIVSCGNQTGEGWFLTGEMIELIKSGVPNIVCTQPFGCLPNHVVGKGVIKELRHQYPDSNIVAVDYDPGASEVNQLNRIKLMLSTAGKNLQIENL

SEQ ID NO: 598 - protein, 708 aa, unidentified
  REGION 1..708: note = Category: MG55 effectors
  REGION 1..708: note = Description: MG55-173 effector
  source 1..708: note = uncultivated organism sequence
MKIQKRDGRIVPYEEEKIIDAIHKANQEVEEKDRADDTLIEQILEAVKAEGKKQQTVEHVQDVIEQHLVEANKYVLSKKYMVYRYQRSLLRKSNTTDESILKLIRNENKELAEENSNKNTRLASTQRDYIAGEVSRDVTRRMLLPEHISMAHDNGVLHFHDADYFIQPIFNCCLINIQDMLDNGTSINGKMIESPKSFQVACTVTTQIIAAVASNQYGGQSVNIKHLGKYLRKSKEKFTKQLEDEFGDSLDAAMKEKIVQMRLKDELKSGVQTIQYQINTLMTTNGQSPFVTLFLHIDENDEYVEETVQIIGEILRQRIEGTKNEKGVYVTPAFPKLVYVLDENNCLKGGKYDYVTRLAAKCSAKRMYPDYISAKKMRENYEGNVFSCMGCRSFLSPWKDENGNYKWEGRFNQGVVSLNLPQIGIIADGNEEVFWKLLDERLELCYEALMCRHKALLGTVSDVSPIHWQYGAIARLKKGEKIDRLLLNGYSTMSLGYIGLYELTYLMKGCSHTAPKGKEFALRVMDHLREAAARWKEETGIGFSLYGTPAETLCYRFARIDREKYGDIPNVTDKGYYTNSYHVDVREKMDAFTKFTFESEFQNKSLGGAISYVEIPNLNNNLEAIEELIRFIYDNIQYGEFNTKSDYCHVCGYDGEIIVNDDNEWECPQCHNKDHAKMNVTRRTCGYLGENFWNTGKTKEIKARVLHL

SEQ ID NO: 599 - protein, 973 aa, unidentified
  REGION 1..973: note = Category: MG55 effectors
  REGION 1..973: note = Description: MG55-174 effector
  source 1..973: note = uncultivated organism sequence
MRIGMDIGSTTIKCVVLDENDQIIYSAYERHYSHILEKTRELLTSLNDTYLKGKKAYFAISGSAGMGLADSCGVSFVQEVFADRVAANRLNPGTDCIIELGGEDAKILFLTNGTEVRMNGSCAGGTGAFIDQMATLLKMSADEMDKTAQQATRKYTIAARCGVFAKSDVQPLINQGALSSDIAASIYQAVVNQTIAGLAQGRPISGKILYLGGPLTFSKCLRDSFNETLKIEGICPENSLLYVALGAAYYADKEVVFDDVVKGLANYGKTATYASLPPLFNNVEEYNEFKKRHAKASVPRVDFDENTGPVHIGIDSGSTTIKVAVIDDHANLLFTDYQSNSGNPLPIVIDVLKGLYEQHPNLKIQSVTTTGYGEALMTHALHTDFGLVETVAHFTAAKHFMPDVDFIIDIGGQDMKCFKIENGAISDIFLNEACSSGCGSFLQTFSAALGYSVKNFAQEALFAKQPVDLGSRCTVFMNSSVKQAQKDGADFDCISAGLSISVVKNALYKVIRTSSPEQLGKKIVVQGGTFYNEAVLRAFEKEMGVDVVRPDIAGLMGAYGAALHGKEHSKPGTISSILTLEELNNFTQKVQNVQCGLCGNHCQMTVSVFQDGKRFITGNRCDRPITGKSNDDTLNLYAYKQQQLSQLMKNPGNGTRGKIGIPMVLNMYELLPFWHAFFTSLGFQVIVSPFSNRKLYQAGQGSIPSDTVCFPAKLTHGHIMALLKKDVDAIFYPCMSYNIDEGLGDNHYNCPVVAYYPEVLAGNIRELEDTKFIYEYLNLEQRKDFVRLMPKIMQKYFPDLKTADIHNAIEVAYTAYRKHMEDTRNEAQRMMTEARNEGKRIIVLAGRPYHVDPEVNHGIDKLIVQHGACVITEDSISNLVQKFDTSVLNQWSYHSRLYAAAKYCVNHADMDLVQLVSFGCGLDAVTSDETKEILQEGNKLYTQLKIDEITNLGAINIRIRSLFAALDERKEQA

SEQ ID NO: 600 - protein, 708 aa, unidentified
  REGION 1..708: note = Category: MG55 effectors
  REGION 1..708: note = Description: MG55-175 effector
  source 1..708: note = uncultivated organism sequence
MKVIKRDGSTADFDSSKIIVAIQKANQVVEPEDRIDQERIEAIAHYVESKNRMRLLVEDIQDMVEHQLMDEGKFNLAKSYIIYRYTRALVRKANTTDESILSLIRNSNKDVMEENSNKNAVMASTQRDLIAGEVSKDLTRRLILPEKISKAHDEGAIHFHDADYFVQPIFNCCLINVGDMLDNGTVMNGKLIESPKSFQVACTVMTQIIASVASSQYGGQSVDIRHLGKYLRRSYEKFKLTIKAEVGDSVADEVVERLTKRRLQDELRSGVQTIQYQINTLMTTNGQSPFVTIFLNLQADDEYLEENAMIVEEILRQRLEGIKNDKGVFVTPAFPKLVYVLDEHNCLKGGKYDYITKLAVKCSAKRLYPDYISAKKMRENYEGNVFAPMGCRSFLAAWKDDEGNYKFEGRFNQGVVSLNLPQVAILAHGDEEKFWPLLDERLQLCYEALMCRHNSLKGIRSDVSPVHWQYGAIARLEKGEVIDKYLEKGYSTISLGYIGLYEMTKLMKDVSHTTPEGEEFALRVMKYLRAACDKWKKETGLGFALYGTPAESLCYRFARIDKERFGTIANVTDKGYYTNSYHVDVREDIDAFSKFNFESQFQRISSGGAISYVEIPNMRHNLEAMEDVVRFIYDNIQYAEFNTKSDYCHVCGFDGEIIINDDLEWECPNCGNKNQTLMNVTRRTCGYLGENFWNVGKTKEIKSRVLHL

SEQ ID NO: 601 - protein, 1410 aa, unidentified
  REGION 1..1410: note = Category: MG55 effectors
  REGION 1..1410: note = Description: MG55-176 effector
  source 1..1410: note = uncultivated organism sequence
MKKFLVGIDVGSTTVKIVCLDDKFNIVYSIYQRHLSNVRETTKLLFNNFLKYMEEHYGKNVSIKLNITGSSGMGIASCIEIDFIQEVIACIKAIETVIPQTDVAIELGGEDAKITFLKNDMDQRMNGSCAGGTGAFIDQIAALLNTDATGLNEMAKNYDTIYPIAARCGVFAKTDIQPLINEGAKKGNIAVSVFQAVVNQTITGLACGKKISGKIAFLGGPLFFLSELRKRFIETLNIKDEDVIFPDNSQIFVAQGAAFAAQENKTSYILEELATKFENLTKKGNDETSRLDSLFKDKIEYDEFINRHANEKIDTVDINEYEGDAFLGIDAGSTTIKLVLISDDNKILYSFYSHNKGNPLDNIIENLKTLYKKMGDKIKIKGSCVTGYGENLIKAALQVDNGIVETIAHYKGALFFQPKVDFILDIGGQDMKCLKINDGVISSILLNEACSSGCGSFLETFANSLGMDIKEFAKLGLNSKSPADLGTRCTVFMNSKVKQAQKDGVDVGDISAGLSYSVVKNTLFKVIKIKNKEELGKYIVVQGGTFLNDCVLRAFEKIANRNVIRPNIAGLMGAFGAAIVAKERSGAKSTLLSLKELEDFSCSTNLTRCGMCTNRCLLTIHKFKSGENFISGNRCDNPINKVKKEQAPNMFEYKYNRLFNYTPLELSKAYRGEIGIPRVLNFYDSYPFWFTLLTNLGFRVVISDDSSKKLYESGIDTITSDSICYPAKLVHGHITNLVNKGIKRIFYPCVIFEEKEDKNSQNQYNCPIVMSYPEVIKNNMDILKDNNIDMMIPVFSFENTEVLYKRVSEIFARFGVSKNEAKIAVDKALEEKYRFRKDMQNKAKEIITNLETTGNIGVVLCGRPYHCDKEIHHGIPNIINSFGIAVLTGDAVASLGSLDDELRVIDQWTYHSRLYRAATVVGKHPNLELVELNSFSCGIDAVTTDQVNEILTNYGKVHTLLKIDEISNLGAIKIRIRSLLAALEYKKSSITNKIKHTIKYKKAEFTKSMKSEYTILAPQMAPMHFDLIKHAFRAQGYNLVVLPETKEALDCGLKYVNNDACYPSILVIGELISALQSGKYDLDKTAVIISQTGGSCRATNYLGFLRKAIRDAGFEKIPIISLNTAGFEKQPGFSLSLPFIHKALIAVSYGDLLMKLLYRTRPYEVNYGESDKIYKKWNQLVIPNIYNGKISQFKKNIKSIINDFSNIEITNEEKIKVGIVGEILVKFSPFANNNLAAFIEQEGGEVYTSSLMNFIKYCIYSDIYLNEKFKGKLSSIFLRSALWVLDKYTNIVNSALSENSRFSKETSIQKTAEKTSRFISIGHQSGEGWFLMGEMIEFIEEGIPNIVCVQPFGCLPNHITGKGMIKRLKEEYENVNITPIDYDPAYSEVNQLNRIKLMLSVAKKNLKKSS

SEQ ID NO: 602 - protein, 708 aa, unidentified
  REGION 1..708: note = Category: MG55 effectors
  REGION 1..708: note = Description: MG55-177 effector
  source 1..708: note = uncultivated organism sequence
MKVTKRDGRVVDYDRNKIIVAIQKANAEVDRYEQVSEEKIDAIVAGIENKHVDNLQVEDIQDMIEQKLMSEHKYALAKKYIIYRYTREMVRRANTTDDSIMSLIQNSNKDVMEENSNKNAYIASTQRDLIAGEVSKDLTKRVLLPEKIVKAHEDGVLHFHDMDYYLQSIFNCCLINIGDMFEHGTVMNGKLIESPKSFQVACTVMTQIISAVASSQYGGQSVDVRHLGKYLRMTREKYERHYEEKYGDKVPAEVRKAFADDRIADELRSGVQTIQYQINTLMTTNGQSPFVTLFLNLDKDDPYIEENAMIIEEILNQRIEGIKNEKGVYVTPAFPKLIYVLDEHNCLRGGKYDYLTRLAVKCSAKRMYPDYISAKKMRENYEGNVFSCMGCRSFLTPWKDENGNYKFEGRFNQGVVSLNLPQIGILAEGDEEKFWSLLEERLALCFEALMCRHHALEGTMSNVSPIHWQYGAIARLKPGETIDKLLHNGYSTISLGYIGLYEVTKLMTGVSHTDPKGTDFALRLMKRLRLACDTWKLETGIGFGLYGTPAESLCYRFAEIDKKRFGVIPDVTDKGYYTNSYHVDVREKIDAFEKFTFESQFQNISSGGAISYVEIPNMRHNLEALEDVVRFIYDNIQYAEFNTKSDYCHVCGFDGEIIINDDLEWECPQCHNKDRNRMNVTRRTCGYLGENFWNVGKTKEINARVLHL

SEQ ID NO: 603 - protein, 731 aa, unidentified
  REGION 1..731: note = Category: MG55 effectors
  REGION 1..731: note = Description: MG55-178 effector
  source 1..731: note = uncultivated organism sequence
MDKELLIMTNVIKRNGKEVKFDIYKIIHAMEKANKEVAPVYQMNEYQIQAAAETVAKKIQASSHAVNVEDIQDMVETAIMEMRAYEVAQKYVRYRYKREMARKANSTDEDILALIDQANEELKQENSNKNPVINSTQRDYMAGEVSKDLTRRLLLPEDIVKAHEEGVIHFHDSDYYAQKEHNCDLINLEDMLQNGTVISETMIEKPHSFFTACNVTTQIVAQVASNQYGGQSFTLSHLAPFVDISRQKIREAVIAERKETGESMDEDIIAKIVNRRLKEEIKSGIQTIQYQLITLMTCNGQAPFVTMFMYLDEVPEGKTREDLALIIEEVLHQRMQGVKNEKGVWITPAFPKLIYVLDEDNITEDAPYYHLTKLAAQCTAKRMVPDYISAKIMREYKGGDVYPCMGCRSFLTEDKEGLGENGAHKYYGRFNQGVVTINLVDVACSSEGNMDSFWQILEERLELCHKALRLRHERLLGTVSDVAPILWQHGALARLKKGEKIDKLLYNNYSTISLGYAGLYEMCVRMLGKSHTTEEGRAFSLKVMEKLNDSCKKWREEEKISYSVYGTPMESTTYKFAKALKKRFGTIPGVTDKNYITNSYHVHVSEKIDAFSKLAFEADFQKLSPGGAISYVEVPNMQNNIPAVLSLMHFIYENIMYAELNTKSDYCCACGYDGEIQIVEDSYGKLQWRCPNCGNENQDQLSVARRTCGYIGTQFWNQGRTQEIKDRVLHL

SEQ ID NO: 604 - protein, 977 aa, unidentified
  REGION 1..977: note = Category: MG55 effectors
  REGION 1..977: note = Description: MG55-179 effector
  source 1..977: note = uncultivated organism sequence
MSLRIGIDIGSTTVKVVVLDEQNKLLFRSYERHYSKTRERACETLRSISDMLAGRQVKMVITGSAGLGVANASGIDFVQEVYATAAAVNTYIPGTDAVIELGGEDAKIIFFGGALEERMNGSCAGGTGAFIDQMATLMNVSVNELDALSLKHEKIYPIASRCGVFAKSDIQPILNQGGRKEDVAASIFQAVVDQTVAGLTQGRELKGKIVFLGGPLHFLMGLRERFVETLKLDEEHAIFPEDGDCFAAMGAALCSSDYDTILFEDALKKLEESVDTTTLVDTMPPLFQDVAEYGAFCARHNAKRPPQVDIKTYEGPAWLGIDAGSTTTKLALITEDGGLLYTYYHSNLGNPVAIVLEQLREIYAQCGDRIEIRGVAVTGYGEDLIKNAFSCDLGLVETMAHYKAAAHFEPDVDFIIDIGGQDMKCFKIRNGAVDSIMLNEACSSGCGSFIETFAKALGYTIADFAKLGLFAQKPVNLGSRCTVFMNSSVKQAQKDGASVEEISAGLSISIVKNAIYKVIRAASADDLGKHIVVQGGTFLNDAVLRAFEQELGRDVTRPTISGIMGAFGAALAARDLHLEKSSLLSAQALEKFTHTAKPATCGLCTNHCALTVNTFDGGRRFVSGNRCSRPLGEEPTHLPDLMRYKYAKLRALQGKGQGDGSRGRIGIPFGLNMYENLPFWFELFTRLNFEVVLSPESSRKLYVKGQRTIPSDTVCYPAKLLHGHMEALVEQGVDAIFYPCMPYNFNEGVSDNNYNCPVVAYYPELLAANVPELKKTRYLYPYFGLHRPKDFEKHAAKWFEEEFNVPKKETVAAARAAYGAYDAYKEDLRATAQQYIAQARAEGRPILVVAGRPYHMDPEINHGINDLITNYGFILITEDAVAYLEDRAPRHVLNQWTYHARMYNAARYVCTQPDMELIQLVSFGCGIDAITGDEMRSILEEGGKLYTQLKIDDISNLGAVKIRIRSLMAAIEARKAN

SEQ ID NO: 605 - protein, 1008 aa, unidentified
  REGION 1..1008: note = Category: MG55 effectors
  REGION 1..1008: note = Description: MG55-180 effector
  source 1..1008: note = uncultivated organism sequence
MHNEIILFAPQNNIAAGCGRRARALNTAGTMAKLMGIDVGSTTVKVTVVDGGEVLYKSYERHYAQVRETVLSELEKIKEQFGGDFCASITGSAGLGLSQRSGINFVQEVQAAFVAIRNFYPDADAAVELGGEDAKIIFITGGTEQRMNGSCAGGTGAFIDQMATLLNISVQEMDELALKAEKIYPIASRCGVFAKSDIQPLINQGAKKEDISASIFQAVVDQTVSGLAQGRRIKGKVLFLGGPLYFLKGLRRAFVRTLKLSEENAVFPENAPCFMSIGAALHSAGVKPMPIDDIISAIEHAEGTDEVVTGEPLFKDRDEYAAFVKRHRATDLTFADIATYEGDAYLGIDSGSTTTKLILITPDCRIIYSHYQSNNGQPVDIIVEKLKEIYKLAGGRIHIRGSAVTGYGEDLIKAAIKADFGIVETVAHFKAALHFNPNVDFIIDIGGQDIKCFKIKNRAIDSIMLNEACSSGCGSFIQTFARAMGMEIDKFSQLGLFAPHPVELGSRCTVFMNSAVKQAQKEGSSVEDISAGLSISIVKNAIYKVIRAASADELGDNIVVQGGTFLNDAVLRAFERETGKNVIRPGIAGLMGAFGAALYAKEMSTGESTTMGGEELKNFSYKSASTVCRGCTSKCNVNIVTFADGSRYISGNKCERGAGRKPASADLDIYSYKQERLPQVITGANAGKVRVGLPLQLGMYEQLPIWAGFFESLGFEVVLSDKSSRELYFLGQHTVASDTACYPAKLIHGHIESLLDKGVDFIFMPCESYNLDEHDSVNHYNCPIVAYYPELLKANNERLNDDNFIMPYIDLNERENAVKRLCAALKKYNIKKKVAAAALKEGFARFDKYHADVRAKGAEIIKKAREQGKQIIILAGRPYHVDNEINHGINKLLTSLNLAVLSEDAVFDEADLVKVNVLNQWTYHARLYRAAEYACRHSDVNLVQLVSFGCGLDAITTDEVRSIMEKNGRLYTQIKIDEINNLGVVKIRLRSMLAAIEESKKNKPQSAN

SEQ ID NO: 606 - protein, 739 aa, unidentified
  REGION 1..739: note = Category: MG55 effectors
  REGION 1..739: note = Description: MG55-181 effector
  source 1..739: note = uncultivated organism sequence
MNIIKRDGSVVEYDADKIRTAIGKANAEVHKNEKASKEEIEEIIKYIQELNKKRMLVEDIQDIIEEKLMAYNHYQLAKAYITYRYTRSLVRQANTTDQSIKELIDGTSEYWNTENSNKNARVVTTQRDYLAGITSTDISRRFLIPKDVIEAHDEGLIHFHDMDYFAQNALHNCDLIDLEDMLQNGTCINGVMIEKPHRFITAMTIATQIITAVNSSQYGGVTITLTHLAPFVRDSYLRYVKKYEDRGFSKEDVEKYAKEDLQKEVVDGVQTFQYQINSMTTTNGQAPFLSVCMYLGETEEYKPELAMIIEEVLKQRTEGMKNEKGIYVTPAFPKLLYVLEEDNAKEGSKYFYLTKLAAKCTAKRLVPDYISEKKMKEYKIDSNGNGQCFPCMGCRSFLTPYVDPKTKKPKYYGRFNQGVVTINLPDVALSSGKDEEKFWKILDERLELCHKGLQTRYERLSHATSDVAPILWQNGALARLPKGASIKPLLHGGYSTISLGYAGLYECVKYMTGDSHTDEGKGEEFGLKVMKYLNDKCNQWKEAEDIDYSVYGTPLESTTYKFSKCLQKRFGKIEGITDRGYITNSYHVPVFEKIDAFKKLSIESKFQRLSPGGAISYIETPNLQNNLDAVMQVIQYIYDNIVYAELNTKSDYCQKCGFDGEILLDENLEWYCPNCGNKDHNTLNVARRTCGYIGTNFWNKGRTQEIKERVLHLENTDDENDKTKITKEEKKVRIANQQQ

SEQ ID NO: 607 - protein, 341 aa, unidentified
  REGION 1..341: note = Category: MG55 effectors
  REGION 1..341: note = Description: MG55-182 effector
  source 1..341: note = uncultivated organism sequence
MAATMKDIARRTGLGLATISSYFNGGNVREKNRIKIEEAIQELHYEVNEVARGLKTNATKTIGVVIPELNNTFCAEIITGMEDVLRSHGYATIVCDCRTDKRLERDAVEFLSRKRVDGIISMPVDAEGNHLKKFQKTGKPIVLIDRRIRELSCDSVLVDNEKAAEDAMRVFFQAGHRKIGIIGGPEEISTAQERLQGYRNAYEKENIPVRESLIYHGDYTIQGGVQGIEKLVADNPDMTAVFVTNYEMTMGAVIGMNELGLKIPEKLSMIGFDNLQFARACNPKLTIVAQPTQGIAGEVAGIMLKRLEGAASEETEPITEKLGAEIIMGKSVRVLDEKENL

SEQ ID NO: 608 - protein, 990 aa, unidentified
  REGION 1..990: note = Category: MG55 effectors
  REGION 1..990: note = Description: MG55-183 effector
  source 1..990: note = uncultivated organism sequence
MNVNVGIDIGSTTVKIVVVRDGEIIHKHYERHFSKVREKAVELVQNAREAIGPDATIRCAITGSAGLGVAKAADIDFVQEVFATRKAVGVHVPQADVVIELGGEDAKIVFLSGQLEERMNGSCAGGTGAFIDQMAVLLDVTPGELDELAQHAEQIYTIASRCGVFAKSDIQPLLNDGARKEDVAASIFQAVVNQTVAGLAQGREIKGDVLFLGGPLFFFKGLQKRFQETLKLDDMHAHFPALAPYAIAAGAAEYAKDTQKTYSVDSLLDALEHAAGAPVVANYLPPLFESEQQYEEFKRRHGVHDVMTQNVTMYEGDAYLGIDCGSTTTKLVLIGEDHQILFHHYQSNKGNPADVIREQLTKLYELCGDRVHIVSSAVTGYGEALIQHAFGVDFGLVETVAHFRAARHFCPDVDFIIDIGGQDIKCFKIRNKCIDNISLNEACSSGCGSFIETFARSMGYSIEEFCKLGLFAKHPIDLGSRCTVFMNSSVKQAQKDGAGIDAISAGLSVSVVKNALYKVIRAHSPDDLGQHIVVQGGTFLNDAILRSFEQEIGRDVTRPAIAGLMGAYGAALHAKDNRPAQTSLVGMDVLASFRHTVKSARCGLCENHCSLTINDFGGGRRFISGNRCERPLGGTKKADLPNLYQWKLEKLRSYGESSGKPMPNGRIGLPFGLNYYELLPFWTTFLRSLGFETVLSDVSTRDIYMQGQHSIPSDTVCYPAKLMHGHIENLLEKGVDAIFYPCMTYNLDEGRATNCYNCPVVAYYPELLHANVAALADFDFMMPYFELTDHKRFIQQAAKYFCGKYPQIKKKQVAAAAEAAFQELDNYYAEIRLEGQKAIAYADTHGLDIAVIAGRPYHVDPEINHGIDQLIASFGLVIVSEDAVWQLAEEPKVHVLNQWTYHSRMYGAAKYVTRKENAQLIQLVSFGCGIDAITTDEVRAICENGGKIYTQLKIDEISNLGAAKIRIRSMLAAVEEGRKLAEQQSNQHVG

SEQ ID NO: 609 - protein, 730 aa, unidentified
  REGION 1..730: note = Category: MG55 effectors
  REGION 1..730: note = Description: MG55-184 effector
  source 1..730: note = uncultivated organism sequence
MQVVKRDGRIVDFDKQKILAAIEKANAEVKPRERANKENIKEIVEYITGLDKKRILVEDIQDIIEEKLMEYGKYFLAKKYITYRYTRELVRKANTTDQSIKELIDGESEYWNNENSNKNARVVTTQRDYLAGITSTDITRRFLLPKDVVEAHDEGIIHFHDADYFAQNALTNCELINLDDMLQNGTIMNGVMIEKPHRFLTAMTIATQIILAVTSSTYGGATVSLTHLAPFVKSSYDRYYKKYQDRGLSEKQCKEYAEQDTKKEVSDGVQTFNYQVNSMTNTNGQAPFLSVCMYLGETKEYKKELAMIIEEFLKQRIEGFKNEKGVYITPAFPKLLYVLEEDNIVEGRPYYYLTELAAKCTAKRMVPDYISEKKMLELKIDKNGNGNCYPCMGCRSFLTPYVDEKTNKPKYYGRFNQGVVTINLVDVALSSEKDMDKFWKIFDERLELCHKALQVRHERLSKVTSDVAPILWQNGALARLKKGESIHSLLHGGYSTISLGYAGLYECVKYMTDHSHTDNGEGKDFGVQVMQKLNDKCKEWKAVEDIDYSVYGTPIESTTYKFSKCLKKRFGVIEGITDRDYITNSYHIPVFEEIDAFSKLSIESQFQQLSPGGAISYVETPNLQNNIEAVLQIIRFIYDNIMYAELNTKSDYCQECGFDGEILIDDNLEWYCPNCGNRNHDTLNVARRTCGYIGSQFWNKGRTQEIKERVLHIDNKDAEMPKREKTKAAV

SEQ ID NO: 610 - protein, 736 aa, unidentified
  REGION 1..736: note = Category: MG55 effectors
  REGION 1..736: note = Description: MG55-185 effector
  source 1..736: note = uncultivated organism sequence
MEVRTKVIKRNGSEVEFHIDKIVNAISKANHEVDEIHQMNSHQIAAIADNIAKEVSTAPHAVNVEDIQDMVETGIMEMRCYEVAQKYVRYRYKREISRKSNTTDDGILSLIDQANEEVKQENSNKNPVINSTQRDYMAGEVSKDLTKRVLLPEDIVRAHEEGIIHFHDSDYFAQREHNCDLINLEDMLQNGTVISETMIEAPHSFFTACNVTTQIVAQVASNQYGGQSFTLSHLAPFVDVSRQKIREQVIEERKECGESVDDEIVAKLVETRLDREIQNGIQTIQYQLITLMTCNGQAPFVTMFMYLDEVPEGQTRNDLAKIIREVLKQRIKGVKNEKGVWITPAFPKIIYVLDEDNVTPDSPFYDLTVLAAECTAKRMVPDYISAKIMKRDKGDVYPCMGCRSFLTPDDGTCNKENIANVGGYVAGKHKYYGRFNQGVVTINLVDVACSSDGNMERFWEILEERLELCHRALRCRHERLMGTSSDVAPILWQYGALARLKKGEPIDKLLFGNYSTISLGYAGLYEMTMRMLGVSHTDPNGEEFALKVMQKLNDKCAEWRAAENISYSLYGTPMESTTYKFAKCLQKRFGIIPNVTDHNYITNSYHINVREKIDAFSKLKFESKFQKLSPGGAISYVEVPNMQQNIPAVISVMKFIYDNIMYAELNTKSDYCEVCGYDGEIKIVEEESGKLVWECPKCGNRDQDKMSVARRTCGYIGTQFWNQGRTQEIRDRVLHL

SEQ ID NO: 611 - protein, 983 aa, unidentified
  REGION 1..983: note = Category: MG55 effectors
  REGION 1..983: note = Description: MG55-186 effector
  source 1..983: note = uncultivated organism sequence
MALRIGIDIGSTTVKVVVLDAQNKLLFRSYERHYSKTRERTCETLRGLRGLLGGQQVQLLITGSAGLGVAKAAGLDFVQEVYATAAAVREFIPGTDAVIELGGEDAKIIFFGNTLEERMNGSCAGGTGAFIDQMATLLNVSVDELDELSLRHEKIYPIASRCGVFAKSDIQPILNQGGRKEDVAASIFQAVVDQTVAGLTQGRELKGTIVFLGGPLHFLAGLRQRFVETLHLDQDHAIFPEDGDCFAAIGAALCTEDSQPRPFEELLDLLEHAATVSTPVDTMDPLFTSQADYEAFSARHQAMAVPTVDLATYTGPAYLGIDAGSTTTKMVLIDPDCNLLYSFYHSNQGNPVSIVLPQLREIYAQCGDRVTIQGAAVTGYGEDLIKNAFSCDLGLVETVAHLNAARHFTPDVDFIIDIGGQDMKCFKIRNGAVDSILLNEACSSGCGSFIETFAKALGYTIADFSKMGLFARHPVNLGSRCTVFMNSSVKQAQKDGASVEDISAGLSISVVKNAIYKVIRAASADDLGQHIVVQGGTFLNDAVLRSFELEIGREVTRPTISGMMGAYGAALAAKDAGLTQSTLLSAEALASFTHEARPATCKLCTNHCSLTINRFDGGRKFISGNRCSRPLGQEKVDIPDLLKFKYQYLRSLQGKGEGDGSRGKIGIPFGLNMYENLPFWFTLFTTLNFEVVLSPESTRSLYLKGQQTIPSDTVCYPAKLLHGHIMALLEEGVDTIFYPCMSYNFDEHLSDNHYNCPVVAYYPDLLGVNIPALEDIKYLHPNLGLHRPKDFEKKGAQLLETEFGIPKRASVKAIRKAYAAYEDFRRLVQKKGEEYISFARETGRKILVVAGRPYHMDPEINHGINDLITSFGFVLITEDAVFQHMDKQPRRVLNQWTYHARMYNAARYVCTQPDMAFIQLVSFGCGVDAITTDELRSILEEAGELYTQLKIDDISNLGAVKIRIRSLMAALDARDAQNQKGGQ

SEQ ID NO: 612 - protein, 730 aa, unidentified
  REGION 1..730: note = Category: MG55 effectors
  REGION 1..730: note = Description: MG55-187 effector
  source 1..730: note = uncultivated organism sequence
MQVVKRDGRIVDFDKQKILAAIEKANAEVKPRERANKENIKEIVEYITGLDKKRILVEDIQDIIEEKLMEYGKYFLAKKYITYRYTRELVRKANTTDQSIKELIDGESEYWNNENSNKNARVVTTQRDYLAGITSTDITRRFLLPKDVVEAHDEGIIHFHDADYFAQNALTNCELINLDDMLQNGTIMNGVMIEKPHRFLTAMTIATQIILAVTSSTYGGATVSLTHLAPFVKSSYDRYYKKYQDRGLSEKQCKEYAEQDTKKEVSDGVQTFNYQVNSMTNTNGQAPFLSVCMYLGETKEYKKELAMIIEEFLKQRMEGFKNEKGVYITPAFPKLLYVLEEDNIVEGRPYYYLTELAAKCTAKRMVPDYISEKKMLELKIDKNGNGNCYPCMGCRSFLTPYVDEKTNKPKYYGRFNQGVVTINLVDVALSSEKDMDKFWKIFDERLELCHKALQVRHERLSKVTSDVAPILWQNGALARLKKGESIHSLLHGGYSTISLGYAGLYECVKYMTDHSHTDNGEGKDFGVQVMQKLNDKCKEWKAVEDIDYSVYGTPIESTTYKFSKCLKKRFGVIEGITDRDYITNSYHIPVFEEIDAFSKLSIESQFQQLSPGGAISYVETPNLQNNIEAVLQIIRFIYDNIMYAELNTKSDYCQECGFDGEILIDDNLEWYCPNCGNRNHDTLNVARRTCGYIGSQFWNKGRTQEIKERVLHIDNKDAEMPKREKTKAAV

SEQ ID NO: 613 - protein, 1438 aa, unidentified
  REGION 1..1438: note = Category: MG55 effectors
  REGION 1..1438: note = Description: MG55-188 effector
  source 1..1438: note = uncultivated organism sequence
MNKILHVGLDVGSTTVKIIVMDDSQNLIYENYQRHFSDTKNTVCQVLSDFANKYPDYVYTIALTGSGAMSAAKFLDLPFIQEVVACKRAVEKYIPQTDVVIELGGEDAKIIYFGKSIEQRMNGTCAGGTGAFIDQMASLLNTDAAGLNELAKNYKMIYPIASRCGVFAKTDVQPLINEGANKEDIAASIFQAVVNQTISGLACGRPIRGNIAFLGGPLNYLSELRNRFIETLNLDDNSAIIPQDAHLLVAKGAALDSVNNSAISNEKLKAKIEVLKASHDTTSTPLAPLFVTNAEYEAFKERHDKDTVPKKDLKTYKGDCFIGIDAGSTTTKLVVTDCDDNLLYSLYQSNEGNPLKSVINMLKELYKIIPQTATIRYSGVTGYGEQLIQSALNVDLNEIETIAHYTAAKRFMPNVTSIVDIGGQDMKYIKIKNGTINNIMLNEACSSGCGSFIETFAKSLNISINDFVESALDSRSPVDLGSRCTVFMNSKIKQAQKEGATVGDISAGLSYSVIKNAIQKVMKVRDISTLGDHIVVQGGTFYNNAVLRAFELIVGKDVVRPDIAGLMGAYGVAILARKQYEANLDMEYISKLSTLDEIENLQIETSHVRCGGCENHCLLTINKFNNGQKHISGNRCEKGAGITSKSKDLPNIYKYKNERLFSYKPLSEKSAIRGTIGIPRVLNMYEDYPFWFTFLTNLGFRVIISEKSTRKTYEKGMESMPSESVCYPAKLAHGHIMSLINQGIKTIFYPCIPYSRKEYKQADNHYNCPIVISYSEVLKNNVEELKNVKFLNPFLPFEPKKLAEAILSLPEFDEYHFTKKELIKAAQEAEKEYQNFKTDIRNKGQEALNYMKENNIRGIVLAGRPYHVDPEINHGIDTLITSLGLCVLSEDSISNQVTLDKKLRVVNQWVYHSRLYAAADFVGHHANLELVQLNSFGCGVDAVTTDQVEEILSSYDKMYTLIKIDEVNNLGAVRIRIRSLLASMNKRIEKNSNNSDSLGNYELQRKIFTKEMRNDYTILIPQMAPIHFELLESAVQACGYNVHLLRECTPHTVEVGLKYVNNDACYPSILTTGQMIEALESGKYDLNKTALIMSQTGGGCRATNYIGFIRKALKDAGYSDIPVISFNVVGMEKMPGFKLSPKMAEGLLKSVVYGDLLQKMLTKNRAYEKNKGVTQKKYEYWLEKCKKLVSKSSLKEFNHSIYDMVNDFEKIELDTTVEKPKVGIVGEVLIKYHPFGNNFVADKLEQEGAEVILPDFMGFIKFIATHKITFNQLIKTDSGKAKIFKFAIKLIDLLEKNEINALKNSKKGYLLPCNIFELEENVKDILSIGNQTGEGWFLTAEMVEYMQHDIPNIVCVQPFACLPNHVVGKGVIKTIRDKYPEANIAAIDYDPGASEANQTNRIKLLMAVAKDNLKIKNSKNKLLLKENNKINSKNKIYQ

SEQ ID NO: 614 - protein, 726 aa, unidentified
  REGION 1..726: note = Category: MG55 effectors
  REGION 1..726: note = Description: MG55-189 effector
  source 1..726: note = uncultivated organism sequence
MKIIKRSGSEVTFDISKIMDAVSKANMEVVHSERLSEEQIETISNNVESICKEMNRSLSVEEIQDLVENQIMNFRAFSVARKYITYRYKRALVRKSNSTDKQILSLLECNNEEVKQENSNKNPTVNSVQRDYMAGEVSKDITKRFLLPPDIVDAHEQGLIHFHDADYFAQHMHNCCLVNLEDMLQNGTVISETMIEKPHSFSTACNIATQAIAQIASSQYGGQSISLAHLAPFVQVSREKFIGQVRDEFEKTGIDASEEKIREVAELRVKDEIKRGVQMIQYQVITLMTTNGQAPFVTVFMYLDEVPEGQTRDDLALVTEEVLRQRMQGVKNEQGVYITPAFPKLIYVLEEDNIHEDSKYWYLTEIAAQCTAKRMVPDYISEKKMKELKVDANGNGQCFPCMGCRSFLTPYIDPETGKPKYYGRFNQGVVTLNLVDVACSSGKDMDKFWSILNERLDLCKRALMCRHYRLKGTPSDVAPILWQNGALARLKKGETIDKLLYGGYSTISLGYAGLCECTYYMKGVTHTNPEGTEFALKVMQYLNDTCKRWAAETNIDFSLYGTPLESTTYKFSKCLQKRFGKIAGVTDKNYITNSYHVHVTEQINAFEKLKFESQFQKLSPGGAISYVEVPDMQNNIPAVLKVMQYIYDNIMYAELNTKSDYCQECGYTGQIQIITDDDGKLIWECPNCGNRNQDKMNVARRTCGYIGTQFWNQGRTQEIKERVLHL

SEQ ID NO: 615 - protein, 708 aa, unidentified
  REGION 1..708: note = Category: MG55 effectors
  REGION 1..708: note = Description: MG55-190 effector
  source 1..708: note = uncultivated organism sequence
MKVIKRDGSTADFDSSKIIVAIQKANQVVEPEDRIDQERIEAIAHYVESKNRMRLLVEDIQDMVEHQLMDEGKFNLAKSYIIYRYTRALVRKANTTDESILSLIRNSNKDVMEENSNKNAVMASTQRDLIAGEVSKDLTRRLILPEKISKAHDEGAIHFHDADYFVQPIFNCCLINVGDMLDNGTVMNGKLIESPKSFQVACTVMTQIIASVASSQYGGQSVDIRHLGKYLRRSYEKFKLTIKAEVGDSVADEVVERLTKRRLQDELRSGVQTIQYQINTLMTTNGQSPFVTIFLNLQADDEYLEENAMIVEEILRQRLEGIKNDKGVFVTPAFPKLVYVLDEHNCLKGGKYDYITKLAVKCSAKRLYPDYISAKKMRENYEGNVFAPMGCRSFLAAWKDDEGNYKFEGRFNQGVVSLNLPQVAILAHGDEEKFWPLLDERLQLCYEALMCRHNSLKGIRSDVSPVHWQYGAIARLEKGEVIDKYLEKGYSTISLGYIGLYEMTKLMKDVSHTTPEGEEFALRVMKYLRAACDKWKKETGLGFALYGTPAESLCYRFARIDKERFGTIVDVTDKGYYTNSYHVDVREDIDAFSKFNFESQFQRISSGGAISYVEIPNMRHNLEAMEDVVRFIYDNIQYAEFNTKSDYCHVCGFDGEIIINDDLEWECPNCGNKNQTLMNVTRRTCGYLGENFWNVGKTKEIKSRVLHL

SEQ ID NO: 616 - protein, 754 aa, unidentified
  REGION 1..754: note = Category: MG55 effectors
  REGION 1..754: note = Description: MG55-191 effector
  source 1..754: note = uncultivated organism sequence
MKVIKRDGTIVDYDREKIRVAIQKANNEVSKKYRATDEEINEIIAYIEELKKSRILVEDIQDIIEEKLMSLDKYQLAKEYITYRYTRALVRKANTTDQSIKELIEGESEYWNNENSNKNAKVVTTQRDYLAGITSTDITRRFLLPEDVVKAHDEGIIHFHDADYFAQNALHNCDLINLEDMLQNGTNINGVMIEKPHKFLTAMTIATQIITAVTSSQYGGATVTMTHLAPFVRDSYNIYLKKYRDRKLPEDQVVKFAKEDLAKEISDGVQTFQYQINSMTTTNGQSPFLSVCLYLGETDEYKEELAMIIEEVLKQRILGMKNEKGVYITPAFPKLLYVLEEDNIHEDSKYWYLTKLAAKCTAKRMVPDYISEKKMLELKIDKNGNGNCYPCMGCRSFLTPYVDPKTNKPKYYGRFNQGVVTINLVDVALSSGGDFKKFWKIYDERLELCHKALQIRHERLAKATSDVAPILWQYGALARLKKGESIHQLLHGGYSTISLGYAGLYECVKYMTGHSHTDNGKGKDFGLEVMKKLNDKCKEWKAAEDIDYSVYGTPIESTTYKFAKCLQKRFGKIKGITDKNYITNSYHVPVFEEIDAFSKLKLESQFQQLSPGGAISYVETPNLQENLEVVLQLIKFIYDNIMYAELNTKSDYCQKCGYDGEILIDDNLEWYCPNCGNRDHSTLNVARRTCGYIGSNFWNKGRTQEIKERVLHIDNKDDVDDDCDCDDCKHQHEEENKEENVENKVQKNELVLTR

SEQ ID NO: 617 - protein, 978 aa, unidentified
  REGION 1..978: note = Category: MG55 effectors
  REGION 1..978: note = Description: MG55-192 effector
  source 1..978: note = uncultivated organism sequence
MAKFMGIDVGSTTVKVCVLSESLEILYTSYERHFARVKECVLGQLSVVKEKFGGDFRVCITGSAGLGLAERSGIPFVQEVQAAFTAIRQYYPDADAAVELGGEDAKIIFITGGTEQRMNGSCAGGTGAFIDQMATLLDISVSEMDALSLRAERVYPIASRCGVFAKSDIQPLLNQGARREDIAASIFQAVVDQTVAGLAQGRRIKGKVLFLGGPLYFLQGLRRAFRQTLGLDEEHAVFPENAPSFMAIGAALYAAGTDAMPLAEIVRRIRDARGSDDIVTGEPLFTDRAEYDAFVARHKAHDLAFEDIRTYRGDAYLGIDSGSTTTKLVLITPDCKLLYQHYQSNNGQPLDIVVERLREIYALSEGRVRIAGAATTGYGEDLIKAAIRADFGIVETVAHFKAALHFDPKVDFIIDIGGQDIKCFKIKNGAIDNIMLNEACSSGCGSFIQTFARAMGMEIDEFSKLGLFAKHPVELGSRCTVFMNSSVKQAQKEGAGIEDISAGLSASIVKNAIYKVIRAKTPDELGSNILVQGGTFLNDAVLRCFELETGKQVVRPGIAGLMGAFGAALYAKENVRGESTVLDAQALRTFAYTTRSHVCKGCTSHCNVNVIGFSDGRKFISGNKCEKGAGLKPHSDELDIYHYKYERLLQCAEGARGTRGKVGLPVVLGFYEQLPLWAGFFEACGFEVLFSERSSRSLYFRGQHTVASDTVCYPAKLAHGHIESLLDAGADFIFYPCESYNLDEHDSTNHYNCPVVAYYPELLKANNERLTQDNFIMPYLDLNDERTTVRALHRALKKFGLTPRLIRKGLAEGFRRLALFHADVERKGEEIAAAARAERRPIVVLAGRPYHVDPEINHGIGKLLTSLGVAVLSEDAVFRKGRQVLVNVLNQWTYHARLYRAAEYVAENEDMELVQLVSFGCGIDAITTDEVRALLESRGKLYTQIKIDEINNLGVVKIRLRSMIAAVEEQKRRNHEDR

SEQ ID NO: 618 - protein, 723 aa, unidentified
  REGION 1..723: note = Category: MG55 effectors
  REGION 1..723: note = Description: MG55-193 effector
  source 1..723: note = uncultivated organism sequence
MKIIKRSGQEVKFDINKIVEAIKKANLDANEKNQLSEEVIFKCAKNVEKECKNKGRILTVEEVQDLVEDQLMSVDAFDVARKYITYRYRRALARKANTTDQQILTLLECNNQNVKEENSNKNPTVNSVQRDYMAGEVSKDITKRILLPKDIVDAHEQGIIHFHDADYFAQHMHNCDLVNLEDMLQNGTVISGTLIEKPKSFSTACNIATQIIAQVASNQYGGQSISITHLAPFVEISRQKITKDVKEELKDLDISEEKIQEIIHKRLLDEIKKGVQTIQYQIVTLLTTNGQAPFVTIFMYLNEARSEQEKKDIALITEEILKQRYQGVKNEKGVWITPAFPKLIYCLEDDNVEPGSPYYYLTELAAKCTAKRMVPDYISEKIMLQLKVDSKGQGHCYTCMGCRSFLTPYINDKGEPQYYGRFNQGVVTINLVDVALSSNKDVKQFWKIFDERLDLCYRALMERHKRLLGTKSDVAPILWQYGALARLNKGETIDKLLFNGYSTISLGYAGLYECVYYMTGKSHTDPEATPFALEIMQHMNDACKKWKEKEHIDFSLYGTPLESTTYKFAKCLQKRFGIIKGVTDKNYITNSYHIVVSEHIDAFSKLAFESQFQKLSPGGAISYVEVPNMENNIPAVMNVIKFIYDHIMYAELNTKSDYCQCCGYTGEIQIKEDEDGKLFWECPQCGNRDQNKMNVARRTCGYIGSQFWNQGRTQEIRDRVLHL

SEQ ID NO: 619 - protein, 720 aa, unidentified
  REGION 1..720: note = Category: MG55 effectors
  REGION 1..720: note = Description: MG55-194 effector
  source 1..720: note = uncultivated organism sequence
MKIIKRSGAEAVFDISKIIIAINKANHEVVEAERLTADQIKEIAQYIEDSCKDANHALNVEDIQDLVEDQLMDKRAFSVARKYITYRYKRALVRKSNSTDEQILSLIECNNEEVKQENSNKDSTVNSVQRDYMAGEVSKDITRRFLLPEDIVEAHEQGIIHFHDADYFAQHMHNCDLVNLEDMLQNGTVISGTRIDKPHSFSTACNIATQIIAQVASSQYGGQSISLAHLVPFVQISREKIHAELVQTLKESDVELSEEKINSIVERRLHAEIERGVQVIQYQVVTLMTTNGQSPFVTVFMYLNEAKNEQEKKDLAMIIEEVLDQRYQGVKNEDGVWITPAFPKLIYVLEEDNIHEDSEYYYLTKKAAKCTAKRMVPDYISEKKMKELKDGNCYTCMGCRSFLTVYHDEDGKPKFYGRFNQGVVTLNLVDLACSSGGDFEKFWKLFDERLDLCYRALMARHNRLKGTPSDVAPILWQYGALARLKKGETIDKLLYGGYSTISLGYAGLCECTRYMTGKPHTDPAATPFALKVMQRLNDACKEWKEKENIDFSVYGTPLESTTYKFAKCLQKRFGVIPGVTDKNYITNSYHVHVTENIDAFTKLKFESQFQALSPGGAISYVEVPNMQDNLEAVLSVMKFIYENIMYAELNTKSDYCQVCGYDGEIQIVKDDDGKLVWECPHCHNRDQDKMNVARRTCGYIGSQFWNQGRTQEIKERVLHL

SEQ ID NO: 620 - protein, 720 aa, unidentified
  REGION 1..720: note = Category: MG55 effectors
  REGION 1..720: note = Description: MG55-195 effector
  source 1..720: note = uncultivated organism sequence
MKIIKRSGAEAVFDISKIIIAINKANHEVVEAERLTADQIKAIAQYIEDSCKDANHALNVEDIQDLVEDQLMDKRAFSVARKYITYRYKRALVRKSNSTDEQILSLIECNNEEVKQENSNKDSTVNSVQRDYMAGEVSKDITRRFLLPEDIVEAHEQGIIHFHDADYFAQHMHNCDLVNLEDMLQNGTVISGTRIDKPHSFSTACNIATQIIAQVASSQYGGQRISLAHLVPFVQISREKIHAELVQTLKESDVELSEEKINSIVERRLHAEIERGVQVIQYQVVTLMTTNGQSPFVTVFMYLNEAKNEQEKKDLAMIIEEVLDQRYQGVKNEDGVWITPAFPKLIYVLEEDNIHEDSEYYYLTKKAAKCTAKRMVPDYISEKKMKELKDGNCYTCMGCRSFLTVYHDEDGKPKFYGRFNQGVVTLNLVDLACSSGGDFEKFWKLFDERLDLCYRALMARHNRLKGTPSDVAPILWQYGALARLKKGETIDKLLYGGYSTISLGYAGLCECTRYMTGKPHTDPAATPFALKVMQRLNDACKEWKEKENIDFSVYGTPLESTTYKFAKCLQKRFGVIPGVTDKNYITNSYHVHVTENIDAFTKLKFESQFQALSPGGAISYVEVPNMQDNLDAVLSVMKFIYENIMYAELNTKSDYCQVCGYDGEIQIVKDDDGKLVWECPHCHNRDQDKMNVARRTCGYIGSQFWNQGRTQEIKERVLHL

SEQ ID NO: 621 - protein, 720 aa, unidentified
  REGION 1..720: note = Category: MG55 effectors
  REGION 1..720: note = Description: MG55-196 effector
  source 1..720: note = uncultivated organism sequence
MKIIKRSGAEAVFDISKIIIAINKANHEVVEAERLTADQIKAIAQYIEDSCKDANHALNVEDIQDLVEDQLMDKRAFSVARKYITYRYKRALVRKSNSTDEQILSLIECNNEEVKQENSNKDSTVNSVQRDYMAGEVSKDITRRFLLPEDIVEAHEQGIIHFHDADYFAQHMHNCDLVNLEDMLQNGTVISGTRIEKPHSFSTACNIATQIIAQVASSQYGGQSISLAHLVPFVQISREKIHAELVQTLKESDVELSEEKINSIVERRLHAEIERGVQVIQYQVVTLMTTNGQSPFVTVFMYLNEAKNEQEKKDLAMIIEEVLDQRYQGVKNEDGVWITPAFPKLIYVLEEDNIHEDSEYYYLTKKAAKCTAKRMVPDYISEKKMKELKDGNCYTCMGCRSFLTVYHDEDGKPKFYGRFNQGVVTLNLVDLACSSGGDFEKFWKLFDERLDLCYRALMARHNRLKGTPSDVAPILWQYGALARLKKGETIDKLLYGGYSTISLGYAGLCECTRYMTGKPHTDPAATPFALKVMQRLNDACKEWKEKENIDFSVYGTPLESTTYKFAKCLQKRFGVIPGVTDKNYITNSYHVHVTENIDAFTKLKFESQFQALSPGGAISYVEVPNMQDNLDAVLSVMKFIYENIMYAELNTKSDYCQVCGYDGEIQIVKDDDGKLVWECPHCHNRDQDKMNVARRTCGYIGSQFWNQGRTQEIKERVLHL

SEQ ID NO: 622 - protein, 720 aa, unidentified
  REGION 1..720: note = Category: MG55 effectors
  REGION 1..720: note = Description: MG55-197 effector
  source 1..720: note = uncultivated organism sequence
MKIIKRSGAEAVFDISKIIIAINKANHEVVEAERLTADQIKAIAQYIEDSCKDANHALNVEDIQDLVEEQLMDKRAFSVARKYITYRYKRALVRKSNSTDEQILSLIECNNEEVKQENSNKDSTVNSVQRDYMAGEVSKDITRRFLLPEDIVEAHEQGIIHFHDADYFAQHMHNCDLVNLEDMLQNGTVISGTRIDKPHSFSTACNIATQIIAQVASSQYGGQSISLAHLVPFVQISREKIHAELVQTLKESDVELSEEKINSIVERRLHAEIERGVQVIQYQVVTLMTTNGQSPFVTVFMYLNEAKNEQEKKDLAMIIEEVLDQRYQGVKNEDGVWITPAFPKLIYVLEEDNIHEDSEYYYLTKKAAKCTAKRMVPDYISEKKMKELKDGNCYTCMGCRSFLTVYHDEDGKPKFYGRFNQGVVTLNLVDLACSSGGDFEKFWKLFDERLDLCYRALMARHNRLKGTPSDVAPILWQYGALARLKKGETIDKLLYGGYSTISLGYAGLCECTRYMTGKPHTDPAATPFALKVMQRLNDACKEWKEKENIDFSVYGTPLESTTYKFAKCLQKRFGVIPGVTDKNYITNSYHVHVTENIDAFTKLKFESQFQALSPGGAISYVEVPNMQDNLDAVLSVMKFIYENIMYAELNTKSDYCQVCGYDGEIQIVKDDDGKLVWECPHCHNRDQDKMNVARRTCGYIGSQFWNQGRTQEIKERVLHL

SEQ ID NO: 623 - protein, 610 aa, unidentified
  REGION 1..610: note = Category: MG55 effectors
  REGION 1..610: note = Description: MG55-198 effector
  source 1..610: note = uncultivated organism sequence
MEENSNKNATIASTQRDLIAGEVSKDFAKRDLLPKKIVEAHENAVLHFHDMDYFLQPIFNCCLLNISDMLDNGTVINGKMIESPKSFQVACTVMTQIIAAVASGEYGGQSVKISHLAKYLANDYKKSLKKVREADGTLTAEQVEKIAKAETQEHLKSGIQTIQYQINTLMTTNGQTPFVTLFLQLDESLGYMDEQAAVIEEILKQRIVGMKNEAGVYVTPPFPKLIYVLDECNCLKGGKYDWLTKLAVKCSAKRMYPDYISAKKMRENYEGEVFSCMGCRSFLSPWKDENGNYKWEGRFNQGVVSLNLPQIGILSQSENGPDMYKFWQLMEERTSLCFEALMCRHKALLGTKSDISPIHWQYGGIARLKKGEVIDPLLKDGYSTISLGYIGLYEVTKLMTGKSHTTKEGEEFALKVMRYLKNKCNMWKDMTGIGFGLYGTPAESLCYRFARIDKEKFGEIKDITDKGYYTNSYHVDVREKINAFDKLSFESQFQQISSGGAISYIEIPNMENNLEVLEKVVKFIYENIQYAEFNTKSDYCMNCGFDGEIILNDENEWECPQCGNKDHSKMSVTRRTCGYLGSQFWNKGKTLEIKQRVVHFDIPVVENGGN

SEQ ID NO: 624 - protein, 1005 aa, unidentified
  REGION 1..1005: note = Category: MG55 effectors
  REGION 1..1005: note = Description: MG55-199 effector
  source 1..1005: note = uncultivated organism sequence
MSEIKLQQKAAYTLGIDVGSTTVKTVILDADHHVLHSTYQRHFSKVKEAVSEQLQAIIKEHPATLFSVHMTGSAGLGLATAAKIPFVQEVHAAFLAVKERYPKADAVIELGGEDAKIIFLTGGVEQRMNGSCAGGTGAFIDQMATLLDVTVDELDQMALQADRTYPIAARCGVFAKSDIQPLLNQGAKRENVAASIYQAVVDQTVSGLAQGRKIQGHVLFLGGPLSFLQGLRNAFMQTLHLDAEHAIFPVDGRTFVAYGCALAAENSADKPVTGEALLKQIESAETNHTVIADKPLFGYQEEYDRFRERHAQNDVVHGDLHTYQGNAYLGVDAGSTTTKVALIGEDNSLLYSFYETNKGQPLECVKRALETLYQKKNPNLKICGSAVTGYGEEMLKAGLGIDFGIVETVAHFRAAEFFCPDVDFIIDIGGQDIKCFQIKNGAIDSIMLNEACSSGCGSFIQAFANALGYDVAEFAKLGLFAERPVDLGSRCTVFMNSSVKQAQKDGATVADISAGLSGSIVKNAIYKVIRAKSPEDLGKHIVVQGGTFLNDAVLRCFEREMGRDVIRPAISGLMGAFGAAIYAKEHTSGSSTLLSLMDLHTLTYRTQNTTCNGCTAHCNLQILRFSNGKRFIAGNRCERGAGVSKKDQIPNLVDWKYETLRSLTDRQPEQPKATVGLPMALHYYDQLPLWYTFFTDLGFAVKLSEESTRKTYYKGQSTIPSDTVCYPAKLAHGHIESLLEQNVDFIFYPCMTYNLDEGDSDNHYNCPVVAYYPELLLANNEKLNEQNFLHPFLDLNRRKHLITVLYACLSDYATKKEIAAALEHGFAALEQYRNQIAQTAQEIVRQARAAGKTILVLAGRPYHIDPEINHGIHKLISSLGMAVITEDSIAGLAHTPELQALNQWTYHSRMYRAAQYVTTQPDFQLVQLVSFGCGIDAITTDEVRRILEQSGKLYTQLKIDEISNLGAAKIRLRSLKAAIGADVPPKPAAAPSETAPKNEKEPVSV

SEQ ID NO: 625 - protein, 709 aa, unidentified
  REGION 1..709: note = Category: MG55 effectors
  REGION 1..709: note = Description: MG55-200 effector
  source 1..709: note = uncultivated organism sequence
MIKVQKRDGRIVNYDREKIVRAIQKANAEVDAAERAGEALIDGILDDVEKECEDVVHVESIQDMIESRLVKQNKYTLSKKYMIYRYQRALLRKANTTDESILKLIRNENKELAEENSNKNTILASTQRDYIAGEVSRDLTKRMLLPERISMAHEQGAIHFHDADYFVQPIFNCCLINIADMLDNGTVMNEKMIESPKSFQVACTVMTQIIAAVASNQYGGQSVDMRHLGKYLRKSSNKFHRQIREEFGDSLDNEAVEKMARIRLRDELKSGVQTIQYQINTLMTTNGQAPFVTLFLRLDDEDEYIDENALIVEEILRQRLEGIKNEAGVYVTPAFPKLIYVLDENNCLKGGKYDYITKLAVRCSSKRMYPDYISAKKMKENYEGNVFSCMGCRSFLSPWKDENGEYKFEGRFNQGVVSLNLPQIGILAKGDEEVFWKLLDERLAICFEALMCRHKALEGTLSDVSPIHWQYGAIARLPKGAKIDPLLHDGYSTISLGYIGIYEMTKLMKGVSHTDPAGEEFALRVMNRMKEAVECWKEETGLGFGLYGTPAESLCYRFARIDRERFGLIENVTDKGYYTNSYHVDVREKIDAFSKFTFESQFQKISSGGAISYVEVPNMAKNLEAMEEVVKFIYDNIQYAEFNTKSDYCQECGFDGEIIINEDMEWECPQCHNKNKDKMNVTRRTCGYLGENFWNAGKTKEIKSRVLHL

SEQ ID NO: 626 - protein, 972 aa, unidentified
  REGION 1..972: note = Category: MG55 effectors
  REGION 1..972: note = Description: MG55-201 effector
  source 1..972: note = uncultivated organism sequence
MQIGLDIGSTTIKIAVLDDAGQLQFSKYERHYSQIAEKMQQLLAELHVRMPLLKTARLAISGSAGIGIAESCGLQFAQEVFAEKICTERLNPGTEAVIELGGEDAKLLFLGRHFDARMNDSCAGGTGAFIDQMASLLDVATEDMNALAQQSSTRYTIASRCGVFAKSDIQPLLNQGAAKADLAASIFDAVASQAVTGLAKGRPITGKVLYLGGPLTFMSELRHSFDKILQIEGSCPENSLYYVAMGAAFCAENKVDLTELPAKLAAVGAQRDFDHLEPLFAGQAEYDEFMERHSKERIESGDISAADAAYIGIDAGSTTIKIAVISPSGQLLDSFYQSNKGNPVIAIKEYLQNFYIKYPHCRILGSAVTGYGEDLIRNGFSVDYGIVETMAHFIAAKTLQPDVDFILDIGGQDIKCLKIHNGCIDNIFLNEACSSGCGSFLQTFAEILGYSAEEFARIGLFADKPVNLGSRCTVFMNSSVKQAQKDGATVANISAGLSLSIVKNALYKVIRPGSKESIGKHIVVQGGTFLNDCVLRAFEKEMGLKVVRPNIAGLMGAYGAAIYARSRHQETGHVSTLADAAALKDFFHEVKAVTCGLCSNHCHLTVNTFASGKRFISGNRCERPVTHCAPDDTFNLYRQKLQLLEGLKGVPGKRGRIGLPMGLNMYELLPFWHAFFTRLGFEVITSPIYDKTIYQKGQNTIPSDTVCYPAKLMHGHIKWLLEHGINTIFYPCMTYNVDENSAENCYNCPVVAYYPEVLHANMHDLDNATYIFDYLGLGHKKVLLKKLQQICKEHFPDIGSSELKAALQEAYAAYNKFEAQVKELGQTIINTARSQHKPIVVLAGRPYHIDPKVNHSIDRLITTMGAALVSEDAVSSHISMQELNDDLQVLNQWTYHSRLYAAAKYVSRSSDMYMVHLVSFGCGCDAITADECRRILEEHGQIYTQIKIDDIDNLGAAKIRLRSLFAAAGLES

SEQ ID NO: 627 - protein, 988 aa, unidentified
  REGION 1..988: note = Category: MG55 effectors
  REGION 1..988: note = Description: MG55-202 effector
  source 1..988: note = uncultivated organism sequence
MSLRIGIDIGSTTVKVVVLDEQNKLLFRSYERHYSKTRERACETLRSISDMLAGRQVKMVITGSAGLGVANASGIDFVQEVYATAAAVNTYIPGTDAVIELGGEDAKIIFFGGALEERMNGSCAGGTGAFIDQMATLMNVSVDELDALSLKHEKIYPIASRCGVFAKSDIQPILNQGGRKEDVAASIFQAVVDQTVAGLTQGRELKGKIVFLGGPLHFLMGLRERFVETLKLDEEHAIFPEDGDCFAAMGAALCSSDYDTILFEDALKKLEESVDTTTLVDTMPPLFQDVAEYGAFCARHNAKRPPEVDIKTYEGPAWLGIDAGSTTTKLALITGDGGLLYTYYHSNLGNPVAIVLEQLREIYAQCGDRIEIRGVAVTGYGEDLIKNAFSCDLGLVETMAHYKAAAHFEPDVDFIIDIGGQDMKCFKIRNGAVDSIMLNEACSSGCGSFIETFAKALGYTIADFAKLGLFAQKPVNLGSRCTVFMNSSVKQAQKDGASVEEISAGLSISIVKNAIYKVIRAASADDLGKHIVVQGGTFHNDAVLRAFEQELGRNVTRPTIAGIMGAFGAALAARDLRLNASGLLSEAALQSFTHSAKPVTCGLCTNHCALTVNQFDGGRKFISGNRCSRPLGKEKVELPDLMNYKYKKLRAMEGKGEGTGVRGRMGIPFGLNMYENLPFWFTFFTKLNFEVVLSPESSRKLYIKGQHTIPSDTVCYPAKLLHGHVEALVEEGVDAIWYPCMSYNNDEGIGDNHFNCPVVAYYPELLAANVPALKQTKFLNPYVGLWRHKDFTKRIAKMMEEEFSIPKKESVAAAKAAYAAYDDYVHDVRATGKKYIEYARAMNMPILVVCGRPYHIDPEINHGINDLITSFGFVLITEDALSYLEGYAPRKVLNQWTFQSRMYNAARYVCTQPDMQVVQLVSFGCGTDAITTDELRSILEEGGKLYTQLKIDDISNLGAVRIRIRSLIAAIDARKQQRPQNGQSAANA

SEQ ID NO: 628 - protein, 733 aa, unidentified
  REGION 1..733: note = Category: MG55 effectors
  REGION 1..733: note = Description: MG55-203 effector
  source 1..733: note = uncultivated organism sequence
MKIIKRNGQEADFDLDRIVKAVTAANNEVPEYQRMTEMEILCVADNSKRQIDEFHYAVSVEEIQDIVERQIMKFAPVVAQTYIRYRHKRELARQANTTDAAILSLLDYENEEVKQENSNKNPVVASVQRDYMAGEVSKDLSRRVILPKDVVEAHDKGIIHFHDMDYFSQHIFNCCLINLEDMLQNGTVISGVQIDKPKSFQTACTVATQIISTVASNQYGGQSVSLSHLAPFVEVSRQKWQERVRETLDGVAPEAMINELAENLLYKECEAGMQTIQYQVITLMTTNGQAPFITVEMYLGEVKDPQTKKDLAMLIEIMLKQRILGVKNEKGIYITPAFPKIVYVLEEDNASEGSPYWYLTELAAKCTAKRMVPDYVSEKIMLQYKVDQNGEGHCYPPMGCRSFLTPYVDKDGKPKYFGRFNQGVVTINLPDVALSSGGDMEKFWNIFEERLELCHRALQARHERLKGTLSDVSPIHWQHGAIARIEKGKPIDEFLYGGYSTISLGYAGLFECVKYMTGESHTSEAGKPFALEVMQKLNDKCAEWKAAENIAYSVYGTPLESTTYKFAKALQRRFGIIKDVTDHNYITNSYHVNVREEIDAFSKLSFESEFQRLSPGGAISYIEVPDMQDNIPAVLDIIKFIYDNIMYAELNTKSDYCQECGWDGQIEIVSDESGKLIWKCPNCGNTDQSKMNVARRTCGYIGTQFWNQGRTQEIKDRVVHVGVQDYYAGEENG

SEQ ID NO: 629 - protein, 720 aa, unidentified
  REGION 1..720: note = Category: MG55 effectors
  REGION 1..720: note = Description: MG55-204 effector
  source 1..720: note = uncultivated organism sequence
MKIIKRSGAEAVFDISKIIIAINKANHEVVEAERLTADQIKEIAQYIEDSCKDANHALNVEDIQDLVEDQLMDKRAFSVARKYITYRYKRALVRKSNSTDEQILSLIECNNEEVKQENSNKDSTVNSVQRDYMAGEVSKDITRRFLLPEDIVEAHEQGIIHFHDADYFAQHMHNCDLVNLEDMLQNGTVISGTRIDKPHSFSTACNIATQIIAQVASSQYGGQSISLAHLVPFVQISREKIHAELVQTLKESDVELSEEKINNIVERRLHAEIERGVQVIQYQVVTLMTTNGQSPFVTVFMYLNEAKNEQEKKDLAMIIEEVLDQRYQGVKNEDGVWITPAFPKLIYVLEEDNIHEDSEYYYLTKKAAKCTAKRMVPDYISEKKMKELKDGNCYTCMGCRSFLTVYHDEDGKPKFYGRFNQGVVTLNLVDLACSSGGDFEKFWKLFDERLDLCYRALMARHNRLKGTPSDVAPILWQYGALARLKKGETIDKLLYGGYSTISLGYAGLCECTRYMTGKPHTDPAATPFALKVMQRLNDACKEWKEKENIDFSVYGTPLESTTYKFAKCLQKRFGVIPGVTDKNYITNSYHVHVTENIDAFTKLKFESQFQALSPGGAISYVEVPNMQDNLDAVLSVMKFIYENIMYAELNTKSDYCQVCGYDGEIQIVKDDDGKLVWECPHCHNRDQDKMNVARRTCGYIGSQFWNQGRTQEIKERVLHL

SEQ ID NO: 630 - protein, 979 aa, unidentified
  REGION 1..979: note = Category: MG55 effectors
  REGION 1..979: note = Description: MG55-205 effector
  source 1..979: note = uncultivated organism sequence
MQIGLDIGSTTIKIAVMDDAGNLLFHKYERHYSQIAEKILALHKELMTKFPTLHSARLAISGSGGIGIADSCGLQFIQEVFAEKICAEKLNPGTDAVIELGGEDAKILFLGRHFDARMNDSCAGGTGAFIDQMASLLNVETPQMNELAQQAQNTYTIASRCGVFAKSDIQPLLNQGAEKSDLAASIFHAVASQAITGLAKGRHISGNVLYLGGPLTFMSCLRDAFDSVLNIKGVCPENSLLYVAMGAAFCAEHEVDLTTLPEKLQAAAAQHSFEHLPPLFKNEGEYTVFKKRHSKESVAIGTPAEASEAFIGIDSGSTTIKIAVMSPDGKLLDSFYQSNKGNPVVAVRNYLTDFYTKYPHCRLLAGAVTGYGEELIRHGFGVDYGIVETMAHFYAAQYLEPEVDFILDIGGQDMKCLKIHNGAIDNIFLNEACSSGCGSFLQTFAEILGYTAEQFAQIGLKADMPVDLGSRCTVFMNSSVKQAQKDGASVANISAGLSISIVKNALYKVIRPASKEAIGKHIVVQGGTFLNDCVLRAFEQEMDLNVIRPNIAGLMGAYGAALYAQRRYKDAPHQTTLLNLQQLGEFVHTVKGMTCGLCNNHCHLTVNTFAGGKRFISGNRCERPITHMAPKDELNLYRQKLQLLKELPVNETPKRGIMGIPMGLNMYELLPFWNALLSSLGFKVVHSPIEDKTIYRLGQGTIPSDTVCYPAKLMHGHIKWLLQQGITNIFYPCMTYNIDEQGTENCYNCPVVAYYPEVLHANIRDLNKPEIHFFYDYLGLLHKKKLVKKLQEMFSKAYPDITKDEIRKAVDAAFNAFYDYEAQVKAKGQQIINKAREEHKPIVVLAGRPYHIDPKVNHSIDRLITNMGAALVSEDAVSSHIKTKELNRDLQVLNQWTYHGRLYAAAEYVAQNPDMHLIQLVSFGCGCDAITADECRRLLEERGRIYTQIKIDDIDNLGAAKIRIRSLFSAAQLFDIDNN

SEQ ID NO: 631 - protein, 708 aa, unidentified
  REGION 1..708: note = Category: MG55 effectors
  REGION 1..708: note = Description: MG55-206 effector
  source 1..708: note = uncultivated organism sequence
MKVIKRDGSTADFDSSKIIVAIQKANQVVEPEDRIDQERIEAIAHYVESKNRMRLLVEDIQDMVEHQLMDEGKFNLAKSYIIYRYTRALVRKANTTDESILSLIRNSNKDVMEENSNKNAVMASTQRDLIAGEVSKDLTRRLILPEKISKAHDEGAIHFHDADYFVQPIFNCCLINVGDMLDNGTVMNGKLIESPKSFQVACTVMTQIIASVASSQYGGQSVDIRHLGKYLRRSYEKFKLTIKAEVGDSVADEVVERLTKRRLQDELRSGVQTIQYQINTLMTTNGQSPFVTIFLNLQADDEYLEENAMIVEEILRQRLEGIKNDKGVFVTPAFPKLVYVLDEHNCLKGGKYDYITKLAVKCSAKRLYPDYISAKKMRENYEGNVFAPMGCRSFLAAWKDDEGNYKFEGRFNQGVVSLNLPQVAILAHGDEEKFWPLLDERLQLCYEALVCRHNSLKGIRSDVSPVHWQYGAIARLEKGEVIDKYLEKGYSTISLGYIGLYEMTKLMKDVSHTTPEGEEFALRVMKYLRAACDKWKKETGLGFALYGTPAESLCYRFARIDKERFGTIADVTDKGYYTNSYHVDVREDIDAFSKFNFESQFQRISSGGAISYVEIPNMRHNLEAMEDVVRFIYDNIQYAEFNTKSDYCHVCGFDGEIIINDDLEWECPNCGNKNQTLMNVTRRTCGYLGENFWNVGKTKEIKSRVLHL

SEQ ID NO: 632 - protein, 723 aa, unidentified
  REGION 1..723: note = Category: MG55 effectors
  REGION 1..723: note = Description: MG55-207 effector
  source 1..723: note = uncultivated organism sequence
MKVIKRDKKEVEFDSTKIEAAIKKARNACTSSNLSDENIADIADYITYKCKKLDHSVSVEDIQDMVEDQLMAHGEFALAKEYVKYRYNRQLVRKSNTTDEKILSLIELQNEEVKQENSNKNPTINSTQRDYMAGEVSRDLTNRILLPKDIVEAHEKGIIHFHDSDYFAQHMHNCDLVNLEDMLQNGTVISGTLIEKPHSFHTACNVATQIVAQVASAQYGGQSISLAHLAPFVDISRKKIYNKFRKNFEELGINVTEDKLSELVEKEVKEEINRGVQTIQYQVVTLMTTNGQTPFVTVFMYLGEAKNEREKADLALIIEEVLRQRIQGVKNEKGAWITPAFPKLIYVLEEQNITEDAPYFYLTELAAKCTAKRMVPDYISEKIMLELKKDKNGEGHCYTCMGCRSFLTPYLDKNGKPKYYGRFNQGVVTINLVDVACSSHKDINKFWEIFDERLELCHRALMCRHKRLKGTPSDVAPILWQHGALARLKKGETIDKLLYGGYSTISLGYAGLCECTRYMTGKSHTDPSATPFALEVMKHMNDACAKWKEEENIDFSLYGTPLESTTYKFAKCLQKRFGIIKGVTDKAYITNSYHVHVTEEIDAFTKLAFESQFQKLSPGGAISYVEVPNMQNNIPAVIQVIQFIYDNIMYAELNTKCDYCQKCGYDGEIKVVKKGGKYIWQCPNCGNTDQRFMNVVRRTCGYLGSNYWSHGRTEEIAERKLHL

SEQ ID NO: 633 - protein, 720 aa, unidentified
  REGION 1..720: note = Category: MG55 effectors
  REGION 1..720: note = Description: MG55-208 effector
  source 1..720: note = uncultivated organism sequence
MKIIKRSGAEAVFDISKIIIAINKANHEVVEAERLTADQIKEIAQYIEDSCKDANHALNVEDIQDLVEDQLMDKRAFSVARKYITYRYKRALVRKSNSTDEQILSLIECNNEEVKQENSNKDSTVNSVQRDYMAGEVSKDITRRFLLPEDIVEAHEQGIIHFHDADYFAQHMHNCDLVNLEDMLQNGTVISGTRIDKPHSFSTACNIATQIIAQVASSQYGGQSISLAHLVPFVQISREKIHAELLQTLKESGVELSEEKINSIVERRLHAEIERGVQVIQYQVVTLMTTNGQSPFVTVFMYLNEAKNEQEKKDLAMIIEEVLDQRYQGVKNEDGVWITPAFPKLIYVLEEDNIHEDSEYYYLTKKAAKCTAKRMVPDYISEKKMKELKDGNCYTCMGCRSFLTVYHDEDGKPKFYGRFNQGVVTLNLVDLACSSGGDFEKFWKLFDERLDLCYRALMARHNRLKGTPSDVAPILWQYGALARLKKGETIDKLLYGGYSTISLGYAGLCECTRYMTGKPHTDPAATPFALKVMQRLNDACKEWKEKENIDFSVYGTPLESTTYKFAKCLQKRFGVIPGVTDKNYITNSYHVHVTENIDAFTKLKFESQFQALSPGGAISYVEVPNMQDNLDAVLSVMKFIYENIMYAELNTKSDYCQVCGYDGEIQIVKDDDGKLVWECPHCHNRDQDKMNVARRTCGYIGSQFWNQGRTQEIKERVLHL

SEQ ID NO: 634 - protein, 720 aa, unidentified
  REGION 1..720: note = Category: MG55 effectors
  REGION 1..720: note = Description: MG55-209 effector
  source 1..720: note = uncultivated organism sequence
MKIIKRSGAEAVFDISKIIIAINKANHEVVEAERLTADQIKEIAQYIEDSCKDANHALNVEDIQDLVEDQLMDKRAFSVARKYITYRYKRALVRKSNSTDEQILSLIECNNEEVKQENSNKDSTVNSVQRDYMAGEVSKDITRRFLLPEDIVEAHEQGIIHFHDADYFAQHMHNCDLVNLEDMLQNGTVISGTRIDKPHSFSTACNIATQIIAQVASSQYGGQSISLAHLVPFVQISREKIHAELLQTLKESGVELSEEKINSIVERRLHAEIERGVQVIQYQVVTLMTTNGQSPFVTVFMYLNEAKNEQEKKDLAMIIEEVLDQRYQGVKNEDGVWITPAFPKLIYVLEEDNIHEDSEYYYLTKKAAKCTAKRMVPDYISEKKMKELKDGNCYTCMGCRSFLTVYHDEDGKPKFYGRFNQGVVTLNLVDLACSSGGDFEKFWKLFDERLNLCYRALMARHNRLKGTPSDVAPILWQYGALARLKKGETIDKLLYGGYSTISLGYAGLCECTRYMTGKPHTDPAATPFALKVMQRLNDACKEWKEKENIDFSVYGTPLESTTYKFAKCLQKRFGVIPGVTDKNYITNSYHVHVTENIDAFTKLKFESQFQALSPGGAISYVEVPNMQDNLDAVLSVMKFIYENIMYAELNTKSDYCQVCGYDGEIQIVKDDDGKLVWECPHCHNRDQDKMNVARRTCGYIGSQFWNQGRTQEIKERVLHL

SEQ ID NO: 635 - protein, 735 aa, unidentified
  REGION 1..735: note = Category: MG55 effectors
  REGION 1..735: note = Description: MG55-210 effector
  source 1..735: note = uncultivated organism sequence
MGDKMDKELLIMTNVIKRNGKEVKFDIYKIIHAMEKANKEVAPVYQMNEYQIQAAAETVAKKIQASSHAVNVEDIQDMVETAIMEMRAYEVAQKYVRYRYKREMARKANSTDEDILALIDQANEELKQENSNKNPVINSTQRDYMAGEVSKDLTKRLLLPEDIVKAHEEGVIHFHDSDYYAQKEHNCDLINLEDMLQNGTVISETMIEKPHSFFTACNVTTQIVAQVASNQYGGQSFTLSHLAPFVDISRQKIREAVIGERKETGESMDEDIIAKIVNRRLKEEIKSGIQTIQYQLITLMTCNGQAPFVTMFMYLDEVPEGKTREDLALIIEEVLRQRMQGVKNEKGVWITPAFPKLIYVLDEDNITEDAPYYHLTKLAAQCTAKRMVPDYISAKIMREYKGGDVYPCMGCRSFLTEDKEGLGENGAHKYYGRFNQGVVTINLVDVACSSQGNMDSFWQILEERLELCHKALRLRHERLLGTVSDVAPILWQHGALARLKKGEKIDKLLYNNYSTISLGYAGLYEMCVRMLGKSHTTEEGREFSLKVMEKLNDSCKKWREAENISYSVYGTPMESTTYKFAKALKKRFGTIPGVTDKNYITNSYHVHVSEKIDAFSKLAFEADFQKLSPGGAISYVEVPNMQNNIPAVLSLMHFIYENIMYAELNTKSDYCCACGYDGEIQIIEDQYGKLQWRCPNCGNENQEQLSVARRTCGYIGTQFWNQGRTQEIKDRVLHL

SEQ ID NO: 636 - protein, 982 aa, unidentified
  REGION 1..982: note = Category: MG55 effectors
  REGION 1..982: note = Description: MG55-211 effector
  source 1..982: note = uncultivated organism sequence
MSLRIGIDIGSTTVKVVVLDEQNKLLFRSYERHYSKTRERACETLRSISDMLAGRQVKMVITGSAGLGVANASGIDFVQEVYATAAAVNTYIPGTDAVIELGGEDAKIIFFGGALEERMNGSCAGGTGAFIDQMATLMNVSVDELDALSLKHEKIYPIASRCGVFAKSDIQPILNQGGRKEDVAASIFQAVVDQTVAGLTQGRELKGKIVFLGGPLHFLMGLRERFVETLKLDEEHAIFPEDGDCFAAMGAALCSSDYDTILFEDALKKLEESVDTTTLVDTMPPLFQDVAEYGAFCARHNAKRPPEVDIKTYEGPAWLGIDAGSTTTKLALITGDGGLLYTYYHSNLGNPVAIVLEQLREIYAQCGDRIEIRGVAVTGYGEDLIKNAFSCDLGLVETMAHYKAAAHFEPDVDFIIDIGGQDMKCFKIRNGAVDSIMLNEACSSGCGSFIETFAKALGYEIADFAKMGLFAQHPVNLGSRCTVFMNSSVKQAQKDGASVEDISAGLSISIVKNAVYKVIRAANADDLGQHIVVQGGTFLNDAVLRAFEQELGRNVTRPTIAGIMGAFGAALAAKDLGLEKSSILGPEALERFTHSAKPVTCNLCTNHCSLTVNQFDGGRRFISGNRCSRPLGKEKVTQPDLMTYKYKKLRAMQGKGEGTGVRGRIGIPFGLNMYENLPFWFTFFTKLNFEVVLSPESSRKLYLKGQHTIPSDTVCYPAKLLHGHVEALVEEGVDAIWYPCMSYNNDEGIGDNHFNCPVVAYYPELLAANVPALKETRFLDPYVGLWRHKDFEKRIAKLMEEEFSIPQRETRAAAQAAYAAYEAYVHDLRQTGQEYIAYAREHGLNIAVVCGRPYHIDPEINHGINDLITSFGFVLITEDALSYLEGYAPRKVLNQWTFQSRMYNAARYVCTQPDMQVIQLVSFGCGTDAITTDEMRSILEEGGKLYTQLKIDDINNLGAVKIRIRSLMAAMDARKHQAAPAR

SEQ ID NO: 637 - protein, 979 aa, unidentified
  REGION 1..979: note = Category: MG55 effectors
  REGION 1..979: note = Description: MG55-212 effector
  source 1..979: note = uncultivated organism sequence
MQIGLDIGSTTIKIAVMDDAGNLLFHKYERHYSQIAEKILALHKELMTKFPTLHSARLAISGSGGIGIADSCGLQFVQEVFAEKICAEKLNPGTDAVIELGGEDAKILFLGRHFDARMNDSCAGGTGAFIDQMASLLNVETPQMNELAQQAQNTYTIASRCGVFAKSDIQPLLNQGAEKSDLAASIFHAVASQAITGLAKGRPISGNVLYLGGPLTFMSCLRDAFDSVLNIKGVCPENSLLYVAMGAAFCAEHEVDLTTLPEKLQAAAAQHSFEHLPPLFKNEGEYTVFKKRHSKESVAIGTPAEASEAFIGIDSGSTTIKIAVMSPDAKLLDSFYQSNKGNPVVAVRNYLTDFYTKYPNCHLLAGAVTGYGEDLIRHGFGVDYGIVETMAHFYAAQYLEPEVDFILDIGGQDMKCLKIHNGAIDNIFLNEACSSGCGSFLQTFAEILGYTAEQFAQIGLKADMPVDLGSRCTVFMNSSVKQAQKDGASVANISAGLSISIVKNALYKVIRPASKEAIGKHIVVQGGTFLNDCVLRAFEQEMDLNVIRPNIAGLMGAYGAALYAQRRYKDAPHQTTLLNLQQLGEFVHTVKGMTCGLCNNHCHLTVNTFAGGKRFISGNRCERPITHMAPKDELNLYRQKLQLLKELPVNETPKRGIMGIPMGLNMYELLPFWNALLSSLGFKVVHSPIEDKNIYRLGQGTIPSDTVCYPAKLMHGHIKWLLQQGITNIFYPCMTYNIDEQGTENCYNCPVVAYYPEVLHANIRDLNKPEIHFFYDYLGLLHKKKLVKKLQEMFAKVYPDITKEEIRKAVDAAFTAFYDYEAQVKAKGQEIISKAREEHKPIVVLAGRPYHIDPKVNHSIDRLITNMGAALVSEDAVSSHIKTKELNRDLQVLNQWTYHGRLYAAAEYVAQNPDMHLIQLVSFGCGCDAITADECRRLLEERGRIYTQIKIDDIDNLGAAKIRIRSLFSAVQLFDIDNN

SEQ ID NO: 638 - protein, 979 aa, unidentified
  REGION 1..979: note = Category: MG55 effectors
  REGION 1..979: note = Description: MG55-213 effector
  source 1..979: note = uncultivated organism sequence
MQIGLDIGSTTIKIAVMDDAGNLLFHKYERHYSQIAEKILALHKELMTKFPTLHSARLAISGSGGIGVADSCGLQFVQEVFAEKICAEKLNPGTDAVIELGGEDAKILFLGRHFDARMNDSCAGGTGAFIDQMASLLNVETPQMNELAQQAKNTYTIASRCGVFAKSDIQPLLNQGAEKSDLAASIFHAVASQAITGLAKGRPISGNVLYLGGPLTFMSCLCDAFDSVLNIKGVCPENSLLYVAMGAAFCAEHEVDLTTLPEKLQTAAAQHSFEHLPPLFKNEGEYTVFKKRHSKESVAIGTPEEASEAFIGIDSGSTTIKIAVMSPDGKLLDSFYQSNKGNPVVAVRNYLTDFYTKYPHCHLLAGAVTGYGEELIRHGFCVDYGIVETMAHFYAAQYLEPEVDFILDIGGQDMKCLKIHNGAIDNIFLNEACSSGCGSFLQTFAEILGYTAEQFAHIGLKADMPVDLGSRCTVFMNSSVKQAQKDGASVANISAGLSISIVKNALYKVIRPASKEAIGKHIVVQGGTFLNDCVLRAFEQEMDLNVIRPNIAGLMGAYGAALYAQRRYKDAPHQTTLLNLQQLGEFVHTVKGMTCGLCNNHCHLTVNTFAGGKRFISGNRCERPITHMAPKDELNLYRQKLQLLKELPVNETPKRGIMGIPMGLNMYELLPFWNALLSSLGFKVVHSPIEDKTIYRLGQGTIPSDTVCYPAKLMHGHIKWLLQQGITNIFYPCMTYNIDEQGTENCYNCPVVAYYPEVLHANIRDLNKPEIHFFYDYLGLLHKKKLVKKLQEMFSKAYPNITKDEIRKAVDAAFNAFYDYEAQVKAKGQQIISKAREEHKPIVVLAGRPYHIDPKVNHSIDRLITNMGAALVSEDAVSSHIKTKELNRDLQVLNQWTYHGRLYAAAEYVAQNPDMHLIQLVSFGCGCDAITADECRRLLEERGRIYTQIKIDDIDNLGAAKIRIRSLFSAAQLFDIDNN

SEQ ID NO: 639 - protein, 724 aa, unidentified
  REGION 1..724: note = Category: MG55 effectors
  REGION 1..724: note = Description: MG55-214 effector
  source 1..724: note = uncultivated organism sequence
MKIIKRNGAEVGFDITKIIIAITKANESVEEVDRMTPVQIQRIAESVDLQCQKMNRAPTVEEIQDMVEHYIMAHGAFEVAKHYITYRYTRSLVRKSNTTDDKILSLIECNNEEAKQENSNKNPVVNSTQRDYMAGEVSRDITNRILLPKDIVEAHNEGIIHFHDTDYYAQHMHNCDLVNLEDMLQNGTVITGTLIEKPHSFATACNIATQIVAQVASNQYGGQSISLTHLAPFVQISREKIRASVRDEFDAVGVAVTEDKINSIAEKRLREEIRRGVQTIQYQVVTLLTTNGQAPFVTVFMYLGEAKNQQEKDDLALIIEETLLQRYQGVKNEKGVWVTPAFPKLIYVLEEDNIREGSKYWELTKLAAKCTAKRMVPDYISEKKMLELKVDKNGNGHCYPCMGCRSFLTPYVDEDGNPKYYGRFNQGVVTVNLPDIALSSGGNIEKFWRIFDERMELCHRALLCRHERLKGTLSDAAPILWQYGACARLKKGEPIDKLLYGGYSTISLGYAGLYECVKYMTGKSHTDPSATPFALEIMHKLNAACKTWKAQHNIDFSLYGTPLESTTYKFAKCLQKRFGVIEGITDKGYITNSYHVHVTEPIDAFKKLEFEAQFQHLSPGGAISYVEVPDMQNNLDAVLEVMKFIYDHIIYAELNTKSDYCQVCGWDGEIEVVEEDGKLIWKCPQCGNTDQDKMNVARRTCGYIGTQFWNQGRTQEIKDRVLHL

SEQ ID NO: 640 - protein, 720 aa, unidentified
  REGION 1..720: note = Category: MG55 effectors
  REGION 1..720: note = Description: MG55-215 effector
  source 1..720: note = uncultivated organism sequence
MKIIKRSGAEAVFDISKIIIAINKANHEVVEAERLTADQIKAIAQYIEDSCKDANHALNVEDIQDLVEDQLMDKRAFSVARKYITYRYKRALVRKSNSTDEQILSLIECNNEEVKQENSNKDSTVNSVQRDYMAGEVSKDITRRFLLPEDIVEAHEQGIIHFHDADYFAQHMHNCDLVNLEDMLQNGTVISGTRIDKPHSFSTACNIATQIIAQVASSQYGGQSISLAHLAPFVQISREKIHAELVQTLKESDVELSEEKINSIVERRLHAEIERGVQVIQYQVVTLMTTNGQSPFVTVFMYLNEAKNEQEKKDLAMIIEEVLDQRYQGVKNEDGVWITPAFPKLIYVLEEDNIHEDSEYYYLTKKAAKCTAKRMVPDYISEKKMKELKDGNCYTCMGCRSFLTVYHDEDGKPKFYGRFNQGVVTLNLVDLACSSGGDFEKFWKLFDERLDLCYRALMARHNRLKGTPSDVAPILWQYGALARLKKGETIDKLLYGGYSTISLGYAGLCECTRYMTGKPHTDPAATPFALKVMQRLNDACKEWKEKENIDFSVYGTPLESTTYKFAKCLQKRFGVIPGVTDKNYITNSYHVHVTENIDAFTKLKFESQFQALSPGGAISYVEVPNMQDNLDAVLSVMKFIYENIMYAELNTKSDYCQVCGYDGEIQIVKDDDGKLVWECPHCHNRDQDKMNVARRTCGYIGSQFWNQGRTQEIKERVLHL

SEQ ID NO: 641 - protein, 720 aa, unidentified
  REGION 1..720: note = Category: MG55 effectors
  REGION 1..720: note = Description: MG55-216 effector
  source 1..720: note = uncultivated organism sequence
MKIIKRSGAEAVFDISKIIIAINKANHEVVEAERLTADQIKEIAQYIEDSCKDANHALNVEDIQDLVEDQLMDKRAFSVARKYITYRYKRALVRKSNSTDEQILSLIECNNEEVKQENSNKDSTVNSVQRDYMAGEVSKDITRRFLLPEDIVAAHEQGIIHFHDADYFAQHMHNCDLVNLEDMLQNGTVISGTRIDKPHSFSTACNIATQIIAQVASSQYGGQSISLAHLVPFVQISREKIHAELVQTLKESDVELSEEKINSIVERRLHAEIERGVQVIQYQVVTLMTTNGQSPFVTVFMYLNEAKNEQEKKDLAMIIEEVLDQRYQGVKNEDGVWITPAFPKLIYVLEEDNIHEDSEYYYLTKKAAKCTAKRMVPDYISEKKMKELKDGNCYTCMGCRSFLTVYHDEDGKPKFYGRFNQGVVTLNLVDLACSSGGDFEKFWKLFDERLDLCYRALMARHNRLKGTPSDVAPILWQYGALARLKKGETIDRLLYGGYSTISLGYAGLCECTRYMTGKPHTDPAATPFALKVMQRLNDACKEWKEKENIDFSVYGTPLESTTYKFAKCLQKRFGVIPGVTDKNYITNSYHVHVTENIDAFTKLKFESQFQALSPGGAISYVEVPNMQDNLDAVLSVMKFIYENIMYAELNTKSDYCQVCGYDGEIQIVKDDDGKLVWECPHCHNRDQDKMNVARRTCGYIGSQFWNQGRTQEIKERVLHL

SEQ ID NO: 642 - protein, 341 aa, unidentified
  REGION 1..341: note = Category: MG55 effectors
  REGION 1..341: note = Description: MG55-217 effector
  source 1..341: note = uncultivated organism sequence
MAATMKDIARRTGLGLATISSYFNGGNVREKNRIKIEEAIQELHYEVNEVARGLKTNATKTIGVVIPELNNTFCAEIITGMEDVLRSHGYATIVCDCRTDKRLEREAVEFLSRKRVDGIISMPVDAEGNHLKKFQKTGKPIVLIDRRIRELSCDSVLVDNEKAAEDAMRVFFQAGHRKIGIIGGPEEISTAQERLQGYRNAYEKENIPVRESLIYHGDYTIQGGVQGIEKLVADNPDMTAVFVTNYEMTMGAVIGMNELGLKIPEQLSMIGFDNLQFARACNPKLTIVAQPTQGIAGEVAGIMLKRLEGAASEETEPITEKLGAEIIMGKSVRVLDEKEKL

SEQ ID NO: 643 - protein, 1005 aa, unidentified
  REGION 1..1005: note = Category: MG55 effectors
  REGION 1..1005: note = Description: MG55-218 effector
  source 1..1005: note = uncultivated organism sequence
MSEIKLQQKAAYTLGIDVGSTTVKTVILDADHHVLHSTYQRHFSKVKEAVSEQLQAIIKEHPATLFSVHMTGSAGLGLATAAKIPFVQEVHAAFLAVKERYPKADAVIELGGEDAKIIFLTGGVEQRMNGSCAGGTGAFIDQMATLLDVTVDELDQMALQADRTYPIAARCGVFAKSDIQPLLNQGAKRENVAASIYQAVVDQTVSGLAQGRKIQGYVLFLGGPLSFLQGLRNAFMQTLHLDAEHAIFPVDGRTFVAYGCALAAENSADKPVTGEALLKQIESAETNHTVIADKPLFGYQEEYDRFRERHAQNDVVHGDLHTYQGNAYLGVDAGSTTTKVALIGEDNSLLYSFYETNKGQPLECVKRALETLYQKKNPNLKICGSAVTGYGEEMLKAGLGIDFGIVETVAHFRAAEFFCPDVDFIIDIGGQDIKCFQIKNGAIDSIMLNEACSSGCGSFIQAFANALGYDVAEFAKLGLFAERPVDLGSRCTVFMNSSVKQAQKDGATVADISAGLSGSIVKNAIYKVIRAKSPEDLGKHIVVQGGTFLNDAVLRCFEREMGRDVIRPAISGLMGAFGAAIYAKEHTSGSSTLLSLMDLHTLTYRTQNTTCNGCTAHCNLQILRFSNGKRFIAGNRCERGAGVSKKDQIPNLVDWKYETLRSLTDRQPEQPKATVGLPMALHYYDQLPLWYTFFTDLGFAVKLSEESTRKTYYKGQSTIPSDTVCYPAKLAHGHIESLLEQNVDFIFYPCMTYNLDEGDSDNHYNCPVVAYYPELLLANNEKLNEQNFLHPFLDLNRRKHLITVLYACLSDYATKKEIAAALEHGFAALEQYHNQIAQTAQEIVRQARAAGKTILVLAGRPYHIDPEINHGIHKLISSLGMAVITEDSIAGLAHTPELQALNQWTYHSRMYRAAQYVTTQPDFQLVQLVSFGCGIDAITTDEVRRILEQGGKLYTQLKIDEISNLGAAKIRLRSLKAAIGADVPPKPAAAPSEVAPKNEKEPVSV

SEQ ID NO: 644 - protein, 990 aa, unidentified
  REGION 1..990: note = Category: MG55 effectors
  REGION 1..990: note = Description: MG55-219 effector
  source 1..990: note = uncultivated organism sequence
MNVNVGIDIGSTTVKIVVVRDGEIIHKHYERHFSKVREKAVELVQNAREVIGPDATIRCAITGSAGLGVAKAADIDFVQEVFATRKAVGVHVPQADVVIELGGEDAKIVFLSGQLEERMNGSCAGGTGAFIDQMAVLLDVTPGELDELAQHAEQIYTIASRCGVFAKSDIQPLLNDGARKEDVAASIFQAVVNQTVAGLAQGREIKGDVLFLGGPLFFFKGLQKRFQETLKLDDMHAHFPALAPYAIAAGAAEYAKDTQKTYSVDSLLDALEHAAGAPVVANYLPPLFENEQQYEEFKHRHGVHDVMTQNVTMYEGDAYLGIDCGSTTTKLVLIGEDHQILFHHYQSNKGNPADVIREQLTKLYELCGDRVHIVSSAVTGYGEALIQHAFGVDFGLVETVAHFRAARHFCPDVDFIIDIGGQDIKCFKIRNKCIDNISLNEACSSGCGSFIETFARSMGYSIEEFCKLGLFAKHPIDLGSRCTVFMNSSVKQAQKDGAGIDAISAGLSVSVVKNALYKVIRAHSPDDLGQHIVVQGGTFLNDAILRSFEQEIGRDVTRPAIAGLMGAYGAALHAKDNRPAQTSLVGMDVLASFRHTVKSARCGLCENHCSLTINDFGGGRRFISGNRCERPLGGTKKADLPNLYQWKLEKLRSYGESSGKPMPNGRIGLPFGLNYYELLPFWTTFLRSLGFETVLSDVSTRDIYMQGQHSIPSDTVCYPAKLMHGHIENLLEKGVDAIFYPCMTYNLDEGRATNCYNCPVVAYYPELLHANVAALADFDFMMPYFELTDHKRFIQQAAKYFCGKYPQIKKKQVAAAAEAAFQELDNYYAEIRLEGQKAIAYADTHGLDIAVIAGRPYHVDPEINHGIDQLIASFGLVIVSEDAVWQLAEEPKVHVLNQWTYHSRMYGAAKYVTRKENAQLIQLVSFGCGIDAITTDEVRAICENGGKIYTQLKIDEISNLGAAKIRIRSMLAAVEEGRKLAEQQSNQHVG

SEQ ID NO: 645 - protein, 708 aa, unidentified
  REGION 1..708: note = Category: MG55 effectors
  REGION 1..708: note = Description: MG55-220 effector
  source 1..708: note = uncultivated organism sequence
MKVIKRDGRVVDYDRSKILLAIQKANDEVEIKEKITEQKIEKIVASIEHLKKDTMHVEEIQDFIEQKLMADGKFTLAKTYIIYRYTRELVRKANTTDESIMSLIKNSNKDVMEENSNKNAVIASTQRDLIAGEVSKDLTRRLLLPEKISKAHDEGVLHFHDADYFLQSIFNCCLINIKDMLDNGTVMNGKLIESPKSFQVACTVMTQIISAVASSQYGGQSVDIRHLGKYLRYSYKKYQERYQERFKGKLSDEVIEQIVQERLQDELKSGVQTIQYQINTLMTTNGQSPFVTLFLNLDKDDEYIEENAMIIEEVLRQRLQGIKNEKGVYVTPAFPKLIYVLDEHNCFKGGKYDYITKLAVQCSAKRLYPDYISAKKMRENYEGNVFSCMGCRSFLTPWKDENGNYKFEGRFNQGVVSLNLPQIGIIAQGDEEVFWPLLDERLALCYEALMCRHRALEGTLSDVSPIHWQYGAIARLNKGETIDKLLHGGYSTISLGYIGLYEVTKLMKGVSHTEAGGSEFAFKLMNRLREACDTWKRDTGIGFGLYGTPAESLCYRFARIDKERFGEIADVTDKGYYTNSYHVDVREHIDAFNKFTFESQFQVISSGGAISYIEIPNMRHNMEALEEIVKFIYENIQYAEFNTKSDYCHECSFDGEIIINENLEWECPNCGNKDHSKMNVTRRTCGYLGENFWNVGKTKEINSRVLHV

SEQ ID NO: 646 - protein, 727 aa, unidentified
  REGION 1..727: note = Category: MG55 effectors
  REGION 1..727: note = Description: MG55-221 effector
  source 1..727: note = uncultivated organism sequence
MKVIKRDGHMVDYCPEKIEQAIMKANNEVEEEDQASSTQIKNIIKYIEKLGKKRILVEDIQDIIEMKLMSQGKYELAKHYITYRYTRELVRRSNTTDQSIKELIDGESEYWNTENSNKNAKVVTTQRDYLAGITSTDITRRFLLPEDIVEAHDAGIIHFHDADYFAQNALHNCDLVNLEDMLQNGTSINGVMIEKPHRFLTAMTIATQIITAVSSSQYGGVTITLTHLAPFVRESYNRYLDKYKKRKLSKEQCEKFAMEDTKKEIVDGVQTFQYQVNSMTTTNGQAPFLSVCMYLGETTEYKEELSWIIEEFLKQRILGMKNEQGVYITPAFPKLLYVLEEDNINKNGKYYYLTKLAAECTAKRMVPDYISEKIMKELKIDKNGNGNCYPCMGCRSFLTPYVDENGKPKYYGRFNQGVVTINLVDAALSSDKDMDTFWQIFEERLELCHKALQIRHKRLSKATSDVAPILWQHGALARLKKGESIHELLHNGYSTISLGYAGLYECVKYMTGHSHTDNGKGKEFALEVMEKMNAKCKEWKEVENIDYSVYGTPIESTTYKFAKCLKDRFGVVKGITDRDYITNSYHVPVFEEIDAFTKLKLESEFQKLSPGGAISYIETPNLSNNLDAVLEVITFIYNNIMYAELNTKSDYCQECGYTGEILIDDNMEWYCPNCGNRDHNKLNVARRTCGYIGTNFWNKGRTQEIKERVLHIDNKEEKDTKKDKEEK

SEQ ID NO: 647 - protein, 730 aa, unidentified
  REGION 1..730: note = Category: MG55 effectors
  REGION 1..730: note = Description: MG55-222 effector
  source 1..730: note = uncultivated organism sequence
MKIIKRSGSEDIFDISKIEAAIRKANDSVIDYEKLGDDKIQAILSNVEKACENMKRSPSVEEIQDMVENQIMSQKAFNVARNYITYRYKRELVRKSNSTDEQILSLLECNNEEVKQENSNKNPTVNSVQRDYMAGEVSKDITRRFLLPPEIVEAHEKGIIHFHDADYFAQHMHNCCLVNLEDMLQNGTVISETMIDTPKSFSTACNIATQAIAQIASSQYGGQSISLSHLAPFVQVSREKFRKQVRKELETAGIEATEEKVNQMAEMRVKEEINRGVQMIQYQVITLMTTNGQAPFITVFMYLDEVPEGQLRDDLAAVIEEMLHQRILGVKNEQGVYITPAFPKLIYVLEEDNIREGSKYWYLTRLAAECTAKRMVPDYISEKMMKKLKDGDCYTCMGCRSFLTVDRTTGNLAHAKNYKEGKHKYYGRFNQGVVTLNLVDAACSSGGDEKKFWEIMDERLEMCYQALMIRHNRLKGTPSDVAPILWQNGALARLKKGETIDELLYHGYSTISLGYAGLCECTRYMKGVSHTEPEGTEFALAVMRRLNDACAKWKKETDIDFSLYGTPLESTTYKFAKCLQKRFGIIPGVTDKNYITNSYHVHVTEQINAFDKLKFESQFQELSPGGAISYVEVPNMQNNLEAVLSVMQYIYENIMYAELNTKSDYCMECGYAGEIKIVTDRDGKLVWECPNCGNRDQNKMSVARRTCGYIGTQFWNQGRTQEIKERVLHL

SEQ ID NO: 648 - protein, 712 aa, unidentified
  REGION 1..712: note = Category: MG55 effectors
  REGION 1..712: note = Description: MG55-223 effector
  source 1..712: note = uncultivated organism sequence
MEDNFDIKKIEAAIRKANESVIDYEKLTEEKIQEILANVEKACENMKRSPSVEEIQDMVENQIMNQRAFNVARNYITYRYKRALVRKSNSTDEQILSLLECNNEEVKQENSNKNPTVNSVQRDYMAGEVSKDITRRFLLDGDIVEAHEQGIIHFHDADYFAQHMHNCCLVNLEDMLQNGTVISETMIDRPKSFSTACNIATQAIAQIASSQYGGQSISLSHLAPFVDVSRQKFRKTVREELTATGIEPTEEMVNKIAEMRVKEEINRGVQMIQYQVITLMTTNGQAPFVTVFMYLDEVPEGQLRDDLAAVIEEVLHQRIQGVKNEKGVFITPAFPKLIYVLEEDNIREGSRYWYLTRLAAECTAKRMVPDYISEKIMKKLKQGNCYTCMGCRSFLTVYKDENDKFKFYGRFNQGVVTLNLVDVACSSGRDMNKFWELMDERLELCHRALMARHERLKGTPSDVAPILWQNGALARLKKGETIDKLLYGGYSTISLGYAGLCECTRYMKGVSHTDPDGTPFALEVMRHLNDACAKWKAEHNIDFSLYGTPLESTTYKFAKCLQKRFGIIPGVTDKNYITNSYHVHVTEEMSAFDKLKFESQFQELSPGGAISYVEVPNMQNNLDAVLSVMQYIYDNIMYAELNTKSDYCQECGYSGEIKIVNDKDGKLVWECPNCGNRDQNKMSVARRTCGYIGTQFWNQGRTQEIKERVLHL

SEQ ID NO: 649 - protein, 735 aa, unidentified
  REGION 1..735: note = Category: MG55 effectors
  REGION 1..735: note = Description: MG55-224 effector
  source 1..735: note = uncultivated organism sequence
MGVKMDKELLIMTNVIKRNGKEVKFDIYKIIHAMEKANKEVAPVYQMNEYQIQAAAETVAKKIQASSHAVNVEDIQDMVETAIMEMRAYEVAQKYVRYRYKREMARKANSTDEDILALIDQANEELKQENSNKNPVINSTQRDYMAGEVSKDLTRRLLLPEDIVKAHEEGVIHFHDSDYYAQKEHNCDLINLEDMLQNGTVISETMIEKPHSFFTACNVTTQIVAQVASNQYGGQSFTLSHLAPFVDISRQKIREAVIGERKETGESMDEDIIAKIVNRRLKEEIKSGIQTIQYQLITLMTCNGQAPFVTMFMYLDEVPEGKTREDLALIIEEVLHQRMQGVKNEKGVWITPAFPKLIYVLDEDNISEDAPYYHLTKLAAQCTAKRMVPDYISAKIMREYKGGDVYPCMGCRSFLTEDKEGLGENGAHKYYGRFNQGVVTINLVDVACSSEGNMDSFWEILEERLELCHKALRLRHERLLGTVSDVAPILWQHGALARLKKGEKIDKLLYNNYSTISLGYAGLYEMCVRMLGKSHTTEEGRAFSLKVMEKLNDSCKKWREEEKISYSVYGTPMESTTYKFAKALKKRFGTIPGVTDKNYITNSYHVHVSEKIDAFSKLAFEADFQKLSPGGAISYVEVPNMQNNIPAVLSLMHFIYENIMYAELNTKSDYCCACGYDGEIQIVEDSYGKLQWRCPNCGNENQDQLSVARRTCGYIGTQFWNQGRTQEIKDRVLHL

SEQ ID NO: 650 - protein, 708 aa, unidentified
  REGION 1..708: note = Category: MG55 effectors
  REGION 1..708: note = Description: MG55-225 effector
  source 1..708: note = uncultivated organism sequence
MRVIKRDGRTVEYDRNKILIAIRKANAEVDTFERVNDDMIDGIVAGIENMKRDTMQVEDIQDIIEQKLMAAGKFDLAKKYIIYRYTRELVRKANTTDDSIMSLLQNSNKDVMEENSNKNAYVASTQRDLIAGEGSKDLTKRILLPEKITKAHEDGVLHFHDMDYFIQPIFNCCLINIGDMLDNGTVMNGKLIESPKSFQVACTVMTQIISAVASSQYGGQSVDTRHLGKYLRKSADKYRKHYTERYAGKIAPDVIEEFVKERVNDELRSGVQTIQYQINTLMTTNGQSPFVTLFLNLDPKDEYIKENAMIIEEILRQRLEGIKNEKGVYVTPAFPKLIYVLDEHNALKGGEYDYITKLAVRCSAKRMYPDYISAKKMRENYEGNVFSCMGCRSFLTPWKDENGNYKFEGRFNQGVVSLNLPQIGILAKGDMEYFWQLLEERLSLCFEALMCRHRALEGVTSDVSPIHWQYGAIARLQKGEKIDKLLHGGYSTISLGYIGLYEVTKLMTGESQTTEKGSQFAKALMNRLRRATDTWKEETGIHFGLYGTPAESLCYRFAEIDKKRFGEIEDVTDKGYYTNSYHVDVREKIDAFSKFEFEAQFQVISSGGAISYVEVPNMQNNLPALEEVVKYIYEHIQYAEFNTKSDYCHVCGYDGEIIINDNLEWECPNCGNKDHDKMNVTRRTCGYLGENFWNVGKTKEINARVLHL

SEQ ID NO: 651 - protein, 708 aa, unidentified
  REGION 1..708: note = Category: MG55 effectors
  REGION 1..708: note = Description: MG55-226 effector
  source 1..708: note = uncultivated organism sequence
MKVIKRDGSTADFDSSKIIVAIQKANQVVEPEDRIDQERIEAIAHYVESKNRMRLLVEDIQDMVEHQLMDEGKFNLAKSYIIYRYTRALVRKANTTDESILSLIRNSNKDVMEENSNKNAVMASTQRDLIAGEVSKDLTRRLILPEKISKAHDEGAIHFHDADYFVQPIFNCCLINVGDMLDNGTVMNGKLIESPKSFQVACTVMTQIIASVASSQYGGQSVDIRHLGKYLRRSYEKFKLTIKAEVGDSVADEVVERLTKRRLQDELRSGVQTIQYQINTLMTTNGQSPFVTIFLNLQADDEYLEENAMIVEEILRQRLEGIKNDKGVFVTPAFPKLVYVLDEHNCLKGGKYDYITKLAVKCSAKRLYPDYISAKKMRENYEGNVFAPMGCRSFLAAWKDDEGNYKFEGRFNQGVVSLNLPQVAILAHGDEEKFWPLLDERLQLCYEALMCRHNSLKGIRSDVSPVHWQYGAIARLEKGEVIDKYLEKGYSTISLGYIGLYEMTKLMKDVSHTTPEGEEFALRVMKYLRAACDKWKKETGLGFALYGTPEISLCYRFARIDKERFGTIADVTDKGYYTNSYHVDVREDIDAFSKFNFESQFQRISSGGAISYVEIPNMRHNLEAMEDVVRFIYDNIQYAEFNTKSDYCHVCGFDGEIIINDDLEWECPNCGNKNQTLMNVTRRTCGYLGENFWNVGKTKEIKSRVLHL

SEQ ID NO: 652 - protein, 1441 aa, unidentified
  REGION 1..1441: note = Category: MG55 effectors
  REGION 1..1441: note = Description: MG55-227 effector
  source 1..1441: note = uncultivated organism sequence
MDEILHVGLDVGSTTVKIIVMNSNKETIYSNYERHFSDTKNTICNTLEKLAEKYPNNKFTLALTGSGAMSAAKFLGVDFIQEVVSCKRAVEKYIPKTDVVIELGGEDAKIIYFDESIEQRMNGTCAGGTGAFLDQMASLLHTDTQGLNTLAKNYNTIYPIASRCGVFAKTDIQPLLNEGAAKEDIAASIFQAVVNQTISGLACGRPIKGNVAFLGGPLNYLSELRQRFIKTLNLKPEEIIIPEEAHLIVAKGAALDSINSNIITIEELKEKINNLKNSHDNTSKPLDPLFNSKEELEEFKLRHSKAKINKKDLKDFEENCYIGIDAGSTTTKLVLIDDNNNLLYSLYGSNEGNPLKSVMNMLKELYSILPEKAIIRYSGVTGYGENLIQTALNVDLNEIETIAHYTAAKEFEPDVTSIVDIGGQDMKYIKIKDDTIDNIMLNEACSSGCGSFIETFAKSLNITISDFVKEALESKTPVDLGSRCTVFMNSKIKQAQKEGYSVGDISAGLSYSVIKNAIQKVMKVRDVETLGNHIVVQGGTFYNDAVLRAFELIVGKNVIRPEIAGLMGAYGVALLAKEQFESNLNMEYTSTIANLKDIENLDIKTSHIRCKGCENHCLLTINTFSNGQRHISGNRCEKGAGITNKKQDLPNLVKYKYERLFNYTPLEEKDAPRGTIGIPRVLNMYEDYPFWFTFFTNLGFRVILSDKSTRETYEKGMESMPSESVCYPAKLSHGHIINLIEKGITTIFYPCIPYSRKEFEKANNQYNCPIVISYSEVLKNNVEELKTNNIKFLNPFLPFDTKNLVKRILELDEFKEYNFNKKELLNAAKLAEEEYQNFKKEILEKGNETVKYIEENNLRGIVLAGRPYHLDPEINHGIDTLITSLGLCVLTEDFVARNEKLENPLRVVNQWVYHSRLYAAADFVGKHDHLELIQLNSFGCGVDAVTTDQVEEILKSYDKMYTLIKIDEVNNLGAVRIRIRSLLASMNKRIKEKQENKELGNYSPLRPIFTKEMKKDYTILIPQMAPIHFELLESAVRASGYNAVLLRECTQKTVETGLKYVNNDACYPSILTTGQFIEALQSGKYDLDKTAIIMSQTGGGCRATNYIGFIRKALKDAGFEKVPIISFNVVGMEKMPGFKLTLPLLERLLKMVIYGDLLQKMLTKNRAYEINKGETEKLFNEWLEKCKKLVAKSTNKQFKQSIYNIVNDFEKIELDTSIEKPKVGVVGEVLIKYHPFGNNYVANVLEKEGAEVILPDFMGFVKFMATHKITFNTLLKTTPTIAKISKAAIKLIDILEKDVKIALANSKKGYMQPCDIFHLEEQVKDVLSIGNQTGEGWFLTAEMIEYMENEIPNIVCVQPFACLPNHVVGKGVIKTIRNKYPEANISPIDYDPGASEANQTNRIKLLMTVAKDNLKNNKIKKEKLNSKENKAIDHDIKIYKK

SEQ ID NO: 653 - protein, 1416 aa, unidentified
  REGION 1..1416: note = Category: MG55 effectors
  REGION 1..1416: note = Description: MG55-228 effector
  source 1..1416: note = uncultivated organism sequence
MKLDFNTLGIDIGSTTVKIAILNKDGEIIFSDYQRHYANIQETLAKIIDEAYEEFGDIPVSPMITGSGGLTLSKHMEIPFVQEVVAVATSLKDYAPRTDVAIELGGEDAKIIYFTGGIDQRMNGICAGGTGSFIDQMATLLKTDAAGLNEYAKNYKAIYPIAARCGVFAKTDIQPLINEGATKEDLSASIFQAVVNQTISGLACGKPIKGNVAFLGGPLHFLTELKQAFIRTLGLEGDAIIAPEHSHLFAASGAAMNAHADVQSSLGELKEKLSHKIELEFEVTRMEPLFASEKEYEDFTERHNKHNVRKGDFASYKGDLFLGIDAGSTTTKVAVIGDDGSLLYSFYSSNNGSPLKTALKAMKDIYSKMPEGARIVRSCSTGYGEALLKSALLLDEGEVETVAHYTAAAFFDPNVDCILDIGGQDMKCIKIKNNSVDKVQLNEACSSGCGSFIETFAKSLNYEVADFAKIALFAENPIDLGSRCTVFMNSKVKQAQKEGASVADISAGLAYSVIKNALLKVIKLTDPKDLGKQVVVQGGTFYNDAVLRSFERISGCEAIRPDIAGIMGAFGAALIAKDRYTGQKSTMLSFKEINELRFKTSMTRCQGCINHCLLTVNEFTGDRKFISGNRCEKGLGLEKNKEQIPNLFEYKNERVFRHYKPLKKADAPRGVVGIPRVLNMYENYPFWFTFFTKLGYSVKLSPVSSRKIYELGIESIPSESECYPAKLAHGHVTWLIRQGLEYIFYPCIPYERVEVPDAGNHYNCPIVTSYGENIKNNIEELRDDKIKYQNPFISLESEEILTKRLVDFFRKENGIPAAEIKAAAHEGWLEMQAVREDMTKKGKEVLQYLKETGRHGIVLAGRPYHSDPEINHGIPDLITSYGVAVLTEDSISELSEVDRPTIVMDQWMYHSRLYKAASFVAKNDNLDLIQLNSFGCGLDAVTTDQVNDILTKQNKIYTVLKIDEVNNLGAARIRIRSLLAAVKDRERKKIEAKRVDTAHHRVIFTEQMRKDYTILVPDMSPIHFEILESALASCGYKVEVLKADSKCIDYGLKYVNNDACYPSLIVVGQFMQTLLSGKYDLHKVALIITQTGGGCRATNYIGFIRRALEKAGMGYIPVISMSAGIEKNPGLKVNLEMANKALQALIYGDVFMRVLYKTRPYEKVKGSANALHEKWKKIAIESVKKANKKQFKKNIQNIVKEFDELELVDIKKPKVGIVGEILVKFMPLANNFIVELLEEEGAEAVCPDLIDFFMYSLYNANFKAEYLGKKKSSAKINNFLIWFIERYRKCANDALAASKRFHPTVPIQKLAEYASPIVSCGNQTGEGWFLTGEMIELIKSGVPNIVCTQPFGCLPNHVVGKGVIKELRHQYPDSNIVAVDYDPGASEVNQLNRIKLMLSTAGKNLIAESKDNEEPA

SEQ ID NO: 654 - protein, 337 aa, unidentified
  REGION 1..337: note = Category: MG55 effectors
  REGION 1..337: note = Description: MG55-229 effector
  source 1..337: note = uncultivated organism sequence
MAATMKDIARRTGLGLATISSYFNGGNVREKNRIKIEEAIEELHYEVNEVARGLKTNATKTIGVVIPELNNIFCAEIITGMEDILRSHGYATIVCDCRTDKKLEREAVEFLIRRRVDGIINMPVDETGAHLKRFQKTGRPIVLIDRRIQGIPCDSVLVDNQKAAEEAVELFIEKGHRNIGIIGGPEGIFTAEERLTGYCTALEKAGISIKNSLVYRGDYTIKGGVRGLEELVRNNPDMTAVFVTNYEMTMGAMIGVNELGIQVPGQLSMIGFDNLPFARACRPKLTIVSQPTDGIAREVARIMLERLEKREAGSEEPFMEKLQTEIMEGKSVCVLSR

SEQ ID NO: 655 - protein, 971 aa, unidentified
  REGION 1..971: note = Category: MG55 effectors
  REGION 1..971: note = Description: MG55-230 effector
  source 1..971: note = uncultivated organism sequence
MTNYKIGIDVGSTTVKCVLISEDKKILYSEYKRHFSRVKEAVLEQLERMFENFEGNFKVAITGSAGLGLSSAADLLFVQEVYSASLAIKDMYPDADCAVELGGEDAKILFLTGGIEQRMNGTCAGGTGAFIDQMATLLKVSGDNLDGLALKAEKKYPIASRCGVFAKSDIQPLLNQGASLSDVAASIFQAVVDQTVAGLAQGRKIQGKVLFLGGPLHFYKALGKAFKDTLKLSDENAIFPEYATCFMAFGAALYADGNPEYFTKEEILRRIRDSKPNSSIVAFKPLFENEEEYKEFKERHSKMSVAKANINTYEGNAYLGIDAGSTTTKIVLLSEDKKILYSHYTENSGRPLDVVCTKLKEIYSIIGDRIKIKSSAVTGYGEELLRAGLKIDFGIVETVAHFNAAIYFNPDVDFIIDIGGQDIKCFKIKNKAIDNIMLNEACSSGCGSFIQTFANALGYSVEDFAKLGLFAKNPVELGSRCTVFMNSAVKQAQKDGATVEDISAGISSSVVKNAIYKVIRAKSAKELGQNVVVQGGTFLNDAVLRSFERELGINVIRPTIAGLMGAYGAALYAIRKSKDKSTIISKEELNNFSYTSKSVNCQRCTAHCLLDIINFSDGRKLISGNRCERGLGKKDSEILPDIYKFKYSYITEGIVNTNEKPLATVGLPLCLNFYEQMPFWNTVFNELGFRTVISDQSSRETFIRGQHTIPSDTVCYPAKLVHGHIFNLLDKNVDFIFYPCQSYNIDEGDSDNHYNCPVVAYYPELLKANMDVLTKDNFICPHMDLNNPANVADVVYHSLKKYNLKKSKVVKAIHNGYEAMKKYQDAIREEGARLVEIARERNLPIIVLAGRPYHIDPEINHGVQKLIATLGAVSISEDAVSYLAKPPKLGILNQWTYHSRLYRAAQYVTTQKDMHLVQLVSFGCGIDAITTDETRSIIENGGKIYTQLKIDEISNLGAIKIRLRSLLAAIE

SEQ ID NO: 656 - protein, 735 aa, unidentified
  REGION 1..735: note = Category: MG55 effectors
  REGION 1..735: note = Description: MG55-231 effector
  source 1..735: note = uncultivated organism sequence
MGDNMDKELLIMTNVIKRNGKEVKFDIYKIIHAMEKANKEVAPVYQMNEYQIQAAAETVAKKIQASSHAVNVEDIQDMVETAIMEMRAYEVAQKYVRYRYKREMARKANSTDEDILALIDQANEELKQENSNKNPVINSTQRDYMAGEVSKDLTKRLLLPEDIVKAHEEGVIHFHDSDYYAQKEHNCDLINLEDMLQNGTVISETMIEKPHSFFTACNVTTQIVAQVASNQYGGQSFTLSHLAPFVDISRQKIREAVIAERKETGESMDEDIIAKIVNRRLKEEIKSGIQTIQYQLITLMTCNGQAPFVTMFMYLDEVPEGKTREDLALIIEEVLHQRMQGVKNEKGVWITPAFPKLIYVLDEDNITEDAPYYHLTKLAAQCTAKRMVPDYISAKIMREYKGGDVYPCMGCRSFLTEDKEGLGENGAHKYYGRFNQGVVTINLVDVACSSQGNMDAFWQILEERLELCHKALRLRHERLLGTVSDVAPILWQHGALARLKKGEKIDKLLYNNYSTISLGYAGLYEMCVRMLGKSHTTEEGREFSLKVMEKLNDSCKKWREAENISYSVYGTPMESTTYKFAKALKKRFGTIPGVTDKNYITNSYHVHVSEKIDAFSKLAFEADFQKLSPGGAISYVEVPNMQNNIPAVLSLMHFIYENIMYAELNTKSDYCCACGYDGEIQIVEDSYGKLQWRCPNCGNENQEQLSVARRTCGYIGTQFWNQGRTQEIKDRVLHL

SEQ ID NO: 657 - protein, 1439 aa, unidentified
  REGION 1..1439: note = Category: MG55 effectors
  REGION 1..1439: note = Description: MG55-232 effector
  source 1..1439: note = uncultivated organism sequence
MIKTLHVGLDVGSTTVKIIVMDENLNTIYTDYKRHFSDTKNTICNVLENLIIMYPDTEFTIALTGSGAISAAKFLDLPFIQEVVSCKRAVEKYIPETDVVIELGGEDAKIIYFDKFIEQRMNGTCAGGTGAFIDQMASLLNTDPTGLNELAKSHKLIYPIASRCGVFAKTDIQPLLNEGAAKEDIAASIFQAVVNQTISGLACGRPIRGNVAFLGGPLNYLSELRNRFIETLNLKDNEIIVPNEAHLLVAKGAALDSLNSHTITIEKLKSKIEVLKSSHDDTSNPLNPLFSIDAEYDEFKKRHEKDKVKRADFKTFKGNCFLGIDAGSTTTKLVVISEDGTLLYSLYGSNEGNPLQSVINMLKKLYAEKPSEAIIRFSGVTGYGEKLIQTALNVDLNEIETIAHYTAAKEFMPNVTSIVDIGGQDMKYIKMKNGAIDNIMLNEACSSGCGSFIETFAKSLGLSIQDFVQSALEARRPVDLGSRCTVFMNSKIKQAQKEGYSVGDISAGLSYSVIKNAIQKVMKVRDVKKLGAHIVVQGGTFYNDAVLRAFELIVGRNVVRPDIAGLMGAYGVALLAKEQYENNLDMDYVSSISNINELDKLEINITHIRCQGCENHCLLTINKFSNGTKYISGNRCEKGAGIVDKTLDRPNLIKYKFERTFNYTPLEEKNAPRGTIGIPRVLNMYEDYPFWFTFLTNLGFRVILSEKSNRKTYEKGMESMPSESVCFPAKLSHGHIIGLINSGIKTIFYPCIPYSRKEYQKADNHYNCPIVISYSEVLKNNVEELKDKNIKFLNPFLPFEPDKLAEIIMNLPEFKEYNFTKKELLSAAKKAETEYQNYKSDIHNKGQETLKFMEENNLKGIVLAGRPYHVDPEVNHGIDTLITSLGLCVLTEDSISNLTEAKRPLRVVDQWVFHARLYAAADFVGKHDNLELVQLNSFGCGVDAVTTDQVEEILTSYEKMYTLIKIDEINNLGAIRIRIRSLLASMNKRIKDNNSSMCNGNYEVNKKIFTKEMRKDYTILMPQMAPIHFEFLESAMKNSGYKMELLRDCTQHTVETGLKYVNNDACYPSILVTGQMIEALESGKYDLNKTALIMSQTGGGCRATNYIGFIRKALKDAGFENVPVISFNVVGMEKMPGFKLTIPLIERLIKSCIYADLLQKMLTKNRAYEINKGKTKELFDYWMEKCKKLVNKSSIKEFKQSIFDIVSDFEKIEIDTSVIKPKVGIVGEVLIKYHPFGNNFVADKLEQEGAEVILPDFMGFIKFIATHKITFNKLIKTDAIKAKLFKTAIKLIDLLEKPVISALNNSKKGYLLPCNIWDLEEKVNDILSIGNQTGEGWFLTAEMIEYIEHDIPNIVCVQPFACLPNHVVGKGVIKTIRSKFPEANIAPIDYDPGASEANQTNRIKLMMTVAKDNLKNKNNINKAIKKENYIIDEKNKISN

SEQ ID NO: 658 - protein, 722 aa, unidentified
  REGION 1..722: note = Category: MG55 effectors
  REGION 1..722: note = Description: MG55-233 effector
  source 1..722: note = uncultivated organism sequence
MKIIKRNGAEVKFDVSKILNAIRKANREVSEDNRLTEEQIATIAKKVTELAGDLNRAVGVEEIQDFVENQIMDQKAYAVARKYITYRYSRALVRRANTTDERILTLIECNNEEVKQENSNKNPTVNSVQRDYMAGEVSRDLTRRLLLPREIVEAHDAGLIHFHDADYYAQHMHNCDLVNLEDMLQNGTVISGTFIEKPHSFSTACNIATQIIAQVASNQYGGQSISLTHLAPFVDVSRQKIRAEVREELADVGVMEDTVNRIAEKRLRAEIKKGIQTIQYQVVTLLTTNGQAPFVTVFMYLGEARNERERADLAMIIEETLNQRIEGVKNESGVWVTPAFPKLIYVLEEDNVREGSRYWYLTELAAKCTAKRMVPDYISEKKMLEFKVDKNGEGHCYTCMGCRSFLTPYVDETGKPKYYGRFNQGVVTINLPDVALSSGGDMEKFWQIFDERLELCHRALMERHNRLKGTLSDAAPILWQYGALARLKKGETIDKLLYGGYSTISLGYAGLYECVKYMTGKTHTDPSAKPFALSVMQHMNDKCKEWKKMHNIDFSLYGTPLESTTYKFAKALQKRFGIIEGVTDKNYITNSYHVHVTEHIDAFTKLKFESEFQQLSPGGAISYVEVPNMQDNIPAVLSVMQYIYENIMYAELNTKSDYCQVCGYDGEIQIVEDGGKLYWECPHCHNRDQSKMNVARRTCGYIGTQYWNQGRTQEIKDRVLHL

SEQ ID NO: 659 - protein, 1284 aa, unidentified
  REGION 1..1284: note = Category: MG55 effectors
  REGION 1..1284: note = Description: MG55-234 effector
  source 1..1284: note = uncultivated organism sequence
MKLDFNTLGIDIGSTTVKIAILNKDGEIIFSDYQRHYANIQETLAKIIDEAYEEFGDIPVSPMITGSGGLTLSKHMEIPFVQEVVAVATSLKDYAPRTDVAIELGGEDAKIIYFTGGIDQRMNGICAGGTGSFIDQMATLLKTDAAGLNEYAKNYKAIYPIAARCGVFAKTDIQPLINEGATKEDLSASIFQAVVNQTISGLACGKPIKGNVAFLGGPLHFLTELKQAFIRTLGLEGDAIIAPEHSHLFAASGAAMNAHADVQSSLGELKEKLSHKIELEFEVTRMEPLFASEKEYEDFTERHNKHNVRKGDFASYKGDLFLGIDAGSTTTKVAVIGDDGSLLYSFYSSNNGSPLKTALKAMKDIYSKMPEGARIVRSCSTGYGEALLKSALLLDEGEVETVAHYTAAAFFDPNVDCILDIGGQDMKCIKIKNNSVDKVQLNEACSSGCGSFIETFAKSLNYEVADFAKIALFAENPIDLGSRCTVFMNSKVKQAQKEGASVADISAGLAYSVIKNALLKVIKLTDPKDLGKQVVVQGGTFYNDAVLRSFERISGCEAIRPDIAGIMGAFGAALIAKDRYTGQKSTMLSFKEINELRFKTSMTRCQGCINHCLLTVNEFTGDRKFISGNRCEKGLGLEKNKEQIPNLFEYKNERVFRHYKPLKKADAPRGVVGIPRVLNMYENYPFWFTFFTKLGYSVKLSPVSSRKIYELGIESIPSESECYPAKLAHGHVTWLIRQGLEYIFYPCIPYERVEVPDAGNHYNCPIVTSYGENIKNNIEELRDDKIKYQNPFISLESEEILTKRLVDFFRKENGIPAAEIKAAAHEGWLEMQAVREDMTKKGKEVLQYLKETGRHGIVLAGRPYHSDPEINHGIPDLITSYGVAVLTEDSISELSEVDRPTIVMDQWMYHSRLYKAASFVAKNDNLDLIQLNSFGCGLDAVTTDQVNDILTKQNKIYTVLKIDEVNNLGAARIRIRSLLAAVKDRERKKIEAKRVDTAHHRVIFTEQMRKDYTILVPDMSPIHFEILESALASCGYNVEVLKADSKCIDYGLKYVNNDACYPSLIVVGQFMQALLSGKYDLHKVALIITQTGGGCRATNYIGFIRRALEKAGMGYIPVISMSAGIEKNPGLKVNLEMANKALQALIYGDVFMRVLYKTRPYEKVKGSANALHEKWKKIAIESVKKANKKQFKKNIQNIVKEFDELELVDIKKPKVGIVGEILVKFMPLANNFIVELLEEEGAEAVCPDLIDFFMYSLYNANFKAEYLGKKKSSAKINNFLIWFI

SEQ ID NO: 660 - protein, 978 aa, unidentified
  REGION 1..978: note = Category: MG55 effectors
  REGION 1..978: note = Description: MG55-235 effector
  source 1..978: note = uncultivated organism sequence
MSRSVGVDIGSTTAKVVVMENDQVLFRRYERHYSQVRQKTLEIIRQAEKEIGSEPFTIAISGSAGLGVAKAADIPFVQEGFATSELVRKKIPDADAVIELGGEDAKILFFDKSGTFEERMNGSCAGGTGAFIDQMATLLAVTPEELDRLSADHKFIYTIASRCGVFAKTDIQPLLNQGASKSDIAASIFQAVVDQTITGLAQGRKIQGKVLFLGGPLHFFTGLQERFVETLKLSEENAVFPEYGLYAVGMGAAIYAEEEGKTFTYDELVEKLENAKDEAVTTLRLQPLFRDEAEYEAFKARHAKATIETVPIENYTGKAFLGIDCGSTTTKLCLIDDNYNILYSYYDSNKGNPVKIVREQLLHILDLCGDRIQICGSAVTGYGEDLIKNAFNIDMGLVETMAHLRAASHFNPNVDFVLDIGGQDIKCFKIRNGVIDNIVLNEACSSGCGSFIETFAKSMGYDAASFAKEGLFAQHPVDLGSRCTVFMNSSVKQAQKEGATLQDISAGLSMSVTKNAIYKVIRAVSKEDLGTNIVVQGGTFLNDAILRSFELEIERDVIRPSISGLMGAYGAALYARELRLETSAMMNKEQLEQFQHTSKTISCGICNNHCNLTVNTFDGKRKFISGNRCEKPLGVKANKELPNMFQYKMEKIRALKGVDGGMGKIGIPMGLNMYENIAFWYAFLTRLGFEVVLSDPSTRALYRKGQDTIPSDTVCYPAKLMHGHIKNLIEKGCTRIFYPCLPYNFDEKVGDNHYNCPVVAYYPELLEANMDDLKTVKFYNGYFGIHRPKDFDKKAYEYFKDEFNFPHKLVKQAAKEAYAVYNSWMEDIRNEGARAIHYAREHGCKIIVLAGRPYHIDPEINHGLDKMLSSFNLVIVTEDSVAHLGHAGKVHVLNQWTYHSRLYNAAKYVTTQLDMELIQIVSFGCGIDAITTDEVRSILENGDKLYTQLKIDEINNLSAIRIRIRSLLAAIKAKEAQK

SEQ ID NO: 661 - protein, 731 aa, unidentified
  REGION 1..731: note = Category: MG55 effectors
  REGION 1..731: note = Description: MG55-236 effector
  source 1..731: note = uncultivated organism sequence
MKVVKRDGHIVDFDRSKIVTAIRKANAEVDPEEKISDDKIETIVHGIETKKRKRILVEDIQDIIEQDLMEDGKYVLAKTYIIYRYTRELVRKANTTDDSILSLIKNRNKDVMEENSNKNATVASTQRDLIAGEVSKDLTRRVLLPEKISKAHDEGVLHFHDADYFLQPIFNCCLINIKDMLENGTVMNGKLIESPKSFQVACTVMTQIIASVASSQYGGQSVDLIHLGKYLRKSYEKYKERFTKDFGDKVDADTLEAMIQERLNDELRSGVQTIQYQINTLMTTNGQSPFVTLFLHLDPEDEYVEENARIIIEILRQRYEGIKNEAGVYVTPAFPKLIYVLDEFNCLKGGKYDYITEMAVKCSAKRMYPDYISAKKMRENYEGNVFSPMGCRSFLAPWKDENGQYKFEGRFNQGVVSLNLPQIGIIARGDEELFWKILDERLELCYEALMCRHNALMGVTSDVSPIHWQYGAIARLGKGERIDKYLLNGYSSISLGYIGLYEVTKLMKGVSHTTPEGQEFALRIMHKLRNACDTWKKETGLGFALYGTPAESLCYRFARIDKERFGTIPDITDKGYYTNSYHVDVREDIDAFEKFTFESQFQSISSGGAISYVEIPNMANNLEALTELVKFLYDNIQYAEFNTKSDYCHVCGFDGEIKVNENNEWECPVCHNKDHSKMNVTRRTCGYLGENFWNVGKTKEIKSRVLHVGTPDYIAETVTASASKIFPEKKF

SEQ ID NO: 662 - protein, 708 aa, unidentified
  REGION 1..708: note = Category: MG55 effectors
  REGION 1..708: note = Description: MG55-237 effector
  source 1..708: note = uncultivated organism sequence
MKVIKRDGHTVTYDRSKIITAIKKANAEVEPCEKVTDEKIEEIVQGIESKNRPRMLVEDIQDIIEQKLMADGKFVLAKTYIIYRYTRELVRKANTTDDSILSLIKNRNKDVMEENSNKNATVASTQRDLIAGEVSKDLTRRVLLPEKISKAHDEGVLHFHDADYFLQPIFNCCLINIGDMLDNGTVMNGKLIESPKSFQVACTVMTQIISSVASSQYGGQSVDIRHLGKYLRKSYNKYKNKLVEEFGDKIDDAILEQMAQDRLQDELRSGVQTIQYQINTLMTTNGQSPFVTLFLNLDPNDEYIEENAIIVEEILRQRLEGIKNEKGVYVTPAFPKLIYVLDEHNCLKGGKYDYITKLAVKCSAKRLYPDYISAKKMRENYEGNVFSCMGCRSFLSPWKDENGNYKWEGRFNQGVVSLNLPQIGILAKGNEEKFWSMLDERLDLCYEALMCRHNALLGVTSDVSPVHWQYGAIARLKKGEKIDPLLKDGYSTISLGYIGLYEVTKLMTGKSHTEPEGEEFALRVMNRLRKACDTWKEETGLGFGLYGTPAESLCYRFARIDQERFGTIEDVTDKGYYTNSYHVDVREKIDAFSKFRFESQFQTISSGGAISYVEIPNMRHNLEALEEIVRFIYDNIQYAEFNTKSDYCHVCDYDGEIMINDDNEWECPQCGNKDHSKMNVTRRTCGYLGENFWNVGKTKEIKARVLHL

SEQ ID NO: 663 - protein, 1439 aa, unidentified
  REGION 1..1439: note = Category: MG55 effectors
  REGION 1..1439: note = Description: MG55-238 effector
  source 1..1439: note = uncultivated organism sequence
MIKTLHVGLDVGSTTVKIIVMDENLNTIYTDYKRHFSDTKNTICNVLENLIIMYPNTEFTIALTGSGAISAAKFLDLPFIQEVVSCKRAVEKYIPETDVVIELGGEDAKIIYFDKFIEQRMNGTCAGGTGAFIDQMASLLNTDPTGLNELAKSHKLIYPIASRCGVFAKTDIQPLLNEGAAKEDIAASIFQAVVNQTISGLACGRPIRGNVAFLGGPLNYLSELRNRFIETLNLKDNEIIVPNEAHLLVAKGAALDSLNSHTITIEKLKSKIEVLKSSHDDTSNPLNPLFSIDAEYDEFKKRHEKDKVKRADFKTFKGNCFLGIDAGSTTTKLVVISEDGTLLYSLYGSNEGNPLQSVINMLKKLYAEKPSEAVIRFSGVTGYGEKLIQTALNVDLNEIETIAHYTAAKEFMPNVTSIVDIGGQDMKYIKMKNGAIDNIMLNEACSSGCGSFIETFAKSLGLSIQDFVQSALEARRPVDLGSRCTVFMNSKIKQAQKEGYSVGDISAGLSYSVIKNAIQKVMKVRDVKKLGAHIVVQGGTFYNDAVLRAFELIVGRNVVRPDIAGLMGAYGVALLAKEQYENNLDMDYVSSISNINELDKLEINITHIRCQGCENHCLLTINKFSNGTKYISGNRCEKGAGIVDKTLDRPNLIKYKFERTFNYTPLEEKNAPRGTIGIPRVLNMYEDYPFWFTFLTNLGFRVILSEKSNRKTYEKGMESMPSESVCFPAKLSHGHIIGLINSGIKTIFYPCIPYSRKEYQKADNHYNCPIVISYSEVLKNNVEELKDKNIKFLNPFLPFEPDKLAEIIMNLPEFKEYNFTKKELLSAAKKAETEYQNYKSDIHNKGQETLKFMEENNLKGIVLAGRPYHVDPEVNHGIDTLITSLGLCVLTEDSISNLTEAKRPLRVVDQWVFHARLYAAADFVGKHDNLELVQLNSFGCGVDAVTTDQVEEILTSYEKMYTLIKIDEINNLGAIRIRIRSLLASMNKRIKDNNSSMCNGNYEVNKKIFTKEMRKDYTILMPQMAPIHFEFLESAMKNSGYKMELLRDCTQHTVETGLKYVNNDACYPSILVTGQMIEALESGKYDLNKTALIMSQTGGGCRATNYIGFIRKALKDAGFENVPVISFNVVGMEKMPGFKLTIPLIERLIKSCIYADLLQKMLTKNRAYEINKGKTKELFDYWMEKCKKLVNKSSIKEFKQSIFDIVSDFEKIEIDTSVIKPKVGIVGEVLIKYHPFGNNFVADKLEQEGAEVILPDFMGFIKFIATHKITFNKLIKTDAIKAKLFKTAIKLIDLLEKPVISALNNSKKGYLLPCNIWDLEEKVNDILSIGNQTGEGWFLTAEMIEYIEHDIPNIVCVQPFACLPNHVVGKGVIKTIRSKFPEANIAPIDYDPGASEANQTNRIKLMMTVAKDNLKNKNNINKAIKKENYIIDEKNKISN

SEQ ID NO: 664 - protein, 1439 aa, unidentified
  REGION 1..1439: note = Category: MG55 effectors
  REGION 1..1439: note = Description: MG55-239 effector
  source 1..1439: note = uncultivated organism sequence
MIKTLHVGLDVGSTTVKIIVMDENLNTIYTDYKRHFSDTKNTICNVLENLIIMYPNTEFTIALTGSGAISAAKFLDLPFIQEVVSCKRAVEKYIPETDVVIELGGEDAKIIYFDKFIEQRMNGTCAGGTGAFIDQMASLLNTDPTGLNELAKSHKLIYPIASRCGVFAKTDIQPLLNEGAAKEDIAASIFQAVVNQTISGLACGRPIRGNVAFLGGPLNYLSELRNRFIETLNLKDNEIIVPNEAHLLVAKGAALDSLNSHTITIEKLKSKIEVLKSSHDDTSNPLNPLFSIDAEYDEFKKRHEKDKVKRADFKTFKGNCFLGIDAGSTTTKLVVISEDGTLLYSLYGSNEGNPLQSVINMLKKLYAEKPSEAVIRFSGVTGYGEKLIQTALNVDLNEIETIAHYTAAKEFMPNVTSIVDIGGQDMKYIKMKNGAIDNIMLNEACSSGCGSFIETFAKSLGLSIQDFVQSALEARRPVDLGSRCTVFMNSKIKQAQKEGYSVGDISAGLSYSVIKNAIQKVMKVRDVKKLGAHIVVQGGTFYNDAVLRAFELIVGRNVVRPDIAGLMGAYGVALLAKEQYENNLDMDYVSSISNINELDKLEINITHIRCQGCENHCLLTINKFSNGAKYISGNRCEKGAGIVDKTLDRPNLIKYKFERTFNYTPLEEKNAPRGTIGIPRVLNMYEDYPFWFTFLTNLGFRVILSEKSNRKTYEKGMESMPSESVCFPAKLSHGHIIGLINSGIKTIFYPCIPYSRKEYQKADNHYNCPIVISYSEVLKNNVEELKDKNIKFLNPFLPFEPDKLAEIIMNLPEFKEYNFTKKELLSAAKKAETEYQNYKSDIHNKGQETLKFMEENNLKGIVLAGRPYHVDPEVNHGIDTLITSLGLCVLTEDSISNLTEAKRPLRVVDQWVFHARLYAAADFVGKHDNLELVQLNSFGCGVDAVTTDQVEEILTSYEKMYTLIKIDEINNLGAIRIRIRSLLASMNKRIKDNNSSMCNGNYEVNKKIFTKEMRKDYTILMPQMAPIHFEFLESAMKNSGYKMELLKDCTQHTVETGLKYVNNDACYPSILVTGQMIEALESGKYDLNKTALIMSQTGGGCRATNYIGFIRKALKDAGFENVPVISFNVVGMEKMPGFKLTIPLIERLIKSCIYADLLQKMLTKNRAYEINKGKTKELFDYWMEKCKKLVNKSSIKEFKQSIFDIVSDFEKIEIDTSVIKPKVGIVGEVLIKYHPFGNNFVADKLEQEGAEVILPDFMGFIKFIATHKITFNKLIKTDAIKAKLFKTAIKLIDLLEKPVISALNNSKKGYLLPCNIWDLEGKVNDILSIGNQTGEGWFLTAEMIEYIEHDIPNIVCVQPFACLPNHVVGKGVIKTIRSKFPEANIAPIDYDPGASEANQTNRIKLMMTVAKDNLKNKNNINKAIKKENYIIDEKNKISN

SEQ ID NO: 665 - protein, 1439 aa, unidentified
  REGION 1..1439: note = Category: MG55 effectors
  REGION 1..1439: note = Description: MG55-240 effector
  source 1..1439: note = uncultivated organism sequence
MIKTLHVGLDVGSTTVKIIVMDENLNTIYTDYKRHFSDTKNTICNVLENLIIMYPDTEFTIALTGSGAISAAKFLDLPFIQEVVSCKRAVEKYIPETDVVIELGGEDAKIIYFDKFIEQRMNGTCAGGTGAFIDQMASLLNTDPTGLNELAKSHKLIYPIASRCGVFAKTDIQPLLNEGAAKEDIAASIFQAVVNQTISGLACGRPIRGNVAFLGGPLNYLSELRNRFIETLNLKDNEIIVPNEAHLLVAKGAALDSLNSHTITIEKLKSKIEVLKSSHDDTSNPLNPLFSIDAEYDEFKKRHEKDKVKRADFKTFKGNCFLGIDAGSTTTKLVVISEDGTLLYSLYGSNEGNPLQSVINMLKKLYAEKPSEAIIRFSGVTGYGEKLIQTALNVDLNEIETIAHYTAAKEFMPNVTSIVDIGGQDMKYIKMKNGAIDNIMLNEACSSGCGSFIETFAKSLGLSIQDFVQSALEARRPVDLGSRCTVFMNSKIKQAQKEGYSVGDISAGLSYSVIKNAIQKVMKVRDVKKLGAHIVVQGGTFYNDAVLRAFELIVGRNVVRPDIAGLMGAYGVALLAKEQYENNLDMDYVSSISNINELDKLEINITHIRCQGCENHCLLTINKFSNGTKYISGNRCEKGAGIVDKTLDRPNLIKYKFERTFNYTPLEEKNAPRGTIGIPRVLNMYEDYPFWFTFLTNLGFRVILSEKSNRKTYEKGMESMPSESVCFPAKLSHGHIIGLINSGIKTIFYPCIPYSRKEYQKADNHYNCPIVISYSEVLKNNVEELKDKNIKFLNPFLPFEPDKLAEIIMNLPEFKEYNFTKKELLSAAKKAETEYQNYKSDIHNKGQETLKFMEENNLKGIVLAGRPYHVDPEVNHGIDTLITSLGLCVLTEDSISNLTEAKRPLRVVDQWVFHARLYAAADFVGKHDNLELVQLNSFGCGVDAVTTDQVEEILTSYEKMYTLIKIDEINNLGAIRIRIRSLLASMNKRIKDNNSSMCNGNYEVNKKIFTKEMRKDYTILMPQMAPIHFEFLESAMKNSGYKMELLKDCTQHTVETGLKYVNNDACYPSILVTGQMIEALESGKYDLNKTALIMSQTGGGCRATNYIGFIRKALKDAGFENVPVISFNVVGMEKMPGFKLTIPLIERLIKSCIYADLLQKMLTKNRAYEINKGKTKELFNYWMEKCKKLVNKSSIKEFKQSIFDIVSDFEKIEIDTSVIKPKVGIVGEVLIKYHPFGNNFVADKLEQEGAEVILPDFMGFIKFIATHKITFNKLIKTDAIKAKLFKTAIKLIDLLEKPVISALNNSKKGYLLPCNIWDLEEKVNDILSIGNQTGEGWFLTAEMIEYIEHDIPNIVCVQPFACLPNHVVGKGVIKTIRSKFPEANIAPIDYDPGASEANQTNRIKLMMTVAKDNLKNKNNINKAIKKENYIIDEKNKISN

SEQ ID NO: 666 - protein, 354 aa, unidentified
  REGION 1..354: note = Category: MG55 effectors
  REGION 1..354: note = Description: MG55-241 effector
  source 1..354: note = uncultivated organism sequence
MRSKVEKLREEKGRLDQLEQRDWLTGQYNRVATERLVNRLIEERGCGVMLVLDVDHLRKINGRHGHIVGDHVLRAVAGVLDSMVFRHDVVGRIDGDMFVVFMPVDQEERFLQERCRQIRERLKEIRLPGDLSLSVSLNAGGAVWRSGDDYNSMFERAKEQLSSEKPIGPARERSAGSGARKGNFMVDLRQVRGELAEQTMIPGAYCQDYETFKNIYRFVERRLRRAKISSYILLLTLTDGNGDFPPLEKRERQMATLRELIQNSLRSGDVFTQYSSCQYLVMVADASAENVEMIASRIREAFYRIIDNGTGQVLLHHCYPMWPAGRPARDPGAGRDEDGVDPGNALGNVSGEFK

SEQ ID NO: 667 - protein, 967 aa, unidentified
  REGION 1..967: note = Category: MG55 effectors
  REGION 1..967: note = Description: MG55-242 effector
  source 1..967: note = uncultivated organism sequence
MRLGLDIGSTTIKCVVLDDNDKLLYSTYERHYSQITTKIGEILTRVRKEIDGVENALVAMSGSAGMGVADQCDITFVQEVYATRVATNTFIPGTDVVIELGGEDAKILFLSGGMEVRMNGTCAGGTGAFIDQMATLLNVPLEEMNDLAKGYEKTYTIASRCGVFAKTDIQPLLNQGARKADIAQSIFHAVVNQTVAGLAQGREIEGNVVYLGGPLTFMEELRKAFDEELGTKGTCPENSLYYVACGAALCAESTINFDEIIEKVSHYTGSGNFAFNPPLFKNEEEYEQFKARHAKATVKEVPLEDYDGDCYIGMDAGSTTVKAVVMGKNGELLYSKYLSNSGNPVPIIKDFLNELYDKKPNIKIKSSAVTGYGEDIIKNAFCVDYGIVETVAHFTAAKSFMPDVEFVIDIGGQDIKCFKVHNGAIDNIFLNEACSSGCGSFLQTFANALGYSIQDFAQLGIFGKHPVDLGSRCTVFMNSSVKQAQKDGATIEDISSGLSLSVVKNALYKVIRASGPDELGKKIVVQGGTFLNDAVLRAFEQEMGVNVVRPTISGLMGAYGAAMYAQSKSEGSAEGSTLLKKPDLENFVHEIKVVNCGMCNNNCRLTVNTFADGRKFIAGNRCERPITKKSPDESLNMYEYKLKVLREYKPVKGSRGKIGIPMGLNMFELLPFWHRFFTELGFEVIRSPFSTRKLYQKGQQTIPSDTVCFPAKLMHGHVKALIDMGVDTIFYPCMSYNIDEHLGDNHYNCPVVAYYPEVIYNNMKEVHNVTFIKDYFGIHRPKDFYKKAYEDLSKYFPDLTQKEVKNAAKCAYEEYDNYFAKIRQHGNEIIEKAEKEGKDIIVLSGRPYHIDPEINHGISKMIASFGVAIVSEDCVSDRVEKFKVGVLNQWTYHSRLYAAAKYVSTRKDMNLVQLVSFGCGVDAITTDEVRDILEKNGKIYTQIKIDEITNLGAVKIRIRSLLAAIGK

SEQ ID NO: 668 - protein, 983 aa, unidentified
  REGION 1..983: note = Category: MG55 effectors
  REGION 1..983: note = Description: MG55-243 effector
  source 1..983: note = uncultivated organism sequence
MLAMNESQEKYTLGIDVGSTTVKAVLLNSKGEVLYVSYKRHFSKVRETSESEVKKIREKFGNLEVKFAFTGSAGLGLSERSHLPFVQEVQSSYVAIKRLYPMTDSAIELGGEDAKIIFITGGLEERMNGQCAGGTGAFIDQMATLLNVTVPGLEELATQSKKTYPIASRCGVFAKSDIQALLNQGASKEDVAMSIFYAVADQTIAGLAQGRRIQGHVLFLGGPLHFLNSLGKAFKDRLKLTDEEAIFPEDSDTFVAKGAAIYAEGFKETISLDEIADHLEQANMKGTITTGKPLFNNQEEYDSFVASHQDFDIKRADLRTYEGKAYLGIDAGSTTTKIVLLSENNEILYDHYESNLGLPIDRIVEQLKTIYSLANPKLDIVGSAVTGYGEDLIRAALHVDYGMVETVAHFKAARFYEPDVNFVIDIGGQDIKCFNVKNGAIDSIMLNEACSSGCGSFLQTFAQSLGYGVEEFAQTAYFAKNPVLLGSRCTVFMNSSVKQAQREGAPVDDIAAGLCRSVVKNALYKVIRVRDAKELGEKIVCQGGTFLNNAVLRSFEQEIGHQVIRPSIAGLMGAFGAALTAKEKGGERGLISPKDLDNFGYTSTHSTCHMCGARCPLTLLKFPNGQIFLSGNKCDKPEGRRRSSDALDLYVYKRNRIKELLPSPASPKGVVGLPMSLVMWEQLPFWDAFFKHLGFDTLVSPFSTRKMYREGQKTIPSDTACYPAKLMHGHVDYLLQQNPTFIFYPSESYNVNEKRGDNHFNCPVVAYYGELIKKNDERFPTATFLDPFVDLSAPKKAIATLTDCLSSYGVKKKEVKNAFEFAYQAELKYRADLKQKAKQIIAEAREKKMITVVLAGRPYHVDPEVSHGIERLLDSLGVAVVSEDALDYSEQPQSKVHVLNQWTFHARLYDAANYVAKHEDMELVQLISFGCGVDAVTSDEVRRILESQHKLYTGIKIDEINNLGAVRIRLRSLLAAVEEKKHV

SEQ ID NO: 669 - protein, 720 aa, unidentified
  REGION 1..720: note = Category: MG55 effectors
  REGION 1..720: note = Description: MG55-244 effector
  source 1..720: note = uncultivated organism sequence
MKIIKRSGSEDTFDARKITAAVTKANYEVPTKERLSKEQIKSITADVENICLDMNRALSVEEIQDLVEEQIMDRRAFAVARKYITYRYNRALLRKANSTDKQILSLLECNNEMVKQENSNKNPTVNSVQRDYMAGEVSKDITKRFLLPSEIVRAHEQGIIHFHDSDYFAQHMHNCCLVNLEDMLQNGTVISETMIEKPKSFSTACNIATQSIAQIASSQYGGQSISLTHLAPFVDISRQKYKKQVENELKEAGLSYNSKQVDEIAEIRVRDEIKRGVQMIQYQVITLMTTNGQAPFVSVFMYLDEAPEGRLREDLALIMEEILRQRMQGVKNEKGVYITPAFPKLLYVLEEDNVREGSKYWYLTQLAAKCTAKRMVPDYISEKIMKKMKDGNCYPCMGCRSFLTVYHDEKDRPKFYGRFNQGVVTINLVDVACSSDGDEETFWKILDKRLELCKKALMYRHNRLKGTPSDVAPILWQYGALARLKKGEVIDKLLYNGYSTISLGYAGLCECTRYMTGKSHTDPSATPFALKVMEKLNDACSRWREEENIDFSLYGTPLESTTYKFAKCLQKRFGIIKGVTDKNYITNSYHVHVTEEINAFDKLKFEAQFQNLSPGGAVSYVEVPNMENNIDAVLQVMQFIYDNIMYAELNTKSDYCQVCDYSGQIEIVNDEHGKLIWKCPNCGNTDQDKMNVARRTCGYIGTQFWNQGRTQEIKERVLHL

SEQ ID NO: 670 - protein, 1439 aa, unidentified
  REGION 1..1439: note = Category: MG55 effectors
  REGION 1..1439: note = Description: MG55-245 effector
  source 1..1439: note = uncultivated organism sequence
MIKTLHVGLDVGSTTVKIIVMDENLNTIYTDYKRHFSDTQNTICNVLENLIIMYPDTEFTIALTGSGAISAAKFLDLPFIQEVVSCKRAVEKYIPETDVVIELGGEDAKIIYFDKFIEQRMNGTCAGGTGAFIDQMASLLNTDPTGLNELAKSHKLIYPIASRCGVFAKTDIQPLLNEGAAKEDIAASIFQAVVNQTISGLACGRPIRGNVAFLGGPLNYLSELRNRFIETLNLKDNEIIVPNEAHLLVAKGAALDSLNSHTITIEKLKSKIEVLKSSHDDTSNPLNPLFSIDAEYDEFKKRHEKDKVKRADFKTFKGNCFLGIDAGSTTTKLVVISEDGTLLYSLYGSNEGNPLQSVINMLKKLYAEKPSEAVIRFSGVTGYGEKLIQTALNVDLNEIETIAHYTAAKEFMPNVTSIVDIGGQDMKYIKMKNGAIDNIMLNEACSSGCGSFIETFAKSLGLSIQDFVQSALEARRPVDLGSRCTVFMNSKIKQAQKEGYSVGDISAGLSYSVIKNAIQKVMKVRDVKKLGAHIVVQGGTFYNDAVLRAFELIVGRNVVRPDIAGLMGAYGVALLAKEQYKNNLDMDYVSSISNINELDKLEINITHIRCQGCENHCLLTINKFSNGAKYISGNRCEKGAGIVDKTLDRPNLIKYKFERTFNYTPLEEKNAPRGTIGIPRVLNMYEDYPFWFTFLTNLGFRVILSEKSNRKTYEKGMESMPSESVCFPAKLSHGHIIGLINSGIKTIFYPCIPYSRKEYQKADNHYNCPIVISYSEVLKNNVEELKDKNIKFLNPFLPFEPDKLAEIIMNLPEFKEYNFTKKELLSAAKKAETEYQNYKSDIHNKGQETLKFMEENNLKGIVLAGRPYHVDPEVNHGIDTLITSLGLCVLTEDSISNLTEAKRPLRVVDQWVFHARLYAAADFVGKHDNLELVQLNSFGCGVDAVTTDQVEEILTSYEKMYTLIKIDEINNLGAIRIRIRSLLASMNKRIKDNNSSMCNGNYEVNKKIFTKEMRKDYTILMPQMAPIHFEFLESAMKNSGYKMELLKDCTQHTVETGLKYVNNDACYPSILVTGQMIEALESGKYDLNKTALIMSQTGGGCRATNYIGFIRKALKDAGFENVPVISFNVVGMEKMPGFKLTIPLIERLIKSCIYADLLQKMLTKNRAYEINKGKTKELFDYWMEKCKKLVNKSSIKEFKQSIFDIVSDFEKIEIDTSVIKPKVGIVGEVLIKYHPFGNNFVADKLEQEGAEVILPDFMGFIKFIATHKITFNKLIKTDAIKAKLFKTAIKLIDLLEKPVISALNNSKKGYLLPCNIWDLEGKVNDILSIGNQTGEGWFLTAEMIEYIEHDIPNIVCVQPFACLPNHVVGKGVIKTIRSKFPEANIAPIDYDPGASEANQTNRIKLMMTVAKDNLKNKNNINKAIKKENYIIDEKNKISN

SEQ ID NO: 671 - protein, 1439 aa, unidentified
  REGION 1..1439: note = Category: MG55 effectors
  REGION 1..1439: note = Description: MG55-246 effector
  source 1..1439: note = uncultivated organism sequence
MIKTLHVGLDVGSTTVKIIVMDENLNTIYTDYKRHFSDTKNTICNVLENLIIMYPNTEFTIALTGSGAISAAKFLDLPFIQEVVSCKRAVEKYIPETDVVIELGGEDAKIIYFDKFIEQRMNGTCAGGTGAFIDQMASLLNTDPTGLNELAKSHKLIYPIASRCGVFAKTDIQPLLNEGAAKEDIAASIFQAVVNQTISGLACGRPIRGNVAFLGGPLNYLSELRNRFIETLNLKDNEIIVPNEAHLLVAKGAALDSLNSHTITIEKLKSKIEVLKSSHDDTSNPLNPLFSIDAEYDEFKKRHEKDKVKRADFKTFKGNCFLGIDAGSTTTKLVVISEDGTLLYSLYGSNEGNPLQSVINMLKKLYAEKPSEAVIRFSGVTGYGEKLIQTALNVDLNEIETIAHYTAAKEFMPNVTSIVDIGGQDMKYIKMKNGAIDNIMLNEACSSGCGSFIETFAKSLGLSIQDFVQSALEARRPVDLGSRCTVFMNSKIKQAQKEGYSVGDISAGLSYSVIKNAIQKVMKVRDVKKLGAHIVVQGGTFYNDAVLRAFELIVGRNVVRPDIAGLMGAYGVALLAKEQYENNLDMDYVSSISNINELDKLEINITHIRCQGCENHCLLTINKFSNGTKYISGNRCEKGAGIVDKTLDRPNLIKYKFERTFNYTPLEEKNAPRGTIGIPRVLNMYEDYPFWFTFLTNLGFRVILSEKSNRKTYEKGMESMPSESVCFPAKLSHGHIIGLINSGIKTIFYPCIPYSRKEYQKADNHYNCPIVISYSEVLKNNVEELKDKNIKFLNPFLPFEPDKLAEIIMNLPEFKEYNFTKKELLSAAKKAETEYQNYKSDIHNKGQETLKFMEENNLKGIVLAGRPYHVDPEVNHGIDTLITSLGLCVLTEDSISNLTEAKRPLRVVDQWVFHARLYAAADFVGKHDNLELVQLNSFGCGVDAVTTDQVEEILTSYEKMYTLIKIDEINNLGAIRIRIRSLLASMNKRIKDNNSSMCNGNYEVNKKIFTKEMRKDYTILMPQMAPIHFEFLESAMKNSGYKMELLRDCTQHTVETGLKYVNNDACYPSILVTGQMIEALESGKYDLNKTALIMSQTGGGCRATNYIGFIRKALKDAGFENVPVISFNVVGMEKMPGFKLTIPLIERLIKSCIYADLLQKMLTKNRAYEINKGKTKELFDYWMEKCKKLVNKSSIKEFKQSIFDIVSDFEKIEIDTSVIKPKVGIVGEVLIKYHPFGNNFVADKLEQEGAEVILPDFMGFIKFIATHKITFNKLIKTDAIKAKLFKTAIKLIDLLEKPVISALNNSKKGYLLPCNIWNLEEKVNDILSIGNQTGEGWFLTAEMIEYIEHDIPNIVCVQPFACLPNHVVGKGVIKTIRSKFPEANIAPIDYDPGASEANQTNRIKLMMTVAKDNLKNKNNINKAIKKENYIIDEKNKISN

SEQ ID NO: 672 - protein, 1416 aa, unidentified
  REGION 1..1416: note = Category: MG55 effectors
  REGION 1..1416: note = Description: MG55-247 effector
  source 1..1416: note = uncultivated organism sequence
MKLDFNTLGIDIGSTTVKIAILNKDGEIIFSDYQRHYANIQETLAKIIDEAYEEFGDIPVSPMITGSGGLTLSKHMEIPFVQEVVAVATSLKDYAPRTDVAIELGGEDAKIIYFTGGIDQRMNGICAGGTGSFIDQMATLLKTDAAGLNEYAKNYKAIYPIAARCGVFAKTDIQPLINEGATKEDLSASIFQAVVNQTISGLACGKPIKGNVAFLGGPLHFLTELKQAFIRTLGLEGDAIIAPEHSHLFAASGAAMNAHADVQSSLGELKEKLSHKIELEFEVTRMEPLFASEKEYEDFTERHNKHNVRKGDFASYKGDLFLGIDAGSTTTKVAVIGDDGSLLYSFYSSNNGSPLKTALKAMKDIYSKMPEGARIVRSCSTGYGEALLKSALLLDEGEVETVAHYTAAAFFDPNVDCILDIGGQDMKCIKIKNNSVDKVQLNEACSSGCGSFIETFAKSLNYEVADFAKIALFAENPIDLGSRCTVFMNSKVKQAQKEGASVADISAGLAYSVIKNALLKVIKLTDPKDLGKQVVVQGGTFYNDAVLRSFERISGCEAIRPDIAGIMGAFGAALIAKDRYTGQKSTMLSFKEINELRFKTSMTRCQGCINHCLLTVNEFTGNRKFISGNRCEKGLGLEKNKEQIPNLFEYKNERVFRHYKPLKKADATRGVVGIPRVLNMYENYPFWFTFFTKLGYSVKLSPVSSRKIYELGIESIPSESECYPAKLAHGHVTWLIRQGLEYIFYPCIPYERVEVPDAGNHYNCPIVTSYGENIKNNIEELRDDKIKYQNPFISLESEEILTKRLVDFFRKENGIPAAEIKAAAHEGWLEMQAVREDMNKKGKEVLQYLKETGRHGIVLAGRPYHSDPEINHGIPDLITSYGVAVLTEDSISELSEVDRPTIVMDQWMYHSRLYKAASFVAKNDNLDLIQLNSFGCGLDAVTTDQVSDILTKQNKIYTVLKIDEVNNLGAARIRIRSLLAAVKDRERKKIEAKRVDTAHHRVIFTEQMRKDYTILVPDMSPIHFEILESALASCGYNVEVLKADSKCIDYGLKYVNNDACYPSLIVVGQFMQALLSGKYDLHKVALIITQTGGGCRATNYIGFIRRALEKAGMGYIPVISMSAGIEKNPGLKVNLEMANKALQALIYGDVFMRVLYKTRPYEKVKGSANALHEKWKKIAIESVKKANKKQFKKNIQNIVKEFDELELVDIKKPKVGIVGEILVKFMPLANNFIVELLEEEGAEAVCPDLIDFFMYSLYNANFKAEYLGKKKSSAKINNFLIWFIERYRKCANDALAASKRFHPTVPIQKLAEYASPIVSCGNQTGEGWFLTGEMIELIKSGVPNIVCTQPFGCLPNHVVGKGVIKELRHQYPDSNIVAVDYDPGASEVNQLNRIKLMLSTAGKNLIAESKDNEETA

SEQ ID NO: 673 - protein, 1439 aa, unidentified
  REGION 1..1439: note = Category: MG55 effectors
  REGION 1..1439: note = Description: MG55-248 effector
  source 1..1439: note = uncultivated organism sequence
MIKTLHVGLDVGSTTVKIIVMDENLNTIYTDYKRHFSDTKNTICNVLENLIIMYPNTEFTIALTGSGAISAAKFLDLPFIQEVVSCKRAVEKYIPETDVVIELGGEDAKIIYFDKFIEQRMNGTCAGGTGAFIDQMASLLNTDPTGLNELAKSHKLIYPIASRCGVFAKTDIQPLLNEGAAKEDIAASIFQAVVNQTISGLACGRPIRGNVAFLGGPLNYLSELRNRFIETLNLKDNEIIVPNEAHLLVAKGAALDSLNSHTITIEKLKSKIEVLKSSHDDTSNPLNPLFSIDAEYDEFKKRHEKDKVKRADFKTFKGNCFLGIDAGSTTTKLVVISEDGTLLYSLYGSNEGNPLQSVINMLKKLYAEKPSEAVIRFSGVTGYGEKLIQTALNVDLNEIETIAHYTAAKEFMPNVTSIVDIGGQDMKYIKMKNGAIDNIMLNEACSSGCGSFIETFAKSLGLSIQDFVQSALEARRPVDLGSRCTVFMNSKIKQAQKEGYSVGDISAGLSYSVIKNAIQKVMKVRDVKKLGAHIVVQGGTFYNDAVLRAFELIVGRNVVRPDIAGLMGAYGVALLAKEQYENNLDMDYVSSISNINELDKLEINITHIRCQGCENHCLLTINKFSNGAKYISGNRCEKGAGIVDKTLDRPNLIKYKFERTFNYTPLEEKNAPRGTIGIPRVLNMYEDYPFWFTFLTNLGFRVILSEKSNRKTYEKGMESMPSESVCFPAKLSHGHIIGLINSGIKTIFYPCIPYSRKEYQKADNHYNCPIVISYSEVLKNNVEELKDKNIKFLNPFLPFEPDKLAEIIMNLPEFKEYNFTKKELLSAAKKAETEYQNYKSDIHNKGQETLKFMEENNLKGIVLAGRPYHVDPEVNHGIDTLITSLGLCVLTEDSISNLTEAKRPLRVVDQWVFHARLYAAADFVGKHDNLELVQLNSFGCGVDAVTTDQVEEILTSYEKMYTLIKIDEINNLGAIRIRIRSLLASMNKRIKDNNSSMCNGNYEVNKKIFTKEMRKDYTILMPQMAPIHFEFLESAMKNSGYKMELLRDCTQHTVETGLKYVNNDACYPSILVTGQMIEALESGKYDLNKTALIMSQTGGGCRATNYIGFIRKALKDAGFENVPVISFNVVGMEKMPGFKLTIPLIERLIKSCIYADLLQKMLTKNRAYEINKGKTKELFDYWMEKCKKLVNKSSIKEFKQSIFDIVSDFEKIEIDTSVIKPKVGIVGEVLIKYHPFGNNFVADKLEQEGAEVILPDFMGFIKFIATHKITFNKLIKTDAIKAKLFKTAIKLIDLLEKPVISALNNSKKGYLLPCNIWNLEEKVNDILSIGNQTGEGWFLTAEMIEYIEHDIPNIVCVQPFACLPNHVVGKGVIKTIRSKFPEANIAPIDYDPGASEANQTNRIKLMMTVAKDNLKNKNNINKAIKKENYIIDEKNKISN

SEQ ID NO: 674 - protein, 1439 aa, unidentified
  REGION 1..1439: note = Category: MG55 effectors
  REGION 1..1439: note = Description: MG55-249 effector
  source 1..1439: note = uncultivated organism sequence
MIKTLHVGLDVGSTTVKIIVMDENLNTIYTDYKRHFSDTKNTICNVLENLIIMYPDTEFTIALTGSGAISAAKFLDLPFIQEVVSCKRAVEKYIPETDVVIELGGEDAKIIYFDKFIEQRMNGTCAGGTGAFIDQMASLLNTDPTGLNELAKSHKLIYPIASRCGVFAKTDIQPLLNEGAAKEDIAASIFQAVVNQTISGLACGRPIRGNVAFLGGPLNYLSELRNRFIETLNLKDNEIIVPNEAHLLVAKGAALDSLNSHTITIEKLKSKIEVLKSSHDDTSNPLNPLFSIDAEYDEFKKRHEKDKVKRADFKTFKGNCFLGIDAGSTTTKLVVISEDGTLLYSLYGSNEGNPLQSVINMLKKLYAEKPSEAVIRFSGVTGYGEKLIQTALNVDLNEIETIAHYTAAKEFMPNVTSIVDIGGQDMKYIKMKNGAIDNIMLNEACSSGCGSFIETFAKSLGLSIQDFVQSALEARRPVDLGSRCTVFMNSKIKQAQKEGYSVGDISAGLSYSVIKNAIQKVMKVRDVKKLGAHIVVQGGTFYNDAVLRAFELIVGRNVVRPDIAGLMGAYGVALLAKEQYENNLDMDYVSSISNINELDKLEINITHIRCQGCENHCLLTINKFSNGTKYISGNRCEKGAGIVDKTLDRPNLIKYKFERTFNYTPLEEKNAPRGTIGIPRVLNMYEDYPFWFTFLTNLGFRVILSEKSNRKTYEKGMESMPSESVCFPAKLSHGHIIGLINSGIKTIFYPCIPYSRKEYQKADNHYNCPIVISYSEVLKNNVEELKDKNIKFLNPFLPFEPDKLAEIIMNLPEFKEYNFTKKELLSAAKKAETEYQNYKSDIHNKGQETLKFMEENNLKGIVLAGRPYHVDPEVNHGIDTLITSLGLCVLTEDSISNLTEAKRPLRVVDQWVFHARLYAAADFVGKHDNLELVQLNSFGCGVDAVTTDQVEEILTSYEKMYTLIKIDEINNLGAIRIRIRSLLASMNKRIKDNDSSMCNGNYEVNKKIFTKEMRKDYTILMPQMAPIHFEFLESAMKNSGYKMELLKDCTQHTVETGLKYVNNDACYPSILVTGQMIEALESGKYDLNKTALIMSQTGGGCRATNYIGFIRKALKDAGFENVPVISFNVVGMEKMPGFKLTIPLIERLIKSCIYADLLQKMLTKNRAYEINKGKTKELFDYWMEKCKKLVNKSSIKEFKQSIFDIVSDFEKIEIDTSVIKPKVGIVGEVLIKYHPFGNNFVADKLEQEGAEVILPDFMGFIKFIATHKITFNKLIKTDAIKAKLFKTAIKLIDLLEKPVIFALNNSKKGYLLPCNIWNLEEKVNDILSIGNQTGEGWFLTAEMIEYIEHDIPNIICVQPFACLPNHVVGKGVIKTIRSKFPEANIAPIDYDPGASEANQTNRIKLMMTVAKDNLKNKNNINKAIKKENYIIDEKNKISN

SEQ ID NO: 675 - protein, 1439 aa, unidentified
  REGION 1..1439: note = Category: MG55 effectors
  REGION 1..1439: note = Description: MG55-250 effector
  source 1..1439: note = uncultivated organism sequence
MIKTLHVGLDVGSTTVKIIVMDENLNTIYTDYKRHFSDTKNTICNVLENLIIMYPNTEFTIALTGSGAISAAKFLDLPFIQEVVSCKRAVEKYIPETDVVIELGGEDAKIIYFDKFIEQRMNGTCAGGTGAFIDQMASLLNTDPTGLNELAKSHKLIYPIASRCGVFAKTDIQPLLNEGAAKEDIAASIFQAVVNQTISGLACGRPIRGNVAFLGGPLNYLSELRNRFIETLNLKDNEIIVPNEAHLLVAKGAALDSLNSHTITIEKLKSKIEVLKSSHDDTSNPLNPLFSIDAEYDEFKKRHEKDKVKRADFKTFKGNCFLGIDAGSTTTKLVVISEDGTLLYSLYGSNEGNPLQSVINMLKKLYAEKPSEAVIRFSGVTGYGEKLIQTALNVDLNEIETIAHYTAAKEFMPNVTSIVDIGGQDMKYIKMKNGAIDNIMLNEACSSGCGSFIETFAKSLGLSIQDFVQSALEARRPVDLGSRCTVFMNSKIKQAQKEGYSVGDISAGLSYSVIKNAIQKVMKVRDVKKLGAHIVVQGGTFYNDAVLRAFELIVGRNVVRPDIAGLMGAYGVALLAKEQYENNLDMDYVSSISNINELDKLEINITHIRCQGCENHCLLTINKFSNGAKYISGNRCEKGAGIVDKTLDRPNLIKYKFERTFNYTPLEEKNAPRGTIGIPRVLNMYEDYPFWFTFLTNLGFRVILSEKSNRKTYEKGMESMPSESVCFPAKLSHGHIIGLINSGIKTIFYPCIPYSRKEYQKADNHYNCPIVISYSEVLKNNVEELKDKNIKFLNPFLPFEPDKLAEIIMNLPEFKEYNFTKKELLSAAKKAETEYQNYKSDIHNKGQETLKFMEENNLKGIVLAGRPYHVDPEVNHGIDTLITSLGLCVLTEDSISNLTEAKRPLRVVDQWVFHARLYAAADFVGKHDNLELVQLNSFGCGVDAVTTDQVEEILTSYEKMYTLIKIDEINNLGAIRIRIRSLLASMNKRIKDNNSSICNGNYEVNKKIFTKEMRKDYTILMPQMAPIHFEFLESAMKNSGYKMELLRDCTQHTVETGLKYVNNDACYPSILVTGQMIEALESGKYDLNKTALIMSQTGGGCRATNYIGFIRKALKDAGFENVPVISFNVVGMEKMPGFKLTIPLIERLIKSCIYADLLQKMLTKNRAYEINKGKTKELFDYWMEKCKKLVNKSSIKEFKQSIFDIVSDFEKIEIDTSVIKPKVGIVGEVLIKYHPFGNNFVADKLEQEGAEVILPDFMGFIKFIATHKITFNKLIKTDAIKAKLFKTAIKLIDLLEKPVISALNNSKKGYLLPCNIWNLEEKVNDILSIGNQTGEGWFLTAEMIEYIEHDIPNIVCVQPFACLPNHVVGKGVIKTIRSKFPEANIAPIDYDPGASEANQTNRIKLMMTVAKDNLKNKNNINKAIKKENYIIDEKNKISN

SEQ ID NO: 676 - protein, 1439 aa, unidentified
  REGION 1..1439: note = Category: MG55 effectors
  REGION 1..1439: note = Description: MG55-251 effector
  source 1..1439: note = uncultivated organism sequence
MIKTLHVGLDVGSTTVKIIVMDENLNTIYTDYKRHFSDTKNTICNVLENLIIMYPDTEFTIALTGSGAISAAKFLDLPFIQEVVSCKRAVEKYIPETDVVIELGGEDAKIIYFDKFIEQRMNGTCAGGTGAFIDQMASLLNTDPTGLNELAKSHKLIYPIASRCGVFAKTDIQPLLNEGAAKEDIAASIFQAVVNQTISGLACGRPIRGNVAFLGGPLNYLSELRNRFIETLNLKDNEIIVPNEAHLLVAKGAALDSLNSHTITIEKLKSKIEVLKSSHDDTSNPLNPLFSIDAEYDEFKKRHEKDKVKRADFKTFKGNCFLGIDAGSTTTKLVVISEDGTLLYSLYGSNEGNPLQSVINMLKKLYAEKPSEAVIRFSGVTGYGEKLIQTALNVDLNEIETIAHYTAAKEFMPNVTSIVDIGGQDMKYIKMKNGAIDNIMLNEACSSGCGSFIETFAKSLGLSIQDFVQSALEARRPVDLGSRCTVFMNSKIKQAQKEGYSVGDISAGLSYSVIKNAIQKVMKVRDVKKLGAHIVVQGGTFYNDAVLRAFELIVGRNVVRPDIAGLMGAYGVALLAKEQYKNNLDMDYVSSISNINELDKLEINITHIRCQGCENHCLLTINKFSNGAKYISGNRCEKGAGIVDKTLDRPNLIKYKFERTFNYTPLEEKNAPRGTIGIPRVLNMYEDYPFWFTFLTNLGFRVILSEKSNRKTYEKGMESMPSESVCFPAKLSHGHIIGLINSGIKTIFYPCIPYSRKEYQKADNHYNCPIVISYSEVLKNNVEELKDKNIKFLNPFLPFEPDKLAEIIMNLPEFKEYNFTKKELLSAAKKAETEYQNYKSDIHNKGQETLKFMEENNLKGIVLAGRPYHVDPEVNHGIDTLITSLGLCVLTEDSISNLTEAKRPLRVVDQWVFHARLYAAADFVGKHDNLELVQLNSFGCGVDAVTTDQVEEILTSYEKMYTLIKIDEINNLGAIRIRIRSLLASMNKRIKDNNSSMCNGNYEVNKKIFTKEMRKDYTILMPQMAPIHFEFLESAMKNSGYKMELLKDCTQHTVETGLKYVNNDACYPSILVTGQMIEALESGKYDLNKTALIMSQTGGGCRATNYIGFIRKALKDAGFENVPVISFNVVGMEKMPGFKLTIPLIERLIKSCIYADLLQKMLTKNRAYEINKGKTKELFDYWMEKCKKLVNKSSIKEFKQSIFDIVSDFEKIEIDTSVIKPKVGIVGEVLIKYHPFGNNFVADKLEQEGAEVILPDFMGFIKFIATHKITFNKLIKTDAIKAKLFKTAIKLIDLLEKPVISALNNSKKGYLLPCNIWDLEGKVNDILSIGNQTGEGWFLTAEMIEYIEHDIPNIVCVQPFACLPNHVVGKGVIKTIRSKFPEANIAPIDYDPGASEANQTNRIKLMMTVAKDNLKNKNNINKAIKKENYIIDEKNKISN

SEQ ID NO: 677 - protein, 1439 aa, unidentified
  REGION 1..1439: note = Category: MG55 effectors
  REGION 1..1439: note = Description: MG55-252 effector
  source 1..1439: note = uncultivated organism sequence
MIKTLHVGLDVGSTTVKIIVMDENLNTIYTDYKRHFSDTKNTICNVLENLIIMYPDTEFTIALTGSGAISAAKFLDLPFIQEVVSCKRAVEKYIPETDVVIELGGEDAKIIYFDKFIEQRMNGTCAGGTGAFIDQMASLLNTDPTGLNELAKSHKLIYPIASRCGVFAKTDIQPLLNEGAAKEDIAASIFQAVVNQTISGLACGRPIRGNVAFLGGPLNYLSELRNRFIETLNLKDNEIIVPNEAHLLVAKGAALDSLNSHTITIEKLKSKIEVLKSSHDDTSNPLNPLFSIDAEYDEFKKRHEKDKVKRADFKTFKGNCFLGIDAGSTTTKLVVISEDGTLLYSLYGSNEGNPLQSVINMLKKLYAEKPSEAIIRFSGVTGYGEKLIQTALNVDLNEIETIAHYTAAKEFMPNVTSIVDIGGQDMKYIKMKNGAIDNIMLNEACSSGCGSFIETFAKSLGLSIQDFVQSALEARRPVDLGSRCTVFMNSKIKQAQKEGYSVGDISAGLSYSVIKNAIQKVMKVRDVKKLGAHIVVQGGTFYNDAVLRAFELIVGRNVVRPDIAGLMGAYGVALLAKEQYENNLDMDYVSSISNINELDKLEINITHIRCQGCENHCLLTINKFSNGTKYISGNRCEKGAGIVDKTLDRPNLIKYKFERTFNYTPLEEKNAPRGTIGIPRVLNMYEDYPFWFTFLTNLGFRVILSEKSNRKTYEKGMESMPSESVCFPAKLSHGHIIGLINSGIKTIFYPCIPYSRKEYQKADNHYNCPIVISYSEVLKNNVEELKDKNIKFLNPFLPFEPDKLAEIIMNLPEFKEYNFTKKELLSAAKKAETEYQNYKSDIHNKGQETLKFMEENNLKGIVLAGRPYHVDPEVNHGIDTLITSLGLCVLTEDSISNLTEAKRPLRVVDQWVFHARLYAAADFVGKHDNLELVQLNSFGCGVDAVTTDQVEEILTSYEKMYTLIKIDEINNLGAIRIRIRSLLASMNKRIKDNNSSMCNGNYEVNKKIFTKEMRKDYTILMPQMAPIHFEFLESAMKNSGYKMELLRDCTQHTVETGLKYVNNDACYPSILVTGQMIEALESGKYDLNKTALIMSQTGGGCRATNYIGFIRKALKDAGFENVPVISFNVVGMEKMSGFKLTIPLIERLIKSCIYADLLQKMLTKNRAYEINKGKTKELFDYWMEKCKKLVNKSSIKEFKQSIFDIVSDFEKIEIDTSVIKPKVGIVGEVLIKYHPFGNNFVADKLEQEGAEVILPDFMGFIKFIATHKITFNKLIKTDAIKAKLFKTAIKLIDLLEKPVISALNNSKKGYLLPCNIWDLEGKVNDILSIGNQTGEGWFLTAEMIEYIEHDIPNIVCVQPFACLPNHVVGKGVIKTIRSKFPEANIAPIDYDPGASEANQTNRIKLMMTVAKDNLKNKNNINKAIKKENYIIDEKNKISN

SEQ ID NO: 678 - protein, 1439 aa, unidentified
  REGION 1..1439: note = Category: MG55 effectors
  REGION 1..1439: note = Description: MG55-253 effector
  source 1..1439: note = uncultivated organism sequence
MIKTLHVGLDVGSTTVKIIVMDENLNTIYTDYKRHFSDTQNTICNVLENLIIMYPDTEFTIALTGSGAISAAKFLDLPFIQEVVSCKRAVEKYIPETDVVIELGGEDAKIIYFDKFIEQRMNGTCAGGTGAFIDQMASLLNTDPTGLNELAKSHKLIYPIASRCGVFAKTDIQPLLNEGAAKEDIAASIFQAVVNQTISGLACGRPIRGNVAFLGGPLNYLSELRNRFIETLNLKDNEIIVPNEAHLLVAKGAALDSLNSHTITIEKLKSKIEVLKSSHDDTSNPLNPLFSIDAEYDEFKKRHEKDKVKRADFKTFKGNCFLGIDAGSTTTKLVVISEDGTLLYSLYGSNEGNPLQSVINMLKKLYAEKPSEAVIRFSGVTGYGEKLIQTALNVDLNEIETIAHYTAAKEFMPNVTSIVDIGGQDMKYIKMKNGAIDNIMLNEACSSGCGSFIETFAKSLGLSIQDFVQSALEARRPVDLGSRCTVFMNSKIKQAQKEGYSVGDISAGLSYSVIKNAIQKVMKVRDVKKLGAHIVVQGGTFYNDAVLRAFELIVGRNVVRPDIAGLMGAYGVALLAKEQYENNLDMDYVSAISNINELDKLEINITHIRCQGCENHCLLTINKFSNGAKYISGNRCEKGAGIVDKTLDRPNLIKYKFERTFNYTPLEEKNAPRGTIGIPRVLNMYEDYPFWFTFLTNLGFRVILSEKSNRKTYEKGMESMPSESVCFPAKLSHGHIIGLINSGIKTIFYPCIPYSRKEYQKADNHYNCPIVISYSEVLKNNVEELKDKNIKFLNPFLPFEPDKLAEIIMNLPEFKEYNFTKKELLSAAKKAETEYQNYKSDIHNKGQETLKFMEENNLKGIVLAGRPYHVDPEVNHGIDTLITSLGLCVLTEDSISNLTEAKRPLRVVDQWVFHARLYAAADFVGKHDNLELVQLNSFGCGVDAVTTDQVEEILTSYEKMYTLIKIDEINNLGAIRIRIRSLLASMNKRIKDNNSSMCNGNYEVNKKIFTKEMRKDYTILMPQMAPIHFEFLESAMKNSGYKMELLRDCTQHTVETGLKYVNNDACYPSILVTGQMIEALESGKYDLNKTALIMSQTGGGCRATNYIGFIRKALKDAGFENVPVISFNVVGMEKMPGFKLTIPLIERLIKSCIYADLLQKMLTKNRAYEINKGKTKELFDYWMEKCKKLVNKSSIKEFKQSIFDIVSDFEKIEIDTSVIKPKVGIVGEVLIKYHPFGNNFVADKLEQEGAEVILPDFMGFIKFIATHKITFNKLIKTDAIKAKLFKTAIKLIDLLEKPVISALNNSKKGYLLPCNIWDLEEKVNDILSIGNQTGEGWFLTAEMIEYIEHDIPNIVCVQPFACLPNHVVGKGVIKTIRSKFPEANIAPIDYDPGASEANQTNRIKLMMTVAKDNLKNKNNINKAIKKENYIIDEKNKISN

SEQ ID NO: 679 - protein, 1439 aa, unidentified
  REGION 1..1439: note = Category: MG55 effectors
  REGION 1..1439: note = Description: MG55-254 effector
  source 1..1439: note = uncultivated organism sequence
MIKTLHVGLDVGSTTVKIIVMDENLNTIYTDYKRHFSDTKNTICNVLENLIIMYPDTEFTIALTGSGAISAAKFLDLPFIQEVVSCKRAVEKYIPETDVVIELGGEDAKIIYFDKFIEQRMNGTCAGGTGAFIDQMASLLNTDPTGLNELAKSHKLIYPIASRCGVFAKTDIQPLLNEGAAKEDIAASIFQAVVNQTISGLACGRPIRGNVAFLGGPLNYLSELRNRFIETLNLKDNEIIVPNEAHLLVAKGAALDSLNSHTITIEKLKSKIEVLKSSHDDTSNPLNPLFSIDAEYDEFKKRHEKDKVKRADFKTFRGNCFLGIDAGSTTTKLVVISEDGTLLYSLYGSNEGNPLQSVINMLKKLYAEKPSEAVIRFSGVTGYGEKLIQTALNVDLNEIETIAHYTAAKEFMPNVTSIVDIGGQDMKYIKMKNGAIDNIMLNEACSSGCGSFIETFAKSLGLSIQDFVQSALEARRPVDLGSRCTVFMNSKIKQAQKEGYSVGDISAGLSYSVIKNAIQKVMKVRDVKKLGAHIVVQGGTFYNDAVLRAFELIVGRNVVRPDIAGLMGAYGVALLAKEQYENNLDMDYVSSISNINELDKLEINITHIRCQGCENHCLLTINKFSNGTKYISGNRCEKGAGIVDKTLDRPNLIKYKFERTFNYTPLEEKNAPRGTIGIPRVLNMYEDYPFWFTFLTNLGFRVILSEKSNRKTYEKGMESMPSESVCFPAKLSHGHIIGLINSGIKTIFYPCIPYSRKEYQKADNHYNCPIVISYSEVLKNNVEELKDKNIKFLNPFLPFEPDKLAEIIMNLPEFKEYNFTKKELLSAAKKAETEYQNYKSDIHNKGQETLKFMEENNLKGIVLAGRPYHVDPEVNHGIDTLITSLGLCVLTEDSISNLTEAKRPLRVVDQWVFHARLYAAADFVGKHDNLELVQLNSFGCGVDAVTTDQVEEILTSYEKMYTLIKIDEINNLGAIRIRIRSLLASMNKRIKDNNSSMCNGNYEVNKKIFTKEMRKDYTILMPQMAPIHFEFLESAMKNSGYKMELLRDCTQHTVETGLKYVNNDACYPSILVTGQMIEALESGKYDLNKTALIMSQTGGGCRATNYIGFIRKALKDAGFENVPVISFNVVGMEKMPGFKLTIPLIERLIKSCIYADLLQKMLTKNRAYEINKGKTKELFDYWMEKCKKLVNKSSIKEFKQSIFDIVSDFEKIEIDTSVIKPKVGIVGEVLIKYHPFGNNFVADKLEQEGAEVILPDFMGFIKFIATHKITFNKLIKTDAIKAKLFKTAIKLIDLLEKPVISALNNSKKGYLLPCNIWNLEEKVNDILSIGNQTGEGWFLTAEMIEYIEHDIPNIVCVQPFACLPNHVVGKGVIKTIRSKFPEANIAPIDYDPGASEANQTNRIKLMMTVAKDNLKNKNNINKAIKKENYIIDEKNKISN

SEQ ID NO: 680 - protein, 723 aa, unidentified
  REGION 1..723: note = Category: MG55 effectors
  REGION 1..723: note = Description: MG55-255 effector
  source 1..723: note = uncultivated organism sequence
MRIIKRNGSEEDFNIEKIINAVKKANGSGEHKFLTDEQIEDVADYVEYKCNKIRRAVSVEEIQDMVEDQLMAKGAFELARRYVRYRYNRSLVRKANTTDNRILSLIECNNEEVKQENSNKNPTVNSVQRDYMAGEVSRDLTRRMLLPADIVEADKEGIIHFHDSDYFAQHMHNCDLVNLEDMLQNGTVISDTLIERPHSFSTACNIATQIIAQVASNQYGGQSISLAHLAPFVQVSREKIRRETLAEIEELGVHPTEEKINDIVEQRLRKEVNRGVQTIQYQVVTLLTTNGQAPFVTVFMYLNEAKNEQEKHDLAMIIEETLKQRHKGVKNEKGVWITPAFPKLIYVLEEDNITEDSKYWYLTELAAKCTAKRMVPDYISEKVMLQSKIDKNGEGHCFTCMGCRSFLTPYVDENGKPKYYGRFNQGVVTVNLIDIGLSAGKDLDKFWKIFDERMELCHRALQCRHERLTGTLSDAAPILWQYGALARLKKGEKIDKLLHGGYSTLSLGYAGLWECVYSLIGKKLTEKEGKELGLEIMQKLNDYCAKWKKEENIDYSIYGTPLESTTYKFAKCLQKRFGIIKGVTDKNYITNSYHVHVTENIDAFSKLKLESEFQALSPGGAISYVEVPNMQDNIPAVLQVIKFIYDNIMYAELNTKSDYCQVCGYDGEIKIVHDDGKLVWECPNCGNRDQDKMNVARRTCGYIGTQFWNQGRTQEIEERVLHL

SEQ ID NO: 681 - protein, 723 aa, unidentified
  REGION 1..723: note = Category: MG55 effectors
  REGION 1..723: note = Description: MG55-256 effector
  source 1..723: note = uncultivated organism sequence
MKIIKRNGSEVPFDITKIITAVTKASDSVSGKSRLTREQITQIAAEVTDQCQSLNRAVSVEEIQDMVENKLMDMKAHDIARHYITYRYVQSLKRQTNTTDERILSLIECQNEEVKQENANKNPTVNSVQRDYMAGEISKDLTARLLLDPEIVKAHQEGLIHFHDSDYFAQHMHNCDLVNLEDMLQNGTVISGTYIEKPHSFSTACNIATQIIAQVASNQYGGQSISLTHLAPFVDVSRKKIAAEVEAEMEGLNVSAERKKAIVERRLRNEINRGVQTIQYQVVTLMTTNGQAPFITVFMYLGEARNAQEKADLAIIIEETIRQRYQGVKNEAGVWITPAFPKLIYVLEEDNIRPGTPYYYLTELAAKCTAKRMVPDYISEKKMLEMKIDKNGEGHCYTCMGCRSFLTPYVDPETGKPKYYGRFNQGVVTINLVDVALSSGGNFEKFWKIFDERLALCHRALQARHKRLLGTPSDAAPILWQYGALARLKKGEKIDKLLFGGYSTISLGYAGLYECVKYMTGRSHTDAGAKPFALSVMQHMNDKCNEWKKAENIDYSLYGTPLESTTYKFAKCLQKRFGIVPGITDKNYITNSYHVHVSEPIDAFTKLKFESEFQRLSPGGAISYVEVPNMQDNLEAVISVLQFIYDNIMYAELNTKSDYCQCCGYDGEIKIVEDDGKLVWECPKCGNRDQNKLNVARRTCGYIGTQFWNQGRTQEIKDRVLHL

SEQ ID NO: 682 - protein, 723 aa, unidentified
  REGION 1..723: note = Category: MG55 effectors
  REGION 1..723: note = Description: MG55-257 effector
  source 1..723: note = uncultivated organism sequence
MKIIKRNGSEVPFDITKIITAVTKASDSVSGKSRLTREQITQIAAEVTDQCQSLNRAVSVEEIQDMVENKLMDMKAHDIARHYITYRYVQSLKRQTNTTDERILSLIECQNEEVKQENANKNPTVNSVQRDYMAGEISKDLTARLLLDPEIVKAHQEGLIHFHDSDYFAQHMHNCDLVNLEDMLQNGTVISGTYIEKPHSFSTACNIATQIIAQVASNQYGGQSISLTHLAPFVDVSRKKIAAEVETEMEGLNVSAERKKAIVERRLRNEINRGVQTIQYQVVTLMTTNGQAPFITVFMYLGEARNAQEKADLAIIIEETIRQRYQGVKNEAGVWITPAFPKLIYVLEEDNIRPGTPYYYLTELAAKCTAKRMVPDYISEKKMLEMKIDKNGEGHCYTCMGCRSFLTPYVDPETGKPKYYGRFNQGVVTINLVDVALSSGGNFEKFWKIFDERLALCHRALQARHKRLLGTPSDAAPILWQYGALARLKKGEKIDKLLFGGYSTISLGYAGLYECVKYMTGRSHTDAGAKPFALSVMQHMNDKCNEWKKAENIDYSLYGTPLESTTYKFAKCLQKRFGIVPGITDKNYITNSYHVHVSEPIDAFTKLKFESEFQRLSPGGAISYVEVPNMQDNLEAVISVLQFIYDNIMYAELNTKSDYCQCCGYDGEIKIVEDDGKLVWECPKCGNRDQNKLNVARRTCGYIGTQFWNQGRTQEIKDRVLHL

SEQ ID NO: 683 - protein, 703 aa, unidentified
  REGION 1..703: note = Category: MG55 effectors
  REGION 1..703: note = Description: MG55-258 effector
  source 1..703: note = uncultivated organism sequence
MKVIKRDGSTADFDSSKIIVAIQKANQVVEPEDRIDQERIEAIAHYVESKNRMRLLVEDIQDMVEHQLMDEGKFNLAKSYIIYRYTRALVRKANTTDESILSLIRNSNKDVMEENSNKNAVMASTQRDLIAGEVSKDLTRRLILPEKISKAHDEGAIHFHDADYFVQPIFNCCLINVGDMLDNGTVMNGKLIESPKSFQVACTVMTQIIASVASSQYGGQSVDIRHLGKYLRRSYEKFKLTIKAEVGDSVADEVVERLTKRRLQDELRSGVQTIQYQINTLMTTNGQSPFVTIFLNLQADDEYLEENAMIVEEILRQRLEGIKNDKGVFVTPAFPKLVYVLDEHNCLKGGKYDYITKLAVKCSAKRLYPDYISAKKMRENYEGNVFAPMGCRSFLAAWKDDEGNYKFEGRFNQGVVSLNLPQVAILAHGDEEKFWPLLDERLQLCYEALMCRHNSLKGIRSDVSPVHWQYGAIARLEKGEVIDKYLEKGYSTIGLYEMTKLMKDVSHTTPEGEEFALRVMKYLRAACDKWKKETGLGFALYGTPAESLCYRFARIDKERFGTIADVTDKGYYTNSYHVDVREDIDAFSKFNFESQFQRISSGGAISYVEIPNMRHNLEAMEDVVRFIYDNIQYAEFNTKSDYCHVCGFDGEIIINDDLEWECPNCGNKNQTLMNVTRRTCGYLGENFWNVGKTKEIKSRVLHL

SEQ ID NO: 684 - protein, 972 aa, unidentified
  REGION 1..972: note = Category: MG55 effectors
  REGION 1..972: note = Description: MG55-259 effector
  source 1..972: note = uncultivated organism sequence
MQIGLDIGSTTIKIAVLDDAGQLQFSKYERHYSQIAEKMQQLLAELHIKMPLLKTARLAISGSAGIGIADSCSLQFVQEVFAEKVCTERLNPGTEAVIELGGEDAKLLFLGRHFDARMNDSCAGGTGAFIDQMASLLSVPTEAMNELAQQASTRYTIASRCGVFAKSDIQPLLNQGAAKADLAASIFDAVASQAVTGLAKGRPITGKVLYLGGPLTFMSELRHSFDKILKIEGYCPENSLYYVAMGAAFCAENKVDLTELPAKLAAVGAQRDFDHLEPLFASTAEYDEFMERHSKERIEPGDISAATEAYIGMDAGSTTIKIAVISPSGQLLDSSYQSNKGNPVIAIKEYLQNFYIKYPHCRILGSAVTGYGEDLIRNGFSVDYGIVETMAHFIAAKTLQPDVDFILDIGGQDIKCLKIHNGCIDNIFLNEACSSGCGSFLQTFAEILGYSAEEFARIGLFADKPVDLGSRCTVFMNSSVKQAQKDGATVANISAGLSLSIVKNALYKVIRPGSKESIGKHIVVQGGTFLNDCVLRAFEKEMGLKVVRPNIAGLMGAYGAAIYSRSRHQETGHVSTLADAAALENFVHEVKAVTCGLCSNHCHLTVNTFASGKRFISGNRCERPVTHCAPDDTFNLYRQKLQLLESLKGVPGKRGKIGLPMGLNMYELLPFWHAFFTRLGFEVITSPIYDKTIFQKGQNTIPSDTVCYPAKLMHGHIKWLLENGINTIFYPCMTYNVDENSAENCYNCPVVAYYPEVLHANMHDLDNATYIFDYLGLGHKKVLLKKLQQICKEHFPDIGSSELKAALQEAYAAYNKFEAQVKELGQTIINTARSQHKPIVVLAGRPYHIDPKVNHSIDRLITTMGAALVSEDAVSSHISMQELNDDLQVLNQWTYHSRLYAAAKYVSRSSDMYMVHLVSFGCGCDAITADECRRILEEHGQIYTQIKIDDIDNLGAAKIRLRSLFAAAGLES

SEQ ID NO: 685 - protein, 724 aa, unidentified
  REGION 1..724: note = Category: MG55 effectors
  REGION 1..724: note = Description: MG55-260 effector
  source 1..724: note = uncultivated organism sequence
MKIIKRNGAEENFDISKIIMAVTKANAAVEECDRMTPRQIQRIAESVELACQELGRSAAVEEIQDMVEKQIMAHGAFEVAKAYITYRYTRSLVRRANTTDDRILSLIECNNEEAKQENSNKNPIVNSTQRDYMAGEVSRDITSRLLLPKDIVEAHEEGIIHFHDADYYAQHMHNCDLVNLEDMLENGTVITGTLIERPHSFSTACNIATQIIAQVASNQYGGQSISLTHLAPFVQVSRERIRREVEAEMQAIDAHPGEEKLAELVENRVREEIRRGVQTIQYQVVTLLTTNGQAPFVTVFMYLGEAKNEQERHDLAMIIEETLRQRYQGVKNEKGVWVTPAFPKLIYVLEEDNIHEDSPYWYLTELAARCTAKRMVPDYISEKKMLELKVDKNGEGHCYTCMGCRSFLTPYVDENGKPKYYGRFNQGVVTINLPDVALSSGGNMEKFWKIFDERLELCHRALMCRHERLKGTLSDAAPILWQYGALARLKKGEPIDKLLYGGYSTISLGYAGLYECVKYMTGKSHTDPSATPFALEIMQHMNDACAKWKQMHNIDFSLYGTPLESTTYKFAKCLQKRFGIIPGVTDKGYITNSYHIHVTEHIDAFSKLAFESKFQALSPGGAISYVEVPNMQNNIPAVLEVMKFIYDNIMYAELNTKSDYCQKCGFDGEIEILEQDGKLVWTCPQCGNQDQDTMNVARRTCGYIGTQFWNQGRTQEIKERVLHL

SEQ ID NO: 686 - protein, 728 aa, unidentified
  REGION 1..728: note = Category: MG55 effectors
  REGION 1..728: note = Description: MG55-261 effector
  source 1..728: note = uncultivated organism sequence
MYIIKRSGAEELFDHTKIETAIAKANETVEAVERATKAERELVARRVEECAETCGHALNIEEIQDLVVTNIMDLKLYRLAQNYAVYRYKRELVRKSNTTDEQILSLIECNNEEVKQENSNKNPTVNSVQRDYMAGEVSKDLTRRFLLPPDIVQAHEEGLIHFHDADYFAQHMHNCCLVNLEDMLQNGTVISETQIDPPKSFSTACNVATQAIAQVASSQYGGQTISLSHLAPFVQVSREKFRKQAIAEYDANGIDYTDEQVERAVAMRVKEEIKKGVQTIQYQVITLMTTNGQAPFITVFMYLDEVPEGQTRDDLAAIIEEMLHQRIIGVKNEKGVYVTPAFPKLIYVLEEDNIHEESKYFYLTSLAAQCTAKRMVPDYISEKKMKEIKIDANGDSYCYPSMGCRSFLTPYIDPETNKPKYYGRFNQGVVTLNLVDVACSSDGDMDKFWKILDERLQLCYRALMCRHKRLLGTPSDVAPILWQNGALARLKKGEPIDKLLFNGYSTISLGYAGLYETCMRMLGVSHTEKEKGMPFAKAVMQHLNDACKEWKEKENIDFSVYGTPLESTTYKFAKCLQKRFGKIKDVTDHNYITNSYHVCVREEINAFDKLKFESEFQPLSPGGAISYVEVPNMQNNIEAVLSVMKYIYDNIMYAELNTKSDYCMECGYDGEIKIVKEEGSGKLVWECPCCGNRDQNKMSVARRTCGYIGTQFWNQGRTAEIADRRLHL

SEQ ID NO: 687 - protein, 984 aa, unidentified
  REGION 1..984: note = Category: MG55 effectors
  REGION 1..984: note = Description: MG55-262 effector
  source 1..984: note = uncultivated organism sequence
MARRIKNVASNNYTLGIDIGSTTAKLALMCDGKIVYSKYQRHRSRIIGTTLDMLREMKEIHPVDKVRVTISGSAGMGMAEKAGIDFIQEVYATGEVVYKLAPDTGVVIELGGEDAKVIFFKGGVDERMNGSCAGGTGAFIDQMAVLLNMSVDDMDKASLEAKRIYPIASRCGVFAKTDIQPLLNQGASKADIAASIFQAVVNQTITGLIQGRKIEGKVMFLGGPLYYCEGLKKRFYETLSLTKETAVFPEYALYAVAMGASMYAQNSEEISFEELEKRIENSAKCESRGLDTLPPLFASKEEYDYFVQRHNKATVPQKDINTYIGNAWLGIDCGSTTTKLVLISDDRSILYSFYSSNKGNPVKLVKEQLEIIYFLCQNRIKICGSSVTGYGEELIRHAFRTDEGVVETIAHYTAAKYFRPDVDFILDIGGQDIKCFKIRNGAIDSIMLNEACSSGCGSFVETFAKAMGYNVSDFAKLGIFAKSPVNLGSRCTVFMNSSVKQSQKDGASVEDISAGLSASVVKNAIYKVIRANSPKELGNCIVVQGGTFYNDAVLRAFEKEIKNNVIRPSIAGLMGAYGAALHIMKSKESTLLSQKELETFTHTSNSSICRGCSNNCHLTINRFSDGETFVSGNQCQKALGLKNTEELPNLYAWKRNFFENLKPVRGTRGKIGIPMALSMYELAPLWNAFFTYLGFEVHFSALSNRKTYEKGQFTIPSDTACYPAKIMHGHMVELMEKGFENIFYPSITYNINEHAGDNHFNCPIVAYYAELLNGNMEELKNINFLYPYVSIDSPSELSKTIYDTILKLDPKVSKSEVLKAAKSGFAAYKEYKNKVKNEGAKAIAYARENGKRIMILAGRPYHIDPEIGHGIDKLATSLGFVVVSEDSVCELAPVQYVKVLDQWTFHSRLYRAARYATEHSDTELVQLVSFGCGVDAITTDEVRSILEEKHKHYTQIKIDEITNLGAVKIRLRSLIGALEEGEAK

SEQ ID NO: 688 - protein, 1416 aa, unidentified
  REGION 1..1416: note = Category: MG55 effectors
  REGION 1..1416: note = Description: MG55-263 effector
  source 1..1416: note = uncultivated organism sequence
MKLDFNTLGIDIGSTTVKIAILNKDGEIIFSDYQRHYANIQETLAKIIDEAYEEFGDIPVSPMITGSGGLTLSKHMEIPFVQEVVAVATSLKDYAPRTDVAIELGGEDAKIIYFTGGIDQRMNGICAGGTGSFIDQMATLLKTDAAGLNEYAKNYKAIYPIAARCGVFAKTDIQPLINEGATKEDLSASIFQAVVNQTISGLACGKPIKGNVAFLGGPLHFLTELKQAFIRTLGLEGDAIIAPEHSHLFAASGAAMNAHADVQSSLGELKEKLSHKIELEFEVTRMEPLFASEKEYEDFTERHNKHNVKKGDFASYKGDLFLGIDAGSTTTKVAVIGDDGSLLYSFYSSNNGSPLKTALKAMKDIYSKMPEGARIVRSCSTGYGEALLKSALLLDEGEVETVAHYTAAAFFDPNVDCILDIGGQDMKCIKIKNNSVDKVQLNEACSSGCGSFIETFAKSLNYEVADFAKIALFAENPIDLGSRCTVFMNSKVKQAQKEGASVADISAGLAYSVIKNALLKVIKLTDPKDLGKQVVVQGGTFYNDAVLRSFERISGCEAIRPDIAGIMGAFGAALIAKDRYTGQKSTMLSFKEINELRFKTSMTRCQGCINHCLLTVNEFTGDRKFISGNRCEKGLGLEKNKEHIPNLFEYKNERVFKHYKPLKKADAPRGVVGIPRVLNMYENYPFWFTFFTKLGYSVKLSPVSSRKIYELGIESIPSESECYPAKLAHGHVTWLIRQGLEYIFYPCIPYERVEVPDAGNHYNCPIVTSYGENIKNNIEELRDDKIKYQNPFISLESEEILTKRLVDFFRKENGIPAAEIKAAAHEGWLEMQAVREDMNKKGKEVLQYLKETGRHGIVLAGRPYHSDPEINHGIPDLITSYGVAVLTEDSISELSEVDRPTIVMDQWMYHSRLYKAASFVAKNDNLDLIQLNSFGCGLDAVTTDQVNDILTKQNKIYTVLKIDEVNNLGAARIRIRSLLAAVKDRERKKIEAKRVDTAHHRVIFTEQMRKDYTILVPDMSPIHFEILESALASCGYNVEVLKADSKCIDYGLKYVNNDACYPSLIVVGQFMQALLSGKYDLHKVALIITQTGGGCRATNYIGFIRRALEKAGMGYIPVISMSAGIEKNPGLKVNLEMANKALQALIYGDVFMRVLYKTRPYEKVKGSANALHEKWKKIAIESVKKANKKQFKKNIQNIVKEFDELELVDIKKPKVGIVGEILVKFMPLANNFIVELLEEEGAEAVCPDLIDFFMYSLYNANFKAEYLGKKKSSAKINNFLIWFIERYRKCANDALAASKRFHPTVPIQKLAEYASPIVSCGNQTGEGWFLTGEMIELIKSGVPNIVCTQPFGCLPNHVVGKGVIKELRHQYPDSNIVAVDYDPGASEVNQLNRIKLMLSTAGKNLIAESKDNEETA

SEQ ID NO: 689 - protein, 1415 aa, unidentified
  REGION 1..1415: note = Category: MG56 effectors
  REGION 1..1415: note = Description: MG56-1 effector
  source 1..1415: note = uncultivated organism sequence
MDKITREDKAKYFINKNKTGVHLLERDKKRARVFSLFKKLVTALHAEYIDRVLSENDNTESLSDDFASLINKLVDYKNKKSRESDDLSDIEKNVNKLKKELASSINKVLKNKNNAIEIAIGERNITIDFNALTGAGDPGADKLVEAFREIPIEDLKKAEIFKHYIDEQDWDLEDISWGKEADALNPFSFFHKWKTYLRKFYQIRAKIYDTDGYDSDTENSGIVKGLAHQITTRILDDNAELFVQNYQKYLSQIAEKDYKAKLDEQLSKELSVNSDIFKPENFANVLSQSQIDIYNKAVGIANRFLNEKLQGSGKKPDFFKKLYKQILGKENKDENSDSKDEFLEFDTIDELQKFLLVANDYDGKPFLQYAVDLLDKDIFTGLLDKENKKLNFPETELGEFRLNTNQLSFISNFAFGNWEVFRDAVKRVKEELKNKKDDELTGEEKQVIDSVNKFLDENEIALSELVQIFRFKVEDPDSSEKTKINLTGKDLYKLVKEESAWNLPKEELQKFSQEDTGDAALYNLLLVFELYFNSLRNGRAWHTAVEEKEMEESCDKKTCPEHKSLRELFEDLKSYVSAHGEQIKESKNKRNDYMEKLSILFYRLNDMNKFLYLFELADDESLYTNKALQEIVKINPRKNKINEAFNATRNYATKAIVVEDKIKLTFERQKLADGWSLKKTENRWGNQYEAFILKKNDKYHLGINAKLPFRIENNFNLDGFEIMEYKLLKNKTLFGSSWRGYFNESSPNYTLERLRKENPDTAVKKINKMLAEFLNEKFVKTNYFSAITDKFKEIVALLESGKVDFELSYEKLSSLYAKKFSTEYKDDDSDKSTKLDRMEELSKYLVDEQILNTIPLHCIVNKIKSILDKKEGVLSGNEVAMCYIATLEKYMYEIEFINVNKKNPPTNLVLFEIYNKDFSDKKEADSTKNIHTLYFLELFSAENKKNSQFKLSGQAEVFFRDALPESEREKVSKAELKKPKTDKIPYRKKRFASPKILFHVPIEINRLAGKGGVADEIKEYIKNNKDEISVIGVDRGEKHLAYYCLLDKDGNIKEIDSLNEIEGIKFQEKLTAREEQRMKNRKLWKTIEQIKDLKKGYISFVIRKLAEMIVDNNTILTMEELNRGFKRGRMKIEKNIYQQLENALLHKLEYFVKEKTSGGIRNAYQLVPPVGPQYKWGSQQGVVFYVDAKFTSKTCPKCGYRRRGVNFGSSKDIRKMMDKKDLQLFYDKENDRFIVKYKWEYKYKNPSGNEIPFRSDYLLTDSNGFETIYSNIDRSVWRKKQHNVERINVTKILKEALLDVDLDDLAINKNIFEIPDIEVSFSKLKMALKYWTNLRFEDNWSDIEDDKRDVLQCPSCHFDTRKANHLINGDAVGAYNIARKGILAKQNLAEKNKAKVILKEWDEYTHQQRSEQRDL

SEQ ID NO: 690 - protein, 1189 aa, unidentified
  REGION 1..1189: note = Category: MG56 effectors
  REGION 1..1189: note = Description: MG56-2 effector
  source 1..1189: note = uncultivated organism sequence
MNKYQKTSAIRLALKVNENFESNLKNAIETYKKNTADPEELCSRLIEILKKVIELFDKEEVKKDEYKSLLYKLKLSPHIIGSEFGLFISGSGRADSLRLNSRKLKGFFSTLFKKTNESLISLEKQLTEKNTPNFSPKNTRKILDEIFKSSLDIEHELLKRKAPTLKEAIDLIQKQNYHSDDLVPQEFAELQKTLAKLSKILDKLKESLSIFHEVITASLNEHTLTRQTTLEEREKKIKEEEDKLTQKVWAGDLKDNLNYISRFVAGHKNAFKATMNYLGKSINDNFITVEEAGKWTKKFYKIIAEGYKTEIKGLKKEVDELAKQIIGSDLEEFVKSNKDKIRVNKIKIDQNIKNSAINIFKKYLPDLPSNIKDDFLIKFLRNRILKVLIDNLIGKENKKYQIKPERKNAANELAKIINNKSEDNLEESQIIEILLNKKQKAAHTAGTNYTHIINKSNFIQNKNKVAKYIGNIKAKIATYKKDKKNLSHLALLVLDKKDENFDLLLVPKKFKKEFLYTLERLNEPVGDKKIYKIESLTLRSAKTLISANLGELIPFFKAGKWHTIFAFKAFLIKYLLDAGSINSTKAAALKCKVVEEFKKLIEYASLGGQEQKEADKFIGVVDKLICNSKNRFSHIELSHSFAEKSISIVEKDYSDVADFKKDFTELYNFVLVANVNSGKLIKLIQEAQKKFNNPNNLQFSNLFLLTSSGVKGNYRQNRRYLKEEKELLQSIKKQDFESIRLNPEIKIFLELGLDTQSSEELKELASKTRRGKDRLSIVFTITKNAKEEEDFLPAFAQDEDLETRIFELNKVVNENLKNAVRIGLDRGESELVSAVFGKIEEGRVKFQKIQVYYIDYKKIFDENQEGAVKIFLNPSLLFDENKPYTKYTKHLIEKEISQENLSYAKVIKDKVIMNADISSVVNQLMYITFADLNIEQVENLIVAEPGFVDKTKTIQLKFNGINSKKFGINASYLYLNGNITEDVKENFISAFLIKVLEHKLKIFNERVLPLIKIGQISIDTLPKNTKEALASNIAGVIAYLIEKEFNNQAIIHLEDLSAQFKDDHSKNGRAISREFEWALYRRLGKIENDFDLVPPKLGQTIYFAEIKKLKQAGIIKYLPTGKSSSFCPECLQFNFTNKDGIKKYIKITQKCQFCDFEIGNNELGIDSPDTLAAYNLIYPEFERRAINNN

SEQ ID NO: 691 - protein, 1403 aa, unidentified
  REGION 1..1403: note = Category: MG57 effectors
  REGION 1..1403: note = Description: MG57-1 effector
  source 1..1403: note = uncultivated organism sequence
MEKFTNLYQLSKTLRFKLEPIGNTAETFKQWLNDMNSTNESDNLFAKDKNIYDAYLVIKSIMDKLHEQFIEKSLLSDEAKQIDFSEYYEVFKDSTKEISTDLEKRLRREIGNTYNVGGSFFLNEIATATKKLEEEKNKVRKSGKKSKGEKTDNKKKKKPYEYLTDAKILNYLSANVKTLAIQNDIEEQELDKHIKQFKGFWGYLGGYNQNRENYYEVEKEASTAVATRIVHENLPTFCSNALRFEKHKDEYLGIHQYLKDNNLITKIKNSSGEENEAETMTDTIFLIGHFNECLAQTQIEEYNRIIGNYNYLINLYNQARCDEKGFNKIDEFEKLKKQIGCGKKKHMFASLIKDKQSELTETEKKNEIEDGAILSVETLLKRAKEAGDVMFNNGNDEVEIKTIPDFIQFLKECDNWDGIYMSKTAINKISNLYFANWHSIVDTFIEIYNGKDKELKEKVNTSVTYDKKREDPLKLRDAIELSGLFAVLDTVPTEHFFKESLFKEDDTNEYRGLLDKTLPPSKNLIKLLCFDIEHNTKAFLNKSRDVIKLEKYKEENIQADEEDQKIKLIKDWFDAATDVMRIVRYFAVRKGKMKGNLPNVTMEQALSNLLYRDDAQWFKWYDLIRNYLTKKPQDDVKENKLKLNFGNSSLLGGWSDGQEKTKAATLLRCENDLYLCILKKRDVFDTSKDNPIYSSPSNASRLIIRNLKFQTLAGKGFLSEYGISYGEMSKDDPKKAIQCLQEIIKERYVKKYPLLEKFVTIKYADKSEFDAEINETLKECYVCEFVPINWNLIVEKQNNDELFLFKILCKDYKPNSIGKRDLQTIYWEDVLSDASNHQLCAGAEIFMRKPIANESPLTHRIGSKLVNKRDKDGNTIPDKFYREIYLYANGKTKVISKEAKKYIDEEKATIKDVNHEIIKDKRFYGDSQEPQYMFHCPIKLNYKTKGYKEPQYAFPEVNAKINGALQQSENMQFVGIDRGEKHLVYSCTIDKDGKIVKDTNNEWKCQHHDNINGTDYVKKLEAIAGERIIAKKNWQAQNRIKDLKCGYISHVVHRLVEEVIKDDNNRISPHAYIVLEDLNTEMKRGRQKIEKQVYQNLEVALAKKLNFVVDKEAKQGELGSVSKALQLTPPISNYQDIEGKKQFGVMLYTRANYTSITDPATGWRKTIYIRNGKEEDIKKQVLEKFSDFGFDGKDYFFEYTEANAGHTWRMYSGKNGEPLLRFQNKKQMQKDKNVWVPEPINVVEILDNLFADFDKAKSFKEQINGGVKLKKIDGRNETAWQSLRYALDIIQQIRNSGIKETDDNFLYSPVRSANGEHFDTHFPEKNGELSAIRDADANGAYNIARKGLIMDAHYRYWIEQGKPEIKKGETALSLYVSDIEWDMWLLDKEMWKRHLGEFALKKK

SEQ ID NO: 692 - protein, 1372 aa, unidentified
  REGION 1..1372: note = Category: MG57 effectors
  REGION 1..1372: note = Description: MG57-2 effector
  source 1..1372: note = uncultivated organism sequence
MKTKTITIMKEKEQYSDFTNLYQLSKTLRFELKPVGKTAETFKQWLSEMNNSDKEENLFAKDKKIKNAYMVIKPIIDKLHERFIEKSLTSKEAKEIDFSPYFEAYKQKNVLDTFEEGLRKKIGETYTVAGGFQYLTDKRILNYLSANVEELAKQNGIDEKTLANHIEQFKGFGGYLSGYNQNRMNYYTTKEEQSTAVATRIVHENLPTFCDNILRFEKSREGYLSICQYLKDNNREIKIKNAQGEETEAETITEAIFQIKHFNSCLAQSQIEEYNRIIGNYNFLINLYNQARREEKEFKKLDEFESLYKQIGCGEKKSLFESLHDDSDLKALLQKIKEAGDTFFKECCDETEISTVSAFIKFLKECDNWEGIYMSSAAVNKISNLYFTNWHSIKDKLKESNANACITYDKDREEPVKLRDAVELSELFAVLNKESLEHLFKESLFKDNKLDTELTPSHNLINLLCSDVKQNIDYFWEHSEGITDLINDKNQSNEETQKIKQIKEWLDAAMNAMRIVRYFAVRKSKMKGNMPNVTIEQALSNLLYNDDAQWFKWYDLVRNYLTKKPQDDVKENKLKLNFGNSTLMNGWDMNKERDNTAVIIRRNNLYYLGIMDKNYNKILDADKIKSDDKSSYYEKMDYKQIALPTGVGGFVRKCFDTAQQYGWSCPKDCLNEDEKIIIKDDEARKNLTKIIDCYKDFFDKYEKDGFKYRNFNFRFLKSTEYEKLSDFFKDVERQRYMIKFRNISADYIDDLVNEGKLYLFQIYNKDFSTGRNERNGSKGKPNMHTLYWKTLFDETNLNDVVYKLNGQAEIFMREPIAENSPVKHGVGSKLVNKRDKDGNTIPEQIYKEIYLFANNKVKKENLSAEAKNYIESEKVKIKEAKYEIVKDNRFYGETKYMFHCPITINFKAGSSSGVNEKITDALQQSDNLQFIGIDRGEKHLVYSCTIDKYGKIIKCNHHDNINGTDYVQKLEAVANERLIAKKNWQQQNRIKDLKSGYISHVVHRLVEETIKDDKTIAPHAYIVLEDLNSEMKRGRQKIEKQVYQNLELALAKKFNFVVDKTAKQGELGSVSMALQLTPPVTNYKDIEGKKRFGIMLYTRANYTSITDPATGWRKTIYIKNGKDEEIKAQIIDKFSNFGFDEKDYYFEYTEENAGHTWRMYSGKDGKPLPRFQNKKQMLQDKNIWVPEQINVKEILDKLFANFDKGRSFKEQVNEEVKLEKIEGRSETAWQSLRYALNMIQQIRNSGVEKTDDNFLYSPVRNENGEHFDTRNHENNGDLSPIVDADANGAFNIARKGLIMDAHIKKWIKEGKPTTKEGDSKTPDLDLFISDREWDLWLLDREEWKKYLPVFASKSKKDADKTTSTKSPKRKKK

SEQ ID NO: 693 - protein, 1353 aa, unidentified
  REGION 1..1353: note = Category: MG57 effectors
  REGION 1..1353: note = Description: MG57-3 effector
  source 1..1353: note = uncultivated organism sequence
MKKKLDDFTNLYSLSKTLRFELKPEAETNKRFDDWIKELEANNETTVENLIAKDYKIFNAYKALKPILDSIHEEYITIALQSDTAKNIDFLTFYEAYSDKSKDTKNIESDLRNEIEKSFEVAEEDFFDAIKSVEPKVKKSTKASVLTDKYILSYIEKNMKNFVSNTLSEEELEKHLNAFKGFFTYFSGYNINRANYYDCKEEKNTAVATRIVNENLPIFCNNKIRFEKYRQQYSIIYSELKNLGVETKIVDNNGKLQESEPISDSVFDIKYFNYCLSQVEIEKYNQIIGNANFLINLFNQQKSKEQKFAKLPLFEKLRKQIGCGTRKNLFFALKKDKEPELTEKERNSEEILSVEKLLKITAEAGERIFNGHNNTEYSVKKLIDFLQTQTNWDGFYWSDASVSYISNKFFANWHDLLDKLKDNKACASFVKKRDEQVKLNEAVELSGLFQVLDKEANEQAFKKSVLDNYRCIINLKESVSSNLINIICSDLQNFLNEFNKNKTAILTLEKYKKKNAYNTEYDSNIRLIKEWYDSIKGILRIVGLFHAKKTKMKGCLANPEIENFVESILNPENVSWNKWYDGIRNYLTKKPQDDVKENMLKLNFGSSSLLGGWSDGQEKVKISTILKHENQVYLCILKNKQFFDTSKDNNPVYKGDGGFRLILRNLKFQTLAGKGFIGAFGQGYSEMGKETPKKAMDCLKSFIKDNYIGKYPILQSVIINEYKNKKDFDLAIQEKLKECYECKFIPIDWNKIIEAEKNGDLFIFQISSKDSKENSRGRKDLQTLYWESVLSENSPHQLCAGAEIFMRKPVDKKSPVIHKKGSILINKRFSDETTIPDELYKKLMAFVASIKQPFENEQAVKDLLFKSELSKIYAKEYLDKVKLRIAEYDIEKDKRFYGETKYFFHCPIKLNYNLKTYGKPEYAFTEINQKVNDVFTSLESPYFIGLDRGEKHLVYLCEIDNSCNIIDCRSLNNINGTNYMLKLEEKAGSRQKSRQEWQRIDNISNLKDGYVSHVVHAITEKVVNEPSYIVLEDLSRKMMQGRQKIEKSLYQKFEVALAKKLNFVVEKEIPNGEPGSVSSALQLTPPLNNYKDIENKRQFGIMLYTRANYTSVTDPVTGWRKTIYLKKGSAESIRQQIIDTFSEIGFDGKDYYFEYIELNAHKTWRMYSGKDGVSLPRFINEKKLQEDKNLWIPVEVDIVEILNQLFHCFDKNKSLLEQIKDGKELNKLCNRNETAWESLIFAINMIQQIRNNGCTEQDENFLYSPVRNENGVHFDTRKQDNTKYPADADANGAYNIARKGIIMHEHILQWRKEGSKKGDVDLFVSDEEWDLWLLDRKRWQEKLPYFASKSAKK

SEQ ID NO: 694 - protein, 1357 aa, unidentified
  REGION 1..1357: note = Category: MG57 effectors
  REGION 1..1357: note = Description: MG57-4 effector
  source 1..1357: note = uncultivated organism sequence
MKKKLDDFTNLYSLSKTLRFELKPEAETNKRFDDWIKELEANNETTAENLIAKDYKIFNAYKALKPILDSIHEEYITIALQSDTAKNIDFSTFYEAYSDKSKDTKNIESDLRNEIEKSFEVAEEDFFDAIKSVEPKVKKSTKASVLTDKYILSYIEKNMKNFVSNTLSEEELEKHLKAFKGFFTYFSGYNINRANYYDCKEEKNTAVATRIVNENLPIFCNNKIRFEKYRQQYSIIYSELKTLGVETKIVDNNGKLQESEPISDSVFDIKYFNYCLSQVEIEKYNQIIGNANFLINLFNQQKSKEQGFVKLPLFEKLRKQIGCGTRKNLFFALKKDKESELTEKERNSEEILSVEKLLKTTAESGERIFNGHNNTEYSVKKLIDFLQTQTNWDGFYWSDASVSYISNRFFANWHDLLDKLKDNRACASFDKKREEQVKLNEAVELSGLFKVLDKETNEQAFKESVFDNYKNIIDVKESVSSNLINIICSDLQNFLNEFNKNKTSILTLEKYKEKNAYNTEDDSNIRLIKEWYDSIKGILRIVGLFHAKKTKMKGSLANPEIESFVESILNPENVFWNKWYDGIRNYLTKKPQDDVKENMLKLNFGSSSLLGGWSDGQEKVKISTILKHENQVYLCILKNKQFFDTSKDNNPVYKGDGGFRLILRNLKFQTLAGKGFIGAFGQGYSEMGKETPKKAIDCLKSFIKDNYIGKYPILQSVIINEYKNKKDFDLAIQEKLKECYECKFILIDWNKIMEAEKNGDLFIFQISSKDFKENSRGRKDLQTLYWESVLSENSSHQLCAGAEIFMRKPVAEKSPVIHTKGSILINKRFSDGTTIPDELYKKLMAFVASIKQPFENEQAVKDLLFNSELSRIYAKEYLDKIKFRIAEYDIEKDKRFYGKTKYFFHCPIKLNYNLKTYGKPEYAFTEINQKVNDVFTSLESPYFIGLDRGEKHLVYLCEIDNSCNIIDCRSLNNINGTNYMLKLEEKAGSRQKSRQEWQRIDNISNLKDGYVSHVVHAITEKVVNEPSYIVLEDLSRKMMQGRQKIEKSLYQKFEVALAKKLNFVVEKEIPNGEPGSVSSALQLTPPLNNYKDIENKRQFGIMLYTRANYTSVTDPVTGWRKTIYLKKGSAESIRQQIIDTFSEIGFDGKDYYFEYIELNAHKTWRMYSGKDGVSLPRFINEKKLQEDKNLWIPVEVDIVEILNQLFHCFDKNESLLEQIKDGKELNKLCNRNETAWESLIFAINMIQQIRNNGCTEQDENFLYSPVRNENGVHFDTRKQDNTKYPADADANGAYNIARKGIIMHEHIVQWKKDGSKKGDVDLFVSEEEWDLWLLDKNKWQEKLPYFASKSAKKKNEY

SEQ ID NO: 695 - protein, 1410 aa, unidentified
  REGION 1..1410: note = Category: MG57 effectors
  REGION 1..1410: note = Description: MG57-5 effector
  source 1..1410: note = uncultivated organism sequence
MEEFTNLYQLSKTLRFELKPVGKTAETFKQWLEELKNDELVVDNDGNLFAKDKSIKDAYLAIKPIMDRLHEQFIEMSLLSEEAKQIDFSDYFEKYQKNNVPEKLEGGLREIIGNTYKVAGNYLSEEISIVLGKEFKTKKDRPYECLTDAKMYNYLSAHVKDLAEQNGIDEEDLKKHIEQFKGFWGYLDGYNQNRENYYKVDKEASTAVATRIVHENLPTFCSNAIRFEKRKEEYLCIYRYLHDNSRETKIKNAKGEEIDVEAISDVIFQINHFNECLAQSQIEEYNRIIGNYNMLINLYNQLRCGEKDFKKVDEFEKLRKQIGCGKNKSMFETLQDDCDVKNLLRKASKAGKMMFGVASDNIEIKTVPDFIKFLRECDNWDGIYMSKTAIDKISSLYFANWHSIKDKLKESKADACITYEKKREEPIKLRDAVELSGLFAVLDSEQSEHFFKDSLFKDDDTNNYRGILNIDLKPSSNLINLLCFDIEQNIKAFLDESDNIVALEKYKDENNQAGEEDQTIKKLKEWFDAATSAMRIVRYFAVRKSKMKGNNIPNATMEQALSNLLYSDDVQWFKWYDLIRNYLTKKPQDDVKENMLKLNFGNETLMDGWDMNKEHDNSTVILRKNGKNGWYYLGIMDTKHKDVLDKEKVRTTGECYEKMDYKQIALHSGVGGFVRKCFGTAQNFGWRCPNNCLNEEGKIIIKDDEAQANLKEIIDCHKDFFDKYEKDGFKYKDFNFDFRESNKYGKLSEFYRDVEQQGYKITFRNVSVDYINDLVSEGKLYLFKINNKDFSPGKNGGKGSIGKPNLHTMYWRMLFDENNLKDVVFTLNGKSEIFMRKPVAKESPTKHSIGSKLVNKQYKDGDTKKTIPEKIYREIYSYANGETKDISAEAKKYIDEKKAIIKDVKHEIIKDNRFYGDDIEGTKYMFHCPITINFKANKYKDPKYAYPEVNKKITDSLQQSDNLQFIGIDRGEKHLVYSCTIDKNGRIIKDKCHHHDNINGTDYVQKLEAVADDRTIAKENWQAQRKIKDLRDGYISHVVHQLVEEAIKDDGKIAPHAYIVLEDLNTEMKRGRQKFEKQVYQNLETALAKKLNFVVDKDAKQGELGSESNALQLTPPINNYQDIEGKKQFGVMLYTRSNYTSVTDPATGWRKTIYIKNGKEEDIKKQILEKFSDFGFDGKDYYFEYTESNAGHLWRMYSGNNGEPLPRFLYKKQILKDKNNWVPERIDVVKILDKLFANFDKAKSFKSQIENGVELQKDEERNETAWQSLRFALDLIQQIRNSGEKDSEDDNFLFSPVRNDKGEHFDTHNYKNNAELSEIKDADANGAYNIARKGLIMDAHIKYWIEKGRPKISAKKDEKTSDLDLFISDREWDLWLLDKKLWKKELPTFASKSAKYDSDTPQTAKKRKKR

SEQ ID NO: 696 - protein, 1358 aa, unidentified
  REGION 1..1358: note = Category: MG57 effectors
  REGION 1..1358: note = Description: MG57-6 effector
  source 1..1358: note = uncultivated organism sequence
MEEKEKVQYSDFTNLYQLSKTLRFELKPIGKTKETFEGWLKENNSFNNEDNLFAQDKKIKDAYVVIKSIMDKLHEQFIEKSLTSEEAKNIDFSDFLDIYKYRGNDFPKDFEKKLREQIGNTYKVAGAYFSKEISEALNKEFKTKKPFECLTDAKMLNYLSANVKEIAEQNNIDQETLANHIEQFKGFWGYLSNYNKNRENYYTTDKEQSTAVATRIVHENLPTFCDNILRFEKSREGYLSICQYLKDNNREIKIKNAQGEETEAETITEAIFQIKHFNSCLAQSQIEEYNRIIGNYNFLINLYNQARREEKEFKKLDEFESLYKQIGCGEKKSLFESLHDDSDLKALLQKIKEAGDTFFKECCDETEISTVSAFIKFLKECDNWEGIYMSSAAVNKISNLYFTNWHSIKDKLKDNKACVTYDKNREEPIQLRDAVELSDLFKVLDDKEQSEHFFKESLSNDINEKECPSKNLINLLCFDIEQNISKFLANSENIINLLNGNKDNQASEEDKIKQIKEWLDAAIDTMRIVRYFAVRKSKMKGNLPNTTMEKALNNLLYNDDAQWFKWYDLVRNYLTKKPQDDAKENKLKLNFGNPSLLGGWSDGQEQTKAATLLKYNNELYLCILKIRNIFDTSKADNPIYTKAPFCACRLILRNLKFQTLAGKGFKSKYGIKYSEMGNEDQSQAIKCLKEIIRERYAKKYPPLEQIINQEYSDKKSFDNEVKEALKECYVCEFVPINWDVVSKKQNSTDLFLFKIHCKDYLPKATGKKDLQTMYWEDVLSDSSNHQLCGGAEIFMREPVPKESPVKHGVGSKLVNKRDKDGNTIPEQIYKEIYLFANDKVKKENLSAEAKNYIESEKVKIKEAKYEIVKDNRFYGETKYMFHCPITINFKAGSSSGVNEKITDALQQSDNLQFIGIDRGEKHLVYSCTIDKYGKIIKCNHHDNINGTDYVQKLEAVANERLIAKKNWQQQNRIKDLKSGYISHVVHRLVEETIKDDKTIAPHAYIVLEDLNSEMKRGRQKIEKQVYQNLELALAKKFNFVVDKTAKQGELGSVSMALQLTPPVTNYKDIEGKKRFGIMLYTRANYTSITDPATGWRKTIYIKNGKDEEIKAQIIDKFSNFGFYGKDYYFEYTEENAGHTWRMYSGKDGKPLPRFQNKKQMLQDKNIWVPEQINVKEILDKLFANFDKGRSFKEQVNEEVKLEKIEGRSETAWQSFRYVLNMIQQIRNSGIEKKDDNFLYSPVRNENGEHFDTRNPQNNGGLELIVDADANGAFNIARKGLIMDAHIKHWINSGRPKIKKDGKETSDLDLFISDREWDLWLLDREEWKKYLPVFASKSKKDAEKLPLQSPQKERRNNKY

SEQ ID NO: 697 - protein, 1353 aa, unidentified
  REGION 1..1353: note = Category: MG57 effectors
  REGION 1..1353: note = Description: MG57-7 effector
  source 1..1353: note = uncultivated organism sequence
MEEKEKVQYSDFTNLYQLSKTLRFELKPIGKTKETFEGWLKENNSFNNEDNLFAQDKKIKDAYVVIKSIMDKLHEQFIEKSLTSEEAKNIDFSDFLDIYKYRGNDFPKDFEKKLREQIGNTYKVAGAYFSKEISEALNKEFKTKKPFECLTDAKMLNYLSANVKEIAEQNNIDQETLANHIEQFKGFWGYLSNYNKNRENYYTTDKEQSTAVATRIVHENLPTFCDNILRFEKSREGYLSICQYLKDNNREIKIKNAQGEETEAETITEAIFQIKHFNSCLAQSQIEEYNRIIGNYNFLINLYNQARREEKEFKKLDEFESLYKQIGCGEKKSLFESLHDDSDLKALLQKIKEAGDTFFKECCDETEISTVSAFIKFLKECDNWEGIYMSSAAVNKISNLYFTNWHSIKDKLKDNKACVTYDKNREEPIQLRDAVELSDLFKVLDDKEQSEHFFKESLSNDINEKECPSKNLINLLCFDIEQNISKFLANSENIINLLNGNKDNQASEEDKIKQIKEWLDAAIDTMRIVRYFAVRKSKMKGNLPNTTMEKALNNLLYNDDAQWFKWYDLVRNYLTKKPQDDAKENKLKLNFGNPSLLGGWSDGQEQTKAATLLKYNNELYLCILKIRNIFDTSKADNPIYTKAPFCACRLILRNLKFQTLAGKGFKSKYGIKYSEMGNEDQSQAIKCLKEIIRERYAKKYPPLEQIINQEYSDKKSFDNEVKEALKECYVCEFVPINWDVVSKKQNSTDLFLFKIHCKDYLPKATGKKDLQTMYWEDVLSDSSNHQLCGGAEIFMREPVPKESPVKHAKGSKLVNKRDKDGNTIPEQIYREIYLYANDKKQDISTEAKKYITDKKVIIKDVKHEIIKDRRFYGETKYMFHCPITINFKAGSSSGVNEKITDALQQSDNLQFIGIDRGEKHLVYSCTIDKEGKIVKCNHHDNINGTDYVQKLEAVANERLIAKKNWQQQNRIKDLKSGYISHVVHRLVEETIKDDKTIAPHAYIVLEDLNSEMKRGRQKIEKQVYQNLELALAKKFNFVVDKTAKQGELGSVSMALQLTPPVTNYKDIEGKKRFGIMLYTRANYTSITDPTTGWRKTIYIKNGKDEEIRKQILEKFTDFGFAGKDYYFEYIEANAGHSWRMYSGKDGKPLPRFQNKKQLQNDKNIWVPEPVNVVEILNNIFEDFDKRSSFKDQVKNNVELKKVEGRNETAWQSLRYALNMIQQIRNSGVEKTDDNFLYSPVRNENGEHFDTRNPQNNGGLELIVDADANGAFNIARKGLIMDAHIKHWINSGRPKIKKDGKETPDLDLFISDREWDLWLLDREEWKKYLPVFASKSKKDADKTTSTKSPKRKKK

SEQ ID NO: 698 - protein, 1450 aa, unidentified
  REGION 1..1450: note = Category: MG57 effectors
  REGION 1..1450: note = Description: MG57-8 effector
  source 1..1450: note = uncultivated organism sequence
MEQFTNLYQLSKTLKFKLEPEGNTKTTFEKWVNEMNSTSEDSNLFAKDEKIRDAYLVIKPIMDKLHEQFIEKSLTSDEAKHIDFSEFLAEFRDKKKRRSKKIQKIEERLRKDIGATYNVGGRFFSAEIEKAVEKLKEEKNNGEESEKKSKDEETDNKRKKTPYDCLTEKKIFSYLCANAKTLAKENGITERILNKHLEQFKKFWGYLDGYNQNRENYYEVKEEAATAVATRIVHENLPTFCSNALRFEKHREEYLGIYQFLKDNNCEAKIKNSQGKEVEAEAITETCFLIGHFNNCLAQSQIEEYNRIIGNYNYLINLYNQAPHDEKDFKKIDEFEKLKKQIGCGKKKTMFAALIKDKQNELTDEQKKKENKEGDILTVETLLNRAKDAGDVMFVKDDNKDNDKAEIITIPDFIQFLEGCDNWDGIYMSKAAINKISNRYFANWHSIVDLFIEIYNGKDKELKEKINACITYDKKREEPLKLRDAVELSGFFAVLDKVKSEHFFKEWLFKEDNTNEYCGDKALSPSKNLIKLLCHDMKYYTEEVFLKKSSEIVALKKYKDEKTQAGKEDENIKKIKEWFDAAADAMSIVRFFAVRRSKMKGSLPNVTMEQALSNLLYSEDIQWFKWRDLIRNYLTKKPQDDVKENKLKLNFGNPTLMKGWDLNKEPDNTTVILRKNDWYYLGIMNKEYNHILDNVKTSSNGECYEKMDYKQISLSSGVGGFVRKCFSSAQEYGWHCPDNCLNEDGKIIIKDDEAQPHLKAIIDCYKDFFDKYKKDGFEYKDYNFNFLESNEYEKLSDFFRDVEQQGYKISFRKVSVNYIDNLVKEGKLYLFKIYSKDFSTGKDGGNGSTGNENLHTKYWKRLFDENNLKDVVYKLNGKSEIFMRKPIAKEARIKHKKGSKLVNKRDINGEIIPEHIYKEIYSYVNNNTKISKEAKIYIDEKKAIIKDAKHEIVKDNRFYGETNSYFFHCPITINFKAKKYKEPQYAYPEVNAKITDALQQSDNLQFIGIDRGEKHLVYSCTIDKNGKIVKDKNNEWKCHHHDIITVIRKDKDGKIVEHKTNYVQKLEAVAGERIIAKKNWQAQRKIKDLRNGYISHVVHRLVEEVIKEDNKRIAPHAYIVLEDLSTEMKRGRQKFEKQVYQNLEVALAKKLNFVVDKEAEQGELGSVSKALQLTPPISNYQDIEGKKQFGIMLYTRANYTSITDPATGWRKTIYIRNGKEEDIKKQILDKFNDFGLEGKDYFFEYREANAGRIWRMYSGKNGEPLTRFRNKREKLTDKNVWVTEPINVVEILDKLFADFDKTKSFKKQIEDDGIELKKIEGRSETAWQSLRYVLDMIQQIRNSGIEKKDDNFLHSPVRGENGEHFDTRNHENNGELSAIKDADANGAYNIARKGLIMNAHYRYWVNQGRPEIKKGKTALSLYVSDAEWDMWLLDKEKWHEHLCEFALRTK

SEQ ID NO: 699 - protein, 1435 aa, unidentified
  REGION 1..1435: note = Category: MG57 effectors
  REGION 1..1435: note = Description: MG57-9 effector
  source 1..1435: note = uncultivated organism sequence
MKEFTNLYQLSKTLRFELKPIGKTTKTFQRWLEEMNKAELVGDNDGNLFLKDKKIKNAYLAIKPIMDKLHEQLIEMSLLSEEAKQIDFSVYFEAYKNKAVKVEMENGFRKAFAKPFQYAGQCFIEKISKAQKNGKEIKTKKDKQYECLTDAKMYNYLSAHIKDLAEQNGIDEQELKKHLEQFKGFWGYLDGYNQNRENYYEVDKEASTAVATRIVHENLPTFCSNALRFEDRREEYLGIYQYLKDNNHETKIKDSKGAEIEAEAISEEIFQINYFNECLAQSQIDEYNRIIGNYNYLINLYKQARRSEKDFKKIDEFEKLKKQIGCGKKKLMFAALIKDKQSELTEDQKKMENDGGAILTVKTLLQKAKSAGDTMFNKGEDTEEIKTVPEFIQFLQGCDDWNGIYMSKSAIRKISNMYFANWHNIEDIFIDWYNGTDKEKKEMAKACITYDKNRENPLKLRDAVELSGLFAVMDKDEQSEHFFKDSLFDNEDTNDYRGVLDKELTPSKNLINLLCFDIEQNIKVFLNNSGKIVALEKYKDENNQEGEEDQTINDIKDWFDAATDAMRIVRYFAVRKSKMKGNIPNATMEQALSNLLYGEEEQWFNWYDQIRNYLTKKPQDDVKENMLKLNFGNETLMDGWDMNKEHDNSTVILRKDGFYYLGIMDTTHKDVLDKEKVRTTGECYEKMDYKQIALHSGVGGFVRKCFGTAQNFGWRCPNNCLNEEGKIIIKDDEAQANLKEIIDCHKDFFDKYEKDGFKYKDFNFDFRESNKYEKLSEFYRDVEQQSYKITFRNVSVDYINNLVSEGQLYLFKIYNKDFSTGKNGGNGSTGKPNLHTIYWRMLFDKNNLKDVVFTLNGKSEIFMRKPVAKESPTKHSIGSKLVNKRYKDGDTKKTIPEKIYREIYSYANGETKDISAEAQKYIDEKKAIIKDVKHEIIKDNRFYGDDIEGTKYMFHCPITINFKANKYKEPKYAYPEVNKKITDSLQQSANLQFIGIDRGEKHLVYSCIVDKDCKILKCGHHDVINGTDYVQKLEAVADERIIAKKNWQSQSRIKDLRDGYISHVVHSLVKETIKDDGKIAPHAYIVLEDLSTEMKRGRQKFEKQVYQNLETALAKKLNFVVDKEAKQGELGSVTKALQLTPPINNYQDIEGKKQFGVMLYTRANYTSVTDPATGWRKTIYIKDGKEEEIKKQFFEKFSKFGFDGKDYYFEYTEANAGHTWRMFSGKDGKPLPRFRNKKQKLEDKNIWVPEQINVVEILNKLFTKFDKTKSFKTQIENGVELQKVEGRSETAWQSLRYALDLIQQIRNSGEKNSRDDNFLYSPVRNDNGEHFDTRNYKNNGELSEIRDADANGAYNIARKGLIMDKHIKYWINNGRPKTKVDGNEVSDLDLFISDREWDLWLLDREQWMKELSTFASKIAKYDSDAPQTAKRRKKR

SEQ ID NO: 700 - protein, 1364 aa, unidentified
  REGION 1..1364: note = Category: MG57 effectors
  REGION 1..1364: note = Description: MG57-10 effector
  source 1..1364: note = uncultivated organism sequence
MKQFTDLYQVSKTLRFELQPIGKTAETFKQWLEDLKSTEAVVDNNNLFAKDQGIKDAYSIIKPIMDKLHEQFIEMSLLSEVAKEIDFSQYFEAYQERNVSERLEAELREQIGKTYIVAGHFFTKEISDAIGKDFKIKKDKPYECLTDAKMTYYLSAKSQELAKQNDIDEKKLAMHIEQFKGFWGYLTGFNQNRENYYEVKKETSTAVATRIVHENLPTFCDNILRFEKRKEEYLNIFQFLKDNERETKIKNAQGEEVEIEPIAETFFQIEYFNKCLSQSQIEEYNRIICNFNYLVNLYNQARRGEDGFKKIDEFETLYKQIGCGKKKTYFETLQDISELKNLLQKARIAGDSMFNKESSKTEINTVPEFIKFLQECDNWQGIYMSSAAINKISNLYFANWHSIKDKLKEAKANACITYDKKREEPIKLRDAVELSELFDVLNTEQSEHFFKDSLFKNDETNEYRGVLDKALKPSQNLIKLLCHDIKRNIEAFLEDSDKIVALEKFKDESNPSGEEDKAIKRIKDWLDAAIGAMRIVRYFAVRKSKMKGSIPNVTMEQALGNLLYCEEAPWFKWYDLVRNYLTKKPQDDAKENKMKLNFGTSSLLGGWSDGQEMNKAATLLKYEDEMYLCILKTKNVFDTSKKDNPIYNVASSNASRLILRNLKFQTLAGKGFLGEYKVSYGEMGQSDPVKAIQCLQKIIEDRYVKKYPLLEKFVVNRYDDKSQFDKEIKEALNECYVCEFVPIDWNLVTEKQNNTELFLFKIHSKDYKSNATGKRDLQTMYWEDVLSDGSKHQLCAGAEIFMRKPVAKESPVRHRVGSKIVNKRDKDGNTIPEQIYREIYAYANGKTKDISTEAQKYINEKRAIIKDVKHDIDKDKRFYGETKFMFHCPIKLHFEAKDPKYAFAEVNAKITESLHQSNNLNYIGIDRGEKHLVYSCTIDQDGKILKCNHHDNINGTDYVQKLEAVADERIIAKKNWQAQNRIKDLKNGYISHVVHRLVEETIKDGGIISPHAYIVLEDLNTEMKRGRQKIEKQVYQNLELALAKKFNFVVDKNAEPGGLGSVSQALQLTPPVSNYQDIEGKKQFGVMLYTRANYTSITDPATGWRKTIYIKNGKEEDIRNEILDKFRDFGFDGKDYFFEYVEVHAGHTWRMYSGKDGKPLPRFQNNKQMIDDKNVWVPEQINVVDILDLLFAKFDKSKSFKKQIDQGVELTKIDGRSETAWQSLRYALNMIQQIRNSGLKNEDDNFLFSPVRNNKGEHFDTRNHQNNGELSLIVDADANGAFNIARKGLIMDAHIKHWIEIGRPMKSARRDERTSDLDLFISDKEWDLWLLNREAWEKELPLFSSRAAKEDFSKPKTGKSRKKK

SEQ ID NO: 701 - protein, 1414 aa, unidentified
  REGION 1..1414: note = Category: MG57 effectors
  REGION 1..1414: note = Description: MG57-11 effector
  source 1..1414: note = uncultivated organism sequence
MKTFNDLTGLYSLSKTLRFELKPVGKTEETFKQWLEEMPNDKIVVDNDGNLFQKDKKIKDAYLAIKPIMDRLHEQFIEMSLLSEKAKQIDFSEYFVRFIDKDISSDLEKKLRREIGGTYQVAGECISKEITNACVKESKNKKVKDFKTKKGKEYQCLTDAKILDYLSANARILAEQNGIDEKTLEKHINQLKGFWGYLTGYNQNRENYYEVEKEASTAVATRIVHENLPTFCSNISRFEKRKDEYVGIYQYLADNNRERKIKNSKGEEVDAEAISENVFQIGYFNECLAQSQIEEYNRIIGNYNMLINLYNQARRSEKDFKKIEEFEKLYKQIGCGVKKTMFETLQNESDVKSLLEKASEAGNAMFKTCSNSLEIKTVPDFISFLKECDNWDGIYMSKTAISKISNLYFANWHSIKDKLKEAKADACITYDKNREEPIKLRDAVELSGLFAVMDSERPEYTFKESLFKNDKTNDYRGVLDKELSSSQNLIRLLCSDIERNINDFLKDSNSIVALETYKNINSQADEENQTIKQIKDWFDAATDAMRIVRYFAVRKSKMKGKNLPNVTMEQALSNLLYSDEAQWFKWYDLIRNYLTKKPQDDAKENKLKLNFDSSSFLKESGWDNDYLKHGAFIVIKGNDYYLVVVNDKLEEDDINQLKTSSNNTAKRLVYKQQKMDFKNFPRWFIFSKGDNLAPAVEKYKLPIETILTDYKKYRELSQKGKESFIEEHPKFRSNLIAYFKKCALVHESLMPFKDMLEMVWRKTDEYKTLSDFYNDTINACYEITFEDIDFDKLRSMDKFYIFQIYNKDFSTGQNGGNGTTGKPNMHTIYWKMLFDEINLKNVVFKLDGQGAELFKRKPIGKESLVKHGLGFKLVNKRDKEGNTIPEQIYREIYMYVNDKKEVISVEAQKYIDEQKVIIKDVKHEIIKDKRFFGETKYLFHCPITINFKAKSANEPEVNSKILNVLHQLDNLHFIGIDRGEKHLVYSCTIDKDGKIIKCNHHDNINGTDYVQKLEAVADERIIAKKNWQEQNKIKDLKSGYISHVVHRLVEETIKDDGKIAPHAYIVLEDLNTEMKRGRQKIEKQVYQNLETALAKKLNFVVDKNAKQGELGSVSKALQLTPPISNYQDIENKKQFGVMLYTRANYTSVTDPATGWRKTIYVKNGKEEDIKNQILEKFDDFGFDGKDYYFEYTEAHVGRTWRLYSGKNGEALPRFQNRKQLLQDKNIWVPESINVVEILDKLFVDFDKSKSFKLQIKKGVELKKIEGKSETAWQSLRYALDLIQQIRNSGEKNSIDDNFLYSPVRNINGEHFDTRNHEGNGDLSKIVDADANGAYNIARKGLIMDAHIKHWIESGSPAKKGEKSPDLDLFISDKEWDMWLLNRDLWKKELPIFASRNAKEDAVKSNIGIRRAKKK

SEQ ID NO: 702 - protein, 1365 aa, unidentified
  REGION 1..1365: note = Category: MG57 effectors
  REGION 1..1365: note = Description: MG57-12 effector
  source 1..1365: note = uncultivated organism sequence
MKTLNDFTGLYSLSKTLRFELKPVGKTEETFKQWLEEMQSKEIVVDNDGNLFLKDKKIKDAYLAIKPIMDKLHEQFIEMSLLSEKANQIDFSEYFIKFRDKNVSSDLEKNLRSKIGDTYQVAGECISEEITNACKKEFKTKKGKEYQCLTDAKMLDYLSANVKDLAEQNGIDKQTLDNHIKQFKGFWGYLDGYNQNRENYYVVDKEASTAVATRIVHENLPTFCSNILRFEKREDEYVGIYQYLKGINRERKIKNSKGEEVDVEAISENVFQIEHFNECLAQSQIEEYNRIIGNYNMLINLYKQARRGEKDFKKIEEFEKLYKQIGCGEKETMFETLQNESDVKNLLEKASEAGKEMFKTCSKSLEIKTVPDFITFLKECDNWDGIYMSKTAISKISNLYFANWHSIKDKLKEAKKDACITYDKNREEPIKLRDAVELSGLFDVLDSERPEYTFKESLFKDDETNEYRDVLDKDRSSSQNLIRLLCFDIERNIRSFLNASDSIVALKKYKNINSQADEESQTIKQIKEWFDAATDAMRIVRYFAVRKSKMKGNMPNVTMEQALNNLLYSDEARWFKWYDLIRNYLTKKPQDDAKENKLKLNFGTSSLLGGWSDGQEKTKAATLLKFENELYLCILKTKNIFDTSKNNNPIYTTQSNASRLILRNLKFQTLAGKGFLGENGISYGDMGNDNPVKAIQCLQKIIKERYVKKYPLLEKFVVNKYTDKSKFDAEINETLKECYVCEFMPIDWSLVIEKQNNAELFLFKIHCKDYLSNAIGKKDLQTMYWEDVLSDGSKHQLCAGAEIFMRKPVAKESPIKHSVGSKLVNKRDKDGNTIPEQIYKEIYLYANGKTKDISAEAQRYIFEQKAVIKDVKHEIIKDKRFYGEAKYMFHCPIKLQFEAKDPKYVLPEVNRIITDALQQSNNLNFIGIDRGEKHLVYSCTIDKDGKIKECNHHDNINGTDYVQKLEAVADARVIAKKNWQEQNKIKDLKSGYISHVVHRLVEETIKDNDKIAPHAYIVLEDLNTEMKRGRQKIEKQVYQNLETALAKKLNFVVDKNAKQGELGSVSKALQLTPPINNYQDIENKKQFGVMLYTRANYTSVTDPATGWRKTIYIKNGKEEDIKSQILDKFDDFGFDGKDYYFEYTESNTGHTWRMYSGKNGKSLPRFQNRKQMMQDKNIWVSESIDVVEILNQLFSDFDKGKSFKEQIGQGVDLKKIEGRSEPAWQSLRYALDLIQQIRNSGLEKKDDNFLFSPVRNETGEHFDTRKHANNGGLSKIEDADANGAYNIARKGLIMDAHIKHWIERGRPTMKGEKTPDLDLFISDKEWDLWLLDREQWEKELHIFASRSEKEGEDNSLVAKKRKKKI

SEQ ID NO: 703 - protein, 1365 aa, unidentified
  REGION 1..1365: note = Category: MG57 effectors
  REGION 1..1365: note = Description: MG57-13 effector
  source 1..1365: note = uncultivated organism sequence
MKTLNEFTGLYSLSKTLRFELKPVGKTEETFKQWLEEMQSNEIVVDNDGNLFLKDKKIKDAYLAIKPIMDKLHEQFIEMSLLSEKAKHIDFSEYFTKFRDKNVSSDLEKNLRSKIGDTYQVAGECISEEITNVCEKEFKTKKGKEYQCLTDAKMLDYLSTNVKDLAEQNGIDEQTLANHIKQFKGFWGYLDGYNQNRENYYVVDKEASTAVATRIVHENLPTFCSNILRFEKREDEYVGIYQYLKGINRERKIKNSKGEEVDVEAISENVFQIEHFNECLAQSQIEEYNRIIGNYNMLINLYNQARRDEKDFKKIEEFEKLYKQIGCGEKETMFETLQNESDVKNLLEKASKAGEAMFRTSNNSLEIKTMPDFITFLKKCDDWDGIYMSKTAISKISNLYFANWHSIKDKLKEAKKDACITYDKNREEPIKLRDAVELSGLFDVLDSERPEYTFKESLFKDDETNEYRDVLDKDRSSSQNLIRLLCFDIERNIRSFLNASDSIVALEKYKDENNQIGEENQTIKQIKDWFDAAIDAMRIVRYFAVRKSKMKGNMPNVTMEQALNNLLYSDEARWFKWYDLIRNYLTKKPQDDAKENKLKLNFGTSSLLGGWSDGQEKTKAATLLKFENELYLCILKTKNIFDTSKNNNPIYTTQSNASRLILRNLKFQTLAGKGFLGENGISYGDMGNDNPVKAIQCLQKIIKERYVKKYPLLEKFVVNKYTDKSKFDAEINETLKECYVCEFMPIDWSLVIEKQNNAELFLFKIHCKDYLSNAIGKKDLQTMYWEDVLSDGSKHQLCAGAEIFMRKPVAKESPIKHSVGSKLVNKRDKDGNTIPEQIYKEIYLYANGKTKDISAEAQRYIFEQKAVIKDVKHEIIKDKRFYGEAKYMFHCPIKLQFEAKDPKYVLPEVNRIITDALQHSNNLHFIGIDRGEKHLVYSCTIDKDGKIIKCNHHDNINGTDYVQKLEAVADARVIAKKNWQEQNKIKDLKSGYISHVVHRLVEETIKDNDKIAPHAYIVLEDLNTEMKRGRQKIEKQVYQNLETALAKKLNFVVDKNAKQGELGSVSKALQLTPPINNYQDIENKKQFGVMLYTRANYTSVTDPATGWRKTIYIKNGKEEDIKSQILDKFDDFGFDGKDYYFEYTESNTGHTWRMYSGKNGKSLPRFQNRKQMMQDKNIWVPESIDVVEILNQLFSDFDKGKSFKEQIGQGVDLKKIEGRSEPAWQSLRYALDLIQQIRNSGLEKKDDNFLFSPVRNETGEHFDTRKHANNGGLSKIEDADANGAYNIARKGLIMDAHIKHWIERGRPTMKGEKTPDLDLFISDKEWDLWLLDREQWEKELHIFASRSAKEGEDNSLVAKKRKKKI

SEQ ID NO: 704 - protein, 1401 aa, unidentified
  REGION 1..1401: note = Category: MG57 effectors
  REGION 1..1401: note = Description: MG57-14 effector
  source 1..1401: note = uncultivated organism sequence
MKTLTNLYQVSKTLRFELQPIGKTSETFKQWLEDMNMNELVVDNDGNLFAKDKNIKEAYLAIKPIMDRLHEQLIEMSLLSEEAKQIDFSDYFEAYKNKAVKAEMEKGLRKAFAKPFQFAGQCFIDMISNDPKVGIEIKTKKDKQYECLTDAKMYNYLLANVKDLAEQNGIAEQKLAKHIEQFKGFWGYLDGYNQNRENYYEVDKETSTAVATRIVHENLPTFCSNILRFEKRLEEYLSIYQYLKDNNRETKIKDSKGEEIDVEAISDDIFQIKHFNECLAQSQIEEYNRIVGNYNMLINIYNQLRRSEKDFKKVDEFETLYKQIGCGKKKSMFETLQGDSDVKELLRKASEAGKQMFKDATDTIEIKTLPDFIKFLKECDNWDGIYMSKTAIDKISSLYFANWHSIKDKLKEAKADACITYDKKREDPIKLRDAVELSGLFAVLDTEQSEHFFKDSLFKDDESNDYRGVLDKALMPSKNLINLLCFDIEQNTKAFLNESNNIVALEKYKDENNQARVEDKTIKQIKDWFDAATDAMRIVRYFAVRKSKMKGNIPNTTMEQALSNLLYCDEARWFKWYDLIRNYLTKKPQDDAKENMLKLNFDNSTLMEGWDINKEHDNTTVILRKKGLYYLGIINKKYNNILDKDNAISDGECYEKMDYKQIALPMGVGAFVRKCFGTAQNFGWCCPQNCLNEEGKIIIKDDEAQPNLKAIVDCYKDFFDKYEKDGFKYKDFNFRFLESDKYKKLSEFFREVEPQGYKIAFRNVSVDYIEDLVENGKLYLFNIYNKDFEDKATGTPNLHTIYWKMLFDENNLKDVVYKLNGKAEVFMRNPVAKESPIKHSIGSKLVNKRDKDGNSIPEQIYREIYLYANGKTKAISVEAKKYIDEQKVVIKDVKHEIIKDKRFYGETKYMFHCPITINFKAKSSSGSEVNAKITDALQQSKNLNFIGIDRGEKHLVYSCTIDNDGKIIKGKCHDHDIISVIIKDKDGKDITHKTNYVQKLEAVADERIIAKKNWQAQNKIKDLKNGYISHVVHHLVEETIKVDGNISPHAYIVLEDLNTEMKRGRQKIEKQVYQNLELALAKKLNFVVDKNAKQGELGSVFQALQLTPPINNYQDIEGKKQFGVMLYTRANYTSVTDPATGWRKTIYIKNGKEEDIRKEILSKFDDFGFDGQDYFFEYTEANAGHIWRLYSGKNGKALPRFQNKKQMLQDKNVWVPEIINVVEILDNLFADFDKAKSFKKQIENGVELRKIEGRNETAWQSLRFALDIIQQIRNSGEKNSKDDNFLYSPVRKNGEHFDTRNYEYNGELSEIRDADANGAYNIARKGLIMDAHIKYWIDKGRPMMSSKKDKKTSDLDLFISDKEWDLWLLDKNQWRKELPTFASRSAKEGNTESKTGKRKKK

SEQ ID NO: 705 - protein, 1407 aa, unidentified
  REGION 1..1407: note = Category: MG57 effectors
  REGION 1..1407: note = Description: MG57-15 effector
  source 1..1407: note = uncultivated organism sequence
MNDLKQFTGLYSLSKTLRFELKPVGKTKETFKRWLDELKNTELVVDDGGNLFLKDKQIKDAYLAIKPIMDKLHDQFIEMSLLSKEARNIDFSDYYTAFKDRSKGLNDIEKKLRENIGATYNVAGNYFSAEISKALGKEFKIKKDKSYECLTDAKMYYYLSANIKDLAEQNNIEEQALAQYIEKFKGFWGYLDGYNQNRENYYEFGNEASTAVATRIVHENLPTFCSNVFRFEKRKEEYLDIYQYLKDNNRETRIKDSQGKEVEVEAISEIVFQIKHFNECLAQSQIEEYNRIIGNYNMLINIYNQLRSSDKDFKRIDEFETLYKQIGCGERKAMFETLQDDSDVKNLLKRASDAGSEMFNTYSDSSEIKTVLDFIKFLRGCDNWDGIYMSKTAISKISNLYFANWHSIKDKLKEAKASACITYEKNLEDPIKLRDAVELSGLFAVFDTEQSEHFFKESLFKDDETNEYRGVLDKALTPSKNLIRLLCFDIERNIKFFLQKSVEIVALEKYKDENNYAGDEDQTIRIIKDWLDAATDAMRIVRYFAVRKNKMKGNLPNTTMEQALGNLLYNDDAQWFKWYDLIRNYLTKKPQDDVKENKLKLNFDSSSFLKESGWDNDYSKSGAFIVIHDNAYYLVVLNNKLEEREINKLKTLSNNSAQRIVYKQQKMDFKNFPRLFIFSKGDNLAPAVNKYNLPIATIIDDYKKYRNLNGKDKDAFIEEHPKFRYNLIEYFKKCAPLHESLSPFKDQFEKVWRKTEDYNTLSEFYKDTANACYEISFENIDFQQLCSMDKCWLFQIYNKDFSIGKDGCNGSTGKPNLHTIYWKMLFDETNLKNVIFKLDGQGAEIFMREPVPKESPTKHPVGSKIVNKRDNDGNTIPEHIFREIYLYANGKTKDISNVARKYIGEGKAVIKDVKHEIIKDKRFYGEPKYIFHCPITINFKSKSANESEINSKITNALQQSDNLQFIGIDRGEKHLVYSCTIDKNCKIIKCDHHDNINGTNYVQKLEGVADDRIIAKKNWQAQSKIKDLRDGYISHVVHRLVDETIKDGDSIAPHAYIVLEDLNTEMKRGRQKFEKQVYQNLETALAKKLNFVVDKNAKQGELGSVSKALQLTPPINNYQDIEGRKQFGVMLYTRANYTSVTDPATGWRKTIYIKNGKEEDIKEQILDKFSDFGFDGKDYYFEYTESNVGHTWRLYSGNNGEPLPRFQNKKQMQQDKNVWVPEKNNVVEILDKLFVNFDKSKSFKAQIENGVELQKAEGRSETSWQSLRYALDLIQQIRNSGEKNSKDDNFLYSPVRDDKGEHFDSRHPERNGELSEIKDADANGAYNIARKGLIMDAHIKYWIEKGRPTMKKDGKEISDLDLFISDKEWDLWLLDRDQWKNTLPTFALRNAKEGDAKPPKRKGGKKK

SEQ ID NO: 706 - protein, 1391 aa, unidentified
  REGION 1..1391: note = Category: MG57 effectors
  REGION 1..1391: note = Description: MG57-16 effector
  source 1..1391: note = uncultivated organism sequence
MNNTDALTNLYSLSKTLRFELQPIGKTKETFDDWLKEMNGDNPVVDNDSNLFVKDQGIKDAYMAIKPIMDKLHERFIEKSLTSEESKRIDFSEYFARFKDKSKDITNELEKGLRERIGETYIVAGNYFSEEIDKATKKLQEEQPKGKSRKQKENGTKPQKAKKKKPFECLTDAQMLNYLYANVAELAKENNIDEKVLANHIKKFQGFWGYLSGYNTNRENYYTTDTEQSTAVATRIVNDNLPTFCTNVLRFEKCRDEYLGMYQYLKDHNRETKIKKPQGELVEAETIKETFFQIEHFNECLSQQQIEEYNRVIGNCNLLINLYNQSSRDEKDFKKVDEFETLYKQIGCGKKKSMFAALIKDKQSELSEEQKKEENEENAIYSVETLLRKAQKAGDKMFGNGKNESSINTLPAFIHFLKDCDNWNGIYMSSTAVNKISNRYFANWHSIEDKLKEAKADACITYNKNREEQIRLRDAVELSGLFAVLDTEQSEHLFKQSLFKEEATNDYRGVLDTTLTPSKNLINLLCFDMERNMKAFLEISDSINALKKYKDDNTSSGEENQAIKLIKEWFDAATHAMRIVRFFAVRKSKMKGNLPNVTMEQALSNLLYSDDAQWFMWYDLVRNYLTKKPQDDVKENKLKLNFDNPILLGGWSDGQEKVKSATLLKYMNEMYLCILKTRNIFDTSKENPIYIEHSDASRLILRNLKFQTLAGKGFKGENGITYGEMGKSDPQKAIQCLQKIIAERYVSKYPLLEEYVSNAYTDKSKFDAAITETLKQCYVCEFEPIDWNLVVEKQNNGELFLFKIHCKDYMPKVSGKKDLQTLYWEDVLSEGSKHQLCAGAEIFMRKPVAKAPRKKHSVGSKLVNKKDSDGNTIPERIYSEIYLYVNSKTESISAEAQRYIDEQKAVIKDVKHEIIKDKRFYGETKFMFHCPVKLNYESKGYKGPNYAYPEVNTAIRESLQQSDNLQFIGIDRGEKHLVYSCTLDKDCNIIACHDHDNINGTDYVQKLEDVANERIIAKKNWQAEDKIKDLKSGYISHVVHRLVEEVIKDGNTIEPHAYIVLEDLNTEMKRGRQKIEKQVYQNLETALAKKLNFVVDKDAQPNELGSVGKALQLTPPISNYQDIEGKKQFGVMLYTRANYTSVTDPATGWRKTIYLKNGKEEEIKKQVLEKFSDLGFDGRDYFFEYTEAHAGHTWRLYSGKDGQPLPRFQNKKQLQQDKNIWVPEQVNVVEILDNLFAHFDKTKSFKQQIEQGVELVKIERRKEIAWQSLRYALDLIQQIRNTGTEQKDDNFLYSPVRNSKGEHFDTRNHANNGKLSAIKDADANGAYNIARKGLIMDAHIKYWMACGQPSRKNTLDLFVSDKEWDLWLLDRKGWEQELPAFALRNANESKD

SEQ ID NO: 707 - protein, 1406 aa, unidentified
  REGION 1..1406: note = Category: MG57 effectors
  REGION 1..1406: note = Description: MG57-17 effector
  source 1..1406: note = uncultivated organism sequence
MTQFTNLYQISKTLRFELKPVGKTKETFKQWFEELKNAELIVDNDGNLFLKDKNIKEAYLTIKPIMDRLHEQFIEMSLLSEEAKQIDFSEYFEKYQAKSVSEKLEKGLREKIGNTYIVAGKYLSNEIGIVLDKELNTKKGKPYDCLTDAKMYNYLSANVKVLAEQNGIDEQVLDKHIKQFKGFWGYLTGYNHNRKNYYEVDKEATTAIATRIVHENLPIFCCNIMRFVKRREEYISIYQYLKEHNRETKIKDSKGNDMDVEAISEEVFQINHFNECLAQSQIEEYNRIISNYNMLINLYNQLRRSEKDFKKIDELETLYKQIGCGKKRTMFETLQDDSDVKRLLQKVSKAGDEMFRVRSNSLEIKTVPDFITFLKDCDNWDGIYMSKAAISKISNIYFANWHSIKDKLKRAKANSCITYDKNREEQIKLRDAVELSELFAVVDTEQTEHFFKESLFKDSDTNEYRGVIDKKITPSKNLIKLLCYDIERNKKVFLEKTDEIVTLKKYKEENNQTSEEDQTIKTIKDWFDAVTDAMRIVRYFSVRKSKMKGNLPNATMEQALSNLLYSDNAQWFKWYDLIRNYLTKKPQDDAKENKLKLNFDSSSFLRESGWDNDYSKNGAFIVIKDNDYYLVVIKEKLEEEDINKLKNLSDNSAKRVVYKQQKMDFKNFPRLFVFSKGDNLAPAVSKYNLPIDTIFDDYRKYRNLKGKEKDVFIEEHPKFRYNLIEYFKKCAPLHESLSSFKDKFEEVWKRTEDYNSLSEFYKDTANACYELSFEHINFEELCSSDKCHLFQIYNKDFSIGENGGNGSIGKPNLHTIYWNMLFDETNLKDVIFKLDGQGAEIFMREPVAKESPTKHPIGSKLVNKRDKDGNTIPAQLYREIYLYVNGKAKIISKEAQEYLDNEKVVIKEVKHEIIKDNRFYGDSAKYMFHCPITINFKAQPGNESEVNSIITNALQQSDNLNIIGIDRGEKHLVYSCTIDRNGKIIKGKCHHYDNINGTNYVQKLEAVADERIIAKKNWQAQDKIKDLKNGYISHVVHRLVKEAIKDGDIIDPHAYIVLEDLNAEMKRGRQKIEKQVYQNLETALAKKLNFVVDKNVTQCELGSARKALQLTPPISNYQDIEGKKQFGIMLYTRANYTSVTDPATGWRKTIYIKNGRDEEIKKQILDRFIDFGFDGKDYYFKYTEDNVGHTWQMYSGKNGEPLSRFQNRKQILKDKNIWVPEQVNVIKILDKLFAEFDKSESFKAQINNGSELQKDDERNETAWQSLRYALDMIQQIRNSGEKNSENDNFLCSPVRNNNGEHFDTRRHEKNGELSEIIDADANGAFNIARKGLIMDAHIKYWIGNGRPTTKRDGKVISDLDLFISDKEWDMWLLDRAQWVKQLPSFASRNVKDSNENPPTAKRGKKS

SEQ ID NO: 708 - protein, 1406 aa, unidentified
  REGION 1..1406: note = Category: MG57 effectors
  REGION 1..1406: note = Description: MG57-18 effector
  source 1..1406: note = uncultivated organism sequence
MTQFTNLYQISKTLRFELKPVGKTKETFKQWFEELKNAELIVDNDGNLFLKDKNIKEAYLTIKPIMDRLHEQFIEMSLLSEEAKQIDFSEYFEKYQAKSVSEKLEKGLREKIGNTYIVAGKYLSNEIGIVLDKELNTKKGKPYDCLTDAKMYNYLSANVKVLAEQNGIDEQVLDKHIKQFKGFWGYLTGYNHNRKNYYEVDKEATTAIATRIVHENLPIFCCNIMRFVKRREEYISIYQYLKEHNRETKIKDSKGNDMDVEAISEEVFQINHFNECLAQSQIEEYNRIISNYNMLINLYNQLRRSEKDFKKIDELETLYKQIGCGKKRTMFETLQDDSDVKRLLQKVSKAGDEMFRVRSNSLEIKTVPDFITFLKDCDNWDGIYMSKAAISKISNIYFANWHSIKDKLKRAKANSCITYDKNREEQIKLRDAVELSELFAVVDTEQTEHFFKESLFKDSDTNEYRGVIDKKITPSKNLIKLLCYDIERNKKVFLEKTDEIVTLKKYKEENNQTSEEDQTIKTIKDWFDAVTDAMRIVRYFSVRKSKMKGNLPNATMEQALSNLLYSDNAQWFKWYDLIRNYLTKKPQDDAKENKLKLNFDSSSFLRESGWDNDYSKNGAFIVIKDNDYYLVVIKEKLEEEDINKLKNLSDNSAKRVVYKQQKMNFKNFPRLFVFSKGDNLAPAVSKYNLPIDTIIDDYRKYRNLKGKEKDVFIEEHPKFRYNLIEYFKKCAPLHESLSSFKDKFEEVWKRTEDYNSLSEFYKDTANACYELSFEHINFEELCSSDKCHLFQIYNKDFSIGENGGNGSIGKPNLHTIYWNMLFDETNLKDVIFKLDGQGAEIFMREPVAKESPTQHPIGSKLVNKRDKDGNTIPAQLYREIYLYVNGKTKIISKEAQEYLDNEKVVIKEVKHEIIKDNRFYGDSAKYMFHCPITINFKAQPGNESEVNSIITNALQQSDNLKFIGIDRGEKHLVYSCTIDRNGKIIKGKCHHYDNINGTNYVQKLEAVADERIIAKKNWQAQDKIKDLKNGYISHVVHRLVKEAIKDGDIIDPHAYIVLEDLNAEMKRGRQKIEKQVYQNLETALAKKLNFVVDKNVTQCELGSVRKALQLTPPISNYQDIEGKKQFGIMLYTRANYTSVTDPATGWRKTIYIKNGRDEEIKKQILDRFIDFGFDGKDYYFKYTEDNVGHTWQMYSGKNGEPLSRFQNRKQILKDKNIWVPEQVNVIKILDKLFAEFDKSESFKAQINNGSELQKDDERNETAWQSLRYALDMIQQIRNSGEKNSENDNFLCSPVRNNNGEHFDTRRHEKNGELSEIIDADANGAFNIARKGLIMDAHIKYWIGNGRPTTKRDGKVISDLDLFISDKEWDMWLLDRAQWVKQLPSFASKNVKDGNENPPTAKRGKKS

SEQ ID NO: 709 - protein, 1401 aa, unidentified; identical to SEQ ID NO: 704
  REGION 1..1401: note = Category: MG57 effectors
  REGION 1..1401: note = Description: MG57-19 effector
  source 1..1401: note = uncultivated organism sequence

SEQ ID NO: 710 - protein, 431 aa, unidentified
  REGION 1..431: note = Category: MG57 effectors
  REGION 1..431: note = Description: MG57-20 effector
  source 1..431: note = uncultivated organism sequence
MKTKTITIMKEKEQYSDFTNLYQLSKTLRFELKPVGKTAETFKQWLSEMNNSDKEENLFAKDKKIKNAYMVIKPIIDKLHERFIEKSLTSKEAKEIDFSPYFEAYKQKNVLDTFEEGLRKKIGETYTVAGGFQYLTDKRILNYLSDNVQELAKQNGIDEKTLANHIEQFKGFGGYLSGYNQNRMNYYTTKEEQSTAVATRIVHENLPTFCDNILRFEKSREGYLSICQYLKDNNREIKIKNAQGEETEAETITEAIFQIKHFNSCLAQSQIEEYNRIIGNYNFLINLYNQARREEKEFKKLDEFESLYKQIGCGEKKSLFESLHDDSDLKALLQKIKEAGDTFFKECCDETEISTVSAFIKFLKECDNWEGIYMSSAAVNKISNLYFTNWHSIKDKLKESNANACITYDKDREEPVKLRDAMGGKTKSKIM

SEQ ID NO: 711 - protein, 1406 aa, unidentified
  REGION 1..1406: note = Category: MG57 effectors
  REGION 1..1406: note = Description: MG57-21 effector
  source 1..1406: note = uncultivated organism sequence
MKTFNDLTGLYSLSKTLRFELKPVGKTEETFKRWLEEMQNNEKVIDNDSNLFLKDKNIKDAYLAIKPIMDRLHEQFIEMSLLSEKAKQIDFSEYFIKFKDKNISSDLEKKLRREIGDTYQVAGECISEEITNACGKEFKIKKGKEYQCLTDAKILDYLSANVKNLAKFNCIDEKTLDKHINQLKGFWGYLTGYNQNRENYYEVEKEASTAVATRIVHENLPTFCSNILRLEKRKDEYVGIYQYLADNNREIKIKNSKGEEVDAEAISENVFQIGYFNECLAQSQIEEYNRIIGNYNMLINLYNQARRSEKNFKKIEEFEKLYKQIGCGVKKTMFETLQNESDVKSLLEKASEAGNAMFKTCSNSLEIKTVPDFVSFLKECDNWDGIYMSKTAISKISNLYFANWHSIKDKLKETKAEACITYDKNREEPIKLRDAVELSGLFAVMDLERPEYTFKESLFKNDETNDYRGVLDKELSSSQNLIRLLCSDIERNINDFLKDSDSIVALETYKNINSQADEENQTIKQIKDWFDAATDAMRIVRYFAVRKSKMKGKNLPNVTMEQALSNLLYSDEAQWFKWYDLIRNYLTKKPQDDAKENKLKLNFDSSSFFKESGWDNDYLKHGAFIVIKGNDYYLVVVNDKLEEDDINQLKTSSNNTAKRLVYKQQKMDFKNFPRWFIFSKGDNLAPAVEKYKLPIETILKDYQKYRELSQKGKESFIEEHPKFRSNLIAYFKKCALVHESLMPFKDMLEMVWRKTDEYKTLSDFYNDTINACYEITFEDIDFDKLRSMDKFYIFQIYNKDFSTGQNGGNGTTGKPNMHTIYWKMLFDEINLKNVVFKLDGQGAEIFMRKPIGKESLVKHGLGFKLVNKRDKEGNTIPEQIYREIYMYVNDKKEVISVEAQKYIDEQKVIIKDVKHEIIKDKRFFGETKYLFHCPITINFKAKSANEPEVNSKILNVLHQLDNLHFIGIDRGEKHLVYSCTIDKDGKIIKCNHHDNINGTDYVQKLEAVADERIIAKKNWQEQNKIKDLKSGYISHVVHRLVEETIKDDGKIAPHAYIVLEDLNTEMKRGRQKIEKQVYQNLETALAKKLNFVVDKNAQQGELGSVSKALQLTPPISNYQDIENKKQFGVMLYTRANYTSVTDPATGWRKTIYVKNGKEEDVKNQILEKFDDFGFDGKDYYFEYTEAHVGRTWRLYSGKNGEPLPRFQNRKQLLQDKNIWVPESINVVEILDKLFVDFDKSKSFKLQIKQGVELKKIEGKSETAWQSLRYALDLIQQIRNSGEKKSIDDNFLYSPVRNINGEHFDTRNHEGNGDLSKIVDADANGAYNIARKGLIMDAHIRHWIESGRPAKKGEKSPDLDLFISDKEWDLWLLNRDQWKKELPIFASRNAKEDAVKSNTGIRRAKKK

SEQ ID NO: 712 - protein, 1372 aa, unidentified
  REGION 1..1372: note = Category: MG57 effectors
  REGION 1..1372: note = Description: MG57-22 effector
  source 1..1372: note = uncultivated organism sequence
MKTKTITIMKEKEQYSDFTNLYQLSKTLRFELKPVGKTAETFKQWLSEMNNSDKEENLFAKDKKIKNAYMVIKPIIDKLHERFIEKSLTSKEAKEIDFSPYFEAYKQKNVLDTFEEGLRKKIGETYTVAGGFQYLTDKRILNYLSANVEELAKQNGIDEKTLANHIEQFKGFGGYLSGYNQNRMNYYTTKEEQSTSVATRIVHENLPIFCDNILRFEKSREGYLSICQYLKGNNREIKIKNAQGEETEAETITEAIFQIKHFNSCLAQSQIEEYNRIIGNYNFLINLYNQARREEKEFKKLDEFESLYKQIGCGEKKSLFESLHDDSDLKALLQKIKEAGDTFFKECCDETEISTVSAFIKFLKECDNWEGIYMSSAAVNKISNLYFTNWHSIKDKLKESNANACITYDKDREEPVKLRDAVELSELFAVLNKESLEHLFKESLFKDNKLDTELTPSHNLINLLCSDVKQNIDYFWEHSEGITDLINDKNQSNEETQKIKQIKEWLDAAMNAMRIVRYFAVRKSKMKGNMPNVTIEQALSNLLYNDDAQWFKWYDLVRNYLTKKPQDDVKENKLKLNFGNSTLMNGWDMNKERDNTAVIIRRNNLYYLGIMDKNYNKILDADKIKSDDKSSYYEKMDYKQIALPTGVGGFVRKCFDTAQQYGWSCPKDCLNEDEKIIIKDDEARKNLTKIIDCYKDFFDKYEKDGFKYRNFNFRFLKSTEYEKLSDFFKDVERQRYMIKFRNISADYIDDLVNEGKLYLFQIYNKDFSTGRNERNGSKGKPNMHTIYWKTLFDETNLNDVVYKLNGQAEIFMREPVAKESPVKHGVGSKLVNKRDKDGNTIPEQIYKEIYLFANNKVKKENLSAEAKNYIESEKVKIKEAKYEIVKDNRFYGETKYMFHCPITINFKAGSSSGVNEKITDALQQSDNLQFIGIDRGEKHLVYSCTIDKEGKIVKCNHHDNINGTDYVQKLEAVANERLIAKKNWQQQNRIKDLKSGYISHVVHRLVEETIKDDKTIAPHAYIVLEDLNSEMKRGRQKIEKQVYQNLELALAKKFNFVVDKTAKQGELGSVSMALQLTPPVTNYKDIEGKKRFGIMLYTRANYTSITDPATGWRKTIYIKNGKDEEIKAQIIDKFSNFGFYGKDYYFEYTEENAGHTWRMYSGKDGKPLPRFQNKKQMLQDKNIWVPEQINVKEILDKLFANFDKGRSFKEQVNEEVKLEKIEGRSETAWQSFRYVLNMIQQIRNSGIEKKDDNFLYSPVRNENGEHFDTRNPQNNGGLELIVDADANGAFNIARKGLIMDAHIKHWINSGRPKIKKDGKETSDLDLFISDREWDLWLLDREEWKKYLPVFASKSKKDADKTTSTKSPKRKKK

SEQ ID NO: 713 - protein, 765 aa, unidentified
  REGION 1..765: note = Category: MG57 effectors
  REGION 1..765: note = Description: MG57-23 effector
  source 1..765: note = uncultivated organism sequence
MKRFTNLYQLSKTLKFKLEPMDNTADTFKDWLEEMERDVCTDENLFAKDKNIKKAYMAIKPIMDRLHEQFIEMSLLSEDAKQIDFSEYFEAYRKKPITPAMEKELRKAFAKPFQCAGRCFIEEISKAQKDGKEIKTKKDKQYECLIDAKIYNYLSANVKEIAEQNGIDELTLDRHIKQFKGFWGYLDGYNQNRENYYEVEKEASTAVATRIVHENLPTFCDNAIRFEKRKEDYLCIYQYLKDNSRETKIKNSKGEEIEVETISDEIFHIKHFNECLAQSQIEEYNRIIGNYNYMINLYNQLRRGEKDFKIIDEFEKLYKQIGCGRKKSMFAVLIKDKHNELKEDQKKAEEDGEVILTVQTLLQRAKSAGDMMFKKGKDTAEIKTVPEFIQFLQGCKDWNGIYMSSAAVNKISNLYFANWHSVKDRLKEAKASACITYDKYREEPIKLRDAVELSGLFAVLDEEQSEHLFKESLFKDDDTNEYRGVLNKALTSSQNLINLLCSDIERNIKVFQEKTADILALDKYKDENNQAGEEDENIKLIKEWFDAATDAMRVVRYFAVRKSKMKGNLPNVTIEQALSNLLYNDDVQWFKWYDLVRNYLTKKPQDYAKDNKLKLNFDSSSFLKENGWDNDYSKSGAFIVIKDNNYYLVVVKDKMEEDELIKLKSPSNNAAKRVIYKQQKMDFKNFPRWFIFSKGDNLAPAVEKYNLPIDTILDDYKVYRTLSGSEKDKFIEGHPRFRYNLIEYFKKCATLHESLSPFKDKFETI

SEQ ID NO: 714 - protein, 1372 aa, unidentified
  REGION 1..1372: note = Category: MG57 effectors
  REGION 1..1372: note = Description: MG57-24 effector
  source 1..1372: note = uncultivated organism sequence
MKTKTITIMKEKEQYSDFTNLYQLSKTLRFELKPVGKTAETFKQWLSEMNNSDKEENLFAKDKKIKNAYMVIKPIIDKLHERFIEKSLTSNKAKKIDFSPYIEAYKQKNVLDTFEEGLRKKIGETYTVAGGFQYLTDKRILNYLSANVEELAKQNGIDEKTLANHIEQFKGFGGYLSGYNQNRMNYYTTKEEQSTAVATRIVHENLPTFCDNILRFEKSREGYLSICQYLKDNNREIKIKNAQGEETEAETITEAIFQIKHFNSCLAQSQIEEYNRIIGNYNFLINLYNQARREEKEFKKLDEFESLYKQIGCGEKKSLFESLHDDSDLKALLQKIKEAGDTFFKECCDETEISTVSAFIKFLKECDNWEGIYMSSAAVNKISNLYFTNWHSIKDKLKESNANACITYDKDREEPVKLRDAVELSELFAVLNKESLEHLFKESLFKDNKLDTELTPSHNLINLLCSDVKQNIDYFWEHSEGITDLINDKNQSNEETQKIKQIKEWLDAAMNAMRIVRYFAVRKSKMKGNMPNVTIEQALSNLLYNDDAQWFKWYDLVRNYLTKKPQDDVKENKLKLNFGNSTLMNGWDMNKERDNTAVIIRRNNLYYLGIMDKNYNKILDADKIKSDDKSSYYEKMDYKQIALPTGVGGFVRKCFDTAQQYGWSCPKDCLNEDEKIIIKDDEARKNLTKIIDCYKDFFDKYEKDGFKYRNFNFRFLKSTEYEKLSDFFKDVERQRYMIKFRNISADYIDDLVNEGKLYLFQIYNKDFSTGRNERNGSKGKPNMHTIYWKTLFDETNLNDVVYKLNGQAEIFMREPIAENSPVKHGVGSKLVNKRDKDGNTIPEQIYKEIYLFANNKVKKENLSAEAKNYIESEKVKIKEAKYEIVKDNRFYGETKYMFHCPITINFKAGSSSGVNEKITDALQQSDNLQFIGIDRGEKHLVYSCTIDKYGKIIKCNHHDNINGTDYVQKLEAVANERLIAKKNWQQQNRIKDLKSGYISHVVHRLVEETIKDDKTIAPHAYIVLEDLNSEMKRGRQKIEKQVYQNLELALAKKFNFVVDKTAKQGELGSVSMALQLTPPVTNYKDIEGKKRFGIMLYTRANYTSITDPATGWRKTIYIKNGKDEEIKVQIIDKFSNFGFDEKDYYFEYTEENAGHTWRMYSGKDGKPLPRFQNKKQMLQDKNIWVPEQINVKEILDKLFANFDKGRSFKEQVNEEVKLEKIEGRSETAWQSLRYALNMIQQIRNSGVEKTDDNFLYSPVRNENGEHFDTRNHENNGDLSPIVDADANGAFNIARKGLIMDAHIKKWIKEGKPTTKEGDSKTPDLDLFISDREWDLWLLDREEWKKYLPVFASKSKKDADKTTSTKSPKRKKK

SEQ ID NO: 715 - protein, 431 aa, unidentified
  REGION 1..431: note = Category: MG57 effectors
  REGION 1..431: note = Description: MG57-25 effector
  source 1..431: note = uncultivated organism sequence
MKTKTITIMKEKEQYSDFTNLYQLSKTLRFELKPVGKTAETFKQWLSEMNNSDKEENLFAKDKKIKNAYMVIKPIIDKLHERFIEKSLTSKEAKEIDFSPYFEAYKQKNVLDTFEEGLRKKIGETYTVAGGFQYLTDKRILNYLSANVEELAKQNGIDEKTLANHIEQFKGFGGYLSGYNQNRMNYYTTKEEQSTAVATRIVHENLPTFCDNILRFEKSREGYLSICQYLKDNNREIKIKNAQGEETEAETITEAIFQIKHFNSCLAQSQIEEYNRIIGNYNFLINLYNQARREEKEFKKLDEFESLYKQIGCGEKKSLFESLHDDSDLKALLQKIKEAGDTFFKECCDETEISTVSAFIKFLKECDNWEGIYMSSAAVNKISNLYFTNWHSIKDKLKESNANACITYDKDREEPVKLRDAMGGKTKSKIM

SEQ ID NO: 716 - protein, 1366 aa, unidentified
  REGION 1..1366: note = Category: MG57 effectors
  REGION 1..1366: note = Description: MG57-26 effector
  source 1..1366: note = uncultivated organism sequence
MKQFTNLYQVSKTLRFELQPIGKTKETFKGWLEKIDTAIPDVDDENLFLRDKKIKEAYLAIKPIMDSIHEEFIEKSLSSKEAKNIDFSDYYSLFKEKKVSSEFEKRLRKKISDTYSIAGDYFISEIEKTIANQKRKSNKKAAVAEEEKITKRKSKKPFECLTDVKMLFYLSANVKRLAEQHEIDEETLSRYIQTFKGFWGYLDGYNQNRENYYESEKETSTAVATRIVNENLPTFCNNILRFEKREKEYLNVFQYLKNNNRETKIKNSLGEEEDVVPIRASIFKIEHFNECLTQSQIEEYNRVIGNYNLLINLYNQLRSEETEYREIDEFEKLRKQIGCGKKPTNFDMLHDDSELKELLQKAGEAGEKMFGTENKQAEISTLPQFVKFLKDCNNWEGIYMSKAAINIISSLYFANWHSIEDKLYEAKAKACITYDKNREEPIQLRDAVELSELFAVLDTELTEHIFKDSLFKKDETNEYQNVLDKTLSPSKNLINLLCCDIEQYTKSFLVKTDKILALEKFKNDTHANEENETVKIIREWFVAATNAMRIVRFFAVRKSKMKGKIPNVAMEHALDNLLYCDNVQWFKWYDLVRNYLTKKPQDDVKENKLKLNFGTSSLLDGWSDGQEKTKAATLLKYNNELYLCILKTKNIFDTSKEDNPVYQTNLSVASRLILRNLKFQTLAGKGFLSENDISYSEMGAANPSQAILCLQKIIKERYVSKYPQLEKFVLKSYTDKGKFDAEISDALKDCYVCEYMPIDWNVIIEKQNSEELFLFKICCKDIKPGTYGRKDLQTMYWEDVLSEGSNHQLCAGAEIFMREPISKESPVRHRVGSKLVNKRDQDGNTIPEHIYREIYSYANGRVNVLSAEAKVFAEKSIIKDAKYEIIKDKRFYGDTKFMFHCPIKLFFKAKDPSRVFSEVNTLVNDALQESTNLHFIGIDRGEKHLVYSCAIDKDARIVKCIHHDIINGTDYVQKLEAVADERIIAKKNWQEENKIKDLKKGYISHVVHRLVEETIKDDGMISPHAYIILEDLSTSMKRGRQKIEKQVYQNLEMALAKKLNFVVDKTASQGELGSVSMALQLTPPVNTYQDIEGKKQFGVMLYTRANYTSITDPATGWRKTIYIKDGKEDNIRKDFISKFTDWGFDGLDYYFEYKEENVGHIWRMYSGINGEPLPRFQNRKQIMQDKNIWVSEQVNVVDILDNLFARFDKSKSLKEQLEHGVELQKINGRNETAWQSLRYAINVIQQIRNSGDKKSGNDNFLYSPVRNAKGEHFDTRNHHNNGELSEIKDADANGAFNIARKGLIMDAHIKYWNECGRPMKSDKKDEKTSDLDLFISDREWDMWLLDRSLWEKELPIFASLKAKKKQ

SEQ ID NO: 717 - protein, 1366 aa, unidentified
  REGION 1..1366: note = Category: MG57 effectors
  REGION 1..1366: note = Description: MG57-27 effector
  source 1..1366: note = uncultivated organism sequence
MKQFTNLYQVSKTLRFELQPIGKTKETFKGWLEKIDTAIPDVDDENLFLRDKKIKEAYLAIKPIMDSIHEEFIEKSLSSKEAKNIDFSDYYSLFKEKKVSSEFEKRLRKKISDTYSIAGDYFISEIEKTIANQKRKSNKKAAVAEEEKITKRKSKKPFECLTDVKMLFYLSANVKRLAEQHEIDEETLSRYIQTFKGFWGYLDGYNQNRENYYESEKETSTAVATRIVNENLPTFCNNILRFEKREKEYLNVFQYLKNNNRETKIKNSLGEEEDVVPIRASIFKIEHFNECLTQSQIEEYNRVIGNYNLLINLYNQLRSEETEYREIDEFEKLRKQIGCGKKPTNFDMLHDDSELKELLQKAGEAGEKMFGTENKQAEISTLPQFVKFLKDCNNWEGIYMSKAAINIISSLYFANWHSIEDKLYEAKAKACITYDKNREEPIQLRDAVELSELFAVLDTELSEHIFKDSLFKKDETNEYQNVLDKTLSPSKNLINLLCCDIEQYTKSFLVKTDKILALEKFKNDTHANEENETVKIIREWFVAATNAMRIVRFFAVRKSKMKGKIPNVAMEHALDNLLYCDNVQWFKWYDLVRNYLTKKPQDDVKENKLKLNFGTSSLLDGWSDGQEKTKAATLLKYNNELYLCILKTKNIFDTSKEDNPVYQTNLSVASRLILRNLKFQTLAGKGFLSENDISYSEMGAANPSQAILCLQKIIKERYVSKYPQLEKFVLKSYTDKGKFDAEISDALKDCYVCEYMPIDWNVIIEKQNSEELFLFKICCKDIKPGTYGRKDLQTMYWEDVLSEGSNHQLCAGAEIFMREPISKESPVRHRVGSKLVNKRDQDGNTIPEHIYREIYSYANGRVNVLSAEAKVFAEKSIIKDAKYEIIKDKRFYGDTKFMFHCPIKLFFKAKDPSRVFSEVNTLVNDVLQESTNLHFIGIDRGEKHLVYSCAIDKDARIVKCIHHDIINGTDYVQKLEAVADERIIAKKNWQEENKIKDLKKGYISHVVHRLVEETIKDDGMISPHAYIILEDLSTSMKRGRQKIEKQVYQNLEMALAKKLNFVVDKTASQGELGSVSMALQLTPPVNTYQDIEGKKQFGVMLYTRANYTSITDPATGWRKTIYIKDGKEDNIRKDFISKFTDWGFDGLDYYFEYKEENVGHIWRMYSGINGEPLPRFQNRKQIMQDKNIWVSEQVNVVDILDNLFARFDKSKSLKEQLEHGVELQKINGRNETAWQSLRYAINVIQQIRNSGDKKSGNDNFLYSPVRNAKGEHFDTRNHHNNGELSEIKDADANGAFNIARKGLIMDAHIKYWNECGRPMKSDKKDEKTSDLDLFISDREWDMWLLDRSLWEKELPIFASLKAKKKQ

SEQ ID NO: 718 - protein, 1366 aa, unidentified
  REGION 1..1366: note = Category: MG57 effectors
  REGION 1..1366: note = Description: MG57-28 effector
  source 1..1366: note = uncultivated organism sequence
MKQFTNLYQVSKTLRFELQPIGKTKETFKGWLEKIDTAIPDVDDENLFLRDKKIKEAYLAIKPIMDSIHEEFIEKSLSSKEAKNIDFSDYYSLFKEKKVSSEFEKRLRKKISDTYSIAGDYFISEIEKTIANQKRKSNKKAAVAEEEKITKRKSKKPFECLTDVKMLFYLSANVKRLAEQHEIDEETLSRYIQTFKGFWGYLDGYNQNRENYYESEKETSTAVATRIVNENLPTFCNNILRFEKREKEYLNVFQYLKNNNRETKIKNSLGEEEDVVPIRASIFKIEHFNECLTQSQIEEYNRVIGNYNLLINLYNQLRSEETEYREIDEFEKLRKQIGCGKKPTNFDMLHDDSELKELLQKAGEAGEKMFGTENKQAEISTLPQFVKFLKDCNNWEGIYMSKAAINIISSLYFANWHSIEDKLYEAKAKACITYDKNREEPIQLRDAVELSELFAVLDTELTEHIFKDSLFKKDETNEYQNVLDKTLSPSKNLINLLCCDIEQYTKSFLVKTDKILALEKFKNDTHANEENETVKIIREWFVAATNAMRIVRFFAVRKSKMKGKIPNVAMEHALDNLLYCDNVQWFKWYDLVRNYLTKKPQDDVKENKLKLNFGTSSLLDGWSDGQEKTKAATLLKYNNELYLCILKTKNIFDTSKEDNPVYQTNLSVASRLILRNLKFQTLAGKGFLSENDISYSEMGAANPSQAILCLQKIIKERYVSKYPQLEKFVLKSYTDKGKFDAEISDALKDCYVCEYMPIDWNVIIEKQNSEELFLFKICCKDIKPGTYGRKDLQTMYWEDVLSEGSNHQLCAGAEIFMREPISKESPVRHRVGSKLVNKRDQDGNTIPEHIYREIYSYANGRVNVLSAEAKVFAEKSIIKDAKYEIIKDKRFYGDTKFMFHCPIKLFFKAKDPSRVFSEVNTLVNDVLQESTNLHFIGIDRGEKHLVYSCAIDKDARIVKCIHHDIINGTDYVQKLEAVADERIIAKKNWQEENKIKDLKKGYISHVVHRLVEETIKDDGMISPHAYIILEDLSTSMKRGRQKIEKQVYQNLEMALAKKLNFVVDKTASQGELGSVSMALQLTPPVNTYQDIEGKKQFGVMLYTRANYTSITDPATGWRKTIYIKDGKEDNIRKDFISKFTDWGFDGLDYYFEYKEENVGHIWRMYSGINGEPLPRFQNRKQIMQDKNIWVSEQVNVVDILDNLFARFDKSKSLKEQLEHGVELQKINGRNETAWQSLRYAINVIQQIRNSGDKKSGNDNFLYSPVRNAKGEHFDTRNHHNNGELSEIKDADANGAFNIARKGLIMDAHIKYWNECGRPMKSDKKDEKTSDLDLFISDREWDMWLLDRSLWEKELPIFASLKAKKKQ

SEQ ID NO: 719 - protein, 1128 aa, unidentified
  REGION 1..1128: note = Category: MG57 effectors
  REGION 1..1128: note = Description: MG57-29 effector
  source 1..1128: note = uncultivated organism sequence
MEQFTNLYQLVKTLRFGLEPVGETKVTFEKWIEKLKNSEPVDDEDGNLFVKDERIRDAYLAIKPIMDRLHEKFIEESLTSNEARKIDFSEYFEAFKDEDKDVSAFEKKLRLDIGATYVVGGRYFSSEIEEAIKKPKEKKEKKEETKDEKTNKTKKKQPYECLTDANMLDYLSANVKKLAEQNGIDEQALSKHIEVFKGFWGYMSGYNQNRKNYYEVKKKATTAVATRIVHENLPIFCNNIRRFEKCRDEYIGIYQLLKDNNRETKIKNSHGVEVEAEAISEDMFQIAHFNNCLSQTQIDEYNRVIGDYNYMINLYKQARSDEKNSKKIDEFERLKKQIGCGKKKSMFVALIKDRKSELKDDDKKRENEDGVILTVETLLQRANIAGEAAFNEHDNESEINSIPGFIRFLKGCNNWSGIYMSKNAINKISSLYFANWHSLEEILVEWHKGNDKELKEKVKACITYDEKREEPLKLRDAVELSGLFAALDTALPEHFFKESLFKDDDTNEYRGVLDKTFTPSENLINMLCFDMKRYTEEFLENSKRILVKEKYKDENIKAGEEDQTIKEIKDWFDAATDAMRIVRYFAVRKSKMKGNIPNATMEQALSNLLYSDEAQWFKWYDLIRNYLTKKPQADVKENRLKLNFNNPTLMEGWDLNKESNYATVILRKNGFYYIGIMAKGHNNKFDEGTIDTDGECYEKMIYKQIPMPMGVVGFVRKCAGTAEKYGWHCPNNCLNEEGKIIGKDDEAHTHLKEIIDCYKDFFDKYEKDGYKYRDFNFTFLDSDKYEKLSDFFRDVEWQSYKVTFRNVSVVFINDKVKNGELYLFKLVSKDFSPGKNGGKGTIGTPNLQTLYWKKLFDEDNLKDVIYKLNGESEIFMRKPVAKESPVKHVLGSKLVNKRDKDDKTIPEQIYREIFLYENKKKKNISDDAKKYIDEQKAIVKDVKHEIVKDNRFYGETKYLFHCPITINFKAKKYKEPKDALAKVNEEITNSLQQSVKDLHFIGIDRGEKHLVYSCTIDENGKIIEGKCHDHDNINGTNYVQKLEAIADERTIARKNWQQQSKIKDLKRGYLSHVVHNLVEETIKDGDVIAPHAYIVLEDLSTEMKRGRQKIEKQVYQLLCLQSEIPMSR

SEQ ID NO: 720 - protein, 990 aa, unidentified
  REGION 1..990: note = Category: MG57 effectors
  REGION 1..990: note = Description: MG57-30 effector
  source 1..990: note = uncultivated organism sequence
MPAFIKFLQECGNWDGIYMSSAAINKISNLYFANWHSLKDKLKDAKANACITYDKKREEQIKLRDAVELSGLFAVLDTEPSEHFFKDSLFKDDDTNEYHNVLDKRLSPSKNLINLLCFDIERNIKAFLKDSDKIVALEKFKGEEETIKQIKDWLDTATDAMRVVRYFAVRKSKMKGSLPNSTMEQALSNLLYNDDAQWFKWYDLVRNYLTKKPQDDAKENKLKLNFGTSSLLGGWSDGQEKNKAATILKCDNDLYLCILKTKNIFDTSKEDNPIYKTNKSKASRLILKNLAFKTLAGKGFKGEYGVSYGDMGKDDPTKAIQCLQKFIKERYVNKYPLLEKFVANKYTDKRIFDAEINETLKECYVCEFVPIDWNIVTEKQNNEELFLFEIHSKDYQQGRKGKKDLQTMYWEDVLSDGSKHQLCAGAEIFMREPVEKESPIKHSVGSKLVNKRDNDGNTIPEQIYREIYLYANGKTKDISKEAQLYIDEQKAIIKEVKHEITKDKRFYGEQKYMFHCPIKLYFEAKDPKYASPEVNSKITKALQQSDNLQFIGIDRGEKHLVYSCSIDMNGKIVKCNHHDNINGTDYVQKLEAVADERIIAKKNWKAQNRIKDLKNGYISHVVHRLVEETIKDGDIIAPHAYIVLEDLNTEMKRGRQKFEKQVYQNLETALAKKLNFVVDKDAKQGELGSVSKALQFTPPISNYQDIEGKKQFGVMLYTRANYTSVTDPATGWRKTIYIKNGKEEDIKNQILEKFSDFGFDGKDYYFEYTEANAGHTWRLYSGKNGEPLPRFQNRKQLQQDKNIWVPEQINVVEILDNLFDNFDKRNSFKSQIGQGVELKKIEGRSETAWQSLRYALDLIQQIRNSGLKKEDDNFLCSPVRDENGKHFDTRNHANNGELSPIVDADANGAYNIARKGLIMDAHIKHWTDSGQPTKKGEKTPDLDLLISDEEWDLWLLDKEQWKKKLPTFASRKAKEDDKKSQTRKKSGMKQ

SEQ ID NO: 721 - protein, 976 aa, unidentified
  REGION 1..976: note = Category: MG57 effectors
  REGION 1..976: note = Description: MG57-31 effector
  source 1..976: note = uncultivated organism sequence
MLPFKIFFCFSYSKNFAFRIFDYNAVELSELFAVLNKESLEHLFKESLFKDNKLDTELTPSHNLINLLCSDVKQNIDYFWEHSEGITDLINDKNQSNEETQKIKQIKEWLDAAMNAMRIVRYFAVRKSKMKGNMPNVTIEQALSNLLYNDDAQWFKWYDLVRNYLTKKPQDDVKENKLKLNFGNSTLMNGWDMNKERDNTAVIIRRNNLYYLGIMDKNYNKILDADKIKSDDKSSYYEKMDYKQIALPTGVGGFVRKCFDTAQQYGWSCPKDCLNEDEKIIIKDDEARKNLTKIIDCYKDFFDKYEKDGFKYRNFNFRFLKSTEYEKLSDFFKDVERQRYMIKFRNISADYIDDLVNEGKLYLFQIYNKDFSTGRNERNGSKGKPNMHTIYWKTLFDETNLNDVVYKLNGQAEIFMREPIAENSPVKHGVGSKLVNKRDKDGNTIPEQIYKEIYLFANNKVKKENLSAEAKNYIESEKVKIKEAKYEIVKDNRFYGETKYMFHCPITINFKAGSSSGVNEKITDALQQSDNLQFIGIDRGEKHLVYSCTIDKYGKIIKCNHHDNINGTDYVQKLEAVANERLIAKKNWQQQNRIKDLKSGYISHVVHRLVEETIKDDKTIAPHAYIVLEDLNSEMKRGRQKIEKQVYQNLELALAKKFNFVVDKTAKQGELGSVSMALQLTPPVTNYKDIEGKKRFGIMLYTRANYTSITDPATGWRKTIYIKNGKDEEIKVQIIDKFSNFGFDEKDYYFEYTEENAGHTWRMYSGKDGKPLPRFQNKKQMLQDKNIWVPEQINVKEILDKLFANFDKGRSFKEQVNEEVKLEKIEGRSETAWQSLRYALNMIQQIRNSGVEKTDDNFLYSPVRNENGEHFDTRNHENNGDLSPIVDADANGAFNIARKGLIMDAHIKKWIKEGKPTTKEGDSKTPDLDLFISDREWDLWLLDREEWKKYLPVFASKSKKDADKTTSTKSPKRKKK

SEQ ID NO: 722 - protein, 1248 aa, unidentified
  REGION 1..1248: note = Category: MG58 effectors
  REGION 1..1248: note = Description: MG58-1 effector
  source 1..1248: note = uncultivated organism sequence
MVKEIFYLLFSKKMKSDFFSPFTNLYPIQKTLRRELKPLNENFQHDPALTALRNSEILQRDEQREKDYQAIKPLLDELHNQFITESLQSLEPQDRSDFVDFYQNYQKSKKNKANLSEKELKSLDEEFESRTKALRTAIGTSFSNTAELRKSNPDYVNEKGKPFLDQKSYKILTEAGVLWLLEKKYASDPEKLALIRRFGNFFTYFTGFNQNRENYYATDEKATAVAYRAINENLLTFANNCELFEKLSVLSLSEREKKIFNPDSYSEYLTQSGIDFYNEMFANIRSKANLYTQEHKTKLPQPKLLYKQIWSPRGNTIPFDLINKDEEFQKMLDTMIAETDQRIPEFKKLLEPIFEGKADLSQIFLSKTALNIISNRYFSSWHTLLEKGVELKLFKFKKNDEESFKLPAYLSLAELKELLEAVPFQTAEKSDTTEGNHHQASLLKLQRENLHLERSNSNWELLLKSMKSDFESFWTWEGEFWSYTSAKKALQSLSSLQSTNQEHKNLIKMLLDNTLYAYRMLKWFKVDTSKLGFVPEGEFYPSLDQILQDYPLPKWYDMIRNYLTRKPYSQAKLKLNFDCSTLLNGRDKNKETQNLSVILRKDGKFYLAIMKKDQNKFFEKSALYEGNLGTMEKMDYKLLPWANKMLPKCLMPGSDKKKYGASDQVLELYAKGSFKKSEKSFNLADLHTLIDFYKSALPKYEDWKVFNFQFQATENYQDISQFYREVEQQGYLLNWRKVNEELIKQGIKDWSLFLFQISSKDFEGKSKTPDLQTLYWQQLFEFSTNVKLNGEAEIFFRPWSMKKEKKNLKVDNYDVFKHKRYTEDKILFHVPITLWFGNNEVSPSAPSKFNQKLNQELIIPHFDDLHVIGLDRWEKHLAFYSVVSVKTGKIVKQGTLNLLNGTDYEAKLSQKAENRLHARQNRDTIEKIADLKNGYISQVVNKLVELVLEYNAVIVFEDLNAGFKRGRQKIEQSVYQKLELALAKKLNFIVKKEKAVGEPWSVTSAYQLAPQINTFWDIKWKQRGIMLYTRANYTSVTDPLTGWRKQHYFKKGSSKEMKAQFFKSFKNLTRDTNQEAYIFDDGTWKLYSNVERRRGKRGDHRERTQIKYDPSLELDTLFSKYQIEKSESLFGQLKNRELPQTFWTSFFRILDLIMQIRNTDDESRDIILSPIGNAQERFDSRKRYDQLPRDEKGVVIEESAFEYPTSGDANGAYNIARKGVMMLERIKENPEKPDLLIRDAEWDRKITN

SEQ ID NO: 723 - protein, 1253 aa, unidentified
  REGION 1..1253: note = Category: MG58 effectors
  REGION 1..1253: note = Description: MG58-2 effector
  source 1..1253: note = uncultivated organism sequence
MYTDYIDKLVGGFMDNAFSKFTNQYSFSKTLRFELVPQGRTADFLNGELESDQDRAESYQLLKPHFDNFHDGFIEQSLKAYSDSENRFEQLGDLLQKQQKFDKNSSNYEKLEKDIIKLQKSIRTNLSRFFTGFAKKLNQDYGLGDKSIISNAGAMVDFAKILWKDQPEKLVLLSKFDKFSGYFTGYCQNRTNYYVGDDKSTAVSNRIVNQNFTKYTQNFIEINKDEFKSFLKWFNQEDRYIYNQSTKQSQLTHINPETFSFAHYTEHLNQSGIETYNFNIGDINYWINQFNQTKPPKKVKKLLNLYKQIGQIPVDKKELFKFYETDEDLATDLLVTIENLPKYTENANTLFRNLADEEFNLEEINISARGTNSLANKYLIGWESVRELVNSNKKHDSSNKLIKLSEKPKSTTLGSLNEIINQFEPNQIFKPKYLNNLSDEPGQPSEILIWLIKESLLNALKESKDLAANLNLNKQSKLLGEKSITENIKTFLDSLLLSSQIMKTFQVDGALGDSDFYNELDQVLNEIDIFSIYNATRNYLTKKPYSQDKILLKFANSSLLDGWDINKESDNTSVILRDSTGYFLAIMKKSSNKFFDKAKNPLLYQVDSGDLEKMDYKLLPGPNKMIPKCIISVFWNKQEKQIVRDKPTTIKLAKSGISPSDEFIYKYNQGLHTKDPETKKIRDKKYLVEYIDYVKDALNKYEGWQGYIFNFKSSDQYQDTSEFYKDISDGGYSLNWSSIDLDVLNKAVDEGEIYLFKLKNKDLARKSKSNGKPNLHTMYWQNLFIDESSFKLNGSAEMFYRPKTIDKKQKVFTGSGIKKSGIFEKNRFTENKYLFHVPITINRKANNVIKFRDKINQAIIDEKITNVIGVDRGEKHLEFYCLLGKDGEIIEQGSLNVINGADYSKILDQKSSDRNEARKNWKTIDQIKDIKNGHTSLAIKQIIDLAVKHNALIVLEDLNTGFMRGRQKIEKSNYQQFELAMAKKLNYLVSKDTPAQQVGGTNKGLQLTPILNNYSDIEKVKQFGIILYTTAGYTSSTDPVTGWRKTVYLKSLNQDSMKNDISKFSQIYWDNKEKCYIFSYDTKNFNSKANSRVWSLYSSVERLRSERNKNGIWEKKQYSPTDVMRKALVNSGINPQSANLKEDILSMANSRSLKDIIFGFNLICQIRNSGTSVRDSDYILSPVKPFFDSRKQLDEQNLNENPNSNQLPTSGDSNGAYNIARKGQIMLSRVKQNPEKPDLFISDSDWDKYLAED

SEQ ID NO: 724 - protein, 1245 aa, unidentified
  REGION 1..1245: note = Category: MG58 effectors
  REGION 1..1245: note = Description: MG58-3 effector
  source 1..1245: note = uncultivated organism sequence
MFYLLFSKKMKSDFFAPFTNLYPIQKTLRRELKPLNENFQHDPALTALRNSEIPQRDQQREKDYQAIKPLLDELHNQFITESLQSLEPQDRSDFVDFYQNYQKSKKNKANLSEKELKNLDEEFESRTKALRTAIGTSFSNTAELRKSNPDYVNEKGKPFLDQKSYKILTEAGVLWLLEKKYASDPEKLALIRRFGNFFTYFTGFNQNRENYYATDEKSTAVAYRAINENLLTFANNCELFEKLSVLSLSEREKKIFNPDSYSEYLTQSGIDFYNEMLANIRSKANLYTQEHKTKLPQPKLLYKQIWSPRGNTIPFDLINNDEEFKKMLHTMIAETDQRIPEFNKLLESIFEENADLSQIFLSKTALNIISNRYFSSWHTLLEKGVELKLFKFKKNDEESFKLPAYLSLAELKELLEAVPFQTVEKSDTAEGTHHQVSLLKLQRENLHLESSHSNWELLLKSMKSDFESFWTWEGEFWSYTSAKNTLLSLSTLESTNQEHKNLIKMLLDNALYAYRMLKWFKIDTSKLGFVPEGEFYPSLDQLLQDYPLSKWYDMIRNYLTRKPYSEAKLKLNFDCSTLLNGRDKNKESQNLSVILRKDGKFYLAIMKKDQNKFFEKSALYEGNLGTMEKMDYKLLPWANKMLPKCLMPGSNKKKYGASDQVLELYAKGSFKKSEKSFNLPDLHTLIDFYKLALPKYEDWKVFNFQFQATENYQDISQFYREVEQQGYLLKWRKINEELIKQGIKDWSLFLFQMSSKDFEGKSKTPDLQTLYWQQLFESQTNVKLNGEAEIFFRPWSMKKEKKTLKVDNYDVFNHKRYTEDKILFHVPITLWFGNNEVSPSAPSKFNQKLNQELIIPHFDDLHMIGVDRWEKHLAFYSVISVKTGKIVKQGTLNLLNGTDYEAKLSQKAENRLHARQNRDTIEKIADLKNGYISQVVNKLIELVLEYNAVIVFEDLNAGFKRGRQKIEQSVYQKLELALAKKLNFIVKKEKAVGEPWSVTSAYQLAPQINTFWDIKWKQRGIMLYTRANYTSVTDPLTGWRKQHYFKKGSSEEMKAQFFESFKNLSRDAGQKAYIFDDGTWQLYSNVERRRGKRGDHRERTQIKYDPSLELDTLFSKYQIEKSDSLLDQLKNRDLPQTFWTSFFRILDLIMQIRNTDDEGRDIILSPIGNAEERFDSRKRYDQLPRDEKGLVIEESAFEYPTSGDANGAYNIARKGVMMLQRIKENPEKPDLLIRDAEWDKKITRK

SEQ ID NO: 725 - protein, 1287 aa, unidentified
  REGION 1..1287: note = Category: MG58 effectors
  REGION 1..1287: note = Description: MG58-4 effector
  source 1..1287: note = uncultivated organism sequence
MKSDFFAPFTNLYPIQKTLRRELKPLNENFEHDPSLSSLRNSDIPQRDEQREKDYQAIKPLLDELHNEFITKSLQSLEPQDRSDFILFYQTYQKSKKNKANLSEKELKSLDEEFESRTKALRAAIGTSFSNTAELRKSNPEYTNEKGKPFLTQKSYKILTEAGVLWLLEKKYASDPESLALIRRFGNFFTYFTGFNQNRENYYATDEKATAVAYRAINENLLTFANNCEVFEKLAVLSLSELEKKVFNPDSYSEYLTQSGIDFYNEMLANIRSKANLYTQEHKTKLPQPKLLYKQIWSPRGNTIPFDLITSEAEFQKMLHTMIRETDQRIPEFKKLLAQIFEEKADLSQIFLSKTALNIISNRYFSSWHTLLEKGVELKLFKFKKNDEESFKLPAYLSLAELKELLEAVPFQAAEKADTAEENHHQISLLKLQRENLHWENSHSNWELLLKSMKSDFESFWTWEGEFWSYTLAKEALQSLSTLESSNQEHKNLIKMLLDNALYAYRMLKWFKVDTSKLGFVPEGDFYPSLDQLLQDYPLPKWYDMIRNYLTRKPYSQAKLKLNFDCSTLLNGRDKNKETQNLSVILRKDGKFYLAIMKKDQNKFFEKSALYEGNLGAMEKMDFKFLPEASKMIPKCSTQLNEVRAAFKKGLPSFIINNEKNFRLPLEVSQRVYNLNNEMYRIENPNKSLISYKKMDKNEKKLYIKSFQKDFLRITWKEDVYKKSLLDWINFCKVFLLSFQSTQNFDFSWLKESSLYGSLEEFYADVDRACYFISWRNVNEELIKQGIKDCSLFLFQISSKDFEGKSKTPDLQTLYRNQIFAPQPNVKLNGEAEIFFRPWSMGKEKKTLKVDNYDVFKHKRYTEDKILFHVPITLWFWNNEVSPSAPSKFNQKLNQELIIPHFDDLHVIGVDRWEKHLAFYSVVSVKTGKIVKQGTLNLLNGTDYEAKLSQKAENRLYARQNRDTIEKIADLKNGYISQVVNKLVELALEYNAVIVFEDLNAGFKRGRQKIEQSVYQKLELALAKKLNFIVKKEKAVGKPWSVTSAYQLAPQINTFWDIKWKQRGIMLYTRANYTSVTDPLTGWRKQHYFKKGSSEEMKAQFFKSFKNLTRDAGQEAYIFDDGTWQLYSNVERRRGKRGDHRERTQIKYDPSLELDTLFSKNQIKKTESLFDQLKNRELPQTFWTSFFRIMDLIMQIRNTDDEGRDIILSPIGNAQERFDSRKRYNQLPCDKNGAVLEESAFEYPTSGDANGAYNIARKGVMMLERIKENPEKPNLLIRDAERDSWVK

SEQ ID NO: 726 - protein, 1234 aa, unidentified
  REGION 1..1234: note = Category: MG58 effectors
  REGION 1..1234: note = Description: MG58-5 effector
  source 1..1234: note = uncultivated organism sequence
MKSDFFAPFTNLYPIQKTLRRELKPLNENFEHDPSLSSLRNSEIPQRDEQREKDYQAIKPLLDELHNQFITESLQSLETQDRSDFVLFYQTYQKKKKNKADFSEKELKSLDEEFESRTKASRTAIGNSYAKLAELRKSNPDYVNEKGKPFLDQKSYKILTEAGVLWLLEKKYASDPEKLALIRRFGNFFTYFTGFNQNRENYYATDEKATAVAYRAINENLLTFANNCELFEKISVLSLSEREKKIFNPDSYSEYLTQSGIDFYNEMLANIRSKANLYTQEHKTKLPQPKLLYKQIWSPRGNTIPFDLINKDEEFQKMLHTMIAETDQRIPEFNKLLESIFEENADLSQIFLSKTSLNIISNRYFSSWHTLLEKGVELKLFKFKKNDEESFKLPAYLSLAELKELLEAVPFQTAEKSDTTEGNHHQASLLKLQRENLHLESSHSNWELLLKSMKSDFESFWTWEGEFWSYTSAKKALQSLSTLESSNQEHKNLIKMLLDNALCAYRILKWFKIDTSKLGFVPEGEFYPSLDQLLQDYPLPKWYDMIRNYLTRKPYSQAKLKLNFDCSTLLNGRDKNKETQNLSVILRKDGKFYLAIMKKDQNKFFEKSALYEGNLGTMEKMDYKLLPWANKMLPKCLMPGSDKKKYRASDQVLELYAKGSFKKSEKSFNLADLHTLIDFYKSALPKYEDWKVFNFQFQATENYQDISQFYREVEQQGYLLNWRKVNEELIKQGIKDWSLFLFQISSKDFEGKSKTPDLQTLYWQQLFKNQTNVKLNGEAEIFFRPWSMKKEKKTLKVDNYDVFKHKRYTEDKILFHVPITLWFGNNEVSPSAPSKFNQKLNQELIIPHFDDLHVIGVDRWEKHLAFYSVVSVKTGKIVKQGTLNLLNGTDYEAKLSQKAENRLHARQNRDTIEKIADLKNGYISQVVNKLVELVLEYNAVIVFEDLNAGFKRGRQKIEQSVYQKLELALAKKLNFIVKKEKAVGESWSVTSAYQLAPQINTFWDIKWKQRGIMLYTRANYTSVTDPLTGWRKQHYFKKGSSEEMKAQFFKSYKNLTRDAGQKAYIFDDGTWLLYSNVERRRGKRGDHRERTQIKYDPSLELDTLFSKYQIEKSHSLFDQLKNREFPQTFWTSFFRILDLIMQIRNTDDKGRDIILSPIGNAQERFDSRKRYDQLPCDEKGLIIEESEFEYPTSGDANGAYNIARKGMMMLERIKENPEKPDLLIRDAEWDSWSK

SEQ ID NO: 727 - protein, 1234 aa, unidentified
  REGION 1..1234: note = Category: MG58 effectors
  REGION 1..1234: note = Description: MG58-6 effector
  source 1..1234: note = uncultivated organism sequence
MKSDFFSPFTNLYPIQKTLRRELKPLNENFEYDPSLSLLRNSEIPQRDEQREKDYQAIKPLLDELHNQFIAESLQSLETQNRSDFVDFYQTYQKKKKNKVDLSEKELKMLNEEFESRTKALRTAIGNSYAKLAELRKSNPDYVNEKGKPFLTQKSYKILTEAGVLWLLEKKYASDPEKLALIRRFGNFFTYFTGFNQNRENYYATDEKATAVAYRAINENLLTFANNCELFEKLSVLSLSEREKKIFNPDSYSEYLTQSGIDFYNEMLANIRSKANLYTQEYKTKLPQPKLLYKQIWSPRGNTIPFDLINNDEEFKKMLHTMIAETDQRIPEFNKLLESIFEENADLSQIFLSKTSLNIISNRYFSSWHTLLEKGVELKLFKFKKNDEESFKLPAYLSLAELKELLEAVPFQTIEKADTAEGNHHQVSLLKLQRENLHLKNSHSNWELLLKSMKSDFESFWAWDEEFWSYTSAKNVIQSLSSLQSTNQEHKNLIKMLLDNALYAYRMLKWFKIDTSKLGFIPEGEFYPSLDQLLQDYPLPKWYDMIRNYLTRKPYSQAKLKLNFDCSTLLNGRDKNKETQNLSVILRKDGKFYLAIMKKDQNKFFEKSALYEGNLGTMEKMDYKLLPWANKMLPKCLMPGSDKKKYGASDQVLELYAKGSFKKSEKSFNLADLHTLIDFYKSALPKYEDWKVFNFQFQATENYQDISQFYREVEQQGYLLNWRKVNEELIKQGIKDWSLFLFQISSKDFEGKSKTPDLQTLYWQQLFESPTNVKLNGEAEIFFRPWSMKKEKKALKVDNYDVFKHKRYTEDKILFHVPITLWFGNNEVSPSAPSKFNQKLNQELIIPHFDDLHVIGVDRWEKHLAFYSVVSVKTGKIVKQGTLNLLNGTDYEAKLSQKAENRLHARQNRDTIEKIADLKNGYISQVVNKLVELVLEYNAVIVFEDLNAGFKRGRQKIEQSVYQKLELALAKKLNFIVKKEKTVGEPWSVTSAYQLAPQINTFWDIKWKQRGVMLYTRANYTSVTDPLTGWRKQHYFKKGSSEEMKAQFFKSFKNLTRDINQEAYIFDDGTWKLYSNVERRRGKRGDHRERTQIKYDPSLELDTLFFKNQIEKYDSLFDQLKNRELPQTFWTSFFRILDLIMQIRNTDDEGRDIILSPIGNVQERFDSRKRYDQLPRDEKGLIIEESEFEYPTSGDANGAYNIARKGVMMLERIKENPEKPDLLIRDAEWDSWAK

SEQ ID NO: 728 - protein, 1236 aa, unidentified
  REGION 1..1236: note = Category: MG58 effectors
  REGION 1..1236: note = Description: MG58-7 effector
  source 1..1236: note = uncultivated organism sequence
MKSDFFSPFTNLYPIQKTLRRELKPLNENFQHDPALTALRNSEILQRDEQREKDYQAIKPLLDELHNQFITESLQSLEPQDRSDFVDFYQNYQKSKKNKANLSEKELKSLDEEFESRTKALRTAIGTSFSNTAELRKSNPDYVNEKGKPFLTQKSYKILTEAGVLWLLEKKYASEPENLALIRRFGNFFTYFTGFNQNRENYYATDEKVTAVAYRAINENLLTFANNCELFEKLSVLSLSDLEKKIFNPDSYSEYLTQSGIDFYNEMLANIRSKANLYTQEHKTKLPQPKLLYKQIWSPRGNTIPFDLINKDEEFQKMLDTMIAETDQRIPEFKKLLVQIFEGKADLSQIFLSKTSLNTISNRYFSSWHTLLEKGVELKLFKFKKNDEESFKLPAYLSLAELKELLEAVPFQTAEKSDTAEGTHHQVSLLKLQRENLHLESSHSNWELLLKSMKSDFESFWTWEGEFWSYTSAKNTFLSLSTLESTNQEHKNLIKMLLDNALYAYRMLKWFKVDTSKLGFVPEGEFYPSLDQLLQDYSLPKWYDMIRNYLTRKPYSQAKLKLNFDCSTLLNGRDKNKETQNLSVILRKDGKFYLAIMKKDQNKFFEKSALYEGNLGTMEKMDYKLLPWANKMLPKCLMPGSDKKKYGASDQVLELYAKGSFKKSEKSFNLPDLHTLIDFYKSALPKYEDWKVFNFQFQATENYQDISQFYREVEQQGYLLNWRKVNEELIKQGIKDWSLFLFQISSKDFEGKSKTPDLQTLYWQQLFEFPTNVKLNGEAEIFFRPWSMKKEKKTLKVDNYDVFKHKRYTEDKILFHVPITLWFGNNEVSPSAPSKFNQKLNQELIIPHFDDLHVAWVDRGERNLWYFSIISVKTGKIVKQGTLNLLNGTDYEAKLSQKAENRLHARQNRDTIEKIADLKNGYISQVVNKLIELVLEYNAVIVFEDLNAGFKRGRQKIEQSVYQKLELALAKKLNFIVKKEKAVGEPWSVTSAYQLAPQINTFWDIKWKQRGIMLYTRANYTSVTDPLTGWRKQHYFKKDSSEEMKTQFFKSFKNLTRDAGQEAYILDDGTWKLYSNVERRRGKRGDHRERTQIKYDPSLELDTLFSKYQIEKSDSLLDQLKNRDLPQTFWTSFFRILDLIMQIRNTDDEGRDIILSPIGNAEERFDSRKRYDLLPRDEKGLVIEESAFEYPTSGDANGAYNIARKGVMMLQRIKENPEKPDLLIRDAEWDKKITRK

SEQ ID NO: 729 - protein, 1236 aa, unidentified
  REGION 1..1236: note = Category: MG58 effectors
  REGION 1..1236: note = Description: MG58-8 effector
  source 1..1236: note = uncultivated organism sequence
MKSDLFSPFTNLYPIQKTLRRELKPLNENFQHDLALSALRNSEIPQRDQQREKDYQAIKPLLDELHNQFITESLQSLEPQHRSDFVLFYQTYQKKKKNKADLPEKELKSLDEEFESRTKALRAAIGTSFSATAELRKSNPDYVNEKGKPFLDQKSYKILTESGVLWLLEKKYTSDPEKLALIRRFGNFFTYFTGFNQNRENYYATDEKSTAVAYRAINENLLTFANNCELFEKLAVLSLSELEKKVFNPDFYSEYLTQSGVDFYNEMLGNIRSKANLYTQEHKTKLPQPKLLYKQIWSPRGNTIPFDLINNDEEFKKMLHMMIAETDQRIPEFNRLLEPIFEGKADLSQVFLSKTSLNIISNRYFSSWHTLLEKGVELKLFKFKKNDEESFKLPAYLSLAELKELLEAVPFQTVEKSDTAEGTHHQVSLLKLQRENLHLESSHSNWELLLKSMKSDFESFWTWEGEFWSYTSAKNTLLSLSTLESTNQEHKNLIKMLLDNVLYAYRMLKWFKIDTSKLGFVPEGEFYLSLDQLLQDYPLPKWYDMIRNYLTRKPYSQAKLKLNFDCSTVLNGRDKNKETQNLSVILRKDGKFYLAIMKKDQNKFFEKSALYEGNLGTMEKMDYKLLPWANKMLPKCLMPGSDKKKYGASDQVLELYAKGSFKKSEKSFNLPDLHTLIDFYKSALPKYEDWKVFNFQFQATENYQDISQFYREVEQQGYLLNWRKVNEELIKQGIKDWTLFLFQISSKDFEGKSKTPDLQTLYWQQLFKNQTNVKLDGEAEIFFRPWSMKKEKKTLKVDNYDVFKHKRYTEDKILFHVPITLWFGNNEVSPSAPSKFNQKLNQELIIPYFDDLHVIGVDRWEKHLAFYSVVSVKTGKIVKQGTLNLLNGTDYEAKLSQKAENRLHARQNRDTIEKIADLKNGYISQVVNKLVELVLEYNAVIVFEDLNAGFKRGRQKIEQSVYQKLELALAKKLNFIVKKEKAVGEPWSVTSAYQLAPQINTFWDIKWKQRGIMLYTRANYTSVTDPLTGRRKHYYFKKGSSEEMKAQFFKSFKNLTRDASQEAYIFDDGTWQLYSNVERRRGKRGDHRERMQIKYDPSLELDTLFSKYQIEKSEALLDQLKNRELPQTFWTSFFRILDLIMQIRNTDDEGRDIILSPIGNAEERFDSRKRYDQLPYDENRVVIEESTFEYPTSGDANGAYNIARKGVMMLERIKENPEKPDLLIRDAEWDSWVWNF

SEQ ID NO: 730 - protein, 1234 aa, unidentified
  REGION 1..1234: note = Category: MG58 effectors
  REGION 1..1234: note = Description: MG58-9 effector
  source 1..1234: note = uncultivated organism sequence
MKSDLFSPFTNLYPIQKTLRRELKPLNENFQHDPALSALRNSEIPQRDQQREKDYQAIKPLLDELHNQFITESLQSLEPQDRSDFVLFYQTYQKKKKNKADLSEKDLKTLDEEFESRTKALRNAIGASFSVTAELRKSNPDYVNEKGKPFLDQKSYKILTESGVLWLLEKKYASDPEKLALIRRFGNFFTYFTGFNQNRENYYATDEKSTAVAYRAINENLLTFANNCELFEKLSMLSLSELEKKVFNPDSYSEYLAQSGIDFYNEMFANIRSKANLYTQEHKTKLPQPKLLYKQIWSPRGNTIPFDLITSEAEFQEMLHTMIRETDQRLPEFNKLLAQIFEEKADLSQIFLSKTALNIISNRYFSSWHTLLEKGVELKLFKFKKNDEESFKLPAYLSLAELKELLESVPFQTAENADTAQGSHHQVSLLKLQREKLYLENSHSNWELLLKSMKSDFESFWTWEGEFWSYTSAKKALQSLSTLESTNQEHKNLIKMLLDNALYAYRMLKWFRVDTSKLGFVPEGEFYPSLDQLLQDYPLPKWYDMIRNYLTRKPYSQAKLKLNFDCSTLLKGRDKNKETQNLSVILRKDGKFYLAIMKKDQNKFFEKSALYEGNLGTMEKMDYKLLPWANKMLPKCLMPGSDKKKYRASDQVLELYAKGSFKKSEKSFNLADLHTLIDFYKSALPKYEDWKVFNFQFQATENYQDISQFYREVEQQGYLLNWRKVNEKLIKQGIKDWSLFLFQISSKDFEGKSKTPDLQTLYWQQLFEFSTNVKLNGEAEIFFRPWSMKKEKKKLKVDNYDVFKHKRYTEDKILFHVPITLWFGNNEVSPSAPSKFNQKLNQELIIPHFDDLHVIGVDRWEKHLAFYSVVSVKTGKIVKQGTLNLLNGTDYEAKLSQKAENRLHARQNRDTIEKIADLKNGYISQVVNKLVELALEYNAVIVFEDLNAGFKRGRQKIEQSVYQKLELALAKKLNFIVKKEKAVGEPWSVTSAYQLAPQINTFWDIKWKQRGIMLYTRANYTSVTDPLTGWRKQHYFKKGSSEEMKAQFFKSFKNLSRDAGQKAYIFDDGTWQLYSNVERRRGKRGDHRERTQIKYDPSLELDTLFSKYQIEKSESLFDQFKNREFPQTFWTSFFRILDLIMQIRNTDDEGRDIILSPIGNAQERFDSRKRYDQLPRDEKGLVIEESAFEYPTSGDANGAYNIARKGVMMLERIKENPEKPDLLIRDAEWDSWII

SEQ ID NO: 731 - protein, 1234 aa, unidentified
  REGION 1..1234: note = Category: MG58 effectors
  REGION 1..1234: note = Description: MG58-10 effector
  source 1..1234: note = uncultivated organism sequence
MKSDLFSPFTNLYPIQKTLRRELKPLNENFQHDPALTALRNSEIPQRDEQREKDYQAIKPLLDELHNQFITKSLQSLEPQDRSDFILFYQTYQKKKKNKADLSEKELKSLDEEFKSRTKALRAAIGTSFSNTAELRKSNPDYTNGKGKSKKPKKSYKILTEAGVLWLLEKKYASDPEKLALIRRFGNFFTYFTGFNQNRENYYATDKKATAVAYRAINENLLTFANNRELFEKLAVLSLSELEKKIFNPDSYSEYLTQSGIDFYNEMLANIRSKANLYTQEHKTKLPQPKLLYKQIWSPRGNTIPFDLINNDEEFQEMLHMMITETDQRIPEFNKLLEQIFEEKTDLSQIFLSKTALNIISNRYFSSWHTLLEKGVELKLFKFKKNDEESFKLPAYLSLAELKELLEAVPFQTAEKSDTDEETHHQVSLLKLQRENLHWENSHSNWELLLKSMKSDFESFWTWEGEFWSYTSAKKALQSLLSLESTNQEHKNLIKMLLDNALYAYRMLKWFRVDTSKLGFVPEGEFYPSLDQLLQDYPLPKWYDMIRNYLTRKPYSQAKLKLNFDCSTLLNGRDKNKETQNLSVILRKDGKFYLAIMKKDQNKFFEKSALYKGNLGTMEKMDYKLLPWANKMLPKCLMPGSEKKKYGASDQVLALYAKGSFQKSEKSFNLPDLHTLIDFYKSALQKYEDWKVFNFQFQATENYQDISQFYREVEQQGYLLNWRKVNEELIKQGIKDWSLFLFQISSKDFEGKSKTPDLQTLYWCQLFESQTNVKLNGEAEIFFRPRSMKKEKKKLKVDNYDVFKHKRYTEDKILFHVPITLWFWNNEVSPSAPSKFNQKLNQELIIPHFDDLHVIGVDRWEKHLAFYSVVSVKTGKIVKQGTLNLLNGTNYEEKLSQKAENRLHARQNRDTIEKIADLKNGYISQVVNKLVELVLEYNAVIVFEDLNAGFKRGRQKIEQSVYQKLELALAKKLNFIVKKEKAVGEPWSVTSAYQLAPQINTFWDIKWKQRGIMLYTRANYTSVTDPLTGWRKQHYFKKGSSEEMKAQFFRSFKNLTRDAGQKAYIFDDGTWQLYSNVERRRGKRGDHRKRTQIKYDPSLELDTLFSKCQIEKSDSLFDQLKNRELPQTFWTSFFRILDLIMQIRNTDDEGRDVILSPIGNTQERFDSRQRYDQLPRDENGLVIEESVFEYPTSGDANGAYNIARKGVMMLQRIKENPEKPDLLIRDAEWDSWVW

SEQ ID NO: 732 - protein, 1236 aa, unidentified
  REGION 1..1236: note = Category: MG58 effectors
  REGION 1..1236: note = Description: MG58-11 effector
  source 1..1236: note = uncultivated organism sequence
MKSDLFSPFTNLYPIQKTLRRELKPLNESFEHDPSLSSLRNSDIPQRDEQREKDYQAIKPLLDELHNQFITESLQSLETQNRSDFVLFYQTYQKKKKNKAELSEKELKSLDEEFESRTKALRAAIGTSFSNTAELRKSNPDYVSEKGKPFLTQKSYKILTEAEVLWLLEKKYASDPEKLALICRFGNFFTYFTGFNQNRENYYATDEKATAVAYRAINENLLTFANNCEVFEKLAVLSLSELEKKVFNPDSYSEYLTQSGIDFYNEMLENIRSKANLYNQEHKTKLPQPKLLYKQIWSPRGNTIPFDLITSEAEFQKMLHMMIAETDQRIPEFKRLLAQIFEQKADLSQIFLSKTALNIISNRYFSSWHTLLEKGVELKLFKFKKNDEESFKLPAYLSLAELKELFEAVPFQTAEKSDTDEETHHQVSLLKLQRENLHWENSHSNWELLLKSMKSDFESFWTWEGEFWSYTLAKKALQSLSTLESTNQEHKNLIKMLLDNALYAYRMLKWFKVDTSKLGFVPEGEFYPSLDQLLQDYPLPKWYDMIRNYLTRKPYSQAKLKLNFDCSTLLNGRDKNKETQNLSVILRKDGKFYLAIMKKDQNKFFEKSVLYEGNLGTMEKMDYKLLPWANKMLPKCLMPGSDKKKYGASDQVLELYAKGSFKKSEKSFNLVDLHTLIDFYKSALPKYEDWKVFNFQFQATENYQDISQFYREVEQQGYLLNWRKVNEELIKQGIKDWSLFLFQISSKDFEGKSKTPDLQTLYWQQLFKNQTNVKLNGEAEIFFRPWSMKKEKKTLTVDNYDVFKHKRYTEDKILFHVPITLWFWNNEVSPSAPSKFNQKLNQELIIPHFDDLHVIGVDRWEKHLAFYSVVSVKTGKIVKQGTLNLLNGTDYEVKLSQKAENRLHARQNRDTIEKIADLKNGYISQVVNKLVELVLEYNAVIVFEDLNAGFKRGRQKIEQSVYQKLELALAKKLNFIVKKEKAVGEPWSVTSAYQLAPQINTFWDIKWKQRGIMLYTRANYTSVTDPLTGWRKQHYFKKGSSEEMKTQFFKNFKNLTRDAGQEAYIFDDGTWKLYSNVERRRGKRGDHRERTQIKYDPSLELDTLFSKYQIENSDSLLDQLKNRDLPQTFWTSFFRILDLIMQIRNTDDEGRDIILSPIGNAQERFDSRKRYNQLPRDEKGLVIEESAFEYPTSGDANGAYNIARKGVMMLQRIKENPEKPDLLIRDAEWDKKITRK

SEQ ID NO: 733 - protein, 1250 aa, unidentified
  REGION 1..1250: note = Category: MG58 effectors
  REGION 1..1250: note = Description: MG58-12 effector
  source 1..1250: note = uncultivated organism sequence
MLSFNWVLFFFFSKMSRSIFSPFTNLYPIQKTLRRELKPLNENFQHDPALSALRNSEIPQRDEQREKDYQAIKPLLDEFHNQFITESLHSLEPQDRSDFILFYQTYQKKKKNKAEISEKELKSLDEEFESRTKALRNAIGTSFSVTAELRKSNPDYVSEKGKPFLTQKSYKILTEAGVLWLLEKKYTSDPEKLALIRRFGNFFTYFTGFNQNRENYYATDEKSTAVAYRAINENLLTFANNCELFEKLSVLSLSELEKKTFNPDSYSEYLTQSGIVFYNEMLANIRSKANLYTQEHKAKLPQPKLLYKQIWSPRGDTIPFDLIASEAEFQETLHTMIRETDQRIPEFNKLLEQIFEEKVDLSQIFFSKTSLNIISNRYFSSWHTLLEKGVELKLFKFKKNDEESFKLPAYLSLAELKELLESAPFQMAEKADADEEKHHQASLFKLQRENLHLEKSHSNWELLLKSMKSDFESFWTWEGEFWSYTLAKKALQSLSALESTNQEHKNLIKMLLDNALYAYRMLKWFKVDTSKLGFVPEGEFYPSLDQLLQDYPLPKWYDMIRNYLTRKTYSQAKLKLNFDCSTLLNGRDKNKEIQNLSVILRKDGKFYLAIMKKDQNKFFENSALYEGNLGTMEKMDYKLLPWANKMLPKCLMPGSDKKKYGASDQVLELYAKGSFKKSEKSFNLADLHTLIDFYKLALPKYEDWKVFNFQFQATENYQDISQFYREVEQQGYLLNWRKVNEKLIKQGIKDWSLFLFQISSKDFEGKSKTPDLQTLYWQQLFEFSTNVKLNGEAEIFFRPWSMKKEKKKLKVDNYDVFKHKRYTEDKILFHVPITLWFGNNEVSPSAPSKFNQKLNQELIIPHFDDLHVIGVDRWEKHLAFYSVVSVKTGKIVKQGTLNLLNGTDYEAKLSQKAENRLYARQNRDTIEKIADLKNGYISQVVNKLVELVLEYNAVIVFEDLNAGFKRGRQKIEQSVYQKLELALAKKLNFIVKKEKAVGEPWSVTSAYQLAPQINTFWDIKWKQRGIMLYTRANYTSVTDPLTGWRKQYYFKKGSSEEMKAQFFKSFKNLTRDAGQEAYIFDDGTWLLYSNVERRRGKRGDHRERTQIKYDPSLELDTLFSKYQIEKSDSLFDQLKNRELPQTFWTSFFRIIDLIMQIRNTDDEGRDIILSPIGNPQERFDSRKRYNQLPRDEKGGIIEESAFEYPTSWDANGAYNIARKGVMMLERIKENPEKPDLLIRDAEWDKKITRK

SEQ ID NO: 734 - protein, 1236 aa, unidentified
  REGION 1..1236: note = Category: MG58 effectors
  REGION 1..1236: note = Description: MG58-13 effector
  source 1..1236: note = uncultivated organism sequence
MSRSIFSPFTNLYPIQKTLRRELKPLNENFQHDPALSALRNSEIPQRDEQREKDYQAIKPLLDEFHNQFITESLHSLEPQDRSDFILFYQTYQKKKKNKAEISEKELKSLDEEFESRTKALRNAIGTSFSVTAELRKSNPDYVSEKGKPFLTQKSYKILTEAGVLWLLEKKYTSDPEKLALIRRFGNFFTYFTGFNQNRENYYATDEKSTAVAYRAINENLLTFANNCELFEKLSVLSLSELEKKTFNPDSYSEYLTQSGIVFYNEMLANIRSKANLYTQEHKAKLPQPKLLYKQIWSPRGDTIPFDLIASEAEFQETLHTMIRETDQRIPEFNKLLEQIFEEKVDLSQIFFSKTSLNIISNRYFSSWHTLLEKGVELKLFKFKKNDEESFKLPAYLSLAELKELLESAPFQMAEKADADEEKHHQASLFKLQRENLHLEKSHSNWELLLKSMKSDFESFWTWEGEFWSYTLAKKALQSLSALESTNQEHKNLIKMLLDNALYAYRMLKWFKVDTSKLGFVPEGEFYPSLDQLLQDYPLPKWYDMIRNYLTRKTYSQAKLKLNFDCSTLLNGRDKNKEIQNLSVILRKDGKFYLAIMKKDQNKFFENSALYEGNLGTMEKMDYKLLPWANKMLPKCLMPGSDKKKYGASDQVLELYAKGSFKKSEKSFNLADLHTLIDFYKLALPKYEDWKVFNFQFQATENYQDISQFYREVEQQGYLLNWRKVNEKLIKQGIKDWSLFLFQISSKDFEGKSKTPDLQTLYWQQLFEFSTNVKLNGEAEIFFRPWSMKKEKKKLKVDNYDVFKHKRYTEDKILFHVPITLWFGNNEVSPSAPSKFNQKLNQELIIPHFDDLHVIGVDRWEKHLAFYSVVSVKTGKIVKQGTLNLLNGTDYEAKLSQKAENRLHARQNRDTIEKIADLKNGYISQVVNKLVELVLEYNAVIVFEDLNAGFKRGRQKIEQSVYQKLELALAKKLNFIVKKEKAVGEPWSVTSAYQLAPQINTFWDIKWKQRGIMLYTRANYTSVTDPLTGWRKQYYFKKGSSEEMKAQFFKSFKNLTRDAGQEAYIFDDGTWLLYSNVERRRGKRGDHRERTQIKYDPSLELDTLFSKYQIEKSDSLFDQLKNRELPQTFWTSFFRIIDLIMQIRNTDDEGRDIILSPIGNPQERFDSRKRYNQLPRDEKGGIIEESAFEYPTSWDANGAYNIARKGVMMLERIKENPEKPDLLIRDAEWDKKITRK

SEQ ID NO: 735 - protein, 178 aa, unidentified
  REGION 1..178: note = Category: MG58 effectors
  REGION 1..178: note = Description: MG58-14 effector
  source 1..178: note = uncultivated organism sequence
MVKEIFYLLFSKKMKSDFFSPFTNLYPIQKTLRRELKPLNENFQHDPALTALRNSEILQRDEQREKDYQAIKPLLDELHNQFITESLQSLEPQDRSDFVDFYQNYQKSKKNKANLSEKELKSLDEEFESRTKALRTAIGTSFSNTAELRKSNPDYVNEKGKPFLDQKSYKILTEAGVL

SEQ ID NO: 736 - protein, 129 aa, unidentified
  REGION 1..129: note = Category: MG58 effectors
  REGION 1..129: note = Description: MG58-15 effector
  source 1..129: note = uncultivated organism sequence
MEKKYASDPEKLALIHRFGNFFTYFTGFNQNRENYYATDEKVTAVAYRAINENLLTFANNCELFEKLSVLSLSDLEKKIFNPDSYSEYLTQSGIDFYNEMLANIRSKANLYTQEHKTKLPQPKLLYKQI

SEQ ID NO: 737 - protein, 178 aa, unidentified
  REGION 1..178: note = Category: MG58 effectors
  REGION 1..178: note = Description: MG58-16 effector
  source 1..178: note = uncultivated organism sequence
MVKEIFYLLFSKKMKSDFFAPFTNLYPIQKTLRRELKPLNENFQHDPALTALRNSEIPQRDQQREKDYQAIKPLLDELHNQFITESLQSLETQDRSDFVLFYQTYQKKKKNKADFSEKELKSLDEEFESRTKSLRTAIGNSYAKLAELRKSNPDYVNEKGKPFLDQKSYKILTEAGVL

SEQ ID NO: 738 - protein, 141 aa, unidentified
  REGION 1..141: note = Category: MG58 effectors
  REGION 1..141: note = Description: MG58-17 effector
  source 1..141: note = uncultivated organism sequence
MIAETDQRIPEFKKLLEPIFEGKADLSQIFLSKTALNIISNRYFSSWHTLLEKGVELKLFKFKKNDEESFKLPAYLSLTELKELLEAVPFQTAEKSGTAEGTHHQVSLLKLQRENLHLERSNSNWELLLKSMKSDFESFWT

SEQ ID NO: 739 - protein, 132 aa, unidentified
  REGION 1..132: note = Category: MG58 effectors
  REGION 1..132: note = Description: MG58-18 effector
  source 1..132: note = uncultivated organism sequence
MLLDNALYAYRMLKWFKVDTSKLGFVPEGEFYPSLDQLLQGYPLPKWYDMIRNYLTRKPYSQAKLKLNFDCSTLLNGRDKNKETQNLSVILRKDGKFYLAIMKKDQNKFFEKSALYEGNLGTMEKMDYKLLP

SEQ ID NO: 740 - protein, 141 aa, unidentified
  REGION 1..141: note = Category: MG58 effectors
  REGION 1..141: note = Description: MG58-19 effector
  source 1..141: note = uncultivated organism sequence
MIAETDQRIPEFNKLLESIFEENADLSQIFLSKTSLNIISNRYFSSWNTLLEKGVELKLFKFKKNDEESFKLPTYLSLAELKELLEAVPFQTAEKSDTAEGTHHQVSLLKLQRENLHLESSHSNWELLLKSMKSDFESFWT

SEQ ID NO: 741 - protein, 99 aa, unidentified
  REGION 1..99: note = Category: MG58 effectors
  REGION 1..99: note = Description: MG58-20 effector
  source 1..99: note = uncultivated organism sequence
MPGSDKKKYGASDQVLELYAKGSFKKSEKSFNLADLHTLIDFYKSALPKYEDWKVFNFQFQATENYQDISQFYREVEQQGYLLNWRKVNEELIKQGIKD

SEQ ID NO: 742 - protein, 132 aa, unidentified
  REGION 1..132: note = Category: MG58 effectors
  REGION 1..132: note = Description: MG58-21 effector
  source 1..132: note = uncultivated organism sequence
MLLDNTLYAYRMLKWFKVDTSKLGFVPEGEFYPSLDQLLQDYPLPKWYDMIRNYLTRKPYSQAKLKLNFDCSTLLNGRDKNKETQNLSVILRKDGKFYLAIMKKDQNKFFEKSALYEGNLGTMEKMDYKLLP

SEQ ID NO: 743 - protein, 105 aa, unidentified
  REGION 1..105: note = Category: MG58 effectors
  REGION 1..105: note = Description: MG58-22 effector
  source 1..105: note = uncultivated organism sequence
MLPKCLMPGSDKKKYGASDQVLELYAKGSFKKSEKSFNLADLHTLIDFYKSALPKYEDWKVFNFQFQATENYQDISQFYREVEQQGYLLNRRKVNEELIKQGIKD

SEQ ID NO: 744 - protein, 115 aa, unidentified
  REGION 1..115: note = Category: MG58 effectors
  REGION 1..115: note = Description: MG58-23 effector
  source 1..115: note = uncultivated organism sequence
MKTGKIVKQGTLNLLNGTDYEAKLSQKAENRLHARQNRDTIEKIADLKNGYISQVVNKLVELVLEYNALIVFEDLNAGFKRGRQKIEQSVYQKLELALAKKLNFIVKKEKAVGEP

SEQ ID NO: 745 - protein, 115 aa, unidentified
  REGION 1..115: note = Category: MG58 effectors
  REGION 1..115: note = Description: MG58-24 effector
  source 1..115: note = uncultivated organism sequence
MKTGKIVKQGTLNLLNGTDYEAKLSQKAENRLHARQNRDTIEKIADLKNGYISQVVNKLVELVLEYNAVIVFEDLNAGFKRGRQKIEQSVYQKLELALAKKLNFIVKKEKAVVEP

SEQ ID NO: 746 - protein, 867 aa, unidentified
  REGION 1..867: note = Category: MG58 effectors
  REGION 1..867: note = Description: MG58-25 effector
  source 1..867: note = uncultivated organism sequence
MKSDLFSPFTNLYPIQKTLRRELKPLNENFQHDPALTALRNSEIPQRDEQREKDYQAIKPLLDELHNQFITESLQSLETQDRSDFVLFYQTYQKKKKNKAALSEKDLKTLDEEFESRTKALRNAIGTSFLNTAELRKSNPDYVNEKGKPFLTQKSYKILTEAGVLWLLEKKYASDPENLALIRRFGNFFTYFTGFNQNRENYYATDEKSTAVAYRAINENLLTFANNCELFEKLSVLSLSELEKKTFNPDSYSEYLTQSGIVFYNEMLANIRSKANLYTQEHKAKLPQPKLLYKQIWSPRGDTIPFDLIASEAEFQETLHTMIRETDQRIPEFNKLLEQIFEEKVDLSQIFFSKTSLNIISNRYFSSWHTLLEKGVELKLFKFKKNDEESFKLPAYLSLAELKELLESVPFQMAEKADADEEKHHQASLFKLQRENLHLEKSHSNWELLLKSMKSDFESFWTWEGEFWSYTLAKKALQSLSALESTNQEHKNLIKMLLDNALYAYRMLKWFKIDMSKLGFVPEGEFYPSLDQLLQDYPLPKWYDMIRNYLTRKPYSQAKLKLNFDCSTLLNGRDKNKETQNLSVILRKDGKFYLAIMKKDQNKFFEKSALYEGNLGTMEKMDYKLLPWAHKMLPKCLMPGSDKKKYGASDQVLELYAKGSFKKSEKSFNLADLHTLIDFYKSALQKYEDWKVFNFQFQATENYQDISQFYREVEQQGYLLKWRKVNEELIKQGIKDWSLFLFQISSKDFEGKSKTPDLQTLYWQQLFESPTNVKLNGEAEIFFRPWSMKKEKKTLKVDNYDVFKHKRYTEDKIFFHVPITLWFWNNEVSPSAPSKFNQKLNQELIIPYFDDLHVIGVDRWEKHLETI

SEQ ID NO: 747 - protein, 1294 aa, unidentified
  REGION 1..1294: note = Category: MG58 effectors
  REGION 1..1294: note = Description: MG58-26 effector
  source 1..1294: note = uncultivated organism sequence
MVERESPKLRVASSILASPELSWKCWIKSVFFLAKTFYLLDFYNKKNMVKEIFYLLFSKKMKSDFFAPFTNLYPIQKTLRRELKPLNENFEHDPSLSSLRNSEIPQRDEQREKDYQAIKPLLDELHNQFITESLQSLETQDRSDFVLFYQTYQKKKKNKADFSEKELKSLDEEFESRTKASRTAIGNSYAKLAELRKSNPDYVNEKGKPFLDQKSYKILTEAGVLWLLEKKYASDPEKLALIRRFGNFFTYFTGFNQNRENYYATDEKATAVAYRAINENLLTFANNCELFEKISVLSLSEREKKIFNPDSYSEYLTQSGIDFYNEMLANIRSKANLYTQEHKTKLPQPKLLYKQIWSPRGNTIPFDLINKDEEFQKMLHTMIAETDQRIPEFNKLLESIFEENADLSQIFLSKTSLNIISNRYFSSWHTLLEKGVELKLFKFKKNDEESFKLPAYLSLAELKELLEAVPFQTAEKSDTTEGNHHQASLLKLQRENLHLESSHSNWELLLKSMKSDFESFWTWEGEFWSYTSAKKALQSLSTLESSNQEHKNLIKMLLDNALCAYRILKWFKIDTSKLGFVPEGEFYPSLDQLLQDYPLPKWYDMIRNYLTRKPYSQAKLKLNFDCSTLLNGRDKNKETQNLSVILRKDGKFYLAIMKKDQNKFFEKSALYEGNLGTMEKMDYKLLPWANKMLPKCLMPGSDKKKYRASDQVLELYAKGSFKKSEKSFNLADLHTLIDFYKSALPKYEDWKVFNFQFQATENYQDISQFYREVEQQGYLLNWRKVNEELIKQGIKDWSLFLFQISSKDFEGKSKTPDLQTLYWQQLFKNQTNVKLNGEAEIFFRPWSMKKEKKTLKVDNYDVFKHKRYTEDKILFHVPITLWFGNNEVSPSAPSKFNQKLNQELIIPHFDDLHVIGVDRWEKHLAFYSVVSVKTGKIVKQGTLNLLNGTDYEAKLSQKAENRLHARQNRDTIEKIADLKNGYISQVVNKLVELVLEYNAVIVFEDLNAGFKRGRQKIEQSVYQKLELALAKKLNFIVKKEKAVGESWSVTSAYQLAPQINTFWDIKWKQRGIMLYTRANYTSVTDPLTGWRKQHYFKKGSSEEMKAQFFKSYKNLTRDAGQKAYIFDDGTWLLYSNVERRRGKRGDHRERTQIKYDPSLELDTLFSKYQIEKSHSLFDQLKNREFPQTFWTSFFRILDLIMQIRNTDDKGRDIILSPIGNAQERFDSRKRYDQLPCDEKGLIIEESEFEYPTSGDANGAYNIARKGMMMLERIKENPEKPDLLIRDAEWDSWSK

SEQ ID NO: 748 - protein, 105 aa, unidentified
  REGION 1..105: note = Category: MG58 effectors
  REGION 1..105: note = Description: MG58-27 effector
  source 1..105: note = uncultivated organism sequence
MLPKCLMPGSNKKKYGASDQVLELYAKGSFKKSEKSFNLPDLHTLIDFYKLALPKYEDWKVFNFQFQATENYQDISQFYREVEQQGYLLKWRKINEELIKQGIKD

SEQ ID NO: 749 - protein, 132 aa, unidentified
  REGION 1..132: note = Category: MG58 effectors
  REGION 1..132: note = Description: MG58-28 effector
  source 1..132: note = uncultivated organism sequence
MLLDNALYAYRMLKWFKIDTSKLGFVPEGEFYPSLDQLLQDYPLSKWYDMIRNYLTRKPYSEAKLKLNFDCSTLLNGRDKNKESQNLSVILRKDGKFYLAIMKKDQNKFFEKSALYEGNLGTMEKMDYKLLP

SEQ ID NO: 750 - protein, 141 aa, unidentified
  REGION 1..141: note = Category: MG58 effectors
  REGION 1..141: note = Description: MG58-29 effector
  source 1..141: note = uncultivated organism sequence
MIAETDQRIPEFNKLLESIFEENADLSQIFLSKTALNIISNRYFSSWHTLLEKGVELKLFKFKKNDEESFKLPAYLSLAELKELLEAVPFQTVEKSDTAEGTHHQVSLLKLQRENLHLESSHSNWELLLKSMKSDFESFWT

SEQ ID NO: 751 - protein, 141 aa, unidentified
  REGION 1..141: note = Category: MG58 effectors
  REGION 1..141: note = Description: MG58-30 effector
  source 1..141: note = uncultivated organism sequence
MIAETDQRIPEFNKLLESIFEENADLSQISLSKTSLNIISNRYFSSWNTLLEKGVELKLFKFKKNDEESFKLPTYLSLAELKELLEAVPFQTAEKSDTAEGTHHQVSLLKLQRENLHLESSHSNWELLLKSMKSDFESFWT

SEQ ID NO: 752 - protein, 129 aa, unidentified
  REGION 1..129: note = Category: MG58 effectors
  REGION 1..129: note = Description: MG58-31 effector
  source 1..129: note = uncultivated organism sequence
MEKKYASDPEKLALIRRFGNFFTYFTGFNQNRENYYATDEKSTAVAYRAINENLLTFANNCELFEKLSVLSLSEREKKIFNPDSYSEYLTQSGIDFYNEMLANIRSKANLYTQEHKTKLPQPKLLYKQI

SEQ ID NO: 753 - protein, 165 aa, unidentified
  REGION 1..165: note = Category: MG58 effectors
  REGION 1..165: note = Description: MG58-32 effector
  source 1..165: note = uncultivated organism sequence
MTKPFFSQFTNLYPIQKTLRRELKPLNKNFEHDPSLSSLRNSEIPQRDEQREKDYQAIKPLLDKLHNQFITEGLQSLEPQDRSDFILFYQTYQKKKKNKANLSEKELKSLDEEFESRTKAFRAAIGTSFSNTAELRKSNPNYVNEKGKPFLTQKSYKILTEAGVL

SEQ ID NO: 754 - protein, 129 aa, unidentified
  REGION 1..129: note = Category: MG58 effectors
  REGION 1..129: note = Description: MG58-33 effector
  source 1..129: note = uncultivated organism sequence
MEKKYASEPENLALIRRFGNFFTYFTGFNQNRENYYATDEKVTAVAYRAINENLLTFANNCELFEKLSVLSLSDLEKKIFNPDSYSEYLTQSGIDFYNEMLANIRSKANLYTQEHKTKLPQPKLLYKQI

SEQ ID NO: 755 - protein, 165 aa, unidentified
  REGION 1..165: note = Category: MG58 effectors
  REGION 1..165: note = Description: MG58-34 effector
  source 1..165: note = uncultivated organism sequence
MTKPFFSQFINLYPIQKTLRRELKPLNENFQHDPSLSALRNSEIPQRDEQREKDYQAIKPLLDELHNEFITESLQSLEIQNRSGFVDFYQNYQKSKKNKAELSEKELKSLDEEFESRTKALRNAIGTSFSATAELRKSNPDYVNEKGKPFLTQKSYKILTEAGVL

SEQ ID NO: 756 - protein, 141 aa, unidentified
  REGION 1..141: note = Category: MG58 effectors
  REGION 1..141: note = Description: MG58-35 effector
  source 1..141: note = uncultivated organism sequence
MIAETDQRIPEFNKLLESIFEENADLSQIFLSKTSLNIISNRYFSSWHTLLEKGVELKLFKFKKNDEESFKLPAYLSLAELKELLEAVPFQTIEKADTAEGNHHQVSLLKLQRENLHLKNSHSNWELLLKSMKSDFESFWA

SEQ ID NO: 757 - protein, 117 aa, unidentified
  REGION 1..117: note = Category: MG58 effectors
  REGION 1..117: note = Description: MG58-36 effector
  source 1..117: note = uncultivated organism sequence
MIRETDQRIPELKKLLAQIFEEKADLSQIFLSKTALNIISNRYFSSWHTLLEKGVELKLFKFKKNDEESFKLPAYLSLAELKELLEAVPFQTAEKSDTDEETHHQVSLLKLQRENLH

SEQ ID NO: 758 - protein, 1234 aa, unidentified
  REGION 1..1234: note = Category: MG58 effectors
  REGION 1..1234: note = Description: MG58-37 effector
  source 1..1234: note = uncultivated organism sequence
MKSDFFAPFTNLYPIQKTLRRELKPLNENFEHDPSLSSLRNSEIPQRDEQREKDYQAIKPLLDELHNQFITESLQSLETQGRSDFVLFYQTYQKKKKNKVDLSEKDLKTLDEEFESRTKALRTAIGNSYAKLAELRKSNPDYVNEKGKPFLDQKSYKILTEAGVLWLLEKKYTSDPEKLALIRRFGNFFTYFTGFNQNRENYYATDEKSTAVAYRAINENLLTFANNCELFEKLSVLSLSEREKKIFNPDSYSEYLTQSGIDFYNEMLANIRSKANLYTQEHKTKLPQPKLLYKQIWSPRGNTIPFDLINKDEEFQKMLHTMIAETDQRIPEFNKLLESIFEENADLSQIFLSKTSLNIISNRYFSSWHTLLEKGVELKLFKFKKNDEESFKLPAYLSLAELKELLEAVPFQTAEKSDTTEGNHHQASLLKLQRENLHLESSHSNWELLLKSMKSDFESFWTWEGEFWSYTSAKKALQSLSTLESSNQEHKSLIKMLLDNALCAYRMLKWFKIDTSKLGFVPEGEFYPSLDQLLQDYPLPKWYDMIRNYLTRKPYSQAKLKLNFDCSTLLNGRDKNKETQNLSVILRKDGKFYLAIMKKDQNKFFEKSALYEGNLGTMEKMDYKLLPWANKMLPKCLMPGSDKKKYGASDQVLELYAKGSFKKSEKSFNLADLHTLIDFYKSALQKYEDWKVFNFQFQATENYQDISQFYREVEQQGYLLNWRKVNEELIKQGIKDWTLFLFQISSKDFEGKSKTPDLQTLYWQQLFKNQTNVKLNGEAEIFFRPWSMKKEKKKLKVDNYDVFKHKRYTEDKILFHVPITLWFGNNEVSPSAPSKFNQKLNQELIIPHFDDLHVIGVDRWEKHLAFYSVVSVKTGKIVKQGTLNLLNGTDYEAKLSQKAENRLHARQNRDTIEKIADLKNGYISQVVNKLVELVLEYNAVIVFEDLNAGFKRGRQKIEQSVYQKLELALAKKLNFIVKKEKAVGEPWSVTSAYQLAPQINTFWDIKWKQRGIMLYTRANYTSVTDPLTGWRKQHYFKKGSSEEMKAQFFKSFKNLTRDTNQEAYIFDDGTWKLYSNVERRRGKRGDHRERTQIKYDPSLELDTLFSKYQIEKSESLFGQLKNRELPQTFWTSFFRILDLIMQIRNTDDEGRDIILSPIGNAQERFDSRKRYNQLPRDENGLVLEESAFEYPTSGDANGAYNIARKGVMMLERIKENPEKPDLLIRDAEWDSWVK

SEQ ID NO: 759 - protein, 132 aa, unidentified
  REGION 1..132: note = Category: MG58 effectors
  REGION 1..132: note = Description: MG58-38 effector
  source 1..132: note = uncultivated organism sequence
MLLDNALYAYRMLKWFKIDTSKLGFIPEGEFYPSLDQLLQDYPLPKWYDMIRNYLTRKPYSQAKLKLNFDCSTLLNGRDKNKETQNLSVILRKDGKFYLAIMKKDQNKFFEKSALYEGNLGTMEKMDYKLLP

SEQ ID NO: 760 - protein, 1253 aa, unidentified
  REGION 1..1253: note = Category: MG58 effectors
  REGION 1..1253: note = Description: MG58-39 effector
  source 1..1253: note = uncultivated organism sequence
MYTDYIDKLVGGFMDNAFSKFTNQYSFSKTLRFELVPQGRTADFLNGELESDQDRAESYQLLKPHFDNFHDGFIEQSLKAYSDSENRFEQLGDLLQKQQKFDKNSSNYEKLEKDIIKLQKSIRTNLSRFFTGFAKKLNQDYGLGDKSIISNAGAMVDFAKILWKDQPEKLVLLSKFDKFSGYFTGYCQNRTNYYVGDDKSTAVSNRIVNQNFTKYTQNFIEINKDEFKSFLKWFNQEDRYIYNQSTKQGQLTHINPEMFSFAHYTEHLNQSGIETYNFNIGDINYWINQFNQTKPPKKVKKLLNLYKQIGQIPVDKKELFKFYETDEDLATDLLVTIENLPKYTENANTLFRNLADEEFNLEEINISARGTNSLANKYLIGWESVRELVNSNKKHDSSNKLIKLSEKPKSTTLGSLNEIINQFEPNQIFKPKYLNNLSDEPGQPSEILIWLIKESLLNALKESKDLAANLNLNKQSKLLGEKSITENIKTFLDSLLLSSQIMKTFQVDGALGDSDFYNELDQVLNEIDIFSIYNATRNYLTKKPYSQDKILLKFANSSLLDGWDINKESDNTSVILRDSTGYFLAIMKKSSNKFFDKAKNPLLYQVDSGDLEKMDYKLLPGPNKMIPKCIISVFWNKQEKQIVRDKPTTIKLAKSGISPSDEFIYKYNQGLHTKDPETKKIRDKKYLVEYIDYVKDALNKYEGWQGYIFNFKSSDQYQDTSEFYKDISDGGYSLNWSSIDLDVLNKAVDEGEIYLFKLKNKDLARKSKSNGKPNLHTMYWQNLFIDESSFKLNGSAEMFYRPKSIDKKQKVFTGSGIKKSGIFEKNRFTENKYLFHVPITINRKANNVIKFRDKINQAIIDEKITNVIGVDRGEKHLEFYCLLGKDGEIIEQGSLNVINGADYSKILDQKSSDRNEARKNWKTIDQIKDIKNGHTSLAIKQIIDLAVKHNALIVLEDLNTGFMRGRQKIEKSNYQQFELAMAKKLNYLVSKDTPAQQVGGTNKGLQLTPILNNYSDIEKVKQFGIILYTTAGYTSSTDPVTGWRKTVYLKSLNQDSMKNDISKFSQIYWDNKEKCYIFSYDTKNFNSKANSRVWSLYSSVERLRSERNKNGIWEKKQYSPTDVMRKALVNSGINPQSANLKEDILSMANSRSLKDIIFGFNLICQIRNSGTSVRDSDYILSPVKPFFDSRKQLDEQNLNENPNSNQLPTSGDSNGAYNIARKGQIMLSRVKQNPEKPDLFISDSDWDKYLAED

SEQ ID NO: 761 - protein, 132 aa, unidentified
  REGION 1..132: note = Category: MG58 effectors
  REGION 1..132: note = Description: MG58-40 effector
  source 1..132: note = uncultivated organism sequence
MLLDNALYAYRMLKWFKVDTSKLGFVPEGEFYPSLDLLLQNYPLSKWYDMIRNYLTRKPYSQAKLKLNFDCSTLLNGRDKNKETQNLSVILRKDGKFYLAIMKKDQNKFFEKSALYEGTLGTMEKMDYKLLP

SEQ ID NO: 762 - protein, 141 aa, unidentified
  REGION 1..141: note = Category: MG58 effectors
  REGION 1..141: note = Description: MG58-41 effector
  source 1..141: note = uncultivated organism sequence
MIRETDQRIPEFNKLLEQIFEEKADLSQIFLLKTALNIVSNRYFSSWHTLLEKGVELKLFKFKKNDEESFKLPAYLSLAELKELLEAVPFQTPEKSDTDEETHHQVSLLKLQRENLHLENSYSNWELLLKSMKSDFESFWT

SEQ ID NO: 763 - protein, 105 aa, unidentified
  REGION 1..105: note = Category: MG58 effectors
  REGION 1..105: note = Description: MG58-42 effector
  source 1..105: note = uncultivated organism sequence
MLPKCLMPGSDKKKYGASDQVLELYAKGSFKKSEKSFNLADLHTLIDFYKSALPKYEDWKVFNFQFQATENYQDISQFYREVEQQGYLLNWRKVNEELIKQGIKD

SEQ ID NO: 764 - protein, 1240 aa, unidentified
  REGION 1..1240: note = Category: MG58 effectors
  REGION 1..1240: note = Description: MG58-43 effector
  source 1..1240: note = uncultivated organism sequence
MKSDLFSPFINLYHIQKTLRRELKPLNENFEHDPSLTALRNSEIPQRDEQREKDYQAIKPLLDELHNQFITESLQSLETQNRSDFVDFYQNYQKSKKNKAHLSEKELKSLDEEFESRTKAFRAAIGTSFSNTAELRKSNPDYVNEKGKPLLTQKSYKILTEAGVLWLLEKKYASEPETLALIRRFGNFFTYFTGFNQNRENYYATDEKSTAVAYRAINENLLTFANNCELFEKFSVLSLSDLEKKIFNPDSYSEYLTQEWIDFYNEMLANIRSKANLYTQEHKTKLPQPKLLYKQIWSPRGNTIPFDLINNDKEFQEMLHTMIAETDQRIPEFNKLLEQIFEEKADLSQIFLSKTALNIISNRYFSSWHTLLEKGVELKLFKFKKNDEESFKLPAYLSLAELKELLEAVPFQTVEKSDTAEEKHHQVSLLKLQRENLYLENSHSNWELLLKSMKSDFESFWTWEGEFWSYTSAKNALQSLLSLESTNQEHKNLIKKLLDNALYAYRMLKWFRVDTSKLGFVPEGEFYPSLDQLLQDYPLPKWYDMIRNYLTRKPYSQAKLKLNFDCSTLLNGRDKNKETQNLSVILRKDGKFYLAIMKKDQNKFFEKSALYEGNLGTMEKMDYKLLPWANKMLPKCLMPGSDKKKYGASDQVLELYAKGSFKKSEKSFNLADLHTLIDFYKSALPKYEDWKVFNFQFQATENYQDISQFYREVEQQGYLLNWRKVNEELIKQGIKDWSLFLFQISSKDFEGKSKTPDLQTLYWCQLFESPTNVKLNGEAEIFFRPWSMKKEKKTLKVDNYDVFKHKRYTEDKILFHVPITLWFGNNEVSPSAPSKFNQKLNQELIIPHFDDLHVIGVDRWEKHLAFYSVVSVKTGKIVKQGTLNLLNGTDYEAKLSQKAENRLHARQNRDTIEKIADLKNGYISQVVNKLVELALEYNAVIVFEDLNAGFKRGRQKIEQSVYQKLELALAKKLNFIVKKEKAVGEPWSVTSAYQLAPQINTFWDIKWKQRGIMLYTRANYTSVTDPLTGWRKQHYFKKGSSEEMKAQFFKSFKNLTRDAGQEAYIFDDGTWQLYSNVERRRGKRGDHRERTQIKYDPSLELDTLFSKYQIEKSDSLFDQLKNREFPQTFWTSFFRILDLIMQIRNTDDKGRDIILSPIGNAKERFDSRKQYNQLPRDEKGMIIEESVFEYPTSGDANGAYNIARKGVMMLERIKENPEKPDLLIRDAEWDSWVKLNNIII

SEQ ID NO: 765 - protein, 105 aa, unidentified
  REGION 1..105: note = Category: MG58 effectors
  REGION 1..105: note = Description: MG58-44 effector
  source 1..105: note = uncultivated organism sequence
MLPKCLMPGSDKKKYGASDQVLELYAKGSFKKSEKSFNLADLHTLIDFYKLALPKYEDWKVFNFQFQATENYQDISQFYREVEQQGYLLNWRKVNEELIKQGIKD

SEQ ID NO: 766 - protein, 132 aa, unidentified
  REGION 1..132: note = Category: MG58 effectors
  REGION 1..132: note = Description: MG58-45 effector
  source 1..132: note = uncultivated organism sequence
MLLDNALYAYRMLKWFKVDTSKLGFVPEGEFYPSLDRLLQDYPLPKWYDMIRNYLTRKPYSEAKLKLNFDCSTLLNGRDKNKETQNLSVILRKDGKFYLAIMKKDQNKFFEKSALYEGNLRTMEKMDYKLLP

SEQ ID NO: 767 - protein, 115 aa, unidentified
  REGION 1..115: note = Category: MG58 effectors
  REGION 1..115: note = Description: MG58-46 effector
  source 1..115: note = uncultivated organism sequence
MKTGKIVKQGTLNLLNGTDYEAKLSQKAENRLHARQNRDTIEKIADLKNGYISQVVNKLVELVLEYNAVIVFEDLNAGFKRGRQKIEQSVYQKLELALAKKLNFIVKKEKTVGEP

SEQ ID NO: 768 - protein, 115 aa, unidentified
  REGION 1..115: note = Category: MG58 effectors
  REGION 1..115: note = Description: MG58-47 effector
  source 1..115: note = uncultivated organism sequence
MKTGKIVKQGTLNLLNGTDYEAKLSQKAENRLHARQNRDTIEKIADLKNGYISQVVNKLVELVLEYNAVIVFEDLNAGFKRGRQKIEQSVYQKLELALAKKLNFIVKKEKAVGEP

SEQ ID NO: 769 - protein, 34 aa, unidentified
  REGION 1..34: note = Category: MG58 effectors
  REGION 1..34: note = Description: MG58-48 effector
  source 1..34: note = uncultivated organism sequence
MKKEKKTLTVDNYDVFKHKRYTEDKILFHVPITL

SEQ ID NO: 770 - protein, 165 aa, unidentified
  REGION 1..165: note = Category: MG58 effectors
  REGION 1..165: note = Description: MG58-49 effector
  source 1..165: note = uncultivated organism sequence
MSRSIFSPFTNLYPIQKTLRRELKPLNENFQHDPALSALRNSEIPQRDEQREKDYQAIKPLLDELHNQFITESLQSLETQDRSDFVLFYQTYQKKKKNKAALSEKDLKTLDEEFESRTKALRTAIGNSYAKLAELRKSNPDYVNEKGKPFLNQKSYKILTEAGVL

SEQ ID NO: 771 - protein, 155 aa, unidentified
  REGION 1..155: note = Category: MG58 effectors
  REGION 1..155: note = Description: MG58-50 effector
  source 1..155: note = uncultivated organism sequence
MITSEAEFKKILHTVIRETDQRIPEVKKLLESIFEEKTDLSQIFLSKTAFNIISNRYFSSWHTLLEKGVELKLFKFKKNDEESFQLPAYLSLAELKELLESVPFETAEKVDAAEGNHHQVSLLKLQRENLHLENSHSNRELLLKSMKSDFESFWT

SEQ ID NO: 772 - protein, 1236 aa, unidentified
  REGION 1..1236: note = Category: MG58 effectors
  REGION 1..1236: note = Description: MG58-51 effector
  source 1..1236: note = uncultivated organism sequence
MKSDFFAPFTNLYPIQKTLRRELKPLNENFEHDPSLSSLRNSEIPQRDEQREKDYQAIKPLLDELHNQFITESLQSLEPQDRSDFVLFYQTYQKKKKNKAELSEKELKSLDEEFESRTKALRAAIGTSFSNTAELRKSNPDYVSEKGKPFLTQKSYKILTEAGVLWLLEKKYASDHEKIALIRRFGNFFTYFTGFNQNRENYYATDEKSTAVAYRAINENLLTFANNCELFEKLSVLSLSDLEKKIFNPDSYSEYLTQSGIDFYNEMLANIRSKANLYTQEHKVKLPQPKLLYKQIWSPRGNTIPFDLITSEEEFQEMLHAMIRETDQRIPEFNKLLEQIFEQKADLSQIFLSKTALNIISNRYFSSWHTLLEKGVELKLFKFKKNDEESFKLPAYLSLAELKELLEAVPFQTVEKSDTAEGNHHQVSLLKLQRENLHLEKSHSNWELLLKSMKSDFESFWTWEGEFWSYTSAKKALQSLSSLQSTNQEHKNLIKMLLDNTLYAYRMLKWFKVDTSKLGFVPEGEFYPSLDQLLQDYPLPKWYDMIRNYLTRKPYSQAKLKLNFDCSTLLNGRDKNKETQNLSVILRKDGKFYLAIMKKDQNKFFEKSALYEGNLGTMEKMDYKLLPWANKMLPKCLMPGSDKKKYGASDQVLELYAKGSFKKSEKSFNLADLHTLIDFYKSALPKYEDWKVFNFQFQATENYQDISQFYREVEQQGYLLKWRKVNEELIKQGIKDWSLFLFQISSKDFEGKSKTPDLQTLYWQQLFESQTNVKLNGEAEIFLRPWSMKKEKKTLKVDNYDVFKHKRYTEDKILFHVPITLWFGNNEVSPSAPSKFNQKLNQELIIPHFDDLHVIGVDRWEKHLAFYSVVSVKTGKIVKQGTLNLLNGTDYEAKLSQKAENRLHARQNRDTIEKIADLKNGYISQVVNKLVELALEYNAVIVFEDLNAGFKRGRQKIEQSVYQKLELALAKKLNFIVKKEKAVGEPWSVTSAYQLAPQINTFWDIKWKQRGIMLYTRANYTSVTDPLTGWRKQHYFKKGSSEEMKTQFFKNFKNLTRDAGQEAYIFDDGTWKLYSNVERRRGKRGDHRERTQIKYDPSLELDTLFSKYQIEKSDSLLDQLKNRDLPQTFWTSFFRILDSIMQIRNTDDEGRDIILSPIGNAQERFDSRKRYNQLPRDEKGLVIEESAFEYPTSGDANGAYNIARKGVMMLQRIKENPEKPDLLIRDAEWDKKITRK

SEQ ID NO: 773 - protein, 178 aa, unidentified
  REGION 1..178: note = Category: MG58 effectors
  REGION 1..178: note = Description: MG58-52 effector
  source 1..178: note = uncultivated organism sequence
MVKEIFYLLFSKKMKSDLFSPFTNLYPIQKTLRRELKPINENFEHDPFLTTLRNSKIPQRDKQREKDYQEIKPLLDKLHNQFITESLQSLETQDRSDSVLFYQTYQKKKKNKADLSEKDLKTLDEEFESRTKALRNAIGASFSVTAALRKSNPDYVNEKGKPFLDQKSYKILTEAGVL

SEQ ID NO: 774 - protein, 309 aa, unidentified
  REGION 1..309: note = Category: MG58 effectors
  REGION 1..309: note = Description: MG58-53 effector
  source 1..309: note = uncultivated organism sequence
MVKEIFYLLFSKKMKSDLFSPFTNLYPIQKTLRRELKPINENFEHDPFLTTLRNSKIPQRDKQREKDYQEIKPLLDKLHNQFITESLQSLETQDRSDFVLFYQTYQKKKKNKAALSEKDLKTLDEEFESRTKALRNAIGTSFLNTAELRKSNPDYVNEKGKPFLTQKSYKILTEAGVLWLLEKKYASDPENLALIRRFGNFFTYFTGFNQNRENYYATDEKSTAVAYRAINENLLTFANNCELFEKLSVLSLSELEKKTFNPDSYSEYLTQSGIVFYNEMLANIRSKANLYTQEHKAKLPQPKLLYKQI

SEQ ID NO: 775 - protein, 658 aa, unidentified
  REGION 1..658: note = Category: MG58 effectors
  REGION 1..658: note = Description: MG58-54 effector
  source 1..658: note = uncultivated organism sequence
MLDLSLEEKNIFNPDSYSDYLVQEGIQDYNTQIASIKSKINLYSGAHKTKLPQPKLLYKQIWSPRGNTIPFDLITSEAEFQKMLHTMIAETDQRIPEFKKLLAQIFEEKADLSQIFLSKTALNIISNRYFSSWHTLLEKGVELKLFKFKKNDEESFKLPAYLSLAELKELLEAVPFQTPEKSDTDEETHHQVSLLKLQRENLHLENSYSNWELLLKSMKSDFESFWTWEGEFWSYTLAKNALQSLSTLESTNQEHKNLIKMLLDNALYAYRMLKWFKVDTSKLGFVPEGEFYPSLDLIFQDYPLPKWYDMIRNYLTKKPYSQAKLKLNFDCSTLLNGRDKNKETQNLSVILRKDGKFYLAIMKKDQNKFFEKSALYEGNLGTMEKMDYKLLPWANKMLPKCLMPGSDKKKYGAFDQVLELYAKGSFKKSEKSFNLPDLHTLIDFYKSALPKYEDWKVFNFQFQATENYQDISQFYREVEQQGYLLNWRNVNEELIKQGIKDWSLFLFQISSKDFEGKSRTPDLQTLYRNQSFAPQTNVKLNGEAEIFFRPWSMKKEKKKLKVDNYDVFKHKRYTEDKILFHVPITLWFWNNEVSPSAPSKFNQKLNQELIIPHFDDLHVIGVDRWEKHLNLYKISTFVDIVEFSFLRLFRTYIRFLLL

SEQ ID NO: 776 - protein, 130 aa, unidentified
  REGION 1..130: note = Category: MG58 effectors
  REGION 1..130: note = Description: MG58-55 effector
  source 1..130: note = uncultivated organism sequence
MDNALYAYRMLKWFKVDTSKLGFLPEGEFYPSLDQLLQDYPLPKWYDMIRNYLTRKPYSQAKLKLNFDCSTLLNGRDKNKETQNLSVILRKDGKFYLAIMKKDQNKFFEKSALYEGNLGTMEKMDYKLLP

SEQ ID NO: 777 - protein, 1234 aa, unidentified
  REGION 1..1234: note = Category: MG58 effectors
  REGION 1..1234: note = Description: MG58-56 effector
  source 1..1234: note = uncultivated organism sequence
MTKPFFSQFINLYPIQKTLRRELKPLNENFQHDPSLSALRNSEIPQRDEQREKDYQAIKPLLDELHNEFITESLQSLEIQNRSGFVDFYQNYQKSKKNKAELSEKELKSLDEEFESRTKALRNAIGTSFSATAELRKSNPDYVNEKGKPFLTQKSYKILTEAGVLWLLEKKYASDPERLALIRRFGNFFTYFTGFNQNRENYYSTEEKSTAVAYRTINENLLTFANNCELFEKLSVPSLSELEKKIFNPDSYSEYLTQEWIDFYNEMLANIRSKANLYTQEHKTKLPQPKLLYKQIWSPRANTIPFDLIASEAEFQEMLHTMIRETDQRIPEFNKLLEQIFEEKADLSQIFLLKTALNIVSNRYFSSWHTLLEKGVELKLFKFKKNDEESFKLPAYLSLAELKELLEAVPFQTPEKSDTDEETHHQVSLLKLQRENLHLENSYSNWELLLKSMKSDFESFWTWEGEFWSYTSAKKALQSLSTLESTNQEHKNLIKMLLDNALYAYRMLKWFKVDTSKLGFVPEGEFYPSLDRLLQDYPLPKWYDMIRNYLTRKPYSEAKLKLNFDCSTLLNGRDKNKETQNLSVILRKDGKFYLAIMKKDQNKFFEKSALYEGNLRTMEKMDYKLLPWANKMLPKCLMPGSDKKKYGASDQVLELYAKGSFKKSEKSFNLADLHTLIDFYKSALPKYEDWKVFNFQFQATENYQDISQFYREVEQQGYLLNWRKVNEELIKQGIKDWSLFLFQISSKDFEGKSKTPDLQTLYWQELFESPTNVKLNGEAEIFFRPWSMKKEKKTLTVDNYDVFKHKRYTEDKILFHVPITLWFGNNEVSPSAPSKFNQKLNQELIIPHFDDLHVAWVDRGERNLWYFSIISVKTGKIVKQGTLNLLNGTDYEAKLSQKAENRLHARQNRDTIEKIADLKNGYISQVVNKLVELVLEYNAVIVFEDLNAGFKRGRQKIEQSVYQKLELALAKKLNFIVKKEKAVGEPWSVTSAYQLAPQINTFWDIKWKQRGIILYTRANYTSVTDPLTGWRKQHYFKKSSSEEMKAQFFKSFKNLTRDAGQEAYIFDDGTWQLYSNVERRRGKRGDHRERTQIKYDPSLELDTLFSKYQIEKSDSLFDQLKNRELPQTFWTSFFRILDLIMQIRNTDDEGRDIILSPIGNPQERFDSRKRYDQLPRDEKGLVIEESEFEYPTSGDANGAYNIARKGVMMLERIKENPEKPDLLVRDAEWDSWVI

SEQ ID NO: 778 - protein, 1237 aa, unidentified
  REGION 1..1237: note = Category: MG58 effectors
  REGION 1..1237: note = Description: MG58-57 effector
  source 1..1237: note = uncultivated organism sequence
MTKPLFSQFTNLYPIQKTLRRELKPLNENFEHDPALSALRNSEIPQRDEQREKDYQAIKPLLDELHNQFITESLQSLETQNRSGFIDFYQNYQKSKKNKADLSEKELKSIDEEFESRTKALRTAIGNSYAKLAELRKSNPDYVNEKGKPFLDQKSYKILTESGVLWLLEKKYASDPENLALIRRFGNFFTYFTGFNQNRENYYATDEKSTAVAYRAINENLLTFANNCGLFEALQVLDLSLEEKNIFNPDSYSDYLVQEGIQDYNTQIASIKSKINLYSGAHKTKLPQPKLLYKQIWSPRANTIPFDLIASEAEFQEMLHTMIRETDQRIPEFKKLLAQIFEEKADLSQIFLSKTALNIVSNRYFSSWHTLLEKGVELKLFKFKKNDEESFKLPAYLSLAELKELLEAVPFQTPEKSDTDEETHHQVSLLKLQRENLHLENSYSNWELLLKSMKSDFESFWTWEGEFWSYTSAKNALQSLSTLESANQEQKNLIKMLLDNALYAYRMLKWFKVDTSKLGFVPEGEFYPSLDQLLQDYPLPKWYDMIRNYLTRKPYSQAKLKLNFDCSTLLNGRDKNKETQNLSVILRKDGKFYLAIMKKDQNKFFEKSALYEGNLGAMEKMDYKLLPWANKMLPKCLMPGSDKKKYGASDQVLELYTKGSFKKSEKSFNLPDLHTLIDFYKSALPKYEDWKVFNFQFQATENYQDISQFYREVEQQGYLLNWRKVNEELIKQGIKEWSLFLFQISSKDFEGKSKTPDLQTLYWQQLFKNQTNVKLNGEAEIFFRPWSMKKEKKTLTVDNYDVFKHKRYTEDKILFHVPITLWFGNNEVSPSAPSKFNQKLNQELIIPHFDDLHVIGIDRWEKHLAFYSVVSVKTGKIVKQGTLNLLNGTDYEAKLSQKAENRLHARQNRDTIEKIADLKNGYISQVVNKLVELVLEYNAVIVFEDLNAGFKRGRQKIEQSVYQKLELALAKKLNFIVKKEKAVGEPWSVTSAYQLAPQINTFWDIKWKQRGIMLYTRANYTSVTDPLTGWRKQHYFKKGSSEEMKAQFFRSFKNLTRDAGQEAYIFDDGTWKIYSNVERRRGKRGDHRERTQIKYDPSLELDALFSKYQIEKSDSLLDQLKNRELPQTFWTSLFRILDLIMQIRNTDDEGRDIILSPIGNPQERFDSRKRYDQLSRDEKGVVIEESAFEYPTSGDANGAYNIARKGVMMLERIKKNPEKPDLLIRDAEWDKENNKLT

SEQ ID NO: 779 - protein, 1247 aa, unidentified
  REGION 1..1247: note = Category: MG58 effectors
  REGION 1..1247: note = Description: MG58-59 effector
  source 1..1247: note = uncultivated organism sequence
MVKEIFYLLFSKKMKSDFFSPFTNLYPIQKTLRRELKPLNENFEYDPSLSLLRNSEIPQRDEQREKDYQAIKPLLDELHNQFIAESLQSLETQNRSDFVDFYQTYQKKKKNKVDLSEKELKMLNEEFESRTKALRTAIGNSYAKLAELRKSNPDYVNEKGKPFLTQKSYKILTEAGVLWLLEKKYASDPEKLALIRRFGNFFTYFTGFNQNRENYYATDEKATAVAYRAINENLLTFANNCELFEKLSVLSLSEREKKIFNPDSYSEYLTQSGIDFYNEMLANIRSKANLYTQEYKTKLPQPKLLYKQIWSPRGNTIPFDLINNDEEFKKMLHTMIAETDQRIPEFNKLLESIFEENADLSQIFLSKTSLNIISNRYFSSWHTLLEKGVELKLFKFKKNDEESFKLPAYLSLAELKELLEAVPFQTIEKADTAEGNHHQVSLLKLQRENLHLKNSHSNWELLLKSMKSDFESFWAWDEEFWSYTSAKNVIQSLSSLQSTNQEHKNLIKMLLDNALYAYRMLKWFKIDTSKLGFIPEGEFYPSLDQLLQDYPLPKWYDMIRNYLTRKPYSQAKLKLNFDCSTLLNGRDKNKETQNLSVILRKDGKFYLAIMKKDQNKFFEKSALYEGNLGTMEKMDYKLLPWANKMLPKCLMPGSDKKKYGASDQVLELYAKGSFKKSEKSFNLADLHTLIDFYKSALPKYEDWKVFNFQFQATENYQDISQFYREVEQQGYLLNWRKVNEELIKQGIKDWSLFLFQISSKDFEGKSKTPDLQTLYWQQLFESPTNVKLNGEAEIFFRPWSMKKEKKALKVDNYDVFKHKRYTEDKILFHVPITLWFGNNEVSPSAPSKFNQKLNQELIIPHFDDLHVIGVDRWEKHLAFYSVVSVKTGKIVKQGTLNLLNGTDYEAKLSQKAENRLHARQNRDTIEKIADLKNGYISQVVNKLVELVLEYNAVIVFEDLNAGFKRGRQKIEQSVYQKLELALAKKLNFIVKKEKTVGEPWSVTSAYQLAPQINTFWDIKWKQRGVMLYTRANYTSVTDPLTGWRKQHYFKKGSSEEMKAQFFKSFKNLTRDINQEAYIFDDGTWKLYSNVERRRGKRGDHRERTQIKYDPSLELDTLFFKNQIEKYDSLFDQLKNRELPQTFWTSFFRILDLIMQIRNTDDEGRDIILSPIGNVQERFDSRKRYDQLPRDEKGLIIEESEFEYPTSGDANGAYNIARKGVMMLERIKENPEKPDLLIRDAEWDSWAK

SEQ ID NO: 780 - protein, 1281 aa, unidentified
  REGION 1..1281: note = Category: MG59 effectors
  REGION 1..1281: note = Description: MG59-1 effector
  source 1..1281: note = uncultivated organism sequence
MNLDSFTRKYKLAKTLRFELRPVGRTLETFKEQFFEGDKRRAEDYPIVKELLDGEHKALLERALSNPPSDLDWTALAQAHEDYRTSDKSKEAKDALAAKQAEFRKKIVALFKKDDAFSNLTAPTPKDIFAAMRQRYEDAGEEVPEALVTFSRFAGFFKGYQENRRNIYSDEAQATSAANRAVNENFPKFLEDVRIFRHIADAYPAILSGAEKELAPLLKGRTLASLFDPAAYGSFLSQSNIDFFNSVLGGFVPEEGEKTRGINEFVNLYRQQHEDARTDRSLSALHSLYKQILSDRETRSLVPRALETDEDVLVSLRAMLEERLLGLATESGRVNVLDDLQALLSKIPAADDIWIDGAEISRVSMNLLGSWNALGSLMESAAEVRFASESTEKKRLSAIDKWMKRSVYALSELADLRQETDTGSVIVDVSKLWKGPAAAQRFDAARAAVAAALPLLSSPIPENGPKLRERKDDVEIIKAALDAVLDVLHFVKPLHAGEGLDRDEAFYSAFDPLYTALDGFVPLYNKVRNYLTKKPGETERIKLMFDNPTLADGWDQNKEKDNTCVLFFRDGLYYLGVMNPEEKTDFSKLSGPKTPGCYRKMVYKLLPGPNKMLPKVFFSKKGLELFHPSANLLERYHAGAYKKGPSFDLAFCRRLIDFYKASIAAHPDWSKFGFRFSPTSSYNGIDEFYREVSEQGYRISFENIPVETVDRLVEEGKLCLFQLWNKDFSRASTGRPNLHTQYWNAVFAPENLQDVVIKLNGEAELFYRPRSIKEHVFRHKVGEKMVNRRGADGSPMPESVHGELFRHFNGSPEPLSDEARAWIESGNLVVKDVTHEIVKDRRYTEDKFSFHVPLTINFKQPDAPARFNEQVRDFLRGNPDVNVIGIDRGERNLIYLTLVDRQGNLLEQRSFNVVSRTRRDGVEMRTDYQSKLAQAEKDRAAARLTWSEIGAIKDLKEGYLSAVVHEIAKMMVERNAIVVLEDLNFGFKRGRFRIERQVYQKFEKALIDKLNYLVFKDRGLAEPGGTLRGYQLTDAFESFERIGKQTGFLFYVPAGYTSKIDPTTGFTNLFNTKRCTNAAGIRDFFAAFDSIRWDAARRAFAFAFDYRNFKTSQESHRTAWTVYSANRRLVFDKDARTEKEIDPTAILLDALKKHGVSVTDGFDLKALLADTEPSKANAGFFRNVFYAFDRTLQMRNSRAGEDYIESPVLNGRGEFFDSRKADATLPKDADANGAYHIALKGVQLLEENIAENRTANGSADLKIEHKDWFRFAQELAARKFK

SEQ ID NO: 781 - protein, 1245 aa, unidentified
  REGION 1..1245: note = Category: MG59 effectors
  REGION 1..1245: note = Description: MG59-2 effector
  source 1..1245: note = uncultivated organism sequence
MTAMTDFTKLYNLSHTLTFELHPIGKTAEKLQESGLLNQDFKRSQDYAEVKSVLDEIHKKFLQEVLSDCDLSWQELADALKIFRINKDRRALEGIQKKYRKSLADKFSKNKFFKILTEATPSKLFRYLLDQPDMVERKVETFGKFACYFKGYQENRKNIYSAEEQQTAAAYRAVNVNFQKYLRVVELYGDFVKNFPELTEDIKQRTAELTKEDLSQVLQIENYNKFIAQSGIEYLNSLIAQINLSVNWYRQAHNVRLSFAPLLFKQILSDREQAFVVERIEKDDDLYEKLKAFCEQHICSVEIRGETGDLFSRLKGLFATLNDDSDLYVDAASLSGIGNVLTGNWSCFRDAMDAYANETLKSKILREKYCKQPVYSFSEIKSWRIVRTDDDGNTTPVRLTDYWNGKKVQEMFATEKTLRNRVLEMVRVSHDKNFRERNHDVALVKEYLDAVQGILHLLKPLNVGSENGGGFYDALSPIIPLYNQVRNYVTQKPSDIGKIKLMFNNPTLADGWDFNKEKANTSVIFCRNGEYYLGIMNPKSKTDFDKLAVDDPANCYQKMVYKLLPGPNKMLPKVFFADKNIDFFAPSGDLLRRYEAKEHLKGEKFDLAYCHELINFFKESIARHKDWSKFGFKFSETSAYSGIDEFYREVAEQGYKMSFANIPVGTIDKLVEDGNLFLFQIWNKDFSEKSTGIPNKFTLYWKALFDRRNLSDVIFKLNGEAELFLREPAITEPVVHRPGEKLVNKTVVMEVGGDHQAIRNSIPDVVYTEIYKYVNGMEEGPLSSAAKEHLNKFPRLDWEPGMGLEATLKRTVVKDVKFQLVKDRRFAKRFFSFHVPITVNFKSPDPKGVRLNDRVWVFLKDNPDVNIIGIDRGERNLIYVNCIDQKGRILLQKSFNVVGGFDYHQKLDMREKERAQARKSWSEIGSIKELKSGYLSGVIYEIARMMIKYNAIVVMEDLNGGFKRSRTGIEKQVYQKFEKALIDKLNYLVFKNESDWSAPGGLLNGYQLTEHLESFSKLGRQCGWLFYVPAAYTSKIDPSTGFVSLFKLKDYTNSEKRKAFFENFKSIVYQAELDAFVFAFDYKKFKDVQSCWQSSWEVCSAKRRLVYSSRSQQIEEVNPTQLIKRALDKRDVALSDGFDLKHYISTVEAVDENAAFFKALLDAFGMTLQMRNSSKTEDYIESPVLNSKGLFFDSRKADENWPQDADSNGAYHIALKGLLCLKKGKVDLKLKDWFEFVQRRDFMVK

SEQ ID NO: 782 - protein, 1312 aa, unidentified
  REGION 1..1312: note = Category: MG59 effectors
  REGION 1..1312: note = Description: MG59-3 effector
  source 1..1312: note = uncultivated organism sequence
MKHHHALFAPISDSSGSAEAAPKSIRDFTGLFAVSETLQFELRPLDADFKPKSPELALADMDKYLEKDRERAGQYSNLKLILDEEHKKLIERVFSDVSASIRRLPASASGRKLLNDAGTGICWSKLAEAERQESFEKVQESFRKLIAELLNTDEKKKSLLEATPSKYIKGMLSSPDLSDSDRKTLSAFEKFACYLKGFQENRANLYSDEAKITAISNRIVNQNFPKFLIGCQIMKHIGEQYPEIIQSAERNLASILHGLSLKDVFRPDAFDRCLSQSGIDAYNNLLGGFTADGGAQKIQGINETINLYRQQHPDVVKKDKLFAPLPSLFKQILSERSSISYIPEMFDSDHAVCETIRTFLAEADLAKALQSITDLLSSIAPDDSGVFVTANELNWISNKVFGAWNMIERALDNYAETLKTKKEQEKWLKKKYYSLAELGALDFRAITTEDAAIPAVADFWRGQVFGQTAATLTNAVAEVQSVLNSPAYLPGNRDPLMRENADDVKRIKALFDSLLDLLHFLKPLRVDAPDANQVFYTGFNAVYDRLDTVVPLYNRVRNYLTRKPSEMKKTKLMFDCATLADGWDRNKESSNNAVLLLKDGNYYLAIIQPAKSRTDRKVDFASLESDRQGDCFRKMVYKYLPGPNKMLPKVIFSDRNRDLFAPSAELKRKYDAKMHTKGDNFDLGFCHELIDYFKACIAKHEDWSKFGFKFSDTAKYRGIDEFYNEISAQGYKMSFTPIPASSISDLIRQDKILLFQIYNKDFAPGATGRPNKFTLYWKQLFDEKNLNDVVFKLNGEAELFLRDPSIRKPFRHRKGEKLVNRTQKDGTPIPESVHRELCKLANGQLNESALSPEARSIWLSGQALVKTATHDIVKDRRFTVPKILFHVPITINFKSPDGKYGINQRVNDYLRGNSDVKIIGIDRGERNLIYITLVDQSGRILLQKSFNTIPQKRPDKTIELDYHAKLDLREKERDEARKNWTEINRIKDMKAGYLSQVVHEIARLMVEHNAIVVMEDLNAGFKRGRTAFEKQVYQNFERALITKLNYLVFKDAEESAPGFVRKGLQLANFFDSFEKLGKQSGFLFYVPPSYTSGIDPATGFVSLFQFGKYTNAAARKQFFESFESIRFDAGRNAFTFEFDYSKFPVPKNSEPSKVRRWTVFSVGDRIVHRMKDAQTVKPTAVILGELQKRGIQVTDGFDLLEYIRGTDADSRNASFFNAIFDAFRWTVQLRNSDKENDYILSPVLSPDGTFFDSRKATDGMPKDADANGAYHIAMKGLYLLQNRFPATDSKKIDLFISNRDWLDFMQTRSRAN

SEQ ID NO: 783 - protein, 1317 aa, unidentified
  REGION 1..1317: note = Category: MG59 effectors
  REGION 1..1317: note = Description: MG59-4 effector
  source 1..1317: note = uncultivated organism sequence
MKHHHALFAPNSDSSGSAEAAPKSIRDFTGLFAVSETLQFELRPLDADFNPKSPELALADMEKYLEKDRERAAQYSNLKSILDEEHKKLIERVFSDVSASIRRLPASAPGRKLLNETGTGILWSKLVEAEGQESFEKVQESFRKLIAELLNTDEKKKSLLEATPSKYIKDMLSSPDLADSDRKTLSAFEKFACYLKGFQENRTNLYSAEAKITAISNRIVNQNFPKFLIGCRIMAHIWKQYPEIIQSAEKNLASILHGRSLHDVFRPDGFDRCLSQSGIDAYNNLLGGFTAEGGAQKIQGINETINLYHQQHPEEVKKDKMFAQLPSLFKQILSERSTISYIPEMFDSDHAVCEAIRTFLAEADLTQTMQTISDLLNSITPADSGIFVAANELNWISSKVFGSWNQIERALDDYAETLKSKKEQEKCLKKKYYSLAELGTLDFRSLTAEDAAVPAVADFWHGQFFNQTADAVTNAVAEVQSVLNSPDYQPGNRDPLMRENADDVKKIKALFDSLLDLLHFLKPLRVDAPDADQVFYTGFNAVYDRLDTVVPLYNRVRNYLTRKPSEMKKTKLMFDCATLADGWDKNKESDNNAVILLKDENFYLAVIQPAQKKVDGKREQKVDFAKLETTDSGACFRKMIYKYLPTPSRMLPKVVFGKSNEALFHPSAELLRKYRADMHKKTSPNFDLGFCHELIDYFKACIAKHEDWSKFGFKFTDTAKYRGIDEFYNEISAQGYKMSFTSIPASSISDLIRQDKILLFQIYNKDFAPGATGRPNKFTLYWKQLFDENNLNDVVFKLNGEAELFLRDPSIRKPFRHRKGEKLVNRTQKDGTPIPEPVHIELCKLANGQLNENTLSPEALSIWQSGQAVVKAATHDIVKDRRFTVPKFLFHVPITINFKSPDGKYGINQRVNDYLRGNPDVKIIGIDRGERNLIYITLVDQSGRILLQKSFNTIPQKRPDKTIELDYHAKLDLREKERDAARKNWTEINRIRDLKAGYLSQVVHEIAKLMVEHNAIVVMEDLNAGFKRGRTAFEKQVYQNFERALITKLNYLVFKDAEESAPGFVRKGLQLANFFDSFEKLGKQSGFLFYVPPSYTSGIDPATGFVSLFQFGKYTNAAARKQFFESFESIRFKAGRSAFAFEFDYSRFPVPKNAEPSKVRRWTVFSVGDRIVHRMKDTQTVRPTCVILGELQKRGVQVTDGFDLLEYIRGTDEDSRNASFFNAVFDAFRWTVQLRNSDKENDYILSPFLSPDGTFFDSRKATDGMPKDADANGAYHIAMKGLYLLQNRFPSTDSKKIDLFISNRDWLDFMQTRSRAN

SEQ ID NO: 784 - protein, 1276 aa, unidentified
  REGION 1..1276: note = Category: MG59 effectors
  REGION 1..1276: note = Description: MG59-5 effector
  source 1..1276: note = uncultivated organism sequence
MNNSFTHQYSISKTLSFELRPIGRTEETVRSIFLPQDEKRAKDYFEVKELLDAEHKAFLNHALQNVPNLDWEDLENAHEAYRKSEKSAKDKKVLEEVQGKFRKEIARAFKADGERYAEITATTPSRIFARLIEQHENANEKIPDSLLSFVNFGGYFIWFQNNRKNIYSEEAQSTSAANRAINENFPRFLHDVKTFLHLVENYPSIIKDAENELLELLNGETFACLFDVSSYGRFLPQDGIDLFNQILGGYTKNDGTKIRGLNEFVNLYRQQHKEVQNDKGLLPLIPFYKQILSDRTTLSNRIKPFENDSEVIEILKYMLTDGLAFETESGRIKIGDALKKLFACISNSEGIWIDRRQLSNLSKMMFDSWGTIKTIMESEAVKMFSNEKTEKKKQSAIDKWMRRNAYSLHELFGMKIETDNEERFVDVAAFFQSDALMKHLKSIEEAKAKALVALSVENAENIPLREQEETKQKIQSALDSILELFQFIKPLYVDNSMERDESFYSQFDKIYSALDEFVPFFNKIRNYLTKKHDGSEPIRLMFGNPTLAAGWDKNKELDNTCVLFIKDGLYYLGIMNPKAKTDFSKFAVGDSQDCYQKMVYKFLPEPHKMLPKVFFSEKGKSIYNPPPSLIKKYQLGFHRHGETFDLEFCHELIDFFKKSIGAKTEWQTFNFKFSPTESYDGIDKFYNEIKEQGYKISFENIPVKVIDSLVDDGKLCLFKLWHRDFSDKFTGKPDPYTFYWKAAFSPENLRDYIIKLNGNARVFYRPASIKKPFSHKTGENMLNRRGKSGKAIPGEIYGELFRHFNGDKTPLSAEAQHWIDSGELTIKKATYEIVKDRRFTKDQFKLEVPIVINFKQPESPNNFNEKVNQYLRENTDVNIIGLDRGERNLIYLTVVNQNGDILEQRSLNSIGNTNPNGTEILTNYKEKLSDIEKERQQQRKSWQSLSAIADLKSGYISMVVHEIAKLMIKYNAIVVLEDLNVGFKQTRTKVERQVYQNFEIALIKKLNYLCFKDKKALEVGGVLAGLQLANKFETFEKVGKQTGFIFYVPAGYTSKIDPTTGFTNLFNTKKCTNAQATQRFFNSFDSIIWDEKSKSFALAFDYNNFKTGIKSPRSKWVVYSAIRRLVFSKEKKSTVELNPTQIIIDAVKKMGLALTDGFDLKAVLSNLEPSRENAWFFRSVFYAFDKTLHLRNSNEIEDYIESPVLNAAGEHFDSRNAPKSLPQDADANGAYHIALKGIMLINSIRSSEKPNLAIKNEDWFKFAQELAERKIGGIAK

SEQ ID NO: 785 - protein, 1255 aa, unidentified
  REGION 1..1255: note = Category: MG59 effectors
  REGION 1..1255: note = Description: MG59-6 effector
  source 1..1255: note = uncultivated organism sequence
MTKMTDFTKLYQLSHTLKFELRPIGKTSENLQNSGLLEEDFKRSQDYVEVKLVLDEVHKKFLQDVLSDCDLSWQELADALKIFQVNKDRKVLEDVQKKYRKLLVDRFNKNKFFKTLTEATPSKLFKSLLAEPDMAERKVETFKRFACYFKGYQETRKNIYSAEAQQTAAAYRAVNENFVKYLRVVELYENFRKNFPELAEEIGRRTAELTDGELSQILRIENYNRFIAQSGIEYLNSLIAQINSAVNLYRQAHNVKLSFVPLLFKQILSDREQAFSLERIEKDADLDEKLRAFCERHIGNVEIRGETGDLFSRLKVLLTTLNDDCELYIDAASLSAIGNALTGNWSCFRDAMAAYANETLKNKSLREKYCKQPVYSFSEIKSWRVVRTDDDGNVQPVCLSDYWHGEKTLELFAAEKILRNRILEMVRVPHDKNFRERKNDVALVKDYLDAVVEILHLLKPLNVGSENGGDLDLLGTLTEFYEALSPVIPLYNQIRNYVTQKPSDIGKIKLMFNNPTLADGWDLNKEKDYTAVIFCRNGMYYLGIMNPKSKTDFNSLATDSSSDCYQKMVYKQLQNPNQMLPKVFFSAEKIKFFAPSEELLRRYKAGEYKKGEKFDLAYCHELIDFFKRSIDRHEKWSKFEFKFSETSAYSGINEFYREVAEQGYKMSFVNIPVKAVDQLVEDGKLFLFQIWNKDFLEKSTGTPNKFTLYWKALFDRQNLSDVVFKLNGEAELFLREPAITEPVVHRSGEKLVNKTVVAAVDGNGVAIRNSIPDSVYMEIYNHVNGMEDGTLSPAAREHLNRFPRLDWEPGMGLEATVKRTVVKDVKFQLVKDKRFTERKFSFHVPITVNFKSPGLKGAKLNEMVWEFLKDNPDVNVIGIDRGERNLIYVNCIDQKGRILLQKSFNIVGGFDYHQKLDLREKERGQARKSWTEIGTIKELKAGYLSGVVYEIARLMVEYNAIVVMEDLNGGFKRSRTGIEKQIYQKFEKALIDKLNYLVFKNESDWHVPGGLLNGYQLTGPLESFAKLGKQCGWLFYVPAAYTSKIDPSTGFVSLFKLSNYTNTEKRKAFFENFESIVYQAERDAFVFAFDYKKFKDVQSCWKTSWEIYSAKRRLVYSSRSRQIGEINPTRFIKRALDKRGVVLSDGFDLKHYITSVEAVNENAAFFKDIFDAFGTTLQMRNSSGEEDYIESPVLNENGQFFDSRKAGKEWPRDADSNGAYHIALKGLLRMKSGQTAKLKRLDWFEFVQRRGFITE

SEQ ID NO: 786 - protein, 1255 aa, unidentified
  REGION 1..1255: note = Category: MG59 effectors
  REGION 1..1255: note = Description: MG59-7 effector
  source 1..1255: note = uncultivated organism sequence
MTKMTDFTKLYQLSHTLKFELRPIGKTSENLQNSGLLEEDFKRSQDYVEVKSVLDEVHKKFLQDVLSDCDLSWQELADALKIFQVNKDRKVLEDVQKKYRKLLADRFNKNKFFKTLTEATPSKLFKSLLAEPDMAERKVETFKRFACYFKGYQETRKNIYSAEAQQTAAAYRAVNENFVKYLRVVELYENFRKNFPELAEEIGRRTAELTDGELSQILRIENYNRFIAQSGIEYLNSLIAQINSAVNLYRQAHNVKLSFVPLLFKQILSDREQVFTLERIEKDADLDEKLRAFCEQHIGNVEIRGETGDLFSRLKVLLTTLNDDCELCIDAASLSAIGNALSGNWSCFRDAMTAYANETLKNKSLREKYCKQPVYSFSEIKSWRVVRTDDDGNVQPVCLSDYWHGEKALELFATEKILRNKILEMVRVPHDKNFRERKNDVALVKDYLDAVVEILHLLKPLNVGSENGGDLDLLGILTEFYEALSPVIPLYNQIRNYVTQKPSDIGKIKLMFSNPTLADGWDLNKEKDNTAVIFYRNGMYYLGIMNPKSKTDFDNLATDSSSDCYQKMVYKLLPGPNKMLPKVFFADKNIDFFAPSEELLRRYKAGEHLKGEKFDLAYCHKLIDFFKRSITRHEEWSKFDFQFSETSAYAGIDEFYREVAEQGYKMSFVNIPVKAVDQLVEDGKLFLFQIWNKDFSEKSTGTPNKFTLYWKALFDRQNLSDVVFKLNGEAELFLREPAITEPVVHRSGEKLVNKTVVAAVDGNGMAIRNSIPDAVYTEIYKHVNGMEEGTLSPAAREHLNRFPRLDWEPGMGLEATVKRTVVKDVKFQLVKDKRFTERKFSFHVPITVNFQSPGLKGAKLNEMVWEFLKDNPDVNVIGIDRGERNLIYVNCIDLKGRILLQKSFNIVGGFDYHQKLDMRERERGQARKSWNEIGTIKELKAGYLSGIVYEIARLMVEYNAIVVMEDLNGGFKRSRTGIEKQIYQKFEKALIDKLNYLVFKSESDWHVPGGLLNGYQLTGPLESFAKLGKQCGWLFYVPAAYTSKIDPSTGFVSLFKLSNYTNTEKRKAFFENFESIVYQTEQDAFVFAFDYKKFKDVESCWKTSWEVYSARRRLVYGRRSRQIEAINPTRLIKRALEQRGVVLSDGFDLKHYITSVEAVNENAAFFKDIFDAFGTTLQMRNSSGEEDYIESPVLNENGQFFDSRKAGKEWPRDADSNGAYHIALKGLLRMKSGQTAKLKRLDWFEFVQRRGFITE

SEQ ID NO: 787 - protein, 1255 aa, unidentified
  REGION 1..1255: note = Category: MG59 effectors
  REGION 1..1255: note = Description: MG59-8 effector
  source 1..1255: note = uncultivated organism sequence
MTKMTDFTKLYQLSHTLKFELRPIGKTSENLQNSGLLEEDFKRSQDYVEVKSVLDEVHKKFLQDVLSDCDLSWQELADALKIFQVNKDRKVLEDVQKKYRKLLADRFNKNKFFKTLTEATPSKLFKSLLAEPDMAERKVETFKRFACYFKGYQETRKNIYSAEAQQTAAAYRAVNENFVKYLRVVELYENFRKNFPELAEEIGRRTAELTDGELSQILRIENYNRFIAQSGIEYLNSLIAQINSAVNLYRQAHNVKLSFVPLLFKQILSDREQVFTLERIEKDADLDEKLRAFCERHIGNVEIRGETGDLFSRLKVLLTTLNDDCELYIDAASLSAIGNALTGNWSCFRDAMAAYANETLKNKSLREKYCKQPVYSFSEIKSWRVVRTDDDGNVQPVCLSDYWHGEKALELFATEKILRNKILEMVRVPHDKNFRERKNDVALVKEYLDAVVEILHLLKTLNVGSENGGDLDLLGTLTEFYEALSPVIPLYNQIRNYVTQKPSDIGKIKLMFNNPTLADGWDLNKEKDYTAVIFCRNGMYYLGIINPKSKTDFNSLATDSSTDCYQKMVYKQLQNPNQMLPKVFFSAEKIKFFAPSEELLRRYKAGEYKKGEKFDLAYCHELIDFFKRSIDRHEKWSKFEFKFSETSAYSGINEFYREVAEQGYKMSFVNIPVKAVDQLVEDGKLFLFQIWNKDFSEKSTGTPNKFTLYWKALFDRQNLSDVVFKLNGEAELFLREPAITEPVVHRPGEKLINKTVVVAIDGNGVAVRNSIPDSVYMEIYNHVNGMEDGTLSPAAREHLNRFPRLDWEPGMGLEATVKRTVVKDVKFQLVKDKRFTERKFSFHVPITVNFKSPGLKGAKLNEKVWEFLKDNPDVNVIGIDRGERNLIYVNCIDLKGRILLQKSFNIIGGFDYHQKLDLRERERGQARKSWNEIGTIKELKAGYLSGVVYEIARLMVEYNAIVVMEDLNGGFKRSRTGIEKQIYQKFEKALIDKLNYLVFKNESDWHVPGGLLNGYQLTGPLESFAKLGKQCGWLFYVPAAYTSKIDPSTGFVSLFKLSNYTNTEKRKAFFENFESIVYQTEQDAFVFAFDYKKFKDVESCWKTSWEVYSARRRLVYGRRSRQIEEINPTRLIKRALDKRGVVLSDGFDLKHYITSVEAVNENAAFFKDIFDAFGTTLQMRNSSGEEDYIESPVLNENGQFFDSRKAGKEWPRDADSNGAYHIALKGLLRMKSGQTAKLKRLDWFEFVQRRGFITE

SEQ ID NO: 788 - protein, 1255 aa, unidentified; identical to SEQ ID NO: 786
  REGION 1..1255: note = Category: MG59 effectors
  REGION 1..1255: note = Description: MG59-9 effector
  source 1..1255: note = uncultivated organism sequence

SEQ ID NO: 789 - protein, 1255 aa, unidentified; identical to SEQ ID NO: 786
  REGION 1..1255: note = Category: MG59 effectors
  REGION 1..1255: note = Description: MG59-9 effector
  source 1..1255: note = uncultivated organism sequence

SEQ ID NO: 790 - protein, 1280 aa, unidentified
  REGION 1..1280: note = Category: MG59 effectors
  REGION 1..1280: note = Description: MG59-10 effector
  source 1..1280: note = uncultivated organism sequence
MFKNFVGLYKMSKTLRFELKPVGATLANMKKSGVLERDFVRAEKYKMMKDILDLQHKALLERTLSSVDNFTRCMGEKERKKYAVILAENGVLNWEILAKAFEDFRTSSKDKESRDKLESVCASYRTLIAEIIKSDDKYKCLAASTPKDFIKEFLANEGSGDAAEKLAVETFNGFACYFTGFQENRSNIYSDKAQKTSAANRAVNENFPRYLKCCSLYDYVVKKYPDIIAEVELALGEKAKEFSASKCLTVGKYSDFLSQRGIEKINTLIGIFNQQINLKKQSDESARQDKKLGQMPVLYKQILSDRESASFSIEKFESDADVFSSIKNFGEFLKNNNVLTKLYNLIATVRIEDTIFVKRESLSEISNNLYGDWHELSAAIERVAEEKFSNITAKGHREKAIKQWISRNEYPLTDFVDAVRYDEKNNNWVTIDICDYWKNEKSKVLFELVESSWKALLPILDTDEKIGLRDRKDDVKAIKEYLDSILNVIRLVKPLSVGAELERDTDFYGQFDELYDILDDVVPLYNQARNYITSKPSEEKKLKLMFDSPTLADGWDQNQEEANKAVLLEKGGQFYLGIVNAKLGKKERPDFLKLRSRDSSNCYRKMVYKLLPGPNKMLPKVFFSNKGLPIYKPSPRLLERYKNGDYKKGATFDLQFCHQLIDFFKKSIAIHPDWSKFGFEFSPTSSYGGIDDFYREISNQGYKISFDSIDEKVIDSFVDSGALYLFKLHNKDFSSGSTGRQNLHTIYWRMLFASENLEDVIYKLNGEAELFYRRASIKNPYIHKFGKKLVNRIDREGKRIPDVAFGQLVKFADGEIAVGELSGVAKDLYDAGKVVMKDVKHEIIKDRRFAEDKFFFHVPITINAKANDKASRFNDFVNDAVRNFEDVNIIGIDRGERHLLYVTVIDNNGKILEQRSFNTIDIDRYDGKRIDVDYHAKLDQMEKDRDKARKSWSEIGKIKDLKSGYLSMVVHEIAKLMVKYNAIVVLEDLNGGFKRGRSAIEKQVYQKFEKAMIDKLNYLVFKDSEPLCLGGSLRGYQLADKFESFEKLGKQTGFIYYVPAAYTSKIDPTTGFTNIFDFKECTSAEGIKRFFNLFDSIKYSETDKAFIFAFDYNKFNTRFPSWNSKWEVYSASRRLVYSKDQKTDVEINPTDVIIDALVKRGVAITDEFNLGLYLKEMDATRENASLFKSVFYAFERTLQMRNSSAKTGEDYIESPVKNSSDGFFDSRKCGKELPENADANGAYHIALKGLMMVNELKTNETPKLAIKNEAWLEFVQRMRK

SEQ ID NO: 791 - protein, 1262 aa, unidentified
  REGION 1..1262: note = Category: MG59 effectors
  REGION 1..1262: note = Description: MG59-11 effector
  source 1..1262: note = uncultivated organism sequence
MAKNTKLSQFTGLYPVSKTLRFELKPMGKTLEKIKETGIIENDKKRHNDYFDAKKIIDKYHKYFIDAALSKFPRIDWNPLKEAIERSLDRSDASKKKLEKTQTEFRKKIAKALTTHDHYKELTASTPKELFLKVFPDHFGKQPAIDTFDGFSSYFTGFQENRQNIYSDEAISTAIPYRLVHDNFPKFLSNIEVYKTLKDNAPSVLSDAENELKDFLNGKSLANIFELNAYNDVLTQSGIDFFNQVIGGISGEGGEKKTRGINEFSNLYRQQHPEFAQKRLATKMIPLYKQILSDRETKSFILESYSTDSQVQESVKEFFESQILNCDIAGRKVNVLKELSSLIKRITEFDLGSIYVNQEELSNISLELFKSWNTINAILFKNAENRIGSAEKAANKKKIDAWMKNNEFSIATLNLAIAESDSEEISRVKIESYWNNFEAKVQSILCGDNRRNLDEFLSATFNENNALREDSKIIEKLKAFLDALIEIMHSIKPLISDAENRDLSFYNELTPLYDQLSLVVPLYNKIRNYATQKLTESEKFKLNFDNPTLADGWDQNKEDANTAILLLKNGLYYLGIMNAKNKPKIKDFKTSESEDCYDKMVYKLLPGPNKMLPKVFFSEKGLATFKPPKDILDGYNAGKHKKGDLFDIGFCHQLIDFFKESIAKHPDWKKFDFNFSDTSSYEDISGFYKEVTDQGYKITFSKIPTFQIDEWVNEGKLFLFQIYNKDFAPGAKGSPNLHTLYWKSVFSPENLKDVVVKLNGEAELFYRPSSVKKPYSHKVGEKLVNRIGKDGLPLPESVFGELFRYFNGKLDGELSDEAKRYLDVAVVKDVKHEIVKDRRYTQDKFEFHVPLTLNFKADSKNEYMNERVRQFLKDNPDVNIIGIDRGERHLLYMTLINQKGEILKQKSFNIVESVNYQAKLVQREKERDAARRSWSSVGKIKDLKEGFLSQVIHEITTTMIENNAIVVLEDLNFGFKRGRFCVERQVYQKFEKMLIDKLNYLVFKNKPEGDVGGVLKGYQLAEKFDSFQKLGKQSGFLFYIPAAYTSKIDPTTGFANLFNMTELTSAEKKKEFLSHFKDITYDGQNDRFSFSFDYKDFKCFQTDYIKKWTVYTQGKRIVYDKESKSAKEIFPVEIIKAALEKQNIALTDQLDVLSVINSVEASSKSASFFGDICYAFEKTLQMRNSIPNTDEDYLVSPVMNKRGEFYDSRSCGDTLPKNADANGAYHIALKGLYLIKNVFDAGGKDLKISHEDWFKFAQSRNC

SEQ ID NO: 792 - protein, 1271 aa, unidentified
  REGION 1..1271: note = Category: MG59 effectors
  REGION 1..1271: note = Description: MG59-12 effector
  source 1..1271: note = uncultivated organism sequence
MFEKFTGIYKVSKTLRFELKPIGKTAENMKKFNVLESDRVRDSQYERMKDILDAQHRALLERTLERVGKEEDVEDWVKLAEAYRKFRVGKKDKAARASLDKVLEAMRKSIVAAFGEDDLYKELVTESTPSKFIKRLVKDEMFKDSDEGRALDTFNGFACYFTGYQENRRNIYSDKPQTTATAYRAIDVNFPKFLDAVEVVRHIQDEYPKIIKLVEDELGDKLGGKRLATIFSVESYGSYLSQTGIDFFNLVLGGYAPKVGEKKRGLNEFINLELQQNECAASDAKLHKVAPLFKQILSDRESESFRFVAFEKDCDVIDAVKDFANRLEGDEIVGRLRKKLATLTKSEKIYVNGDASLTMVSKNLCGNWGALESCMRDAAEAKYKVLGTEKKIAKAVEEWMKSKAFALADLPDVTVADDKSEDGVKVYRVLDCWRGEPATAIFEALVTASAAVKGLPDNADDDEATLREDSKRVAVLKSYLDAVQDLLHLVKPLAVSAELDRDMNFYSEFDELYERLDEVVPLYNKVRNYVTKKVGEVEKMKLMFDCATLGDGWDLNKEQSNRCVILVKDGAYYLGIMRPRCKVSLDSLQSNSGADYKKMVYKYLPGPNKMLPKVVFSEKGKAKYKPSKELLDKYDKKCHIKSSPAFDIDFCHQLIDFFKDAINKNNDWSVFNFKFSPTKSYASIDGFYKEVTEQGYKIDFINVAIKDIDALVDRGDLFLFQIYNKDFAEGAKGRPNLHTLYWNAVFSPENLLNPIAQLNGGAELFCRPAAIKTPYAHEVGEKMLNRWTTAGEPIPETVFGELFKYINGRLSEIKLSAEAKSLLERKQLIIKPVKHRIVKDARYTCEKFFLHVPVAFNAFAGETYRFNDCVNAAVAANNNVNVIGLDRGERHLIYLTLINQKGEILLQKSFNTITGAAYDGHVREVDYQKKLTAMEKGRDAARKSWSEIGQIKDLKAGYISLVVHEIVSLMLKYDAIVVMEDLNFGFKRGRFKVERQVYQKFEKALIDKLNYLAFKDADTTSPGGVLKGYQLAAKFESFEKLGKQTGFVYYVPAGYTSKIDPTTGFTNLFNTKKCTSAAGIAEFFSRFDAITYDAGRNSFAFKFDYSNFKTSQTSWKKDWIVYSADRRLVFDVKTRVETEIHPTQIIFDALKKAGEKVADGYDLRAFLASVEPSKSNATIFRDIFYSFDRTLQMRNSCAATGEDYIASPVMNASGKFFDSRESGDDLPKNADANGAYHIALKGLYLVKNRLGKEKIDLKLTHEQWFEFVQNR

SEQ ID NO: 793 - protein, 1128 aa, unidentified
  REGION 1..1128: note = Category: MG60 effectors
  REGION 1..1128: note = Description: MG60-1 effector
  source 1..1128: note = uncultivated organism sequence
MVNLESFKNLYEVRKTVRFELKPYKKTREILKWDNNYQSLDSYIKHIKDWEFEDGFDWNDFCLWKYEDFLKESKKYYWFLLQINAEIQKWRNETTKKNIYFDFKKSKGIFKNIPSLKKIQWFEWLKSKLLEIQDEYQNYFNFFDQLQDKQHKNEKKSDISIHLRKIAYLNRNLFTIFNFFDIYKTHKEILDEYKEIIDYDFEKLNNSIIASHENEISGACFWKFTFNKFALFRREASPLKENFEANKQVLQKAVATMVENGEIVNDNWTIAGINTNQIHSLTLQKKNCYSLKFEEEIWTLQGRLEKFNFNRNLDEVISELDDINGQLLNQYIQNFVNGYKNDENVLEVSFYTDHEGNKIFDKSKKYDSYENGQKKEKFYPSLVKLDLEQFVEAQKRNQIKIQPGQTLKWYQYLNLLWKADLTDEEKEQKKIVNKFLQILFKQKFINPDYNTIKEFRDTLAKHRWKLRQNVRTSEREFIQEAMVRYYGQILEKNGCYFVALFDKDKLQNDIKNIVTDSQIKDKWMEGNYFKIYKYSQLSFSALEKLCLSKDWDLLSNSSLQKAWDKYKNQKKDIEWRCDFHKNWQDKSCTSCKSNEMQMRRSFLKAFKMHILQALEKLKNDEKYKWEDWSYLYWELKQKNSVEDIVSFINQKFYKLEEKYIEQEEVFKLADTWEILLFQVYSKDFNIFNSDFVSDEENLRDYEKDTWESQKTIGTSKREDGKQENLFTTYFKNIFKDDWETFLGQEWGIFFRKADSESDKKRFRSDKFFISLDILFNKGKQNNNAKLCESKEEKSKKHVKNTTLNIFNSIKNKDEITIMWIDRGSLSDELSVKNTKISMLWYVIITLRKEDKQYVLKEIKKSWDINWFIRGKGGGWKIVGKGQNMSSETNAKDYIDFKKILSNLKEEIQKELEKNNVKRNILKIIDKKEWITSLLISAISQLIQEYNVDYIALENLDNIYEDDKSFKKIMEERTLSTYLYQNLEVQLFKKLNYIYLKNEKVQDRQIFPICSIDEVKNLDSKNFFKIKESSNYDDYKMIWNIVFVKTSGTSSTCFNCENTIKKHGVVCKNCKISVKHDGSKLDLKDYKAKFVSKNILEKQNIQQDFNNDARAWLYIAKKAKEYLEYLFSH

SEQ ID NO: 794 - protein, 770 aa, unidentified
  REGION 1..770: note = Category: MG60 effectors
  REGION 1..770: note = Description: MG60-2 effector
  source 1..770: note = uncultivated organism sequence
LVKESKNNKNIKLFNLAYEWPLLNFVNENYRISNLEKKYLNLVQKLLIDLKDKDYKIWKNHKTWKYNLKNLSFLWDNFGLWDNSENKKIKNLEDLKIYFNDSWYKVIQKDVDLEKILKQVKAWELEIFQIKSKDMPFHKDFINDKNCWIIEEAKNEKSDGFKKDLNTLYFEQFFQDIAEWNKKTRIGADFKIRWINSSENNDYGSFWGKEKNQLRHLSNKENIEKFQNRFKRDRYSIEFSINLNATNHLTEEDFNTELSNKLKEKRETWSLRILSLDHGESSFLTYKIFEFSGENLEDIQIINTWWNFDNFQQEWNWPNRLQKNIQIDEKLVSYEGQEILDNYITKYHLMIQDQKRERQVEEAIKHFAKKSISKIKEIISADTVDKNKEWVSDMTKENVKKFIQYTIGYKEVFSLSNEENSIRNKNKGSNKSIENKKNGVEYSKRIEEFFQNKRLDVISLWEDTIRFDKINIFHILDYEFHFSYIKQEEWFIQKFPDQENIKEKIDTYLKQIQELLHDESKLIAFCNEVKKSFDWVSLADIDKLYNTPFYSYKTNFSLQLEQINNLKKWYVSALIGTISKWVRNWDVDVIALENNLLYYGVDNSKSFQKHMWAENHATFVEALINKLSFCLDKETNESYQFCYPIKVAERSQKFKNKNNGILIFVDEGITSLICPKCGQKLNRSKQDGDDHLHHNDKNPAWDKCQKEPFEIQKSKNIVGEYQGMRFHDWDDLATYNIAKKAKEYLESLPKKEDSEWSWKISGNITFTQSK

SEQ ID NO: 795 - protein, 1122 aa, unidentified
  REGION 1..1122: note = Category: MG60 effectors
  REGION 1..1122: note = Description: MG60-3 effector
  source 1..1122: note = uncultivated organism sequence
MEDLKNLFEVKKTVRFELKPYIETRKYLKWNNDYSTLNSYISHIKMEEFEKWFDWNEFCKSQYSDFLDKTEYISEFLEEVINELNKKNNDKKRKSIQFNFKWFKWVFKNIPSLKNIESFPRLKEKIEEMTESYKSSITFFDFKKDNDDKQSNQKQSDVSKELRKLAYLNRNFLTIFKYLWSNNGNETDEGILKKYEEVKNKLWENFKKLNSSIIASHQNETSGACIWKYTLNKYSLFRRETRKLKEKSRKSKKAIDKDVDFIIKNWIYDDKWFEIKLKKEDITNITLKTDFSDNFEKHIESLWLQYKLENFNFNRSLDEVIEELDLINAQLLNTYITYFKEEYEEFWESLLDIEFQTEFKIDNEWNNKPFNIYNNKSKPPKIRKLWYFSNEEGKYITLNQWQTLEWYEYLNLLDLEQKDLTDEEKYQKKLANKFLQIIFKQDFINRDYNNIKQFRDKLSKYRGKLRQDVKNSEREFISEGMIRYFWSILEKDWNYFLALTEKVDINWENKIDSIENIEIENTLNDNCIEWYFKIYKYHQLSFSAIEKLCLLKDWPDADNEKLIKYWDKYKYQKKDFKDYKDKSDFLSLFKKQIIDLVYLLKSDNKYNWYDFSSFLPKIEKFNSVEQIIEFIDHNFYKLEEKYISEEKLFKLADNKDILLFQIYNKDFNIYDEIFLSNEENIKEEKYSEKRKLLEIIDRKKDAKPNLFTLYWKDIFKNEAFLGQEWGVFFRKADLEKEEKRFRNNKFLVSFDVRFYKWKTIWDVKICDKKAQKTEKSYKKITLNYFNEIINKDKITILGIDRWSISSAINEKTKIAMLWFCVITLKKEKSNYILEDIVRTWDINWLIKETIKERNVNYIEFWKPVKKASGIKIDIDFKNVLLELKNNIMQEIEKKWQDRRDLQRILDKKIWLTSFLVNEIQKVIVEYDVNYVALENLDNIFNSTNKISFKKELEINTLSNYLYQNFETQLLNKLQLFTTKTNYNNKKQFIPNFKIDELKELPSNNWFLHTKTWKTIEHDFKDFKILWNTIFVWTAGTSSECFNCWEKIKKHWLICKNCNIDDRLKLKDYQENFVSKSILQNMDLQSDSKWKKLFNNDVRAWLVIAKKAKEYLEFLEKQKNNNS

SEQ ID NO: 796 - protein, 1165 aa, unidentified
  REGION 1..1165: note = Category: MG60 effectors
  REGION 1..1165: note = Description: MG60-4 effector
  source 1..1165: note = uncultivated organism sequence
MLQFADLKKKQITICQKLIPIGKTRENIDTFNAMANDEYVSDNKNEIKKLIKEMARFEIDEKLSNIKGSLDFTNLFTLMNKVDESENKEEILQELFFERAALAKTISSELNFKYTSAKTITEKLPKFISNNYDGDEKEKYLELVDKVKSRQAMFNRFEESIDFIAGELIKKNTLVYRLLVENSQIFLSNYKRIKEQDISSIITNLDVDDSIKTVLQNQCISFTPDNYNELLTQAKIDKYNYCISMINSELNVFCSVNKLSYSSYELKKLYKMILCEKDLLFEKINKFTDDEQVIDTYNDFITNVNDSNLFEKINSSAMDYDNIYIRPNFINAYSNITYGKWNIVSDCIKAHVEDLRLAGKNKITYEKYVENISIVKIDTIVNDYSSELGVKVNGRDYIEIIKEQLLHKYKEVTNDNISLKSDASIVSETIRKELDYALGTIRLLKLFDFENENFNSANEMALNEILDTLNPANLLYNMARNYITQKPSQKSKLNLVFDTNGFAGGWSESVESQKRVTLLKDDEGNKYLGIYNLNGCRANNTSVAAVVKNIQENLDTNSTKYYEKMIYSAVPDAAKDIPRLFINKSENNELIKKFKNKEHKENEEFKNELIEFIKRQIALHPTWSKYEFVYKDNYGSYKDFCNDINKQGYMLNWEKIDKSIIDNYVESGCIYLFRIHNNDYSKYKKTYSKVKAHTQYLDYLFSDENSKTKLIKLLGGAEVFYREPQIKNPYMHKKGSVLVNKKYKNGSPIGNEYKDLVIKAQTTALDNVFTKVSSRYIVKDNRYRKEQFELHFPILIGEERATDYEKICKNYIKNSNHTIVIGRGKNHLLYVSIYENNKVINAFPLDTVNGTNFKAKLEQIEELKNEQRKTWKNISSNRELLNGYVSAAIAPITDMVLKYKATVVIEIGDSSSKSRNLLPNRAYKIFKEALMKKLAFLTDKNKEMDEPGGLLHPYHLVNIDTRNPNRSINAAQNGIVMQVPAFYCALTDPESNLCNLTYAKTLKEKKQVLKKIGEIKYNKDEDIFTFIYDISKFNKDMKGVYECNSNGLRLIYNNNSEEKINLSQYLKNMLQCKSIDYKSGIINYDSEDKESIEAMFLIIRYTLQMLNKTFYISPVTNLTVQSNDCTESMINQNMYNRFLLLKDNLLLNKPTKYLSIKDVYSKLKP

SEQ ID NO: 797 - protein, 1165 aa, unidentified
  REGION 1..1165: note = Category: MG60 effectors
  REGION 1..1165: note = Description: MG60-5 effector
  source 1..1165: note = uncultivated organism sequence
MLQFADLKKKQITICQKLIPIGKTRENIDTFNAMANDEYVSDNKNEIKKLIKEMARFEIDEKLSNIKGSLDFTNLFTLMNKVDESENKEEILQELFFERAALAKTISSELNFKYTSAKTITEKLPKFISNNYDGDEKEKYLELVDKVKSRQAMFNRFEESIDFIAGELIKKSTLGYRLLVENSQIFLSNYKRIKEQDILSIMTNLDVDDSIKTVLQNQCISLTPDNYNELLTQAEIDKYNYCISMINSELNVFCSVNKLSYSSYELKKLYKMILCEKDLLFEKINKFTDDEQVIDTYNDFITNVNDSNLFEKINSSAMDYDNIYIRPNFINAYSNITYVKWNIVSDCIKAHVEDLRLAGKNKITYEKYVENISIVKIDTIVNDYSSELGVKVNGRDYIEIIKEQLLHQYKEVTNDNISLKSDASIVSETIRKELDYALGTIRLLKLFDFENENFNSANEMALNEILDTLNPANLLYNMARNYITQKPSQKSKLNLVFDTNGFAGGWSESVESQKRVTLLKDDEGNKYLGIYNLNGCRTNNTSVAAVVKNIQENLDTNSTKYYEKMIYSAVPDAAKDIPRLFINKSENNELIKKFKNKEHKENEEFKNELIEFIKRQIALHPTWSKYEFVYKDNYGSYEDFCNDINKQGYMLNWKKIDKSIIDNYVESGCIYLFRIHNNDYSKYKKTYSKVKAHTQYLDYLFSDENSKTKLIKLLGGAEVFYRKPQIKNPYMHKKGSVLVNKKYKNGSPIGNEYKDLVIKAQTTALDNVFTKVSSRYIVKDNRYRKEQFELHFPILIGEERATDYEKICKNYIKNSNHTIVIGRGKNHLLYVSIYENNKVINAFPLDTVNGTNFKAKLEQIEELKNEQRKTWKNISSNRELLNGYVSAAISPITDMVLKYKATVVIEIGDSSSKSRNLLPNRAYKIFKEALMKKLAFLTDKNKEMDEPGGLLHPYHFVNIDARNPNRSINAAQNGIVMQVPAFYCALTDPESNLCNLTYAKTLKEKKQVLKKIGEIKYNKDEDIFTFIYDISKFNKDMKGVYECNSNGLRLIYNNNSEEKINLSQYLKNMLQCKSIDYKSGIINYDSEDKESIEAMFLIIRYTLQMLNKTFYISPVTNLTVQSNDCTESMINQNMYNRFLLLKDNLLLNKPIKYLSIKDVYSKLKP

SEQ ID NO: 798 - protein, 1174 aa, unidentified
  REGION 1..1174: note = Category: MG60 effectors
  REGION 1..1174: note = Description: MG60-6 effector
  source 1..1174: note = uncultivated organism sequence
MNNLVKEQMAGLNKKTLTICQKLIPVGKTRENIDRFKAMEEDEFIKANREKVNVLIKKAAFEKIDNDLGSISKDIDFSDMFDLMGKYLECEGEGIEEISDKLFAERINLSTKLTSVFDFKFEGKDTIKVLLPEYLEKHDMDNKEELLELVEKVKSRQSMFNRYEGHIDSMLENVHKKGKFVYRILYENAIIFYNNIKKIKAFDYESVILNLEDEKNIKNNFLTKGFDSYNGFIRQSQINVYNYCVGAINYELNNYCQKNKLNYDKLELKKLNKMPLAETESFFEKIPTFDKDSDVIDAYNSVVCNINKEKITLDDKKAKSDEIIIKGSSIAKYSYNVYGNWKIVRDCLQLHCSDMVTAAKLKKSEKTLYDEYVNEGISVNLIHNIVTEYAPDLNISCTEVPLTQKIDTLMSGSFSECDYPKVSLKMNDCKEANYIRVTLDRILEARRLLCIYNTESVEFDMEFAELIESYLDILSPAILLYNMCRNYILAKPSARKKTSLTFNCTAFAQGWSEGVEYSKRVSLFKDEKENKYLAIYNALGCKESNMSVTGLVSEIYDNMTTEKQDDCYMKLVQNKTGNVSQALPRLFLNPTLSDEDRARFKAKEYNNDKEFLNHIINVVKTKIAEHETWKKYNFSFKDNYESYAEFVNDIQEQGYKTEWRYIKKSIIDDYVDGGMIYFFRIYNQDYSEFKSSDKLDIQTRYLNYLFSEENCDTDIVKLLANAEVFYREPQITNPYVHKQGSILVNKHYKDGKTVGVEYESIVKNIGDYNNVITKVAKHDIIKDKRYTVEQFELHMPLCIDNIRKETKKYDELSRKYIKESKNIITITKSRNHLLYVCVFDEKRNLLEQRSLDIANNVNYKEKIEIKEELKKINMESWKSVGSNQTIIEGYISCAIKDITDLVLKYDAVVVMEEESANADRNLLKNRNYKKFKTALINKLCYLVDNTKEDFEDGGTFKPYNLCNIEKEKDYKKIWNGIVIQVPAYYLSNKDVDSNFIELADTFANTNIQKKNVVKKFSDLRFNRNTKLFELKFESAKFKEDFKEVFICDSSGNRIVQNKKGVNEVNLTGTIKSELKKIGLEYATGENIFDYVDLKNKNHVTTLHKIIRLILQMYNVGANNSYFYSPVSHSLIRTDKDIYEVITCINLYERAMRVKKKISKDGKVKFKNLADIVIG

SEQ ID NO: 799 - protein, 1035 aa, unidentified
  REGION 1..1035: note = Category: MG60 effectors
  REGION 1..1035: note = Description: MG60-7 effector
  source 1..1035: note = uncultivated organism sequence
VKDSEIWYAIKIVSKLIIDNDFIKKDTELHNRLSQINRYNPNFWNFFELNTLNPFTVNRWKISEIINSYEISLNQYKETLVNLNKEAYTIANAILSDRYFENCRNQKESDGTVRYLFHIFSNCKNSSEKNVWQINHLILLVNKYESLKNGKKKYTNDEIELKIKRLNKELRQLAKVRSELLWYQIHLIDNFQTEKFSFLIQSWKYYFVWMKKMWWENNLSQFQEFIDGLESGDDKLLYLDSMTWGGFKRLFLSKQSDVVFTDGIRIKDLNRTILAKEEEILQLKKWIIEKIEKDINIYISKVTNDIFNEINSKEKIKFIEYLSQKWKKVDNLFKLWKKNRKQLIYGKELKEFGNSLYNFDSIKEQFNLDKLEKEYSDLVQKLLIKIKDKKYEIWKNNFKSLSFLWDNFKDRKFENLDDLKNYFNDSWYKVIVKNVNLEKILKQVKAWELEIFQIKSKDMPFHQDFINDKNCWIIEGVKTEKGGSFKKDLNTLYFEQFFQDIAEWNKNTRIGADFKIRWINSSENNDYKSFWKKEKNQLRHSNNKENIEKFKNRFKRDRYSIEFSINLNATNHLTEEDFNTKISNKLKEKRETWSLRILSLDHGESSFLTYKIYQVEGNKYSIINQWWNFDNFKEVQDWEDKTTKRQENMQIDEEKVLYKDQKILDSYITKYHAMIQDQKRERQVEEAIKHFARKSISKIKEIISADTIDKNKEWVSDTTKANVKKFIQRSIDKTWNKEKDSIVSVLGKFYFDYNKYSFKKYFPDQENIKEKIDTYLKEIQELLDDESKLIAFCNEVKKSFDWVSLADIDKLYNTPFYSYKTNFSLQLEQINNLKKWYVSALIGTISKWVRNWDVDVIALENNLLYYGVDNSKSFQKHMWAENHATFAEALINKLSFCLDKETSESYQFCYPIKVKDRKKLKDKNNGILFFVDQDTTSLICPQCEGKLKRDKADWEDYLYHNDENLAWDGCEEDPFEIKKSEGKKWEYNWIIFENWDDLATYNIGRKGVLMLEKIKENPEETDLLIRDNDWDGLVK

SEQ ID NO: 800 - protein, 1189 aa, unidentified; identical to SEQ ID NO: 690
  REGION 1..1189: note = Category: MG60 effectors
  REGION 1..1189: note = Description: MG60-8 effector
  source 1..1189: note = uncultivated organism sequence

SEQ ID NO: 801 - protein, 1144 aa, unidentified
  REGION 1..1144: note = Category: MG60 effectors
  REGION 1..1144: note = Description: MG60-10 effector
  source 1..1144: note = uncultivated organism sequence
MDKYQLTRTIRFKLKRFNGALQTEVDIAKKSTSDQELEKLLEELSMNMNSYNQRWSDFLYKLHEGKKNRRILNRIQVTPKWLELYARPFLYHKTSRPKHGKPLLTDYHGLPDYIENRLEEWQHLRETLDKLRTRPEHHQARRSEYALLIEKINIPQNFPFFYALADYAQDKDNEKYKNELIVIGERIYSLLSSLRKAYAPAQHTGIEIARASLNYFTINKKPKEYDDEIEQWLEEQNQEYTLADIKSKLSLNPIIIKPDIRDSLPDKATLGEWYSHLKTFKAEQRSALDNCMITSKSIEEWPILFKKINTNKAKELISLTSKITSNANKINNLYQILNDKKKSKRAKDVADKELKTIRNNQIQIKRKRGSIISKAPDFKNFVDAYATIAKENGKIKAKIRGLKKERQDSQLLNYWALLLENCKRHELLLIPRKNRKKVYKILEKLPKTNDKGEASVIYFKSLTLRALHKQIFSEDSTLKQNVVQQLKHDFPEMEGAYSMKDWEESKVVSLYQKVLKYCNDGTLSIDVGDFNIEELVSSSYSTIDKFRIALEKQCYIKRCLIDKSLYQELREREEFHLLSIESKDLNSSKPIQAMNEHTQLWKQFWSADNSKEFFPIRLNPEIKIRFREPKDTRIAKYRKKSGKYEKESGNYNPKKKNRYLHDQLTLEVTISENATGLRQELAFTKPHGLKEALDEYNQSFNKSYYPRNKLDDICFFGIDRGHTELATLLIIKKPNDNQASFQKFTTYRLIDLSHSRNYTTPERVEKTKYAKNNISDFIPDIENEDIFEKRETASLDLTTAKLIKGYIIENGDVNSYLNLKMLSAKRRIWEKHSISKIPEDISISLDQETGYFRFDTEIEEFKNPRKLYYFREELSDYLSEEDIKKELNSYLNKLRTKNQERDLLTLEKINHLRDAISSNITGILAYLLRKKEFIPGILVLEDLNTRLLESHFKDKSNEILGRRLEWKIYNKLSKMNLAPPQIKESTLLREDKKYKVKQFGSVLFVDETGTSNECPNCNKKPTDNFKEKSEKDEQKRLFELNKFQYKKYHCYHCGYDTKTNQMEFTDINNPDDLACFNIAKRGYEYILNPPKPKKTILKKTYSPKGKKQQGRKQAKNPPRTRKKPNKAATHNPFANLKDMMKKDN

SEQ ID NO: 802 - protein, 1143 aa, unidentified
  REGION 1..1143: note = Category: MG60 effectors
  REGION 1..1143: note = Description: MG60-11 effector
  source 1..1143: note = uncultivated organism sequence
MKTFAYKQQKSLTFGLVTKKNDPFIKDKKNNFTIQCREQEIKFNCDAGDRIYGDNLGGLQRIFHYMQNILHTIFTKEPYHRFTFSYEFTLVERKKLQTGRIAEKALKDKIWRKYEKQFQNLLNNISLFDEILEENENNFSKISHIVRIIRYINGDTQKIEHCISNYTYFGDKIEKKSALEEFKNFIQKNGDFGELLEFYSKLDKEQFEEYKIALNPVILNTHSEVNQQNWTQELDNLKMSLEALERKNNFNKNTKRFFEEDLEAYINYILYQKNFFKQSKNVEYKKNTQRIYEKYSNLSSNARYPEELVIDFIEGNEIDLENPYKVAQEELDKYLQQQESINSLKNLKSNINFVQLKTFLYQLTWKRAEIKENNKKSEEKLDYQKLSEYIVIIKGEINSRLKNTNYRYGEFIKSGGIKAQTAQKLGQKYGEYMQKLNFDKELKGYTHFGFIVKKGKRFFIKPYKKQDILNENQGFTLQNAENLLKEKVDVKGEYTAFLFQSLTLKGLLKLIFIKNAFNLDFRKEYKEIYQIWKQKKYIKDKSQSTKLIDFLIKILASNKGKELFPYVDNDFKKGDQYSKFQEFEKDLLKNSYKVKKYQCNFDENELIELDIVDRKFEYNDAVEPRLKRQNDIQILVEGFFSKQNFSFTRLLPEIKIFVRYQKLFDDMKKRVVSGMDNNGDKYKKEINEKKRFYKSVSKASFMLELNPCEIAGNPQKEKKEYQDYIIDLYKKRKDFHIISIDIGENSFATLGVYNSDLAPQKINVKWLPQQNENQNKDIIDITDLKIEKGEIVQINTKNSEKYKSYKNMFENILRSQIYLKDILEQVGEIDLKNENYNNIAKKIGESINRISELRFNTCNIIDEVKQAFPLLKNGLKQFLFSYIKSLHNGQDKAINITQYYHQIFEKLELQKVINFKDAFGANFVGVMKEILNRYPGIIVFESLHIGNNYDSYNDVIKKRLQNTTSEKSKEFRTFGTYIGMYIVQSLVNSFSKIIDIKNEKVNQLIYWEKNYETTIGKEKYSNNGILFFVDEKNTSSVCPICNGNFIQKIEKNGEVIEQENKYIKKLFGHGRGKEFENSMHHINDENDENYQKGKWKSGNLEKGDCDYHIGNKNYPEFEFIKSGDDLATYNIAKKAKEYLEKKQ

SEQ ID NO: 803 - protein, 1174 aa, unidentified
  REGION 1..1174: note = Category: MG60 effectors
  REGION 1..1174: note = Description: MG60-12 effector
  source 1..1174: note = uncultivated organism sequence
MQNYKITKTIRFKLEANPEQTEALLNQVEKSNQAFDLVFFTSKLKNFADGMRDYLMFQKGKEPEKWQFRKNFTIKKDWLKVYAKEELANIKQKQKEEQDKKSRRQPIQLNEGAKEIIQKSLGEVYAIYQELIQDVSKELNERARRERTGLLLKRLQEKNNLPLLCDLTEHISSGNETDNSIYELLKEKEMLQKELLQGIAEFLPAQSSGLPIAKATFNYYTINKKPTDYAQKIEEQLKELSISDYSKKIQINSKLFLGNDNFKKVMEDIRNRLKKDNITHLLFGHVPASISLGYEYRSLRQILKNIKAEQKKKFNELMMEDDFTYDKLKKEQDLYLFTSIKKEQFDEYLDKTRKIQELADKINDKSLSKEEKENLTSKKQTIAKKRGELLRDKFIDWKKFMEIYRSVAQKHGKILASLKGIEKEKVESQLLKYWALILKVNAQYKLVLIPRDKVQDAKKWIENHKNNKKTDTQELPQLYWFESLTFKSLQKLCWGHAETDNNEFRKNIISIIPKNKNNKPYTGEHEFEGKEQDKINFYKKVLQDKYTRDVVHLPFAQIDKEIISKNFDTLEDFKITLEKICYRRQVILNQDAEETLTKQFKAQILNITSLDLSRKSNESALKPHTQIWKNFWSDSNEKQHFDIRLNPEITITYRKPKPSRVHKYGKNSQNYDEKKKNRYLNPQFTLVTTMSEHCNAPQKNLSFITEEELKKEIDTFNQKFREKNQIKFAIGLDNGETELSTLGIFVPDFNKNTNEERLAQLRKVQEYGFEALTIKNLNYAERDYNGNPRKMIDNPSYFLNKSLYMRTFIKTEQEYERMFAEQFEKKHLLSLDLSAAKVICGHIVTNGDTRALFNLWMRHAERLIYFANDHIKEETAKKVLIKTIQELLPAEKEKLAESISKEKKYAKLSEQEKLRYFTWLFEDRKLYSFNEEENKKFNDILERKGNYAIGTVFSVTYLGEELVDVKSVFDIRLIFKKREEFYSILSEEEIMKELSRYNTNRTSHDLSNQELDLKLKTYKETIVANAIGVIDFLYKQYKQRFGGEGLIVKEDFDTSKIQEDLERFSGNIYRILERKLYQKFQNYGLVPPIKSLLSLRNQKVALDSIFNLGVVSFANPDKTSQQCPVCLEGKLYHGKKCDKCGFRATMMHSNDGIAGYNIAKRGFNNFQSLLPLKQ

SEQ ID NO: 804 - protein, 1147 aa, unidentified
  REGION 1..1147: note = Category: MG60 effectors
  REGION 1..1147: note = Description: MG60-13 effector
  source 1..1147: note = uncultivated organism sequence
MKTFAYKQQKSVTFGLIGKEGNPFVKEKKNNFKIKYREQEINFNCDARDRIYGDNLGGLQRIFHYMQNILHMIFAKEPYHRFTFSYEFTLVERKKLQTRRIAEKALKDKIWRKYEKQFQKLLNNISLFDEILEEKEDNFSKISHIVRIIRYINGDTQKLEHCISNYTYFGDKIEKKSALEEFKNFIQKNGDFGELLEFYSKLDKEQFEEYKIALNPAILNTHSEVNQQNWTQELDSLKRSLEALERKNNFNKNIKRFFEEDLEAYINYILYQKNFFKQSKNVEYKNKTQRIYEKYSNLSSNARYQEELVIDFIEGNEIDLENPYKVAQEELDKYLQQQESINSLKNLKSNINFVQLKTFLYQLTWKRAEIKENNKKSEEKLDYQKLSEYIVIIKGEINSRLENANYRYGEFIKRDGIKAQTAQKLGQKYGEYMQKLNFDKELKGYTHFGFIVRKGKRFFIRTYKKEDILNKNQGFTLQDAENLLKEKRDVKGEYTAFLFQSLTLKGLLKLIFIKNAFNLDFKEEYKIYQIWKQKKYIKDRFQSTKLIDFLIKILTSNKGKELFPYVDNYFKKGNQYSKFQEFEKDLLKNSYKVKKYQCNFDESELIELDIVDRKFEHNDAVEPRLKRQNDIQILVEGFFSKQNFSFIRLLPEIKIFVRYQKLFNDMKKRVVSGIDSNGDRYEKEINEKERFYKTISKASFMLELNPCRIGGTPQKEKKEYQDYIIDLYEKREDFHIISIDIGENSFATLGVYDRDLMPKKIDVKWLPQQNENQNKDIIDITDLKIEKGEIVQTNTKNSEKYKSYKNMFENILRYQIYLKDILEQVGEIELKKENYNNIAQKIEESINRISELRFNTGNIIDEVKQDFPLLKNGLKQLLFSYIQNLHNGQDKTINITQYYHQIFEKLELQKVINFKDAFGANFVGVMKEILNRYPGIIVFESLHTGNNYDSYNDVIKKRLQNTTSEKSKEFRTFGTYIGMYIVQSLVNSFSKIIDIKNEKVNQLIYWEKNYETTIGKEKYSNNGILFFVDEKNTSSVCPICNGNFIQKIKKNGEVIEQENKNIKKLFGHGRGKEFETSMHHINDENNKNYQRGKWKSGNLEKGDLCDYGIGNKNYPEFEFIKSGDDLATYNIAKKAKEYLESLSKKED

SEQ ID NO: 805 - protein, 1092 aa, unidentified
  REGION 1..1092: note = Category: MG60 effectors
  REGION 1..1092: note = Description: MG60-14 effector
  source 1..1092: note = uncultivated organism sequence
MLENLTNLYEVIKTLKFELKPSKFTLKRCDFDRAFEADPHALFEKLSSVHRFQEQILDLLKTSSKKIVIHKNLIKLIDADYFYQLKSKAISSNNTIAVLSQDFQEEFFNYIKEKFNRLHSTNYSLDYLLWADYLENPTTIDKKPTKSEIAFATKRYVHAIEKVEEILSNLIYKTNIDREIESLLANYYNNQDLKPLLKVAKSYLQSYSPTSFQVSKFGFNAKAIQKKVDVEKMEQEISLEKKMLDLEEKKIIATQIFDDYAKKFVQEKIKSDPKLLALRENQTASLDEIKRAKEYLKYLKEDFDYQKILKERSKARKEKRDSMIKFTDREYCELKLAKTDASVVYGRAKQAFFAKQQELYSQQALTHYARILRSENYFVAMIDRDDVSFLERLTNDKVNNEKFEILRYASLTARAVEKLIFEKNALKFNIYDKEYKECKMIREKRSYKEKNEDSRSKNEKQKENLKKLVLFLNSAIEQLNKKLEIFDWKPFLINDFDNFSEFQKYITENCYIARREAIDKQTIYDLDQKKLNFYQIFNKDFSVDPYCATTERDRSSTIKNINLQSKKNLFTLYWQSLYTENSTIRLNPESNLYFRPSRVRTEIDLCNDCEASKLRYRQNKIIGDFQLVFYPTKELPFDQLQQKILKNSEKSYAIGIDLGENSLATICLVDNEKKVVLDGNNKPIIKDLSMINNKDFVEVEDCFIDKPYERKQKLLIGTETKPYMLGRHFPKHLQNKVIAEMSQDMLFEVLQILESLAPEKLIVDKQNKVFDYNYAFEHLKAINKIRYHLQVFNHTNDEMRILEKDLLASIKIRFVKIVSYITQMAKKYNAIIVFENLDQEIGRIKRYLFSEQSYAKVSPKEERMYKGISPYQLMQDKIIQKCNYLLTKQEIKGMQISPRLKRQEDIKQLTLLKDKNCAWGKIIFVNEEDSSKECPNCGFVPKYSSNINIKDDIELMANKKDKKVFSFAGNQLLSERREAYQKISDIDKKKALLIETRVKTFLKSYMDIQGDPMICVNCGYDTRKTKRVEKYNLKSCDEIAAYIIAKRLEFMENKYKTQEVSISVGDSYNKPSDGEQDDSCVSGVKLSNISFS

SEQ ID NO: 806 - protein, 341 aa, unidentified
  REGION 1..341: note = Category: MG60 effectors
  REGION 1..341: note = Description: MG60-15 effector
  source 1..341: note = uncultivated organism sequence
MFENILRYQIYLKDILEQVGEIELKKENYNNIAQKIEESINRISELRFNTGNIIDEVKQDFPLLKNGLKQLLFSYIQNLHNGQDKTINITQYYHQIFEKLELQKVINFKDAFGANFVGVMKEILNRYPGIIVFESLHTGNNYDSYNDVIKKRLQNTTSEKSKEFRTFGTYIGMYIVQSLVNSFSKIIDIKNEKVNQLIYWEKNYETTIGKEKYSNNGILFFVDEKNTSSVCPICNGNFIQKIKKNGEVIEQENKNIKKLFGHGRGKEFETSMHHINDENNKNYQRGKWKSGNLEKGDLCDYGIGNKNYPEFEFIKSGDDLATYNIAKKAKEYLESLSKKED

SEQ ID NO: 807 - protein, 1123 aa, unidentified
  REGION 1..1123: note = Category: MG60 effectors
  REGION 1..1123: note = Description: MG60-16 effector
  source 1..1123: note = uncultivated organism sequence
MLENLTNLYEVIKTLKFELKPSKFTLKRCDFDRAFEADPHALFEKLRSVHRFQEQILDLLGKTSSKKIVIHKNLIKLIDADYFYQLKSKAISSNNTIAVLSQDFQEEFFNYIKEKFNRLHSTNYSLDYLLWADYLENPTTIDKKPTKSEIAFATKRYVHAIEKVEEILSNLIYKTGNIDREIESLLANYYNNQDLKPLLKVAKSYLQSYSPTSGFQVSKFGFNAKAIQKKVDVEKMEQEIGSLEKKMLDLEEKKIIATQIFDDYAKKFVQEKIKSDPKLLALRENQTASLDEIKRAKEYLKYLKEGDFDYQKILKERSKARKEKRDSMIKFTGDREYCELKLAKTDASVVYGRAKQAFFAKQQELYSQQALTHYARILRSEGNYFVAMIDRDDVSFLERLGTNDKVNNEKFEILRYASLTARAVEKLIFEKNALKFNIYDKEYKECKMIREKRSYKEKGNEDSRSKNEKQKENLKKLVLFLNSAIEQLNKKLEGGIFDWKPFLIGNDFDNFSEFQKYITENCYIARREAIDKQTIYDLDQKGKLNFYQIFNKDFSVDPYCATTERDRSSTIKNINLQSKKNLFTLYWQSLYTENSGTIRLNPESNLYFRPSRVRTEIDLCNDCEASKLRYRQNKIIGDFQLVFYPTKELPFDQLQQKILKNSEKSYAIGIDLGENSLATICLVDNEKKVVLDGNNKPIIKDLSMINNKGDFVEVEDCFIDGKPYERKQKLLIGGTETKPYMLGRHFPKHLQNKVIAEMSQDMLFEVLQILESLAPEKLGIVDKQGNKVFDYNYAFEHLKAINKIRYHLQVFNHTNDEMRILEKDLLASIKIRGGFVGKIVSYITQMAKKYNAIIVFENLDQEIGRIKGRYLFSEQSYAKVSPKEERMYKGISPYQLMQDKIIQKCNYLLTKQEIKGGMQISPRLKRQEDIKQLTLLKDKNCAWGKIIFVNEEDSSKECPNCGFVPGKYSSNINIKDDGIELMANKKDKKVFSFAENQLLSERREAYQKISDIDKKKALLIETRVGKTFLKSYMDIQGDPMICVNCGYDTRKTKRVEKYNLKSCDEIAAYIIAKRGLEFMENKGYETQEVSISVGGDSYNKPSDGEQDDSCVSGVKLSGNISFS

SEQ ID NO: 808 - protein, 1123 aa, unidentified
  REGION 1..1123: note = Category: MG60 effectors
  REGION 1..1123: note = Description: MG60-17 effector
  source 1..1123: note = uncultivated organism sequence
MLENLTNLYEVIKTLKFELKPSKFTLKRCDFDRAFEADPHALFEKLRSVHRFQEQILDLLGKTSSKKIVIHKNLIKLIDADYFYQLKSKAISSNNTIAVLSQDFQEEFFNYIKEKFNRLHSTNYSLDYLLWADYLENPTTIDKKPTKSEIAFATKRYVHAIEKVEEILSNLIYKTGNIDREIESLLANYYNNQDLKPLLKVAKSYLQSYSPTSGFQVSKFGFNAKAIQKKVDVEKMEQEIGSLEKKMLDLEEKKIIATQIFDDYAKKFVQEKIKSDPKLLALRENQTASLDEIKRAKEYLKYLKEGDFDYQKILKERSKARKEKRDSMIKFTGDREYCELKLAKTDASVVYGRAKQAFFAKQQELYSQQALTHYARILRSEGNYFVAMIDRDDVSFLERLGTNDKVNNEKFEILRYASLTARAVEKLIFEKNALKFNIYDKEYKECKMIREKRSYKEKGNEDSRSKNEKQKENLKKLVLFLNSAIEQLNKKLEGGIFDWKPFLIGNDFDNFSEFQKYITENCYIARREAIDKQTIYDLDQKGKLNFYQIFNKDFSVDPYCATTERDRSSTIKNINLQSKKNLFTLYWQSLYTENSGTIRLNPESNLYFRPSRVRTEIDLCNDCEASKLRYRQNKIIGDFQLVFYPTKELPFDQLQQKILKNSEKSYAIGIDLGENSLATICLVDNEKKVVLDGNNKPIIKDLSMINNKGDFVEVEDCFIDGKPYERKQKLLIGGTETKPYMLGRHFPKHLQNKVIAEMSQDMLFEVLQILESLAPEKLGIVDKQGNKVFDYNYAFEHLKAINKIRYHLQVFNHTNDEMRILEKDLLASIKIRGGFVGKIVSYITQMAKKYNAIIVFENLDQEIGRIKGRYLFSEQSYAKVSPKEERMYKGISPYQLMQDKIIQKCNYLLTKQEIKGGMQISPRLKRQEDIKQLTLLKDKNCAWGKIIFVNEEDSSKECPNCGFVPGKYSSNINIKDDGIELMANKKDKKVFSFAENQLLSERREAYQKISDIDKKKALLIETRVGKTFLKSYMDIQGDPMICVNCGYDTRKTKRVEKYNLKSCDEIAAYIIAKRGLEFMENKGYETQEVSISVGGDSYNKPSDGEQDDSCASGVKLSGNISFS

SEQ ID NO: 809 - protein, 1123 aa, unidentified
  REGION 1..1123: note = Category: MG60 effectors
  REGION 1..1123: note = Description: MG60-18 effector
  source 1..1123: note = uncultivated organism sequence
MLENLTNLYEVIKTLKFELKPSKFTLKRCDFDRAFEADPHALFEKLRSVHRFQEQILDLLGKTSSKKIIIHKNLIKLIDADYFYQLKSKAISSNNTIAVLSQDFQEEFFNYIKEKFNRLHSTNYSLDYLLWADYLENPTTIDKKPTKSEIAFATKRYVHAIEKVEEILSNLIYKTGNIDREIESLLANYYNNQDLKPLLKVAKSYLQSYSPTSGFQVSKFGFNAKAIQKKVDVEKMEQEIGSLEKKMLDLEEKKIIATQIFDDYAKKFVQEKIKSDPKLLALRENQTASLDEIKRAKEYLKYLKEGDFDYQKILKERSKARKEKRDSMIKFTGDREYCELKLAKTDASVVYGRAKQAFFAKQQELYSQQALTHYARILRSEGNYFVAMIDRDDVSFLERLGTNDKVNNEKFEILRYASLTARAVEKLIFEKNALKFNIYDKEYKECKMIREKRSYKEKGNEDSRSKNEKQKENLKKLVLFLNSAIEQLNKKLEGGIFDWKPFLIGNDFDNFSEFQKYIIENCYIARREAIDKQTIYDLDQKGKLNFYQIFNKDFSVDPYCATTERDRSSTIKNINLQSKKNLFTLYWQSLYTENSGTIRLNPESNLYFRPSRVRTEIDLCNDCEASKLRYRQNKIIGDFQLVFYPTKELPFDQLQQKILKNSEKSYAIGIDLGENSLATICLVDNEKKVVLDGNNKPIIKDLSMINNKGDFVEVEDCFIDGKPYERKQKLLIGGTETKPYMLGRHFPKHLQNKVIAEMSQDMLFEVLQILESLAPEKLGIVDKQGNKVFDYNYAFEHLKAINKIRYHLQVFNHTNDEMRILEKDLLASIKIRGGFVGKIVSYITQMAKKYNAIIVFENLDQEIGRIKGRYLFSEQSYAKVSPKEERMYKGISPYQLMQDKIIQKCNYLLTKQEIKGGMQISPRLKRQEDIKQLTLLKDKNCAWGKIIFVNEEDSSKECPNCGFVPGKYSSNINIKDDGIELMANKKDKKVFSFAENQLLSERREAYQKISDIDKKKALLIETRVGKTFLKSYMDIQGDPMICVNCGYDTRKTKRVEKYNLKSCDEIAAYIIAKRGLEFMENKGYETQEVSISVGGDSYNKPSDGEQDDSCVSGVKLSGNISFS

SEQ ID NO: 810 - protein, 552 aa, unidentified
  REGION 1..552: note = Category: MG60 effectors
  REGION 1..552: note = Description: MG60-19 effector
  source 1..552: note = uncultivated organism sequence
MEQHNFDFNEKDLVELDMVYRTFEHVKGVEPKLKRNDDFKLFVNGFFDKQDFDLIRMIPETKVFVRYQRNYDEPKKEKRGKKENIIPEERFYNTVIKGAFNFELKPLEADKNIAREKKKILKDILSKYENDDNFYITTIDIGENSLATLGVYDKNLKPQKLEYFSKDGEKITKEILDITNLKIKKGEIIEQDTDFSQKYKAYKYMFENIILWQIYLKEILEAIEEIEVIEQNYGEIKNRIGKAVNGSEIKNFVSKKKDDYDIKYIVGAFPELKEGLNNFLVNFIKKEYEGEKINFAEDKKVYHEIFQKLELQKVVDFKKAFGSNFVGVIKKIFRQYPGIIVFESLHTGDSYDGFNKIIKKKIKKVSSEKSHQFTSFGTYIGTKIVNLLFNKFTKDISENFNKIEQLVILDKNYENSVKLNSKEDKFINNGVLFFVHEKNTSKACPYCNERLTIENKEKGTLENIDDTKNLYGHGKGKEFEHSMCHINDVSDQNYENGKWTSGTLEGGKMCDFRIGNETYEKEFGFIHSGDELATYNIAKKAKEYLDFLKENN

SEQ ID NO: 811 - protein, 1112 aa, unidentified; identical to SEQ ID NO: 137
  REGION 1..1112: note = Category: MG60 effectors
  REGION 1..1112: note = Description: MG60-20 effector
  source 1..1112: note = uncultivated organism sequence

SEQ ID NO: 812 - protein, 1229 aa, unidentified
  REGION 1..1229: note = Category: MG60 effectors
  REGION 1..1229: note = Description: MG60-21 effector
  source 1..1229: note = uncultivated organism sequence
MQKTVFNDLKNIFKVTKTIELELKPIDKNNEIMEDKEINEIYGGFINEGCFLDREMPKVKDMIDNTIKRDIDYNLANVKINEDLLRNYYALHVQSISDDNADLLNEAKKKLYSDFGKQFVYNVKEGAKFINFLLSEYSHDETVYNILLPFKGKGTLFDDFIKTRKHIFSNEDKHGTVSFRLLDENINLYIYNIGVFNQALDIITKTSSFNKENANIWSTIEGYNSVLTQSSILSYNASIGEYNMAINEYNSKLGKETKKIPLFKALNKMILSDGESISFYNEVYTNNVAMFKDVRNIYTTLEKSFEKFADTLRGFNNFDLRYVYVSNKSIEGISSKMYGDYSLIGGLLKKNDFSKTESISIDNLNKCLCETDKKFDDYINIVFNWDNNGNSVFKLIKDSFNSLTCLKKGNDEAVLTDEDKVSLNEFMNLINDFKFFIKPFIISDTVLTDDDFYYTLNSLWETYKEYDKVYNKVRNWVTRKPYNDKQYRLYFGKSNLMNGFTHSQNQRQYNAYIFRKKNYIDEYDYYLGVSHNTKLFNETPSSEEDISEFECFNFFQTDNKGFYKIYKSCNNVKYKDEDCPKLFATFNDVIKRYNLSEGASHSKESESLEAYIKRLRNYYSEDFKSLLSIEESRGVYDMVFKHFKNTIAVQASKLSTFENLYKKCDDYTIDLLCEEIEKATKATIKEWTPISKNEMYEARNDINKPLYLMKITNKDLSFAEKLEKGLRQNKRGKDSLYTTYFKKLMNCEDGYKISVGKIFYRPKTEGLNERTFRHKANVAINNKNRNNAKKQSVFPYEIVKDKRFTRNMFKLQLSFDMNSELDSPQKANKIINETVIEKIKNGEIKHILGIDRGERNLLYATLIDFNGNIILQKALDKIGNVDYNELLTYREKDNKLRKKSWQTNGSIKELKNGFLSNAINEIVKIVFEYNAIIVMEDLTNGFKHSRSKVEKQVYENFEQSLTKKLSFCYLKGYNTESNGSRDAYQLSCPKDKIDNNSQNGIIFYVNPSYTSKIDPVSGFINVFNTRYENVKKAISFFEAFDDITYDENNENFIFNADLTKFKNNVTLPSGMKTNWKLSTHGERIRTYCDDKHANHWANENIILSDYFKKTFDELNINYQNNIKEQITSLKEKKDFEKLLDCMKLMLQMRNSIINSKVDYIISPVVDENGNYYDSRRSDGLLPIDADANGAFNIARKGLLTTRNLYNNTKKIMVDKKQWLNFVQNNFCKP

SEQ ID NO: 813 - protein, 771 aa, unidentified
  REGION 1..771: note = Category: MG60 effectors
  REGION 1..771: note = Description: MG60-22 effector
  source 1..771: note = uncultivated organism sequence
MANKRTDTTINLNKTVIMLTNMLPEVRAMFQAGIRQAQAYADLVNKWICSNLTNKIGEVLLPYIDNKNCVYYELCYKYKEAPLYTIFMKGKFDLNSRNNALYCAVVAQNIDNYSGNIFGFSQSDYRRNGYCKVVFSNYATKMSSLKPSIKKVTINEESTEETIQSQVIYEMFTNGRQWGKPEYFAEHLKYLEMKDNVSDKLMFRMKTLCEYYQTHTDLIDTMAMNAGVEALKQFEGLKLNRDKFSMTITTNSTSPYTLTRVAGTCAYNLHIPCRKRSYDIRLWGNRQTVRWVNGELVDIADIINQHGQTIIFTIKNGNVYVHIPYGLNFEKTEHEIKNVVGVDVNTKHMLMQTSIKDNGWVKGYVNIYKALVEDEEFVKYISKSDLKLYKDLSKYVSFCPLELNLLYTRYLSKKGLPFNEADNNAEKCVEKVLNNLVKQYEGDDVHVVNYIHNVKKLRALCKASFVLYKKYAELQKAFDDAQGYNDQSTETKETMDKRRWENPFIQTREAQELIAKMDNAVAGIIGCRDNIITYAYKVFGDNNYDTVGLENLTTSQFDNYSTVKSPKSLLSYYGLLGQQVDSDKYNAVMTESNKDWYDFKTDGDGNITDITLTAAGEAQKAKSLFNNKVLKNIHFADVKDKFIQLGNNGSIQTVLVPPSYTSQMDSKTHTIYVKETVDPKNKNKKKLKLVDKKLVRHGQEYHKNGLNADINAALNIAYIVENQEMREVMCLHPSKKDGVYDQPFLKATTKYPATVAGILLKMGKTTNWGEK

SEQ ID NO: 814 - protein, 1141 aa, unidentified
  REGION 1..1141: note = Category: MG60 effectors
  REGION 1..1141: note = Description: MG60-23 effector
  source 1..1141: note = uncultivated organism sequence
MINLENFKNLYEVRKSARFKIVPKKIFKQKEDRGSVYNTEDIVKQYKGIIKDLESILYYENFVPETQPLSNKLWDLFDFSKFESELEENEEISSLKNKESSDLIRIKHAWLQKYFTNDWHENKDSIISKRWDPKRNIEVKMKNWTTIWSVKFLKEFFESFFTDANKYFDVISKLLQVQDFERNRQSDIKLALQTIQWKDHLYKIYQLFEWGYIEHKNDNTSINELQEKLKVFKNNVNNYIENCRINDSFGLPLEYVSLNYYTRRKTQKDYDEEILKKSESLKKKFDWDLWELYWISKELEISDLYNNMKLFKANQKSAFLQLLQSQTPFSKLKNNFEYIDNKWERYSDYKIQLFDDITEENYNEMKDLTFQIEKSDDKKTRKELKEKRWKYFLFYCKKYEKFCDWYFYPKKGEDRKFFNWYKQVAMEFWKRKAEILSLEREKILAERERWYGFLSKDASNNYYINTFDIENTKNAYDFFSNQSQKQWEITYYILSSITLRALEKLCFSKSSNFYKWNIVQKIDGKFLKIQEVTGNKIFKSKRELEEEENLIEFFAEVLRLQNTLWIKFKSEKSLDNLKHCENMSDFEILLKQETYVLDEYKISKEDFEKALEKFKWNSFLIIDKDSDNHNKNSVFSQWWTRFWQKNNTENYILRINPELIISFRKWDTERFKGKISFHRRKNDAYMVSFSFSHFSDKSYITSEFIDDAERKENLKKFNDLYNENVTLEYIYWIDKWTNELVTLWIFKRWKNWLEKVDISEKIPVYRITKKGLKYFEDTETRDSNEKKKRYLSKNVSYFLKDLENNELFEKLDIDSCLWDLTYAKIIKWNIILNADIFTTVNLYKVTAKRFLNDAAFRGKIKNNTVLFDDENKSFYFEYENRWKLQKQNIFYWKDDFDYLPCDDIFQNLKEEVQNELNMYLTSISNEEDISMQRVNNYKNAISANIVWIITELQKHFNGYICYETLDAGQIEKKWFNTFIWNTLNEKIYNKLQLSLEVPPILKKFRTDIWAKETIQHWKIIYVNEKNTSSACPACNKTLLKIDENWILVDKDDKEVFKLFWHLTEFENAMHHINDENDENFQKWKWESGDLEKGGCDYHIGNENYPEFEFIKSWDDLATYNIAKKAKEYLESLSKKVIPQWS

SEQ ID NO: 815 - protein, 1203 aa, unidentified
  REGION 1..1203: note = Category: MG60 effectors
  REGION 1..1203: note = Description: MG60-24 effector
  source 1..1203: note = uncultivated organism sequence
MKHEITKTISAELKPFGNTNISDLKIYIDKDENLCVQRANAIKVLDERHKAFMSNTINTKLDFTTLESLMQRTGNEKEQNKERKSLCEQLIKFLKSRNEAEFKMLTASTPSKLINCIYKADNTIECLAPFANFSTYLSDYNTARKNIYAENNTSGSLGCRIITENFSIFIKNKHKYQKLVSEYASIIKDVVDNLPELHDFISKFASTNDYMTFSVQDNIVKYNAIVGEINKNINLYIQQHPDENKSPKKLHMKKLFKQILFDSESLFAVAPKITEEAELKELINTLWEEILQNGKVLDEVMELLKNIRQYDLSEIYITKNMATKLMYWKYNDSAYVRFIAKNITSNIVPISDVMEHIGLETYLQPMSGYKKDALLSYSAIKSFNEIMNNRVAVDRVHCFMNSLNDFRRIAEFITIDESLLSDDEFYDTYTELKGIMRLVSKAYDTVRNFINQRPKDISKKMKLVFGYADFMNGWDYDKIVNNVYGGAMFKKGNRIYIGLKPENDLFKKIRDVQEGEETMQFVKYKQLNPNQQIPRLFHKTEWIDKYTRQENPRANIQKILDKKVADKKYEYTEKESAALIKYYIYCLIESDYAEMYNLEFSDATEYKNINNFFETIKKSTYKIEFIDVALSQIEEWIDNKKIFMFSVHTKDYQPGAYGSKELFTMFLEQLFSEDNLKSNIIRLCGASTVMFRKQTIKNPYVHYKGSILLNKRDKDGNPIPSEIYLNLRDYLNGKLTKSELSKEEIAYLDRIKYKTAKEDIIKDRRYTEDKMFINLPITINKGCKLEINEFNKAIRKRAKYIISLDRGERNLLYYTVMDFKGNIIEEGSLNIIDGYNYQMKLSQLEKERKDEQRNWQATSQIKHIKNGYVGKAVYKICRLVIKYEGAIIAMESLNKTFCVKRDAAIGPSVYQYFQNALLKKLSYLVLKDRKPTEEGGILNGYQLTYCPDKIEDKLVQYGIVFFVNAGYTSKIDPVTGLTNQFKFDEYNTNEKATEFVKSFDYIRVNDNDVAEFGFKYSNFESFCGSNKNKKGKKEEADEAGKYCEREWNCIINGSRIISNKNKETKFWEYHNEDMRVELDKFCEKYNISKEHGTDIKSEMLLICESKPAMCKEFVSLIKKVMQLRNSNRNTGEDYIISPAMNRCGTYDSRNPGNAEKSLPTNGDSNGSRNIGIKCIMSLDMLKEQDKFFFNNEYYFCGLKKFSE

SEQ ID NO: 816 - protein, 1197 aa, unidentified
  REGION 1..1197: note = Category: MG60 effectors
  REGION 1..1197: note = Description: MG60-25 effector
  source 1..1197: note = uncultivated organism sequence
MFKQEITKTLSAALLPYGQTDVSSLQEVIDRDKKRHKYRKDIIKMIDERHKALLSKIKDAPLEFHRLEELLRKRNKDKKDTAARKELEAEQKALCQILIDWLSSNNRMEFAYLTASTPAKIVSEMFAKNPENKKLEVFDKFCTYLSDYSAARNTIYGTANKAGSVGCRLVTENFPIFIKNKDVYAKLSEEYPEILKTVAKNLPEQSGYIGAFASTDDYMMFSVQDGIKNYNAIVGETNKVINLYIQANPDTKTALKKLRMKNFYKQILFDDEALVAAAFPRIYSVKEFASLVHTIWEDVLDSGKVLDDMMVLLKNIRNYDTTGIFIKKNKIAFVSDKLYGEWNRIKDTIGETKDDYTALEALIFSDADFDNLFKDLNKFKSEAVLAYVEVNKFADDEMMSEDAVPHITELMYALNDFRKLVDIIAIPDDNVNSDPDFYNKYKEYSEKTAAIKSAYSTAYTFVTQRPEDISKKFRLSFDYSTFMKGWDIDKITKNEYGATMFSKDGRLFVGVTNKEKCPDFDDIHPANPGEETFRMLSYKKLGNSSRQIKHMFINDSTPDNIRKIVLGKKDDEAYEHSDMVKVIDYYKKCLVSRYSGIYDFNFSETSDYKTINDFFAEVDKFTYKVSFIDIPASQIDEWIAEKKLFMFIVHTKDYKVGAYGTKELFTIFFENLFTEDNLKNDVIRLAGGSSIVMRPKAVENPYRHKVGSILLNKRDKDGKPVPNKIYVSLSKYLNGRLKKKDLSRDALAYLDKVVWHKHQKEHIAVEDIVKDKRYTTDAFILHLPITINPGCRANEYEINEDARKNAKHTIGIDRGERNLLYVNVTDCRTNKVVEHRSLNEIEGYDYQLRLTQLEKERQDQQRNWRTQSQIKHLKKGYVGKAVHIICELMLKYENSIVVMEALPKEMMQKRGSAFGAVYSQFQQALLNKLSYLVVKDRKPLEKGGILNGYQFTIPPKTLEDKPRQYGSVLFVPPGYTSSIDPVTGFTNIFMYKKYDSSNKKAKNFTAKFDSIRINEDGIPELKFDYSNFKTFQKWPDRQWTCIIDGKRILRQKNQKTGVWEYEDVNVREAFNKLFGKYSKLEPGTDVKELIGKIRKTDADIDVKFVKLMKTVFRLRNSNPNTGEDYIISPALDVHGKTFDSRDQRNLELGLPVNGDSNGARNIALKGAMTLHNAGVTGKLVAVGNSEWMQNVQRFSSE

SEQ ID NO: 817 - protein, 1191 aa, unidentified
  REGION 1..1191: note = Category: MG60 effectors
  REGION 1..1191: note = Description: MG60-26 effector
  source 1..1191: note = uncultivated organism sequence
MLSNMHETTVNINKTSMNQFTNLFQVHKTVKFDLRPIGKTAELINSDGFLVSDDKEKAMAYLVVKCLIDEYYQKEVIAPILDNIKDNKEWNGLLEKYDKAKDGLERNAISKKLAGVIDKSKPTKPTAKALYTPLKDYVLTLKNAELQLILKDLQYDEVVIGGKTLRAAWNKELKEFVELAIDKFKNFTPYFETLATNIEQVFSGKKNGVAHRIVYQNLYTFIRNKKALDDLKIMVDEFSGEKEMLVGDFSYCLHQSGIDKYNKYIGQLVQRLKEYSDAHPKFSMWHKRFKKLNKQILSPQITPSWLPAAFTNDEMMVVAIRAFVNNTSPYLPALEEIIRQIATYDDHIFIYRKSLRSIAAQMTGDYTALDGSFEIPKSSSQKESLSLRWMSNEMKNKYFLYLNNSLSSALQSLKKSSSDAQDFLNLKKAGNNDYRRNNQASVCILRLMESYKQLYRLLRPLTGTGDENDRNEDFYGDFMPIVEALQPINNLFDSVRNWLTKASFSNDSYPVYLGKATLLDNWTNKVVFLKKDGKYFFLMLNGIQKDELQGGSTFDTIVYLPYSQAANRIDANLTRQFVFSKKPNASKGRNEPTMAKFVREHKAELAKEWERIKDGKYKVSDNKEEVEHAIRYFQKCLNMHPDYKNFDFGFLPAEEYDNYTSFVESLKGKLFRIEEKTASWESIIQLVEEGKVYLFQLYNKDYADNRASNSTSNLHTLYWESIFCQKNLLSYDFKLEEPKLYFREKADVVQKTGNIQSVPLRYQKPKIHLHIPILMNANAHKLKDLNLLVLEQIQNGYFSHIIGIDRGERNLLYYSVLDMNGNIVEQNSLNIINGINYHEKLMEKEVELDDERKKWKVRTGIRKLKEGYLGHAIHQLTNLIVEKNAILVLEDLSDSFKRGRQKKDMQIYQLFEKMLIEKLSFMVSKNVCNLNQEGCTFKALQLADPKIEMPKTGVKQNGIVFFVPPEYTSAIDPVTGFCNLFDRDRVKDIRNLLACFKSISYNSDKEWFEFEWDYQEVLQYTRLEQCANSFPWVTCSYGNRIEWSGSKSCHNLKCENVSLTSGFKALLGKYRVDYHSGANLKEMLRTINKKDDIKELKRLFFLMLSLRNKPDKDTDYILSPVQDVNGVFFDSRKMNKETKPQLPKNGDANGAYNIARKGLLSINKLNNGNNETLSIEEWVLSAKSNKVKLQT

SEQ ID NO: 818 - protein, 1200 aa, unidentified
  REGION 1..1200: note = Category: MG60 effectors
  REGION 1..1200: note = Description: MG60-27 effector
  source 1..1200: note = uncultivated organism sequence
MKKELAKTLSAELKPYGNTDINALKDIIANDETRFNARKEVIKLIDERHKAFLYHIKDVSLSFDKLEALVIEYNKDKKNNDVKKKLETFQKIMCDALINQLSSKYSEEFKRLIAPTPANIIAQLIAEYPDNENIRMFDRFCSYLIDYCTARRTMYSSKNVPNSAGHRLITENFSLFVKNKNAYTKLSNSYPSIVETVSKNLPELSEWSSSFANTSDYMEKFSVQDGITKYNAIVGEFNKAINLHIQNNPDDKKSLKSLRMKTLRKQILFDSESLFQTVAKIYTPAELKSTIQTLWEDVLENGNVLERMIALLGKFDQFDMKGVFFKKNKVGIISKQLFDGEPLKIRTALKEKYGKKDMEKRNYFPFQDIFDSEPESDIQKFFRDLNGYLSEARISFATINSSDDIMSESTLEYVKNFMDNLNDFRRISEVIAITDESTADTEFYNSYVELSEKMFVIKRAYNTVKNFVCQRPKDISKKFPLTFEYPEFMKGWDFDKTIKNIYGVMMFIKDGRIYIGVSNKKDAPNYKNIRPVSAGEESFRMVLYKQFKPNIQFPNMFNKDAPEDINKIFKSKKDKKSYDRKDTLKVIDYYKRRFIEKYVKIYDFKFSETSDYKNINDFYDEVSKFTYRISFIDVPTSQIDEWIDNKNLFMFVVSTKDYALGAHGSKELFTMYLESLFSEDNLKNDIIRLNGNSSIVMRPRVIDNPYKHKAGSVLLNKRDNDGNPIPNEIYTRLVKYLNGNLAKEELSENEASFLDKISHQKKSYDIVKDRRYTEDKFIIHLPITINHGCTISDKDFNTEIRKKFIANPDAHIIGIDRGERHILYVNVMDRNGKTVFEESLNVLDGYDYQMKLTQLEKQRRNQQRNWKTAGQIAHLKEGYVGKAVYEVCRLMLKYNAIVVMESLNKKFTTSRSAAFGPAVYAQFQRALLNKLNYLVLKERSPMEKGGILNGYQLAYLPKEGIGDNPVQFGSVFFVPAGYTSKIDPVTGFTSLFDFSEYETSNEKASKFTSSFDSIRINEENIPEVQFTYPKFKTHVKWPERKWSCAIKGERILSRKNQKTGYWEYNTVDVREEFDKLFENHGKKLEPGTDIKALMTEIRKSDASIDKEFVKLMKTVMHMRNSNPETGEDYILSPALDKYGKTFDSRNKENSSLGRPTNGDSNGARNIALKGLMMLNNEKDSGKFKCIKNEEWFRNIQKFSE

SEQ ID NO: 819 - protein, 1330 aa, unidentified
  REGION 1..1330: note = Category: MG60 effectors
  REGION 1..1330: note = Description: MG60-28 effector
  source 1..1330: note = uncultivated organism sequence
MEQFTNLYNVQRTLCFELEPVGVLPEKVQELLAIDKERNLLAPQVKEMMNELHKSFITRTLRNIMLIKDDEEEDISNAKSLIKIKDLLHSTCQLYAIPAKNDKDKDELEQKQAEFRNIISLLFTKDDFYAKLFGKDILDELHNHFTNDEGKLEILDKFKGFLGYFDTFRTNRKNMYVDAENETAIPFRIVNQNLPKFCDNLVAYQRLKSSDLAKCIATVYSDFEDMLNVESLDEYFCVDNYLNCLCQTDIQTYNYIIGGREQEGTKQLLKGLNQHINEFNQTHSKAERLPLFKPLFKQILSDKEKVSWLSEEFKTDRDMLQAIDQCYQDLAIILMGNEECSLPVLLKNISSFNQDGIYISNGKALNLISKRLYSGYSVITDALKQVWKANHERGRRESEENYEKKCNDTIKKTSSFSLSAINQALGITTGDGTNTIATYFAKFGSERECGKTYVQELSELYNEALSALHTKDKDIVNDDEKVGAIKALLDHLKCIQHFIEPLHMKNVEENADAEFYNIFDDIYEQLDNKLTGLYNRVRNRMSRKPYNDDKFQIFFENNSQVLRGWMDSKTENSDNGTQYGGYLFRKINEIGEYDYFLGVSKNVNLFRRFNEVAVADYSEYQRLNYCQLKSETFYGACYKSAVGNDFEQDKSRLTDMILKLCYKHGSENLQDAINKERRKSDPKKSKLSSPKSLLELIEKKDSECYEKILKNKSFLELDALVIESIKKTMASVNVKYLQNLANNDYDSFIQAMEVVDKGCKFGKIFDYFTISQSELDAALEDESKRLYLFKITNKDLSYSKNYKQRKSRGTDNLHTMFFKALMEGGYGTYDIGTGSLYYREMTPGLAKYKPTHPQNIPIDKKSDFFRKRGKQSVFEYDIQKDKRFTRNMFKFHLSINANYTCGNANKIMLNMLNTKVIDAIRNGRFKHIIGIDRGERHLLYVTVINLNGDIVEQFSMNIMESEKLIDGEPVVTNYKSLLDAKMNLRTEQKRTWRRQESIKDLKEGYLSQAVHKLTKLIVDKYQAIVVLENLSKGFMQTQIESAVYAKFEQMLITKLNLYIDKQKDKNAIGGLYHPLQLTSPYKSKSTASIQNGIIFYIPAWCTSKIDPVTGFVNYIRPKYENIQAAREFLSKFDDIRYNPEHDYFEFHIKDYTAFNPKAKSSRQDWIICTNGDRIRNFRDPNNNEWTSEKINLTREFKKLFESYKIDYNCNLLALILIQDKKDFFSNSNVKEPSLFPLLQLTLQLRNSFIKSDVDYILSPVADKNGCFYDSSKCGACLPNNADANGAFNIARKGLILVNRILSTPINEKLSLAISNEDWLNYAQSQQLSND

SEQ ID NO: 820 - protein, 767 aa, unidentified
  REGION 1..767: note = Category: MG60 effectors
  REGION 1..767: note = Description: MG60-29 effector
  source 1..767: note = uncultivated organism sequence
MAHKKQKEENEIIKTISLKVKDYAGYPIVEAMREYTKYYNKISQWINSNLLTINIGELSAFMPDECKTHNYYTYMMSPDWVNEPLYKMFMKGFHTQHCDNILFNVVKTLNIDEYTGNSLGLSASCFRRSGYFQNVVSNYKSKFANPHISIRRKNLSDLPTEDELLEQCIYEIQNGLSSKTKWEEQIEYLKERDDSKQIYLTRLNTLFTYYKANKDFVDEQMQIKSVESLANFGGCVRKNDKLSMNLVFSSNSPYKVVLNEKRNGYILSYSNNFSIELYGNRMGLLNGVEMFNIVDKHSNNITFKMDNDELFVNIPVSVNFVKKANETNKVVGVDVNLKHSIFATNIIDDGKLDGFVNIYRELLSDVDFVKSCHNDLLNFILDVEKYAFFMPLELGLLSSRVMNQCGYSTIGKYEKLFTTEEHFLRVLRQLEKRFQESGENQKRIYIENVIKMRAQLKAYVTLKYAYNKANKDYDLKMGFVDESTANKETMDQRRFENQFVNTDTAQEILGKMRRIANVITSCRNNIICYMYKIFENNGYGVVALEKLQSSQMKKEKRIPSLLSLLKKHKVEGYTINELKDKSVFKFIERGYYTFDFDDDNKITGVQFSDAGEAVNIETELHNLALKTIHFADAKDYFVTLSNNGSVSVALVPSQFTSQMDSTKHVLYAKKNNKGKLGIVSEHEVRPKQERHINGLNGDYNAACNIAYIFENDEWRNAFMKMNPNEYGKALFETNIESTSTIINTLKKINPDNIISFDECEKTKKVAA

SEQ ID NO: 821 - protein, 1180 aa, unidentified
  REGION 1..1180: note = Category: MG60 effectors
  REGION 1..1180: note = Description: MG60-30 effector
  source 1..1180: note = uncultivated organism sequence
MNQFTNLFQVHKTVKFDLRPIGKTAELINSDGFLVSDDKEKAMAYLVVKCLIDEYYQKEVIAPILDNIKDNKEWNGLLEKYDKAKDGLERNAISKKLAGVIDKSKPTKPTAKALYTPLKDYVLTLKNAELQLILKDLQYDEVVIGGKTLRAAWNKELKEFVELAIDKFKNFTPYFETLATNIEQVFSGKKNGVAHRIVYQNLYTFIRNKKALDDLKIMVDEFSGEKEMLVGDFSYCLHQSGIDKYNKYIGQLVQRLKEYSDAHPKFLMWHKRFKKLNKQILSPQITPSWLPAAFTNDEMMVVAIRAFVNNTSPYLPALEEIIRQIATYDDHIFIYRKSLRSISAQMTGDYITLDGSFEIPKSSSQKESLSLRWMSNEMKNKYFLYLNNSLSSALQSLKKASSDAQDFLNLKKAGNNDYRRNNQASVCILRLMESYKQLYRLLRPLTGTGDEDDRNEDFYGDFMPIVEALLPINNLFDSVRNWLTKASFSNDSYPIYLGKATLLDNWTNKVVFLKKDGKYFFLMLNGIQKDELQGGSTFDTIVYLPYSQAANRIDANLTRQFVFSKKPNASKGRNEPTMAKFVREHKAELANEWECIKDGKYKVSDSKEEVEHAIRYFQKCLNMHPDYKNFDFGFLPVEEYDNYTSFVESLKGKLFRIEEKTASWESIIQLVEEGKVYLFQLYNKDYADNRASNSTSNLHTLYWESIFCQKNLLSYDFKLEEPKLYFREKADVVQKTGNIHSVPLRYQKPKIHLHIPILMNANAHKSKDLNLLVLEQIQNGYFSHIIGIDRGERNLLYYSVLDMNGNIVEQNSLNIINGINYHEKLMEKEVELDDERKKWKVRTGIRKLKEGYLGHAIHQLTNLIVEKNAILVLEDLSDSFKRDRQKIDMQIYQLFEKMLIEKLSFMVSKNVCDVNQEKSTFRALQLADPKIEMSKTGIKQNGIVFFVPPEYTSAIDPVTGFCNLFDRDCVKDIRNLFACFKSISYNSGKDWFEFKWDYHDVMRYTRLAQCATPYSWVACSFGNRIEWSGSKSYHNLKCENVSLTSGFKALLDKYRVEYRSGENLKEMFGAINKKDDIKELKRLFFLTLSLRNKPDGDTDYILSPVQDVNGTFFDSRSVNKESLPQLPENGDANGAYNIARKGLLSINKLNNGNNEAISIEEWIQSAKYVKIKFTGPTLCV

SEQ ID NO: 822 - protein, 1321 aa, unidentified
  REGION 1..1321: note = Category: MG60 effectors
  REGION 1..1321: note = Description: MG60-31 effector
  source 1..1321: note = uncultivated organism sequence
MKQFTNLYNVQKTLCFELQPEGKLPETVHELLAKDEERYRLAPKVKEMMNDLHKSFITQTLQNIEVTKNGEKEEVSKAKSQIKELLYSIYHLYRRTNKSDEDKDELRQKQAELRYCLSLIFTKDSFYANLFSKSIIGELRNQFSDDRDKTEILDKFKGFWGYFDTFCTNRKNMYVADEQETAIPFRIANQNFPKFCDNLAVYQRIKSSVLVDCMTKVYSDFEDMLNVANLDEYFCIDNYLHCLCQTDIQAYNYIIGGREQEGTKVLLKGLNQYINEYNQTHSKMERLPLFKPLFKQILSGKEKVSWLPEEFKSDAEMLQAIDLCYKQLEVYLFDNENRSLSELLHNIGSFNPDGIYVQNGDSLNLISKRIYGNYSVISDALKQVWKRTHVKGKRESEEKYEKKCSDAIKRISAFSFSTINQALGIKSGNEKRTITDYFANFGSERESGKTYIQELSELYKDAKSALNTKDEDIINDDAKVGAIRGLLDQLKTILHFIEPLHMKNVEENSDADFYNIYDQIYEKLDKVTNLYNRVRNRLSRKPYNNNKYPIYFENNSKLLGGWPDSCTESSDNGTQYGGYLFRKLNEIGEYDYFLGISSNVKLFRRFKKVVPSDRSEFQRLNYYQLKSQTFYGGCYKTAIGHDFDEDKTKLIMCILKVCNHFASPELLDAINKEKLKDPKKSKLNSPKSFLDLIEKKDFECYEKIVVNKSFRKLDAIVTENIKKTMASVNIQFLQDAANNDYNSFLQAMDVVEKGCAAEKIFEFFPISQSELETALNSDSKRLFLFRITNKDLSYSQNYKQRKSRGTDNLHTMFFKALMEGGYGTYDLGTGSLYFREMTPGLAKGDPTHPKNVLIEKKSSFFRKQKKQSIFKYDIQKDRRYTRDMFKFHLSIKANYTCGNANETILNQKVIEAIRNGEVKHIIGIDRGERHLLYVTVIDLNGKLVDKFSMNIMESEKIIDGEKVKTDYKSLLDSRMNLRTEQKRTWRHQDNIKDLKEGYLSQVIHKLTKMIVDNQAIVVLENLSKGFMQTQIESSVYAKFEQMLITKLNLYIDKQKDKNQPGGLYKPLQLTSPYKSRTNARIQNGVVFYIPAWNTSKIDPVTGFVNFIHPKYENIMAAREFIGKFDNICYNVEQDYFEFHIKNYTAFNPKAKSSRQDWVICTKGKRIRNFRDPDNNNEWTSEEIDLTKEFKVLFDDYGIDYHSHLFDYILKQGKKDFFYNDNEKERKQSLFPLLKLMLQLRNSFIKSDIDYIISPVADKNGVFYDSRTCAAYLPDNADANGAFNIARKGLMLVKRILSTPIDKKISLTISNEEWLHYAQPKD

SEQ ID NO: 823 - protein, 1177 aa, unidentified
  REGION 1..1177: note = Category: MG60 effectors
  REGION 1..1177: note = Description: MG60-32 effector
  source 1..1177: note = uncultivated organism sequence
MEHLTNLFQVHKTVKFELRPIGKTEDLINKNGFLLSDDKERAMAYQVVKCLIDDYYQKEVIAPLLEKVKDNEDWNHNLVAYGDASDSNTRRAISQKLAAIIIKAKPNEPSANLLYTQLHNYLQKQNTGDLCHILKDLQYDEIAIKDRTLKAAWNYKLKDFVQDAIDKFNGFTLYFSALAVNMKQLFSRKKNGLAHRIIYQNLYTFVRNKRALDDLRVVIAEFRDEKDIAVTDFSNYLLQDGIDKYNKYIGQLIQRLKEYEDSHPNSSRWHRRFKQLNKQILSPRIAPDWLPAAFTNDEMMVVAICAFMKSVNPQLSALKEIINQIDTYNGPIFIYRKSLRSIAVQMTGDYKGLDDAFVIPKGYSKSESLSLQWTTPEVKQEFLGFLKDNLSAKLLSIQQASCEADEFLNLKKAEGNDYRRNNKASVSINKLMNAYKQLYNLLRPLTGTGDEEVRDEDFYGSYMPIVDALQPINELFDSVRNWLTKTAYSNESYPTYLGVATILKNWSSKAVYLKKDRKYYFCLASTKGEEKRDIHDILKKIWISNNCPKDAVIYLTRTQSPERITANLPRIFIRSKEADKVNSFVEKHPELKTEWEKLKGGGYKSPELKNEAISYFQKCLQLHDDYKYYKYHFRPAKEYDDYDSFVNSLKKEALFFFEEKPICWNELLQLVDDGKVYLFQLYNKDYADNRPGNSTPNLHTLYWEAVFSQQNRLSYDFKLEEPKLYFREKADVVQRTGDIHSVPLRYQTPKMHLHIPILMNANAQNTVDVNQLVLEQIQAGTFSHIIGIDRGERNLLYYSVLNMNGSIVEQESLNVINDVDYHKLLMEKEADLDDEQRKWKARSGIRKLKEGYLSHALHQLTNLIRKYNAILFVEDLDKAFKHSRQKIDMQIYQLFEKMLIEKLSFWVDKKVSDGNHAGSTFCALQLATPGLKQEEKGVRQNGILFFVPPEYTSAIDPVTGFCNLFDREHVKDVRRIFAHFKRVSYNVDKDWFEFEWDYQDVLQYTRLKECATPQPWVVCSMGERIEWTGSERYRNQKCESVDLTTEFKILFEKYNIQYVNGEDLKDAIASINKKEDINELKRLFFLTVSLRNKPNKDTDYILSPVCDANGVFFDSRLVNSEALAKLPVDGDANGAYNIGRKGLLSINKLKNGINEPLSLEEWVQSARQEIYQTTNQT

SEQ ID NO: 824 - protein, 782 aa, unidentified
  REGION 1..782: note = Category: MG60 effectors
  REGION 1..782: note = Description: MG60-33 effector
  source 1..782: note = uncultivated organism sequence
MAGHSKIKENHIMKAFLMKVKETRKNQWQSNFIRSEIAKFTNYYNGLSKFIADRLLDDMVTTLAPLIEEKKRDSEYYKYLTNGDWDGKPLYFIFKEGFNSTNADNILANSLVRVYCEQNYTGNGFGLSYSYYVVIGFAKEVIANYRSSFQKPKVKIKKKKLSENPTEDELIEQCIYTIYYEFNEKKDIKKWKDEIKFLKERGESKETRLKRIQTLFEFYKDKNHKELVDERVANLVVDNIKEFGGCKRDIGCPSMGIQIQHNFDISINEKRNGYTICFGPNKKNLTKLEVFGNRMVLLNGEEIVDLPNTHGEKLTLIDRGNAIYAALTAQVPFEKHMPDGNKTVGIDLNLKHSVFATSIVDNGKLAGYISIYKELLKDDEFVKYCPKDLLRFMKDASKYVFFAPIEIELLRSRVIYNKGYACVENYENVYKAEVAFVNVIKRLQSQCEANGDAQGALYMSYLSKMRAQLKNYINLKLAYYDHQSAYDLKMGFNDISAESKETIDERRKLFPFSKEKEAQEILAKMKNISNVIIACRNNIAVYMYKMFERNGYDFIGLEKLESSQMKKRQSRSFPTVKSLLNYHKLAGMTMDEIKKQEVSSNIKKGFYDLEFDADGKLYGAKYSNKGNVHFIEDEFYISGLKAIHFADMKDYFVRLSNNGKVSVALVPPSFTSQMDSVEHKFFMKKNANGKLIVADKKDVRSCQEKHKINGLNADYNAACNIGFIVEDDYMRESLLGSPTGGTYDTAYFDTKIQGSKGVYDKIKENGETYIAVLSDDVITAEE

SEQ ID NO: 825 - protein, 1318 aa, unidentified
  REGION 1..1318: note = Category: MG60 effectors
  REGION 1..1318: note = Description: MG60-34 effector
  source 1..1318: note = uncultivated organism sequence
MQQFTNLYNVQKTLCFELQPEGTLPEKVQELLANDKERYLLAPIVKEMMNELHKSFITQTLRNIVVEIKSDNEEIRNAKLLTKELLYTIYQLYKKANKSDEEKEELEQKQTELRICLSLVFTKDNFYGNLFNKEIMKELRNQVSNDEEKLNILDKFKGFFGYFDTFCTNRKNMYVADEQETAIPFRIANQNLPKFCDNLAVYQRLKSSSLSNCIATVYTDFEDMLNVASLDEYFCIDNYLHCLCQTDIQAYNYIIGGREQEGTNVLLKGLNQYINEYNQKNPKTERLPLFKPLFKQILSDKEKVSWLPEEFESDAEMLQAIKLCFKELEGFLCDKGSHSLPLLLQNIGSFKQDAIYIQNGEPLNLISKRLYGNYSVISDALKQVWKRDHVKGKRESEEKYEKKCSDAIKKISAFSFSTINQALGIMSGNEKRTIADYFANFGSERECGKTYIQELNELYKDAEPILNTKDKDIINDDTKVGAIKALLDQLKAILHFIEPLHMKNVEENSNTDFYNTYDQIYEQLDKVTSLYNQVRNRLSRKPYSNNKYPIYFENNSKLLGGWPDSCTETSDNGTQYGGYLFRKQNEIGEYDYFLGISANVKLFRRFKEVSPSDRSEYHRLNFYQLKTQTFYGGCYKTAIGHDFDEDKTKLITCILNNCNHYASSVLLDAINKEKSKVNSKLGSPKSLLELIEKKDMECYEKIVTDKQFRILDAMITGNIKKTMASVNIQFLQDAANNGYDSFIQAMNIVEKGCADERGFEYFPISQSELDAALTSNSKRLFLFKITNKDLSYSQNYKQRKSRGTDNLHTMFFKALMEGGYGTYTLGTGSLYFREETPGLAKDKPTHPQNVPIEKKSVFFRKQKKQSVFEYDIQKDRRFTRNMFKLHLSVKANYTCGNANETALNLKVIDAIRRGGIKHIIGIDRGERHLLYVTVIDFNGRLVDKFSMNIIESEKSIDGETVKTDYKNLLDSRMNLRTEQKRTWRRQENIKDLKEGYLSQVVHKLTKMIVDNQAIVVLENLSKGFMQTQIESSVYAKFEQMLITKLNLYIDKQKDKNQPGGLYMPLQLTSPYKSRANASIQNGVVFYIPAWNTSKIDPVTGFVNFLHPKYENIQNARDFISKFDNIYYDSDKGYFVFHISNYTAFNPKARCSRQNWDICTVGKRIRNYRDPDNNNEWKSEEIELTKEFKVLFDEYGIDYHSNLLDSILIQDNKSFFYNEDVRKPSLFPLIKLMVQLRNSFIKSDVDYISSPVADTKGIFYDSNNCGSHLPNNADANGAFNIARKGLMLVERITATPPEKKLSLIITNEEWLHYAQSQNK

SEQ ID NO: 826 - protein, 1197 aa, unidentified
  REGION 1..1197: note = Category: MG60 effectors
  REGION 1..1197: note = Description: MG60-35 effector
  source 1..1197: note = uncultivated organism sequence
MNKIEIQKTLRAELKPYGKTDVNSFKDVIERDRTRYESKREVMSMIDERHKTFLSCITDAPLDFTHLEDVLSKFNTNKKDTTLKKELESLQKEMCAELVEWIASNNKAEFTRLTAATPAGIITELSLQYPENKKLSLFTNFASYLIDYSNARSNMYSKANKHGSIAHRLITENFQIFVRNKTAYMQLLEKIPNFKSDVQEALPQFADVISAFASTDKYMMFASQDGIMRYNAVAGKINEIINLHIQENPDDKKSFKKLRTKQLYKQLLFDAESVLQKFRKIHDEDELREVMKTLWEETLDFGKTIEELDELLCTIDNYDKNGIFIKKRGLSGLSKYIHDDYLTVSKQLKKKYGKNAMKTHESFQLSDIAEKNVSLNDFFSDLKKYQSIALITYALINSSDDLLSDKSICDIHDFMENLNNFCRLSGIIATTDNPEADAQFYNNYDERAEKTSAIKNAFNAVKSFVCRRPKDIEMKFPLTFNYPHFMEGWDFDKIVNNVYGATLFTKDNRIYVGVLNRKAGMKFDDIRPAKPGEEFFHMVVYKQFGKPDKQLPNLFKSTAPEEIAILMDAKKEGRPYDMAKLIDYYKRCLKERYGNLYDLKFSETSEYKTFDDFTREVVQCTYHISFIDVPASQIDEWIETKKMYMFIVSTKDYAAGAHGSKELFTIFLENIFSKDNMHNDIIRLNGGARIMMRPKVLDKSFTHKKGSILLCKRDVLGNPIPSEAYDLLSRHLNGWTRSDEKNLAQKTMAEYKDIIRYKTAKYDIVKDKRYTRDMFTISLPITINAGYKIHYAEFNREVRRKFMKSDNAHIIGIDRGERNMLYITIIDKNGKTVLQKSLNMMDGYDFHMKLEQLENQRRDNQRNWKASGNIKHLKDGYSGKAVYEIYRLMLEYNAIIVMENLNEKFMTSRNAAFGTAVYTNFQNALINKLSYIVLKERKPMDEGGILNGYQFAYPVKEIGENVNQIGAVFFVPAGYTSKVDPITGFTSLIDFSDYESSDKKAAKFTNSFDSIRINEHGLLETKFKHDKFKTHIKNTGCEYTCIADGQRILTHKNQETGGWEYVDVDVRTEMNNMLEKYGISTSPGTDIKDEITKLRKNNPSIDKDFLTVMKTVMHMRNSNPHTGEDYIISPAVDKHGMTFDSRDIGNDAAGRPVNGDSNGARNIALKALIMLNNEQANGEFRSIKNTEWFSEIPKFSN

SEQ ID NO: 827 - protein, 758 aa, unidentified
  REGION 1..758: note = Category: MG60 effectors
  REGION 1..758: note = Description: MG60-36 effector
  source 1..758: note = uncultivated organism sequence
MLCQTGKSDTLFAYTVSPGKPERQGAGLAAEAVKEGKNMRIIKRSGTEVAFDITKIVAAVEKANKEVVETDRLSLEQIKEIAKKVTLTCSSMNRTFGVEEIQDLVENEIMEMQAFEVARKYITYRYKRALVRKANSTDEQILSLIECNNEEVKQENSNKNPVVNSVQRDYMAGEVSKDITKRFLLPEKIVKAHEAGIIHFHDSDYFAQHMHNCCLVNLEDMLQNGTVISETMIDRPKSFSTACNIATQSIAQIASSQYGGQSITLSHLAPFVDVSRKKYLKMVKEEYDAAGLQIDDSQIASIAELRVREEIKRGVQMIQYQVITLMTTNGQAPFVTVFMYLDEVPEGRTRDDLALVIEEMLTQRILGVKNEKGVYITPAFPKLIYVLEEDNVREGSKYWALTQLAAKCTAKRMVPDYISEKVMKKLKDGNCYPCMGCRSFLTVYHDESNRPKFYGRFNQGVVTLNLVDVACSSKGDMEQFWNILDERLQLCYEALMCRHNRLKGTPSDVAPILWQYGALARLKKGETIDKLLYNGYSTISLGYAGLCECTRYMTGLSHTNPEATPFALEVMQRLNDACAKWKAETNIDFSIYGTPLESTTYKFAKCLQKRFGKIEGVTDKNYITNSYHVHVTEEIDAFKKLTFESKFQELSPGGAVSYVEVPNMQNNIDAVLSVMQHIYDNIMYAELNTKSDYCQQCGFDGEIQISSDKEGKLIWRCPNCGNTDQDTMNVARRTCGYIGTQFWNQGRTQEIKERVLHL

SEQ ID NO: 828 - protein, 997 aa, unidentified
  REGION 1..997: note = Category: MG60 effectors
  REGION 1..997: note = Description: MG60-37 effector
  source 1..997: note = uncultivated organism sequence
MNSILDIAAQFLSENTNPIMESFHDESVDQAKKYIENNYDELYKFKGFQKFAPIKPSNLKEFANTKVRDIQRLIISPFIYAPRNELKWMNSYVLGLTRIMYKDLLYDKPKFKKNLLQDLKKIYLTAVYARQDGIANGDKSLMMDKNMNNLSFNELKTKFMPLFNHYYDIYKKNKQEYINIHTRNATTNTNLVANTAIKYDGAGNELNDTEYEEPYHENSFKIGKYNACLIPNHKAAATWNRFTNKTSDSNGCNWCITIPSTDDHWESYECGKTRTVYFCWTDNFLNLNIKDFNDGSAPYNEWGKSLMCVMVNDSDDINKFVCQVTSRYNHCNGKGENASSSLGFGDYFCGDPDSEGLAANLAQILGCSAEDIQEKFLFDGDMDASSEKGEQIYEDIAERINYYLERHNFNNLEVDTILPDNYVLATYSDKDYTVNVLLKNNTLVPNFIYTYIYPIYIGKTIDDCIFEVIDATAEYSDRTKNIAYGPNADTYFDHDMAEIIPIYKLNRSYSSEYNDEKYKTKHRIVALAPYHNHEYNLFDLDKKEFMLNDEFFIQSVFEKDGQLNLAITTGENSAERNISNVCVYNIDTKKTYYIKNEYLTDLQARLGDNYLRFNNAYMYANESNVILFDLLNMKPIEGNYTYVLESRIAFKDYLITLDESAKNFDYTIFYKGNVIDTFPARTHIYCPKDNTRSTDVFIINYNNDSESRIYYKGKLIYASNSETDNIKTSRGPFVIGNVLYVRLKEEKNITNDYSAQAFKLIDINTQKVITEDICMDGEYALETAVRKDIPVLAFKVNPKTNAIEYVVIDNNGKINNLNNEEDEFIDYNILKSGDSTVIASDSEIRINDGDANITMQYIKFYSNAKIKLYNPDGSIFYKPNDDDFQGLNYVSLAPLGYGFWLLTRKIKYSRIGLLEIHDIIDKNGKLIIGNTDSSPVSINIIDNFNENEDLLITATKYAKDIDSRDYSISKNGELKKLPYGWQSANENYIQNLAAYLL

SEQ ID NO: 829 - protein, 758 aa, unidentified
  REGION 1..758: note = Category: MG60 effectors
  REGION 1..758: note = Description: MG60-38 effector
  source 1..758: note = uncultivated organism sequence
MLCQTGKSDTLFAYTVSPGKPERQGAGLAAEAVKEGKNMRIIKRSGTEVAFDITKIVAAVEKANKEVVETDRLSLEQIKEIAKKVTLTCSSMNRTFGVEEIQDLVENEIMEMQAFEVARKYITYRYKRALVRKANSTDEQILSLIECNNEEVKQENSNKNPVVNSVQRDYMAGEVSKDITKRFLLPEKIVKAHEAGIIHFHDSDYFAQHMHNCCLVNLEDMLQNGTVISETMIDRPKSFSTACNIATQSIAQIASSQYGGQSITLSHLAPFVDVSRKKYLKMVKEEYDAAGLQIDDSQIASIAELRVREEIKRGVQMIQYQVITLMTTNGQAPFVTVFMYLDEVPEGRTRDDLALVIEEMLTQRILGVKNEKGVYITPAFPKLIYVLEEDNVREGSKYWALTQLAAKCTAKRMVPDYISEKVMKKLKDGNCYPCMGCRSFLTVYHDESNRPKFYGRFNQGVVTLNLVDVACSSKGDMEQFWNILEERLQLCYEALMCRHNRLKGTPSDVAPILWQYGALARLKKGETIDKLLYNGYSTISLGYAGLCECTRYMTGLSHTNPEATPFALEVMQRLNDACAKWKAETNIDFSIYGTPLESTTYKFAKCLQKRFGKIEGVTDKNYITNSYHVHVTEEIDAFKKLTFESKFQELSPGGAVSYVEVPNMQNNIDAVLSVMQHIYDNIMYAELNTKSDYCQQCGFDGEIQISSDKEGKLIWRCPNCGNTDQDTMNVARRTCGYIGTQFWNQGRTQEIKERVLHL

SEQ ID NO: 830 - protein, 1255 aa, unidentified
  REGION 1..1255: note = Category: MG60 effectors
  REGION 1..1255: note = Description: MG60-39 effector
  source 1..1255: note = uncultivated organism sequence
MNKILLTDAVPDIEKYWDYEANEGKKPSDFGASSSEKVWTKCPICGTSVKRNIRYTWEKDKNGVGHVIHCRTCGKRNNNNSLVVLFPDIKKHWIYEKNEHDPEYYSISSGKKVYTRCPSCGEERYIAICDLIVKRNDRYELTQCIECSPKRNVIGSIAKNYPDIDKYWDDSNASNPDEIALNSQEIIFIHCPTCDKVVKRKALNSFRRDDQTGLYMLLDCHKCATQKAGKIRGLNQSGALIDKCPEIEEWWDAENNTIEFKNITRGSHYEAQLKCPACHSSFTRQIHSFVNVKRDGRLLPVACPECGYSSKGDPKDNILKLCPEVEQWWDYEANSPYRPEQFSKGSQFQAHFICPDCGMHLYTGIHSLLKSDENGNLHIRHKGKCLKYRSMESDNNLVKQYPQIKEWWDYEENGKALPEEFTIYSGKRMHFICPQCGAKSYRRITDAFAIEANSGEPILFNCPYCRNKKVLAGKNSLLDTDPELAKEWSPNNNKKANEVLSKSFNRVQWICPNCKGEYSAIIRDRKVGDDACPYCKNDKVLTGFNSLQDKNPELAEEWSANNVLKANEVLPTSSSCVKWVCPTCRGEYSAIIRGRKVGDDACPYCRYDKLLPGYNSLLNTDPELAKEWSNSNDMKADEVLPTSSSRVKWVCPICRGEYSAIIRERKVGDDACPYCRYDKLLPGYNSLLNTDPELAKEWSNSNDMKADEVLPTSSSRVKWVCPTCKGEYSAIIRDRKVGDDACPYCRQTKLLKEQTSLGVINPELAKEWSANNVRKADEVLPTSSFRVKWVCPTCRGEYSAIIRDRKVGDDACPYCRKDKLLPGYNSLLDTNPELAKEWSDSNDLKADEVLPTSSSRALWICPTCRGEYYAAIRDRKVGDDACPYCRNDKLLPGYNSLLDTDPELAKEWSDSNDLKADEVLPTSSSRALWICPTCRGEYYAAIRDRKVGDDACPYCRNDKLLPGYNSLLDTDPELAKEWSDSNDLKADEVLPTSSSRALWICPTCRGEYYAAIRDRKVGDDACPYCRNDKLLPGYNSLLDTDPELAKEWSDSNDLKADEVLPTSSSRALWICPTCRGEYYAAIRDRKVGDDACPYCRNDKLLPGYNSLLDTDPELAKEWSDSNDLKADEVLPTSSSRALWICPTCRGEYYAAIRDRKVGDDACPYCRNDKLLPGYNSLKVRQPELVEREWCYPENILIGVYPDQILESYPGQAWWKCPTCKRKYLMSVKDRLMKQKRGHVACSQCRGRRWVRSFWV

SEQ ID NO: 831 - protein, 768 aa, unidentified
  REGION 1..768: note = Category: MG60 effectors
  REGION 1..768: note = Description: MG60-40 effector
  source 1..768: note = uncultivated organism sequence
MFCSCKKNLRVVIYIYDATKTYDCAKKLIVYKSIIKGAEVMKIIKRNGAEETFDRQKIKDAIAKANNETDGTPELTDRQIDYISLVIEDHCNEMNRALSVEEIQELVETHIILQGAPETAKRYIRYRFTRNLARASNTTDNQILSLIECNNEEVKQENSNKNPTVNSVQRDYMAGEVSKDLTKRILLPEDIVKAHEEGLIHFHDADYFAQHMHNCDLVNLEDMLQNGTVISGTMIEKPHSFSTACNIATQIIAQVASNQYGGQSISLAHLAPFVQISREKITRQVRAEMEEFGIDADDEQVKSLVEKRVRDEIKRGVQTIQYQVVTLLTTNGQAPFVTVFMYLNEAKNEQEKKDLAIIIEEVLKQRIKGTKNEVGVWVTPAFPKLIYVLEEDNITEDSRFWYLTKLAAECTAKRMVPDYISEKIMLKLKIDKNGNGNCYTCMGCRSFLTPYVDENGKPKYYGRFNQGVVTINLVDVACTAARDGNKSEEKFWQVLDERLELCHRALQCRHERLEGTLSDAAPILWQYGALARLKKGEPIDKLLHGGYSTLSLGYAGLWECVYEITGKKLTEKEGEEFGLRVMQRLNDACAEWKAAENIDYSIYGTPLESTTYKFAKCLQNRFGIIKGVTDRNYITNSYHIHVTEKIDAFSKLELESKFQKLSPGGAISYVEVPNMQQNIPAVLEVMKFIYNNIMYAELNTKSDYCQVCGYDGEIQIVEEDGKLVWRCPNCGNEDQSKMNVARRTCGYIGSQFWNQGRTQEIKERVLHL

SEQ ID NO: 832 - protein, 768 aa, unidentified
  REGION 1..768: note = Category: MG60 effectors
  REGION 1..768: note = Description: MG60-41 effector
  source 1..768: note = uncultivated organism sequence
MFCSCKKNLCVVIYIYDATKTYDCAKKLIVYKSIIKGAEVMKIIKRNGAEETFDRQKIKDAIAKANNETDGTPELTDRQIDYISLVIEDHCNEMNRALSVEEIQELVETHIILQGAPETAKRYIRYRFTRNLARASNTTDNQILSLIECNNEEVKQENSNKNPTVNSVQRDYMAGEVSKDLTKRILLPEDIVKAHEEGLIHFHDADYFAQHMHNCDLVNLEDMLQNGTVISGTMIEKPHSFSTACNIATQIIAQVASNQYGGQSISLAHLAPFVQISREKITRQVRAEMEEFGIDADDEQVKSLVEKRVRDEIKRGVQTIQYQVVTLLTTNGQAPFVTVFMYLNEAKNEQEKKDLAIIIEEVLKQRIKGTKNEVGVWVTPAFPKLIYVLEEDNITEDSRFWYLTKLAAECTAKRMVPDYISEKIMLKLKIDKNGNGNCYTCMGCRSFLTPYVDENGKPKYYGRFNQGVVTINLVDVACTAARDGNKSEEKFWQVLDERLELCHRALQCRHERLEGTLSDAAPILWQYGALARLKKGEPIDKLLHGGYSTLSLGYAGLWECVYEITGKKLTEKEGEEFGLRVMQRLNDACAEWKAAENIDYSIYGTPLESTTYKFAKCLQNRFGIIKGVTDRNYITNSYHVHVTEKIDAFSKLELESKFQKLSPGGAISYVEVPNMQQNIPAVLEVMKFIYNNIMYAELNTKSDYCQVCGYDGEIQIVEEDGKLVWRCPNCGNEDQSKMNVARRTCGYIGSQFWNQGRTQEIKERVLHL

SEQ ID NO: 833 - protein, 768 aa, unidentified
  REGION 1..768: note = Category: MG60 effectors
  REGION 1..768: note = Description: MG60-42 effector
  source 1..768: note = uncultivated organism sequence
MFCSCKKNLRVVIYIYNATKTYDCAKKLIVYKSIIKGAEVMKIIKRNGAEETFDRQKIKDAIAKANNETDGTPELTDRQIDYISLVIEDHCNEMNRALSVEEIQELVETHIILQGAPETAKRYIRYRFTRNLARASNTTDNQILSLIECNNEEVKQENSNKNPTVNSVQRDYMAGEVSKDLTKRILLPEDIVKAHEEGLIHFHDADYFAQHMHNCDLVNLEDMLQNGTVISGTMIEKPHSFSTACNIATQIIAQVASNQYGGQSISLAHLAPFVQISREKITRQVRAEMEEFGIDADDEQVKSLVEKRVRDEIKRGVQTIQYQVVTLLTTNGQAPFVTVFMYLNEAKNEQEKKDLAIIIEEVLKQRIKGTKNEVGVWVTPAFPKLIYVLEEDNITEDSRFWYLTKLAAECTAKRMVPDYISEKIMLKLKIDKNGNGNCYTCMGCRSFLTPYVDENGKPKYYGRFNQGVVTINLVDVACTAARDGNKSEEKFWQVLDERLELCHRALQCRHERLEGTLSDAAPILWQYGALARLKKGEPIDKLLHGGYSTLSLGYAGLWECVYEITGKKLTEKEGEEFGLRVMQRLNDACAEWKAAENIDYSIYGTPLESTTYKFAKCLQNRFGIIKGVTDRNYITNSYHIHVTEKIDAFSKLELESKFQKLSPGGAISYVEVPNMQQNIPAVLEVMKFIYNNIMYAELNTKSDYCQVCGYDGEIQIVEEDGKLVWRCPNCGNEDQSKMNVARRTCGYIGSQFWNQGRTQEIKERVLHL

SEQ ID NO: 834 - protein, 768 aa, unidentified
  REGION 1..768: note = Category: MG60 effectors
  REGION 1..768: note = Description: MG60-43 effector
  source 1..768: note = uncultivated organism sequence
MFCSCKKNLRVVIYIYNATKTYDCAKKLIVYKSIIKGAEVMKIIKRNGAEETFDRQKIKDAIAKANNETDGTPELTDRQIDYISLVIEDHCNEMNRALSVEEIQELVETHIILQGAPETAKRYIRYRFTRNLARASNTTDNQILSLIECNNEEVKQENSNKNPTVNSVQRDYMAGEVSKDLTKRILLPEDIVKAHEEGLIHFHDADYFAQHMHNCDLVNLEDMLQNGTVISGTMIEKPHSFSTACNIATQIIAQVASNQYGGQSISLAHLAPFVQISREKITRQVRAEMEEFGIDADDEQVKSLVEKRVRDEIKRGVQTIQYQVVTLLTTNGQAPFVTVFMYLNEAKNEQEKKDLAIIIEEVLKQRIKGTKNEVGVWVTPAFPKLIYVLEEDNITEDSRFWYLTKLAAECTAKRMVPDYISEKIMLKLKIDKNGNGNCYTCMGCRSFLTPYVDENGKPKYYGRFNQGVVTINLVDVACTAARDGSKNEEKFWQVLDERLELCHRALQCRHERLEGTLSDAAPILWQYGALARLKKGEPIDKLLHGGYSTLSLGYAGLWECVYEITGKKLTEKEGEEFGLRVMQRLNDACAEWKAAENIDYSIYGTPLESTTYKFAKCLQNRFGIIKGVTDRNYITNSYHIHVTEKIDAFSKLELESKFQKLSPGGAISYVEVPNMQQNIPAVLEVMKFIYNNIMYAELNTKSDYCQVCGYDGEIQIVEEDGKLVWRCPNCGNEDQSKMNVARRTCGYIGSQFWNQGRTQEIKERVLHL

SEQ ID NO: 835 - protein, 768 aa, unidentified
  REGION 1..768: note = Category: MG60 effectors
  REGION 1..768: note = Description: MG60-44 effector
  source 1..768: note = uncultivated organism sequence
MFCSCKKNLCVVIYIYDATKTYDCAKKLIVYKSIIKGAEVMKIIKRNGAEETFDRQKIKDAIAKANNETDGTPELTDRQIDYISLVIEDHCNEMNRALSVEEIQELVETHIILQGAPETAKRYIRYRFTRNLARASNTTDNQILSLIECNNEEVKQENSNKNPTVNSVQRDYMAGEVSKDLTKRILLPEDIVKAHEEGLIHFHDADYFAQHMHNCDLVNLEDMLQNGTVISGTMIEKPHSFSTACNIATQIIAQVASNQYGGQSISLAHLAPFVQISREKITRQVRAEMEEFGIDADDEQVKSLVEKRVRDEIKRGVQTIQYQVVTLLTTNGQAPFVTVFMYLNEAKNEQEKKDLAIIIEEVLKQRIKGTKNEVGVWVTPAFPKLIYVLEEDNITEDSRFWYLTKLAAECTAKRMVPDYISEKIMLKLKIDKNGNGNCYTCMGCRSFLTPYVDENGKPKYYGRFNQGVVTINLVDVACTAARDGNKSEEKFWQVLDERLELCHRALQCRHERLEGTLSDAAPILWQYGALARLKKGEPIDKLLHGGYSTLSLGYAGLWECVYEITGKKLTEKEGEEFGLRVMQRLNDACAEWKAAENIDYSIYGTPLESTTYKFAKCLQNRFGIIKGVTDRNYITNSYHIHVTEKIDAFSKLELESKFQKLSPGGAISYVEVPNMQQNIPAVLEVMKFIYNNIMYAELNTKSDYCQVCGYDGEIQIVEEDGKLVWRCPNCGNEDQSKMNVARRTCGYIGSQFWNQGRTQEIKERVLHL

SEQ ID NO: 836 - protein, 768 aa, unidentified
  REGION 1..768: note = Category: MG60 effectors
  REGION 1..768: note = Description: MG60-45 effector
  source 1..768: note = uncultivated organism sequence
MFCSCKKNLRVVIYIYDATKTYDCAKKLIVYKSIIKGAEVMKIIKRNGAEETFDRQKIKDAISKANNETDGTPELTDRQIDYISLVIEDHCNEMNRALSVEEIQELVETHIILQGAPETAKRYIRYRFTRNLARASNTTDNQILSLIECNNEEVKQENSNKNPTVNSVQRDYMAGEVSKDLTKRILLPEDIVKAHEEGLIHFHDADYFAQHMHNCDLVNLEDMLQNGTVISGTMIEKPHSFSTACNIATQIIAQVASNQYGGQSISLAHLAPFVQISREKITRQVRAEMEEFGIAADDEQVKSLVEKRVRDEIKRGVQTIQYQVVTLLTTNGQAPFVTVFMYLNEAKNEQEKKDLAIIIEEVLKQRIKGTKNEVGVWVTPAFPKLIYVLEEDNITEDSRFWYLTKLAAECTAKRMVPDYISEKIMLKLKIDKNGNGNCYTCMGCRSFLTPYVDENGKPKYYGRFNQGVVTINLVDVACTAARDGSKSEEKFWQVLDERLELCHRALQCRHERLEGTLSDAAPILWQYGALARLKKGEPIDKLLHGGYSTLSLGYAGLWECVYEITGKKLTEKEGEEFGLRVMQRLNDACAEWKAAENIDYSIYGTPLESTTYKFAKCLQNRFGIIKGVTDRNYITNSYHIHVTEKIDAFSKLELESKFQKLSPGGAISYVEVPNMQQNIPAVLEVMKFIYNNIMYAELNTKSDYCQVCGYDGEIQIVEEDGKLVWRCPNCGNEDQSKMNVARRTCGYIGSQFWNQGRTQEIKERVLHL

SEQ ID NO: 837 - protein, 760 aa, unidentified
  REGION 1..760: note = Category: MG60 effectors
  REGION 1..760: note = Description: MG60-46 effector
  source 1..760: note = uncultivated organism sequence
MLVVIYIYNATKTYDCAKKLIVHKSIIKGAEVMKIIKRNGAEETFDRQKIKDAIAKANNETDGTPELTDRQIDYISLVIEDHCNEMNRALSVEEIQELVETHIILQGAPETAKRYIRYRFTRNLARASNTTDNQILSLIECNNEEVKQENSNKNPTVNSVQRDYMAGEVSKDLTKRILLPEDIVKAHEEGLIHFHDADYFAQHMHNCDLVNLEDMLQNGTVISGTMIEKPHSFSTACNIATQIIAQVASNQYGGQSISLAHLAPFVQISREKITRQVRAEMEEFGIDADDEQVKSLVEKRVRDEIKRGVQTIQYQVVTLLTTNGQAPFVTVFMYLNEAKNEQEKKDLAIIIEEVLKQRIKGTKNEVGVWVTPAFPKLIYVLEEDNITEDSRFWYLTKLAAECTAKRMVPDYISEKIMLKLKIDKNGNGNCYTCMGCRSFLTPYVDENGKPKYYGRFNQGVVTINLVDVACTAARDGNKSEEKFWQVLDERLELCHRALQCRHERLEGTLSDAAPILWQYGALARLKKGEPIDKLLHGGYSTLSLGYAGLWECVYEITGKKLTEKEGEEFGLRVMQRLNDACAEWKAAENIDYSIYGTPLESTTYKFAKCLQNRFGIIKGVTDRNYITNSYHIHVTEKIDAFSKLELESKFQKLSPGGAISYVEVPNMQQNIPAVLEVMKFIYNNIMYAELNTKSDYCQVCGYDGEIQIVEEDGKLVWRCPNCGNEDQSKMNVARRTCGYIGSQFWNQGRTQEIKERVLHL

SEQ ID NO: 838 - protein, 768 aa, unidentified
  REGION 1..768: note = Category: MG60 effectors
  REGION 1..768: note = Description: MG60-47 effector
  source 1..768: note = uncultivated organism sequence
MFCSCKKNLCVVIYIYDATKTYDCAKKLIVYKSIIKGAEVMKIIKRNGAEETFDRQKIKDAIAKANNETDGAPELTDRQIDYISLVIEDHCNEMNRALSVEEIQELVETHIILQGAPETAKRYIRYRFTRNLARASNTTDNQILSLIECNNEEVKQENSNKNPTVNSVQRDYMAGEVSKDLTKRILLPEDIVKAHEEGLIHFHDADYFAQHMHNCDLVNLEDMLQNGTVISGTMIEKPHSFSTACNIATQIIAQVASNQYGGQSISLAHLAPFVQISREKITRQVRAEMEEFGIDADDEQVKSLVEKRVRDEIKRGVQTIQYQVVTLLTTNGQAPFVTVFMYLNEAKNEQEKKDLAIIIEEVLKQRIKGTKNEVGVWVTPAFPKLIYVLEEDNITEDSRFWYLTKLAAECTAKRMVPDYISEKIMLKLKIDKNGNGNCYTCMGCRSFLTPYVDENGNPKYYGRFNQGVVTINLVDVACTAARDGSKSEEKFWQVLDERLELCHRALQCRHERLEGTLSDAAPILWQYGALARLKKGEPIDKLLHGGYSTLSLGYAGLWECVYEITGKKLTEKEGEEFGLRVMQRLNDACAEWKAAENIDYSIYGTPLESTTYKFAKCLQNRFGIIKGVTDRNYITNSYHIHVTEKIDAFSKLELESKFQKLSPGGAISYVEVPNMQQNIPAVLEVMKFIYNNIMYAELNTKSDYCQVCGYDGEIQIVEEDGKLVWRCPNCGNEDQSKMNVARRTCGYIGSQFWNQGRTQEIKERVLHL

SEQ ID NO: 839 - protein, 768 aa, unidentified
  REGION 1..768: note = Category: MG60 effectors
  REGION 1..768: note = Description: MG60-48 effector
  source 1..768: note = uncultivated organism sequence
MFCSCKKNLCVVIYIYNATKTYDCAKKLIVYKSIIKGAEVMKIIKRNGAEETFDRQKIKDAIAKANNETDGTPELTDRQIDYISLVIEDHCNEMNRALSVEEIQELVETHIILQGAPETAKRYIRYRFTRNLARASNTTDNQILSLIECNNEEVKQENSNKNPTVNSVQRDYMAGEVSKDLTKRILLPEDIVKAHEEGLIHFHDADYFAQHMHNCDLVNLEDMLQNGTVISGTMIEKPHSFSTACNIATQIIAQVASNQYGGQSISLAHLAPFVQISREKITRQVRAEMEEFGIDADDEQVKSLVEKRVRDEIKRGVQTIQYQVVTLLTTNGQAPFVTVFMYLNEAKNEQEKKDLAIIIEEVLKQRIKGTKNEVGVWVTPAFPKLIYVLEEDNITEDSRFWYLTKLAAECTAKRMVPDYISEKIMLKLKIDKNGNGNCYTCMGCRSFLTPYVDENGKPKYYGRFNQGVVTINLVDVACTAARDGNKNEEKFWQVLDERLELCHRALQCRHERLEGTLSDAAPILWQYGALARLKKGEPIDKLLHGGYSTLSLGYAGLWECVYEITGKKLTEKEGEEFGLRVMQRLNDACAEWKAAENIDYSIYGTPLESTTYKFAKCLQNRFGIIKGVTDRNYITNSYHIHVTEKIDAFSKLELESKFQKLSPGGAISYVEVPNMQQNIPAVLEVMKFIYNNIMYAELNTKSDYCQVCGYDGEIQIVEEDGKLVWRCPNCGNEDQSKMNVARRTCGYIGSQFWNQGRTQEIKERVLHL

SEQ ID NO: 840 - protein, 768 aa, unidentified
  REGION 1..768: note = Category: MG60 effectors
  REGION 1..768: note = Description: MG60-49 effector
  source 1..768: note = uncultivated organism sequence
MFCSCKKNLRVVIYIYNATKTYDCAKKLIVYKSIIKGAEVMKIIKRNGAEETFDRQKIKDAIAKANNETDGTPELTDRQIDYISLVIEDHCNEMNRALSVEEIQELVETHIILQGAPETAKRYIRYRFTRNLARASNTTDNQILSLIECNNEEVKQENSNKNPTVNSVQRDYMAGEVSKDLTKRILLPEDIVKAHEEGLIHFHDADYFAQHMHNCDLVNLEDMLQNGTVISGTMIEKPHSFSTACNIATQIIAQVASNQYGGQSISLAHLAPFVQISREKITRQVRAEIEEFGIAADDEQVKSLVEKRVRDEIKRGVQTIQYQVVTLLTTNGQAPFVTVFMYLNEAKNEQEKKDLAIIIEEVLKQRIKGTKNEVGVWVTPAFPKLIYVLEEDNITEDSRFWYLTKLAAECTAKRMVPDYISEKIMLELKIDKNGNGNCYTCMGCRSFLTPYVDENGKPKYYGRFNQGVVTINLVDVACTAARDGNKSEEKFWQVLDERLELCHRALQCRHERLEGTLSDAAPILWQYGALARLKKGEPIDKLLHGGYSTLSLGYAGLWECVYEITGKKLTEKEGEEFGLRVMQRLNDACAEWKAAENIDYSIYGTPLESTTYKFAKCLQNRFGIIKGVTDRNYITNSYHIHVTEKIDAFSKLELESKFQKLSPGGAISYVEVPNMQQNIPAVLEVMKFIYNNIMYAELNTKSDYCQVCGYDGEIQIVEEDGKLVWRCPNCGNEDQSKMNVARRTCGYIGSQFWNQGRTQEIKERVLHL

SEQ ID NO: 841 - protein, 768 aa, unidentified
  REGION 1..768: note = Category: MG60 effectors
  REGION 1..768: note = Description: MG60-50 effector
  source 1..768: note = uncultivated organism sequence
MFCSCKKNLRVVIYIYDATKTYDCAKKIIVYKSIIKGAEVMKIIKRNGAEETFDRQKIKDAIAKANNETDGTPELTDRQIDYISLVIEDHCNEMNRALSVEEIQELVETHIILQGAPETAKRYIRYRFTRNLARASNTTDNQILSLIECNNEEVKQENSNKNPTVNSVQRDYMAGEVSKDLTKRILLPEDIVKAHEEGLIHFHDADYFAQHMHNCDLVNLEDMLQNGTVISGTMIEKPHSFSTACNIATQIIAQVASNQYGGQSISLAHLAPFVQISREKITRQVRAEMEEFGIDADDEQVKSLVEKRVRDEIKRGVQTIQYQVVTLLTTNGQAPFVTVFMYLNEAKNEQEKKDLAIIIEEVLKQRIKGTKNEVGVWVTPAFPKLIYVLEEDNITEDSRFWYLTKLAAECTAKRMVPDYISEKIMLKLKVDKNGNGNCYTCMGCRSFLTPYVDENGKPKYYGRFNQGVVTINLVDVACTAARDGSKSEEKFWQVLDERLELCHRALQCRHERLEGTLSDAAPILWQYGALARLKKGEPIDKLLHGGYSTLSLGYAGLWECVYEITGKKLTEKEGEEFGLRVMQRLNDACAEWKAAENIDYSIYGTPLESTTYKFAKCLQNRFGIIKGVTDRNYITNSYHIHVTEKIDAFSKLELESKFQKLSPGGAISYVEVPNMQQNIPAVLEVMKFIYNNIMYAELNTKSDYCQVCGYDGEIQIVEEDGKLVWRCPNCGNEDQSKMNVARRTCGYIGSQFWNQGRTQEIKERVLHL

SEQ ID NO: 842 - protein, 768 aa, unidentified
  REGION 1..768: note = Category: MG60 effectors
  REGION 1..768: note = Description: MG60-51 effector
  source 1..768: note = uncultivated organism sequence
MFCSCKKKLCVVIYIYDATKTYDCAKKLIVYKSIIKGAEVMKIIKRNGAEETFDRQKIKDAIAKANNETDGTPELTDRQIDYISLVIEDHCNEMNRALSVEEIQELVETHIILQGAPETAKRYIRYRFTRNLARASNTTDNQILSLIECNNEEVKQENSNKNPTVNSVQRDYMAGEVSKDLTKRILLPEDIVKAHEEGLIHFHDADYFAQHMHNCDLVNLEDMLQNGTVISGTMIEKPHSFSTACNIATQIIAQVASNQYGGQSISLAHLAPFVQISREKITRQVRAEMEEFGIAADDEQVKSLVEKRVRDEIKRGVQTIQYQVVTLLTTNGQAPFVTVFMYLNEAKNEQEKKDLAIIIEEVLKQRIKGTKNEVGVWVTPAFPKLIYVLEEDNITEDSRFWYLTKLAAECTAKRMVPDYISEKIMLKLKIDKNGNGNCYTCMGCRSFLTPYVDENGKPKYYGRFNQGVVTINLVDVACTAARDGNKSEEKFWQVLDERLELCHRALQCRHERLEGTLSDAAPILWQYGALARLKKGEPIDKLLHGGYSTLSLGYAGLWECVYEITGKKLTEKEGEEFGLRVMQRLNDACAEWKAAENIDYSIYGTPLESTTYKFAKCLQNRFGIIKGVTDRNYITNSYHIHVTEKIDAFSKLELESKFQKLSPGGAISYVEVPNMQQNIPAVLEVMKFIYNNIMYAELNTKSDYCQVCGYDGEIQIVEEDGKLVWRCPNCGNEDQSKMNVARRTCGYIGSQFWNQGRTQEIKERVLHL

SEQ ID NO: 843 - protein, 760 aa, unidentified
  REGION 1..760: note = Category: MG60 effectors
  REGION 1..760: note = Description: MG60-52 effector
  source 1..760: note = uncultivated organism sequence
MLVVIYIYNATKTYDCAKKLIVYKSIIKGAEVMKIIKRNGAEETFDRQKIKDAIAKANNETDGTPELTDRQIDYISLVIEDHCNEMNRALSVEEIQELVETHIILQGAPETAKRYIRYRFTRNLARASNTTDNQILSLIECNNEEVKQENSNKNPTVNSVQRDYMAGEVSKDLTKRILLPEDIVKAHEEGLIHFHDADYFAQHMHNCDLVNLEDMLQNGTVISGTMIEKPHSFSTACNIATQIIAQVASNQYGGQSISLAHLAPFVQISREKITRQVRAEMEEFGIDADDEQVKSLVEKRVRDEIKRGVQTIQYQVVTLLTTNGQAPFVTVFMYLNEAKNEQEKKDLAIIIEEVLKQRIKGTKNEVGVWVTPAFPKLIYVLEEDNITEDSRFWYLTKLAAECTAKRMVPDYISEKIMLKLKIDKNGNGNCYTCMGCRSFLTPYVDENGKPKYYGRFNQGVVTINLVDVACTAARDGNNSEEKFWQVLDERLELCHRALQCRHERLEGTLSDAAPILWQYGALARLKKGEPIDKLLHGGYSTLSLGYAGLWECVYEITGKKLTEKEGEEFGLRVMQRLNDACAEWKAAENIDYSIYGTPLESTTYKFAKCLQNRFGIIKGVTDRNYITNSYHIHVTEKIDAFSKLELESKFQKLSPGGAISYVEVPNMQQNIPAVLEVMKFIYNNIMYAELNTKSDYCQVCGYDGEIQIVEEDGKLVWRCPNCGNEDQSKMNVARRTCGYIGSQFWNQGRTQEIKERVLHL

SEQ ID NO: 844 - protein, 768 aa, unidentified
  REGION 1..768: note = Category: MG60 effectors
  REGION 1..768: note = Description: MG60-53 effector
  source 1..768: note = uncultivated organism sequence
MFCSCKKNLCVVIYIYDATKTYDCAKNLIVYKSIIKGAEVMKIIKRNGAEETFDRQKIKDAIAKANNETDGTPELTDRQIDYISLVIEDHCNEMNRALSVEEIQELVETHIILQGAPETAKRYIRYRFTRNLARASNTTDNQILSLIECNNEEVKQENSNKNPTVNSVQRDYMAGEVSKDLTKRILLPEDIVKAHEEGLIHFHDADYFAQHMHNCDLVNLEDMLQNGTVISGTMIEKPHSFSTACNIATQIIAQVASNQYGGQSISLAHLAPFVQISREKITRQVRAEMEEFGIDADDEQVKSLVEKRVRDEIKRGVQTIQYQVVTLLTTNGQAPFVTVFMYLNEAKNEQEKKDLAIIIEEVLKQRIKGTKNEVGVWVTPAFPKLIYVLEEDNITEDSRFWYLTKLAAECTAKRMVPDYISEKIMLKLKIDKNGNGNCYTCMGCRSFLTPYVDENGKPKYYGRFNQGVVTINLVDVACTAARDGSKSEEKFWQVLDERLELCHRALQCRHERLEGTLSDAAPILWQYGALARLKKGEPIDKLLHGGYSTLSLGYAGLWECVYEITGKKLTEKEGEEFGLRVMQRLNDACAEWKAAENIDYSIYGTPLESTTYKFAKCLQNRFGIIKGVTDRNYITNSYHIHVTEKIDAFSKLELESKFQKLSPGGAISYVEVPNMQQNIPAVLEVMKFIYNNIMYAELNTKSDYCQVCGYDGEIQIVEEDGKLVWRCPNCGNEDQSKMNVARRTCGYIGSQFWNQGRTQEIKERVLHL

SEQ ID NO: 845 - protein, 768 aa, unidentified
  REGION 1..768: note = Category: MG60 effectors
  REGION 1..768: note = Description: MG60-54 effector
  source 1..768: note = uncultivated organism sequence
MFCSCKKNLRVVIYIYNATKTYDCAKKLIVYKSIIKGAEVMKIIKRNGAEETFDRQKIKDAIAKANNETDGTPELTDRQIDYISLVIEDHCNEMNRALSVEEIQELVETHIILQGAPETAKRYIRYRFTRNLARASNTTDNQILSLIECNNEEVKQENSNKNPTVNSVQRDYMAGEVSKDLTKRILLPEDIVKAHEEGLIHFHDADYFAQHMHNCDLVNLEDMLQNGTVISGTMIEKPHSFSTACNIATQIIAQVASNQYGGQSISLAHLAPFVQISREKITRQVRAEMEEFGIAADDEQVKSLVEKRVRDEIKRGVQTIQYQVVTLLTTNGQAPFVTVFMYLNEAKNEQEKKDLAIIIEEVLKQRIKGTKNEVGVWVTPAFPKLIYVLEEDNITEDSRFWYLTKLAAECTAKRMVPDYISEKIMLELKIDKNGNGNCYTCMGCRSFLTPYVDENGKPKYYGRFNQGVVTINLVDVACTAARDGNKSEEKFWQVLDERLELCHRALQCRHGRLEGTLSDAAPILWQYGALARLKKGEPIDKLLHGGYSTLSLGYAGLWECVYEITGKKLTEKEGEEFGLRVMQRLNDACAEWKAAENIDYSIYGTPLESTTYKFAKCLQNRFGIIKGVTDRNYITNSYHIHVTEKIDAFSKLELESKFQKLSPGGAISYVEVPNMQQNIPAVLEVMKFIYNNIMYAELNTKSDYCQVCGYDGEIQIVEEDGKLVWRCPNCGNEDQSKMNVARRTCGYIGSQFWNQGRTQEIKERVLHL

SEQ ID NO: 846 - protein, 768 aa, unidentified
  REGION 1..768: note = Category: MG60 effectors
  REGION 1..768: note = Description: MG60-55 effector
  source 1..768: note = uncultivated organism sequence
MFCSCKKNLRVVIYIYDATKTYDCAKKLIVYKSIIKGAEVMKIIKRNGAEETFDRQKIKDAIAKANNETDGTPELTDRQIDYISLVIEDHCNEMNRALSVEEIQELVETHIILQGAPETAKRYIRYRFTRNLARASNTTDNQILSLIECNNEEVKQENSNKNPTVNSVQRDYMAGEVSKDLTKRILLPEDIVKAHEEGLIHFHDADYFAQHMHNCDLVNLEDMLQNGTVISGTMIEKPHSFSTACNIATQIIAQVASNQYGGQSISLAHLAPFVQISREKITRQVRAEMEEFGIDADDEQVKSLVEKRVRDEIKRGVQTIQYQVVTLLTTNGQAPFVTVFMYLNEAKNEQEKKDLAIIIEEVLKQRIKGTKNEVGVWVTPAFPKLIYVLEEDNITEDSRFWYLTKLAAECTAKRMVPDYISEKIMLKLKIDKNGNGNCYTCMGCRSFLTPYVDENGKPKYYGRFNQGVVTINLVDVACTAARDGSKSEEKFWQVLDERLELCHRALQCRHERLEGTLSDAAPILWQYGALARLKKGEPIDKLLHGGYSTLSLGYAGLWECVYEITGKKLTEKEGEEFGLRVMQRLNDACAEWKAAENIDYSIYGTPLESTTYKFAKCLQNRFGIIKGVTDRNYITNSYHIHVTEKIDAFSKLELESKFQKLSPGGAISYVEVPNMQQNIPAVLEVMKFIYNNIMYAELNTKSDYCQVCGYDGEIQIVEEDGKLVWRCPNCGNEDQSKMNVARRTCGYIGSQFWNQGRTQEIKERVLHL

SEQ ID NO: 847 - protein, 768 aa, unidentified
  REGION 1..768: note = Category: MG60 effectors
  REGION 1..768: note = Description: MG60-56 effector
  source 1..768: note = uncultivated organism sequence
MFCSCKKNLCVVIYIYNATKTYDCAKKLIVYKSIIKGAEVMKIIKRNGAEETFDRQKIKDAIAKANNETDGTPELTDRQIDYISLVIEDHCNEMNRALSVEEIQELVETHIILQGAPETAKRYIRYRFTRNLARASNTTDNQILSLIECNNEEVKQENSNKNPTVNSVQRDYMAGEVSKDLTKRILLPEDIVKAHEEGLIHFHDADYFAQHMHNCDLVNLEDMLQNGTVISGTMIEKPHSFSTACNIATQIIAQVASNQYGGQSISLAHLAPFVQISREKITRQVRAEMEEFGIDADDEQVKSLVEKRVRDEIKRGVQTIQYQVVTLLTTNGQAPFVTVFMYLNEAKNEQEKKDLAIIIEEVLKQRIKGTKNEVGVWVTPAFPKLIYVLEEDNITEDSRFWYLTKLAAECTAKRMVPDYISEKIMLKLKIDKNGNGNCYTCMGCRSFLTPYVDENGKPKYYGRFNQGVVTINLVDVACTAARDGSKSEEKFWQVLDERLELCHRALQCRHERLEGTLSDAAPILWQYGALARLKKGEPIDKLLHGGYSTLSLGYAGLWECVYEITGKKLTEKEGEEFGLRVMQRLNDACAEWKAAENIDYSIYGTPLESTTYKFAKCLQNRFGIIKGVTDRNYITNSYHIHVTEKIDAFSKLELESKFQKLSPGGAISYVEVPNMQQNIPAVLEVMKFIYNNIMYAELNTKSDYCQVCGYDGEIQIVEEDGKLVWRCPNCGNEDQSKMNVARRTCGYIGSQFWNQGRTQEIKERVLHL

SEQ ID NO: 848 - protein, 768 aa, unidentified
  REGION 1..768: note = Category: MG60 effectors
  REGION 1..768: note = Description: MG60-57 effector
  source 1..768: note = uncultivated organism sequence
MFCSCKKNLRVVIYIYNATKTYDCAKKLIVYKSIIKGAEVMKIIKRNGAEETFDRQKIKDAIAKANNETDGTPELTDRQIDYISLVIEDHCNEMNRALSVEEIQELVETHIILQGAPETAKRYIRYRFTRNLARASNTTDNQILSLIECNNEEVKQENSNKNPTVNSVQRDYMAGEVSKDLTKRILLPEDIVKAHEEGLIHFHDADYFAQHMHNCDLVNLEDMLQNGTVISGTMIEKPHSFSTACNIATQIIAQVASNQYGGQSISLAHLAPFVQISREKITRQVRAEMEEFGIDADDEQVKSLVEKRVRDEIKRGVQTIQYQVVTLLTTNGQAPFVTVFMYLNEAKNEQEKKDLAIIIEEVLKQRIKGTKNEVGVWVTPAFPKLIYVLEEDNITEDSRFWYLTKLAAECTAKRMVPDYISEKIMLKLKIDKNGNGNCYTCMGCRSFLTPYVDENGKPKYYGRFNQGVVTINLVDVACTAARDGNKSEEKFWQVLDERLELCHRALQCRHERLEGTLSDAAPILWQYGALARLKKGEPIDKLLHGGYSTLSLGYAGLWECVYEIKGKKLTEKEGEEFGLRVMQRLNDACAEWKAAENIDYSIYGTPLESTTYKFAKCLQNRFGIIKGVTDRNYITNSYHIHVTEKIDAFSKLELESKFQKLSPGGAISYVEVPNMQQNIPAVLEVMKFIYNNIMYAELNTKSDYCQVCGYDGEIQIVEEDGKLVWRCPNCGNEDQSKMNVARRTCGYIGSQFWNQGRTQEIKERVLHL

SEQ ID NO: 849 - protein, 768 aa, unidentified
  REGION 1..768: note = Category: MG60 effectors
  REGION 1..768: note = Description: MG60-58 effector
  source 1..768: note = uncultivated organism sequence
MFCSCKKNLCVVIYIYDATKTYDCAKKLIVYKSIIKGAEVMKIIKRNGAEETFDRQKIKDAIAKANNETDGTPELTDRQIDYISLVIEDHCNEMNRALSVEEIQELVETHIILQGAPETAKRYIRYRFTRNLARASNTTDNQILSLIECNNEEVKQENSNKNPTVNSVQRVYMAGEVSKDLTKRILLPEDIVKAHEEGLIHFHDADYFAQHMHNCDLVNLEDMLQNGTVISGTMIEKPHSFSTACNIATQIIAQVASNQYGGQSISLAHLAPFVQISREKITRQVRAEMEEFGIDADDEQVKSLVEKRVRDEIKRGVQTIQYQVVTLLTTNGQAPFVTVFMYLNEAKNEQEKKDLAIIIEEVLKQRIKGTKNEVGVWVTPAFPKLIYVLEEDNITEDSRFWYLTKLAAECTAKRMVPDYISEKIMLKLKIDKNGNGNCYTCMGCRSFLTPYVDENGKPKYYGRFNQGVVTINLVDVACTAARDGSKSEEKFWQVLDERLELCHRALQCRHERLEGTLSDAAPILWQYGALARLKKGEPIDKLLHGGYSTLSLGYAGLWECVYEITGKKLTEKEGEEFGLRVMQRLNDACAEWKAAENIDYSIYGTPLESTTYKFAKCLQNRFGIIKGVTDRNYITNSYHIHVTEKIDAFSKLELESKFQKLSPGGAISYVEVPNMQQNIPAVLEVMKFIYNNIMYAELNTKSDYCQVCGYDGEIQIVEEDGKLVWRCPNCGNEDQSKMNVARRTCGYIGSQFWNQGRTQEIKERVLHL

SEQ ID NO: 850 - protein, 861 aa, unidentified
  REGION 1..861: note = Category: MG60 effectors
  REGION 1..861: note = Description: MG60-59 effector
  source 1..861: note = uncultivated organism sequence
MHKPPKLKRFNQEVLSKYQIYNSIFMTLPFDTITKTGIFLPLFHEVCKTGFSKKKNPTEIVNYFFKTYQDNPTEQEKNDLLFQFIQYIERQIVLFDAIEDAAFTTVNNMDGVGTMRNTKEAAVRDNKKEALQKHLENFKIRLVLTAHPTQFYPGPVLGIITDLANAIEKNDLLLINKLLGQLGKTPFFKHEKPTPYDEAVSLIWYLENVFYHAIADTYNYIQNNIFDGRAINNEIINLGFWPGGDRDGNPFVTTETTLKVAKRLKQILLKNYYKDILVLKKRLTFKGVESIVLELEKLLFENSVNPDLNTMISKDEFLKKLYQIKHILTTEHSSLYLEEITDLINKVHLFGYHFASLDLRQDSRVHHNVFSTIVTELQEKGSGLFPKNYLSLSEKEQIKILSTVAADILPEEFSDEMASKTLSSIRAIKTIQNENGEKGAHRYIISNNQTALNMMETFAMFKLSGFEENFSVDIIPLFETIEDLENAAEVMQTLYANPVYRNHLTHRDNKQTIMLGFSDGTKDGGYFMANWSIFKAKESITKISRNYGIDVIFFDGRGGPPARGGGKTHEFYASLGQTIENKEIQLTIQGQTISANFGIENAAQYNIEQLLSAGIANEIFNTAKNNLTSEDTKIMNDLAKTSYKAYSEFKNHPKFLPYLENRSTLKYYSKTNIGSRPSKRSQSSTLNFSDLRAIPFVGSWSQLKQNVPGFYGVGTALKKYEDNGEFEKLKQFYNHSDFFKALIGNSMMSLSKSFFELTEYMAEDEEYGEFWKMIYEEYKTTKRLILKLTGYTELMQNNPVGKASINIRENIVLPLLTIQQYALLKIQELQKDNNNPKLVEVYEKMVTRSLFGNINASRNSA

SEQ ID NO: 851 - protein, 768 aa, unidentified
  REGION 1..768: note = Category: MG60 effectors
  REGION 1..768: note = Description: MG60-60 effector
  source 1..768: note = uncultivated organism sequence
MFCSCKKNLCVVIYIYDATKTYDCAKKSIVYKSIIKGAEVMKIIKRNGAEETFDRQKIKDAIAKANNETDGTPELTDRQIDYISLVIEDHCNEMNRALSVEEIQELVETHIILQGAPETAKRYIRYRFTRNLARASNTTDNQILSLIECNNEEVKQENSNKNPTVNSVQRDYMAGEVSKDLTKRILLPEDIVKAHEEGLIHFHDADYFAQHMHNCDLVNLEDMLQNGTVISGTMIEKPHSFSTACNIATQIIAQVASNQYGGQSISLAHLAPFVQISREKITRQVRAEMEEFGIAADDEQVKSLVEKRVRDEIKRGVQTIQYQVVTLLTTNGQAPFVTVFMYLNEAKNEQEKKDLAIIIEEVLKQRIKGTKNEVGVWVTPAFPKLIYVLEEDNITEDSRFWYLTKLAAECTAKRMVPDYISEKIMLKLKIDKNGNGNCYTCMGCRSFLTPYVDENGKPKYYGRFNQGVVTINLVDVACTAARDGNKSEEKFWQVLDERLELCHRALQCRHERLEGTLSDAAPILWQYGALARLKKGEPIDKLLHGGYSTLSLGYAGLWECVYEITGKKLTEKEGEEFGLRVMQRLNDACAEWKAAENIDYSIYGTPLESTTYKFAKCLQNRFGIIKGVTDRNYITNSYHIHVTEKIDAFSKLELESKFQKLSPGGAISYVEVPNMQQNIPAVLEVMKFIYNNIMYAELNTKSDYCQVCGYDGEIQIVEEDGKLVWRCPNCGNEDQSKMNVARRTCGYIGSQFWNQGRTQEIKERVLHL

SEQ ID NO: 852 - protein, 768 aa, unidentified
  REGION 1..768: note = Category: MG60 effectors
  REGION 1..768: note = Description: MG60-61 effector
  source 1..768: note = uncultivated organism sequence
MFCSCKKNLCVVIYIYDATKTYDCAKKLIVYKSIIKGAEVMKIIKRNGAEETFDRQKIKDAIAKANNETDGTPELTDRQIDYISLVIEDHCNEMNRALSVEEIQELVETHIILQGAPETAKRYIRYRFTRNLARASNTTDNQILSLIECNNEEVKQENSNKNPTVNSVQRDYMAGEVSKDLTKRILLPEDIVKAHEEGLIHFHDADYFAQHMHNCDLVNLEDMLQNGTVISGTMIEKPHSFSTACNIATQIIAQVASNQYGGQSISLAHLAPFVQISREKITRQVRAEMEEFGIDADDEQVKSLVEKRVRDEIKRGVQTIQYQVVTLLTTNGQAPFVTVFMYLNEAKNEQEKKDLAIIIEEVLKQRIKGTKNEVGVWVTPAFPKLIYVLEEDNITEDSRFWYLTKLAAECTAKRMVPDYISEKIMLKLKIDKNGNGNCYTCMGCRSFLTPYVDENGKPKYYGRFNQGVVTINLVDVACTAARDGSKSEEKFWQVLDERLELCHRALQCRHERLEGTLSDAAPILWQYGALARLKKGEPIDKLLHGGYSTLSLGYAGLWECVYEITGKKLTEKEGEEFGLRVMQRLNDACAEWKAAENIDYSIYGTPLESTTYKFAKCLQNRFGIIKGVTDRNYITNSYHIHVTEKIDAFSKLELESKFQKLSPGGAISYVEVPNMQQNIPAVLEVMKFIYNNIMYAELNTKSDYCQVCGYDGEIQIVEEDGKLVWRCPNCGNEDQSKMNVARRTCGYIGSQFWNQGRTQEIKERVLHL

SEQ ID NO: 853 - protein, 768 aa, unidentified
  REGION 1..768: note = Category: MG60 effectors
  REGION 1..768: note = Description: MG60-62 effector
  source 1..768: note = uncultivated organism sequence
MFCSCKKNLCVVIYIYDATKTYDCAKKSIVYKSIIKGAEVMKIIKRNGAEETFDRQKIKDAIAKANNETDGTPELTDRQIDYISLVIEDHCNEMNRALSVEEIQELVETHIILQGAPETAKRYIRYRFTRNLARASNTTDNQILSLIECNNEEVKQENSNKNPTVNSVQRDYMAGEVSKDLTKRILLPEDIVKAHEEGLIHFHDADYFAQHMHNCDLVNLEDMLQNGTVISGTMIEKPHSFSTACNIATQIIAQVASNQYGGQSISLAHLAPFVQISREKITRQVRAEMEEFGIDADDEQVKSLVEKRVRDEIKRGVQTIQYQVVTLLTTNGQAPFVTVFMYLNEAKNEQEKKDLAIIIEEVLKQRIKGTKNEVGVWVTPAFPKLIYVLEEDNITEDSRFWYLTKLAAECTAKRMVPDYISEKIMLKLKIDKNGNGNCYTCMGCRSFLTPYVDENGKPKYYGRFNQGVVTINLVDVACTAARDGSKSEEKFWQVLDERLELCHRALQCRHERLEGTLSDAAPILWQYGALARLKKGEPIDKLLHGGYSTLSLGYAGLWECVYEITGKKLTEKEGEEFGLRVMQRLNDACAEWKAAENIDYSIYGTPLESTTYKFAKCLQNRFGIIKGVTDRNYITNSYHIHVTEKIDAFSKLELESKFQKLSPGGAISYVEVPNMQQNIPAVLEVMKFIYNNIMYAELNTKSDYCQVCGYDGEIQIVEEDGKLVWRCPNCGNEDQSKMNVARRTCGYIGSQFWNQGRTQEIKERVLHL

SEQ ID NO: 854 - protein, 768 aa, unidentified
  REGION 1..768: note = Category: MG60 effectors
  REGION 1..768: note = Description: MG60-63 effector
  source 1..768: note = uncultivated organism sequence
MFCSCKKNLCVVIYIYDATKTYDCAKKLIVYKSIIKGAEVMKIIKRNGAEETFDRQKIKDAIAKANNETDGAPELTDRQIDYISLVIEDHCNEMNRALSVEEIQELVETHIILQGAPETAKRYIRYRFTRNLARASNTTDNQILSLIECNNEEVKQENSNKNPTVNSVQRDYMAGEVSKDLTKRILLPEDIVKAHEEGLIHFHDADYFAQHMHNCDLVNLEDMLQNGTVISGTMIEKPHSFSTACNIATQIIAQVASNQYGGQSISLAHLAPFVQISREKITRQVRAEMEEFGIDADDEQVKNLVEKRVRDEIKRGVQTIQYQVVTLLTTNGQAPFVTVFMYLNEAKNEQEKKDLAIIIEEVLKQRIKGTKNEVGVWVTPAFPKLIYVLEEDNITEDSRFWYLTKLAAECTAKRMVPDYISEKIMLKLKIDKNGNGNCYTCMGCRSFLTPYVDENGKPKYYGRFNQGVVTINLVDVACTAARDGSKSEEKFWQVLDERLELCHRALQCRHERLEGTLSDAAPILWQYGALARLKKGEPIDKLLHGGYSTLSLGYAGLWECVYEITGKKLTEKEGEEFGLRVMQRLNDACAEWKAAENIDYSIYGTPLESTTYKFAKCLQNRFGIIKGVTDRNYITNSYHIHVTEKIDAFSKLELESKFQKLSPGGAISYVEVPNMQQNIPAVLEVMKFIYNNIMYAELNTKSDYCQVCGYDGEIQIVEEDGKLVWRCPNCGNEDQSKMNVARRTCGYIGSQFWNQGRTQEIKERVLHL

SEQ ID NO: 855 - protein, 760 aa, unidentified
  REGION 1..760: note = Category: MG60 effectors
  REGION 1..760: note = Description: MG60-64 effector
  source 1..760: note = uncultivated organism sequence
MLVVIYIYNATKTYDCAKKLIVYKSIIKGAEVMKIIKRNGAEETFDRQKIKDAIAKANNETDGTPELTDRQIDYISLVIEDHCNEMNRALSVEEIQELVETHIILQGAPETAKRYIRYRFTRNLARASNTTDNQILSLIECNNEEVKQENSNKNPTVNSVQRDYMAGEVSKDLTKRILLPEDIVKAHEEGLIHFHDADYFAQHMHNCDLVNLEDMLQNGTVISGTMIEKPHSFSTACNIATQIIAQVASNQYGGQSISLAHLAPFVQISREKITRQVRAEMEEFGIAADDEQVKSLVEKRVRDEIKRGVQTIQYQVVTLLTTNGQAPFVTVFMYLNEAKNEQEKKDLAIIIEEVLKQRIKGTKNEVGVWVTPAFPKLIYVLEEDNITEDSRFWYLTKLAAECTAKRMVPDYISEKIMLKLKIDKNGNGNCYTCMGCRSFLTPYVDENGKPKYYGRFNQGVVTINLVDVACTAARDGNKSEEKFWQVLDERLELCHRALQCRHERLEGTLSDAAPILWQYGALARLKKGEPIDKLLHGGYSTLSLGYAGLWECVYEITGKKLTEKEGEEFGLRVMQRLNDACAEWKAAENIDYSIYGTPLESTTYKFAKCLQNRFGIIKGVTDRNYITNSYHIHVTEKIDAFSKLELESKFQKLSPGGAISYVEVPNMQQNIPAVLEVMKFIYNNIMYAELNTKSDYCQVCGYDGEIQIVEEDGKLVWRCPNCGNEDQSKMNVARRTCGYIGSQFWNQGRTQEIKERVLHL

SEQ ID NO: 856 - protein, 768 aa, unidentified
  REGION 1..768: note = Category: MG60 effectors
  REGION 1..768: note = Description: MG60-65 effector
  source 1..768: note = uncultivated organism sequence
MFCSCKKNLCVVIYIYDATKTYDCAKKLIVYKSIIKGAEVMKIIKRNGAEETFDRQKIKDAISKANNETDGTPELTDRQIDYISLVIEDHCNEMNRALSVEEIQELVETHIILQGAPETAKRYIRYRFTRNLARASNTTDNQILSLIECNNEEVKQENSNKNPTVNSVQRDYMAGEVSKDLTKRILLPEDIVKAHEEGLIHFHDADYFAQHMHNCDLVNLEDMLQNGTVISGTMIEKPHSFSTACNIATQIIAQVASNQYGGQSISLAHLAPFVQISREKITRQVRAEMEEFGIDADDEQVKSLVEKRVRDEIKRGVQTIQYQVVTLLTTNGQAPFVTVFMYLNEAKNEQEKKDLAIIIEEVLKQRIKGTKNEVGVWVTPAFPKLIYVLEEDNITEDSRFWYLTKLAAECTAKRMVPDYISEKIMLKLKIDKNGNGNCYTCMGCRSFLTPYVDENGKPKYYGRFNQGVVTINLVDVACTAARDGNKSEEKFWQVLDERLELCHRALQCRHERLEGTLSDAAPILWQYGALARLKKGEPIDKLLHGGYSTLSLGYAGLWECVYEITGKKLTEKEGEEFGLRVMQRLNDACAEWKAAENIDYSIYGTPLESTTYKFAKCLQNRFGIIKGVTDRNYITNSYHIHVTEKIDAFSKLELESKFQKLSPGGAISYVEVPNMQQNIPAVLEVMKFIYNNIMYAELNTKSDYCQVCGYDGEIQIVEEDGKLVWRCPNCGNEDQSKMNVARRTCGYIGSQFWNQGRTQEIKERVLHL

SEQ ID NO: 857 - protein, 769 aa, unidentified
  REGION 1..769: note = Category: MG60 effectors
  REGION 1..769: note = Description: MG60-66 effector
  source 1..769: note = uncultivated organism sequence
MKVIKRDGTIVEYDREKIRIAIEKANKEVSRKEKATDSEIEEIMSYIEDLKKGRILVEDIQDIIEEKLMEIKRYELAKKYITYRYTRALVRKANTTDQSIKELIEGESEYWNNENANKNARVVTTQRDYLAGITSTDITRRFLLPEDVVKAHDEGIIHFHDADYFAQNALTNCELINLEDMLQNGTIMNGVMIEKPHRFITACTIATQIILAVTSSTYGGATVSLAHLAPFVRSSYEKYYKKYKENGLSKEQCEKFAKEDTKKEVADGVQTFNYQVNSMTNTNGQAPFLSVCMYLGETDEYKEELAMIIEEFLNQRILGFKNEKGVYITPAFPKLLYVLEEDNIHENSKYWYLTELAAKCTAKRMVPDYISEKIMKQMKVDANGDGQCYPCMGCRSFLTPYIDPVTKKPKYYGRFNQGVVTINLVDVALSSGKDLKKFWKIYDERLELCHKALQARHERLAKATSDIAPILWQHGAFARLPKGASIHPLLHGGYSTISLGYAGLYECVKYMTGKSHTDNGDGKDFAIEVMKKMNEKCAEWKEAEDIDYSVYGTPIESTTYKFAKCLQKRFGKIKGITDKNYITNSYHVPVFEEIDAFSKLKLESEFQRLSPGGAISYVETPNLQNNLEVVLQIMKFIYDNIMYAELNTKSDYCQKCGYTGEILIDDNLEWYCPNCGNRDHNTLNVARRTCGYIGSNFWNKGRTQEIKERVLHIDNKDDDCDCDECNCDHANTDTSKEEKSEEKQMNFMDYDVEEEITKSKKHMKQPAMV

SEQ ID NO: 858 - protein, 768 aa, unidentified
  REGION 1..768: note = Category: MG60 effectors
  REGION 1..768: note = Description: MG60-67 effector
  source 1..768: note = uncultivated organism sequence
MFCSCKKNLCVVIYIYDATKTYDCAKKLIVYKSIIKGAEVMKIIKRNGAEETFDRQKIKDAIAKANNETDGTPELTDRQIDYISLVIEDHCNEMNRALSVEEIQELVETHIILQGAPETAKRYIRYRFTRNLARASNTTDNQILSLIECNNEEVKQENSNKNPTVNSVQRDYMAGEVSKDLTKRILLPEDIVKAHEEGLIHFHDADYFAQHMHNCDLVNLEDMLQNGTVISGTMIEKPHSFSTACNIATQIIAQVASNQYGGQSISLAHLAPFVQISREKITRQVRAEMEEFGIDADDEQVKSLVEKRVRDEIKRGVQTIQYQVVTLLTTNGQAPFVTVFMYLNEAKNEQEKKDLAIIIEEVLKQRIKGTKNEVGVWVTPAFPKLIYVLEEDNITEDSRFWYLTKLAAECTAKRMVPDYISEKIMLKLKIDKNGNGNCYTCMGCRSFLTPYVDENGKPKYYGRFNQGVVTINLVDVACTAARDGNKSEEKFWQVLDERLELCHRALQCRHERLEGTLSDAAPILWQYGALARLKKGEPIDKLLHGGYSTLSLGYAGLWECVYEIKGKKLTEKEGEEFGLRVMQRLNDACAEWKAAENIDYSIYGTPLESTTYKFAKCLQNRFGIIKGVTDRNYITNSYHIHVTEKIDAFSKLELESKFQKLSPGGAISYVEVPNMQQNIPAVLEVMKFIYNNIMYAELNTKSDYCQVCGYDGEIQIVEEDGKLVWRCPNCGNEDQSKMNVARRTCGYIGSQFWNQGRTQEIKERVLHL

SEQ ID NO: 859 - protein, 768 aa, unidentified
  REGION 1..768: note = Category: MG60 effectors
  REGION 1..768: note = Description: MG60-68 effector
  source 1..768: note = uncultivated organism sequence
MFCSCKKNLCVVIYIYNATKTYDCAKKLIVYKSIIKGAEVMKIIKRNGAEETFDRQKIKDAIAKANNETDGTPELTDRQIDYISLVIEDHCNEMNRALSVEEIQELVETHIILQGAPETAKRYIRYRFTRNLARASNTTDNQILSLIECNNEEVKQENSNKNPTVNSVQRDYMAGEVSKDLTKRILLPEDIVKAHEEGLIHFHDADYFAQHMHNCDLVNLEDMLQNGTVISGTMIEKPHSFSTACNIATQIIAQVASNQYGGQSISLAHLAPFVQISREKITRQVRAEMEEFGIAADDEQVKSLVEKRVRDEIKRGVQTIQYQVVTLLTTNGQAPFVTVFMYLNEAKNEQEKKDLAIIIEEVLKQRIKGTKNEVGVWVTPAFPKLIYVLEEDNITEDSRFWYLTKLAAECTAKRMVPDYISEKIMLKLKIDKNGNGNCYTCMGCRSFLTPYVDENGKPKYYGRFNQGVVTINLVDVACTAARDGNKSEEKFWQVLDERLELCHRALQCRHERLEGTLSDAAPILWQYGALARLKKGEPIDKLLHGGYSTLSLGYAGLWECVYEITGKKLTEKEGEEFGLRVMQRLNDACAEWKAAENIDYSIYGTPLESTTYKFAKCLQNRFGIIKGVTDRNYITNSYHIHVTEKIDAFSKLELESKFQKLSPGGAISYVEVPNMQQNIPAVLEVMKFIYNNIMYAELNTKSDYCQVCGYDGEIQIVEEDGKLVWRCPNCGNEDQSKMNVARRTCGYIGSQFWNQGRTQEIKERVLHL

SEQ ID NO: 860 - protein, 768 aa, unidentified
  REGION 1..768: note = Category: MG60 effectors
  REGION 1..768: note = Description: MG60-69 effector
  source 1..768: note = uncultivated organism sequence
MFCSCKKNLCVVIYIYDATKTYDCAKKLIVYKSIIKGAEVMKIIKRNGAEETFDRQKIKDAIAKANNETDGTPELTDRQIDYISLVIEDHCNEMNRALSVEEIQELVETHIILQGAPETAKRYIRYRFTRNLARASNTTDNQILSLIECNNEEVKQENSNKNPTVNSVQRDYMAGEVSKDLTKRILLPEDIVKAHEEGLIHFHDADYFAQHMHNCDLVNLEDMLQNGTVISGTMIEKPHSFSTACNIATQIIAQVASNQYGGQSISLAHLAPFVQISREKITRQVRAEMEEFGIAADDEQVKSLVEKRVRDEIKRGVQTIQYQVVTLLTTNGQAPFVTVFMYLNEAKNEQEKKDLAIIIEEVLKQRIKGTKNEVGVWVTPAFPKLIYVLEEDNITEDSRFWYLTKLAAECTAKRMVPDYISEKIMLKLKVDKNGNGNCYTCMGCRSFLTPYVDENGKPKYYGRFNQGVVTINLVDVACTAARDGSKSEEKFWQVLDERLELCHRALQCRHERLEGTLSDAAPILWQYGALARLKKGEPIDKLLHGGYSTLSLGYAGLWECVYEITGKKLTEKEGEEFGLRVMQRLNDACAEWKAAENIDYSIYGTPLESTTYKFAKCLQNRFGIIKGVTDRNYITNSYHIHVTEKIDAFSKLELESKFQKLSPGGAISYVEVPNMQQNIPAVLEVMKFIYNNIMYAELNTKSDYCQVCGYDGEIQIVEEDGKLVWRCPNCGNEDQSKMNVARRTCGYIGSQFWNQGRTQEIKERVLHL

SEQ ID NO: 861 - protein, 768 aa, unidentified
  REGION 1..768: note = Category: MG60 effectors
  REGION 1..768: note = Description: MG60-70 effector
  source 1..768: note = uncultivated organism sequence
MFCSCKKKLCVVIYIYNATKTYDCAKKLIVYKSIIKGAEVMKIIKRNGAEETFDRQKIKDAIAKANNETDGTPELTDRQIDYISLVIEDHCNEMNRALSVEEIQELVETHIILQGAPETAKRYIRYRFTRNLARASNTTDNQILSLIECNNEEVKQENSNKNPTVNSVQRDYMAGEVSKDLTKRILLPEDIVKAHEEGLIHFHDADYFAQHMHNCDLVNLEDMLQNGTVISGTMIEKPHSFSTACNIATQIIAQVASNQYGGQSISLAHLAPFVQISREKITRQVRAEMEEFGIDADDEQVKSLVEKRVRDEIKRGVQTIQYQVVTLLTTNGQAPFVTVFMYLNEAKNEQEKKDLAIIIEEVLKQRIKGTKNEVGVWVTPAFPKLIYVLEEDNITEDSRFWYLTKLAAECTAKRMVPDYISEKIMLKLKIDKNGNGNCYTCMGCRSFLTPYVDENGKPKYYGRFNQGVVTINLVDVACTAARDGSKSEEKFWQVLDERLELCHRALQCRHERLEGTLSDAAPILWQYGALARLKKGEPIDKLLHGGYSTLSLGYAGLWECVYEITGKKLTEKEGEEFGLRVMQRLNDACAEWKAAENIDYSIYGTPLESTTYKFAKCLQNRFGIIKGVTDRNYITNSYHIHVTEKIDAFSKLELESKFQKLSPGGAISYVEVPNMQQNIPAVLEVMKFIYNNIMYAELNTKSDYCQVCGYDGEIQIVEEDGKLVWRCPNCGNEDQSKMNVARRTCGYIGSQFWNQGRTQEIKERVLHL

SEQ ID NO: 862 - protein, 768 aa, unidentified
  REGION 1..768: note = Category: MG60 effectors
  REGION 1..768: note = Description: MG60-71 effector
  source 1..768: note = uncultivated organism sequence
MFCSCKKNLRVVIYIYNATKTYDCAKKLIVYKSIIKGAEVMKIIKRNGAEETFDRQKIKDAIAKANNETDGTPELTDRQIDYISLVIEDHCNEMNRALSVEEIQELVETHIILQGAPETAKRYIRYRFTRNLARASNTTDNQILSLIECNNEEVKQENSNKNPTVNSVQRDYMAGEVSKDLTKRILLPEDIVKAHEEGLIHFHDADYFAQHMHNCDLVNLEDMLQNGTVISGTMIEKPHSFSTACNIATQIIAQVASNQYGGQSISLAHLAPFVQISREKITRQVRAEMEEFGIAADDEQVKSLVEKRVRDEIKRGVQTIQYQVVTLLTTNGQAPFVTVFMYLNEAKNEQEKKDLAIIIEEVLKQRIKGTKNEVGVWVTPAFPKLIYVLEEDNITEDSRFWYLTKLAAECTAKRMVPDYISEKIMLELKIDKNGNGNCYTCMGCRSFLTPYVDENGKPKYYGRFNQGVVTINLVDVACTAARDGNKSEEKFWQVLDERLELCHRALQCRHERLEGTLSDAAPILWQYGALARLKKGEPIDKLLHGGYSTLSLGYAGLWECVYEITGKKLTEKEGEEFGLRVMQRLNDACAEWKAAENIDYSIYGTPLESTTYKFAKCLQNRFGIIKGVTDRNYITNSYHIHVTEKIDAFSKLELESKFQKLSPGGAISYVEVPNMQQNIPAVLEVMKFIYNNIMYAELNTKSDYCQVCGYDGEIQIVEEDGKLVWRCPNCGNEDQSKMNVARRTCGYIGSQFWNQGRTQEIKERVLHL

SEQ ID NO: 863 - protein, 768 aa, unidentified
  REGION 1..768: note = Category: MG60 effectors
  REGION 1..768: note = Description: MG60-72 effector
  source 1..768: note = uncultivated organism sequence
MFCSCKKNLCVVIYIYDATKTYDCAKKLIVYKSIIKGAEVMKIIKRNGAEETFDRQKIKDAIAKANNETDGTPELTDRQIDYISLVIEDHCNEMNRALSVEEIQELVETHIILQGAPETAKRYIRYRFTRNLARASNTTDNQILSLIECNNEEVKQENSNKNPTVNSVQRDYMAGEVSKDLTKRILLPEDIVKAHEEGLIHFHDADYFAQHMHNCDLVNLEDMLQNGTVISGTMIEKPHSFSTACNIATQIIAQVASNQYGGQSISLAHLAPFVQISREKITRQVRAEMEEFGIAADDEQVKSLVEKRVRDEIKRGVQTIQYQVVTLLTTNGQAPFVTVFMYLNEAKNEQEKKDLAIIIEEVLKQRIKGTKNEVGVWVTPAFPKLIYVLEEDNITEDSRFWYLTKLAAECTAKRMVPDYISEKIMLKLKIDKNGNGNCYTCMGCRSFLTPYVDENGKPKYYGRFNQGVVTINLVDVACTAARDGNKSEEKFWQVLDERLELCHRALQCRHERLEGTLSDAAPILWQYGALARLKKGEPIDKLLHGGYSTLSLGYAGLWECVYEITGKKLTEKEGEEFGLRVMQRLNDACAEWKAAENIDYSIYGTPLESTTYKFAKCLQNRFGIIKGVTDRNYITNSYHIHVTEKIDAFSKLELESKFQKLSPGGAISYVEVPNMQQNIPAVLEVMKFIYNNIMYAELNTKSDYCQVCGYDGEIQIVEEDGKLVWRCPNCGNEDQSKMNVARRTCGYIGSQFWNQGRTQEIKERVLHL

SEQ ID NO: 864 - protein, 768 aa, unidentified
  REGION 1..768: note = Category: MG60 effectors
  REGION 1..768: note = Description: MG60-73 effector
  source 1..768: note = uncultivated organism sequence
MFCSCKKNLCVVIYIYNATKTYDCAKKLIVYKSIIKGAEVMKIIKRNGAEETFDRQKIKDAIAKANNETDGTPELTDRQIDYISLVIEDHCNEMNRALSVEEIQELVETHIILQGAPETAKRYIRYRFTRNLARASNTTDNQILSLIECNNEEVKQENSNKNPTVNSVQRDYMAGEVSKDLTKRILLPEDIVKAHEEGLIHFHDADYFAQHMHNCDLVNLEDMLQNGTVISGTMIEKPHSFSTACNIATQIIAQVASNQYGGQSISLAHLAPFVQISREKITRQVRAEMEEFGIDADDEQVKSLVEKRVRDEIKRGVQTIQYQVVTLLTTNGQAPFVTVFMYLNEAKNEQEKKDLAIIIEEVLKQRIKGTKNEVGVWVTPAFPKLIYVLEEDNITEDSRFWYLTKLAAECTAKRMVPDYISEKIMLKLKIDKNGNGNCYTCMGCRSFLTPYVDENGNPKYYGRFNQGVVTINLVDVACTAARDGSKSEEKFWQVLDERLELCHRALQCRHERLEGTLSDAAPILWQYGALARLKKGEPIDKLLHGGYSTLSLGYAGLWECVYEITGKKLTEKEGEEFGLRVMQRLNDACAEWKAAENIDYSIYGTPLESTTYKFAKCLQNRFGIIKGVTDRNYITNSYHIHVTEKIDAFSKLELESKFQKLSPGGAISYVEVPNMQQNIPAVLEVMKFIYNNIMYAELNTKSDYCQVCGYDGEIQIVEEDGKLVWRCPNCGNEDQSKMNVARRTCGYIGSQFWNQGRTQEIKERVLHL

SEQ ID NO: 865 - protein, 768 aa, unidentified
  REGION 1..768: note = Category: MG60 effectors
  REGION 1..768: note = Description: MG60-74 effector
  source 1..768: note = uncultivated organism sequence
MFCSCKKNLCVVIYIYNATKTYDCAKKIIVYKSIIKGAEVMKIIKRNGAEETFDRQKIKDAISKANNETDGTPELTDRQIDYISLVIEDHCNEMNRALSVEEIQELVETHIILQGAPETAKRYIRYRFTRNLARASNTTDNQILSLIECNNEEVKQENSNKNPTVNSVQRDYMAGEVSKDLTKRILLPEDIVKAHEEGLIHFHDADYFAQHMHNCDLVNLEDMLQNGTVISGTMIEKPHSFSTACNIATQIIAQVASNQYGGQSISLAHLAPFVQISREKITRQVRAEMEEFGIAADDEQVKSLVEKRVRDEIKRGVQTIQYQVVTLLTTNGQAPFVTVFMYLNEAKNEQEKKDLAIIIEEVLKQRIKGTKNEVGVWVTPAFPKLIYVLEEDNITEDSRFWYLTKLAAECTAKRMVPDYISEKIMLKLKIDKNGNGNCYTCMGCRSFLTPYVDENGKPKYYGRFNQGVVTINLVDVACTAARDGNKSEEKFWQVLDERLELCHRALQCRHERLEGTLSDAAPILWQYGALARLKKGEPIDKLLHGGYSTLSLGYAGLWECVYEITGKKLTEKEGEEFGLRVMQRLNDACAEWKAAENIDYSIYGTPLESTTYKFAKCLQNRFGIIKGVTDRNYITNSYHIHVTEKIDAFSKLELESKFQKLSPGGAISYVEVPNMQQNIPAVLEVMKFIYNNIMYAELNTKSDYCQVCGYDGEIQIVEEDGKLVWRCPNCGNEDQSKMNVARRTCGYIGSQFWNQGRTQEIKERVLHL

SEQ ID NO: 866 - protein, 768 aa, unidentified
  REGION 1..768: note = Category: MG60 effectors
  REGION 1..768: note = Description: MG60-75 effector
  source 1..768: note = uncultivated organism sequence
MFCSCKKKLCVVIYIYDATKTYDCAKKSIVYKSIIKGAEVMKIIKRNGAEETFDRQKIKDAIAKANNETDGTPELTDRQIDYISLVIEDHCNEMNRALSVEEIQELVETHIILQGAPETAKRYIRYRFTRNLARASNTTDNQILSLIECNNEEVKQENSNKNPTVNSVQRDYMAGEVSKDLTKRILLPEDIVKAHEEGLIHFHDADYFAQHMHNCDLVNLEDMLQNGTVISGTMIEKPHSFSTACNIATQIIAQVASNQYGGQSISLAHLAPFVQISREKITRQVRAEMEEFGIDADDEQVKSLVEKRVRDEIKRGVQTIQYQVVTLLTTNGQAPFVTVFMYLNEAKNEQEKKDLAIIIEEVLKQRIKGTKNEVGVWVTPAFPKLIYVLEEDNITEDSRFWYLTKLAAECTAKRMVPDYISEKIMLKLKIDKNGNGNCYTCMGCRSFLTPYVDENGKPKYYGRFNQGVVTINLVDVACTAARDGNKSEEKFWQVLDERLELCHRALQCRHERLEGTLSDAAPILWQYGALARLKKGEPIDKLLHGGYSTLSLGYAGLWECVYEITGKKLTEKEGEEFGLRVMQRLNDACAEWKAAENIDYSIYGTPLESTTYKFAKCLQNRFGIIKGVTDRNYITNSYHIHVTEKIDAFSKLELESKFQKLSPGGAISYVEVPNMQQNIPAVLEVMKFIYNNIMYAELNTKSDYCQVCGYDGEIQIVEEDGKLVWRCPNCGNEDQSKMNVARRTCGYIGSQFWNQGRTQEIKERVLHL

SEQ ID NO: 867 - protein, 768 aa, unidentified
  REGION 1..768: note = Category: MG60 effectors
  REGION 1..768: note = Description: MG60-76 effector
  source 1..768: note = uncultivated organism sequence
MFCSCKKNLRVVIYICNAIKTYDRAKKLIVYKSIVKGVEVMKIIKRNGAEETFDRQKIKDAIAKANNETDGTPELTDRQIDYISLVIEDHCNEMNRALSVEEIQELVETHIILQGAPETAKRYIRYRFTRNLARASNTTDNQILSLIECNNEEVKQENSNKNPTVNSVQRDYMAGEVSKDLTKRILLPEDIVKAHEEGLIHFHDADYFAQHMHNCDLVNLEDMLQNGTVISGTMIEKPHSFSTACNIATQIIAQVASNQYGGQSISLAHLAPFVQISREKITRQVRAEMEEFGIAADDEQVKSLVEKRVRDEIKRGVQTIQYQVVTLLTTNGQAPFVTVFMYLNEAKNEQEKKDLAIIIEEVLKQRIKGTKNEVGVWVTPAFPKLIYVLEEDNITEDSRFWYLTKLAAECTAKRMVPDYISEKIMLKLKIDKNGNGNCYTCMGCRSFLTPYVDENGKPKYYGRFNQGVVTINLVDVACTAARDGNKSEEKFWQVLDERLELCHRALQCRHERLEGTLSDAAPILWQYGALARLKKGEPIDKLLHGGYSTLSLGYAGLWECVYEITGKKLTEKEGEEFGLRVMQRLNDACAEWKAAENIDYSIYGTPLESTTYKFAKCLQNRFGIIKGVTDRNYITNSYHIHVTEKIDAFSKLELESKFQKLSPGGAISYVEVPNMQQNIPAVLEVMKFIYNNIMYAELNTKSDYCQVCGYDGEIQIVEEDGKLVWRCPNCGNEDQSKMNVARRTCGYIGSQFWNQGRTQEIKERVLHL

SEQ ID NO: 868 - protein, 768 aa, unidentified
  REGION 1..768: note = Category: MG60 effectors
  REGION 1..768: note = Description: MG60-77 effector
  source 1..768: note = uncultivated organism sequence
MFCSCKKKLCVVIYIYDATKTYDCAKKLIVYKSIIKGAEVMKIIKRNGAEETFDRQKIKDAISKANNETDGTPELTDRQIDYISLVIEDHCNEMNRALSVEEIQELVETHIILQGAPETAKRYIRYRFTRNLARASNTTDNQILSLIECNNEEVKQENSNKNPTVNSVQRDYMAGEVSKDLTKRILLPEDIVKAHEEGLIHFHDADYFAQHMHNCDLVNLEDMLQNGTVISGTMIEKPHSFSTACNIATQIIAQVASNQYGGQSISLAHLAPFVQISREKITRQVRAEMEEFGIDADDEQVKSLVEKRVRDEIKRGVQTIQYQVVTLLTTNGQAPFVTVFMYLNEAKNEQEKKDLAIIIEEVLKQRIKGTKNEVGVWVTPAFPKLIYVLEEDNITEDSRFWYLTKLAAECTAKRMVPDYISEKIMLKLKIDKNGNGNCYTCMGCRSFLTPYVDENGKPKYYGRFNQGVVTINLVDVACTAARDGSKSEEKFWQVLDERLELCHRALQCRHERLEGTLSDAAPILWQYGALARLKKGEPIDKLLHGGYSTLSLGYAGLWECVYEITGKKLTEKEGEEFGLRVMQRLNDACAEWKAAENIDYSIYGTPLESTTYKFAKCLQNRFGIIKGVTDRNYITNSYHIHVTEKIDAFSKLELESKFQKLSPGGAISYVEVPNMQQNIPAVLEVMKFIYNNIMYAELNTKSDYCQVCGYDGEIQIVEEDGKLVWRCPNCGNEDQSKMNVARRTCGYIGSQFWNQGRTQEIKERVLHL

SEQ ID NO: 869 - protein, 768 aa, unidentified
  REGION 1..768: note = Category: MG60 effectors
  REGION 1..768: note = Description: MG60-78 effector
  source 1..768: note = uncultivated organism sequence
MFCSCKKNLCVVIYIYNATKTYDCAKKLIVYKSIIKGAEVMKIIKRNGAEETFDRQKIKDAIAKANNETDGTPELTDRQIDYISLVIEDHCNEMNRALSVEEIQELVETHIILQGAPETAKRYIRYRFTRNLARASNTTDNQILSLIECNNEEVKQENSNKNPTVNSVQRDYMAGEVSKDLTKRILLPEDIVKAHEEGLIHFHDADYFAQHMHNCDLVNLEDMLQNGTVISGTMIEKPHSFSTACNIATQIIAQVASNQYGGQSISLAHLAPFVQISREKITRQVRAEMEEFGIDADDEQVKSLVEKRVRDEIKRGVQTIQYQVVTLLTTNGQAPFVTVFMYLNEAKNEQEKKDLAIIIEEVLKQRIKGTKNEVGVWVTPAFPKLIYVLEEDNITEDSRFWYLTKLAAECTAKRMVPDYISEKIMLKLKIDKNGNGNCYTCMGCRSFLTPYVDENGKPKYYGRFNQGVVTINLVDVACTAARDGNKSEEKFWQVLDERLELCHRALQCRHERLEGTLSDAAPILWQYGALARLKKGEPIDKLLHGGYSTLSLGYAGLWECVYEITGKKLTEKEGEEFGLRVMQRLNDACAEWKAAENIDYSIYGTPLESTTYKFAKCLQNRFGIIKGVTDRNYITNSYHIHVTEKIDAFSKLELESKFQKLSPGGAISYVEVPNMQQNIPAVLEVMKFIYNNIMYAELNTKSDYCQVCGYDGEIQIVEEDGKLVWRCPNCGNEDQSKMNVARRTCGYIGSQFWNQGRTQEIKERVLHL

SEQ ID NO: 870 - protein, 763 aa, unidentified
  REGION 1..763: note = Category: MG60 effectors
  REGION 1..763: note = Description: MG60-79 effector
  source 1..763: note = uncultivated organism sequence
MKTIQQLYSIFVAFATVFLKNKYIIRTYKSNKKYLIDIRKMALLKDLYTRKEWGKMKVIKRDGRTIEFDREKIEVAIEKANKEVRGKEKATKDEINEIIAYIEDLGKKRMLVEDIQDVIEEKLMELDKYELAKKYIVYRYTRALVRKSNTTDESILGLIKNENKELAEENSNKNTMLASTQRDYIAGEVSRDLTKRILLPEKISKAHEEGILHFHDADYFVQPIFNCCLINIGDMLDNGTAMNGKMIETPKSFQVACTVTTQIIAAVASNQYGGQSVDLKHLGKYLRRSHDKFQKRLTEKYGGKLPKQTIDDMIRDRVKEELAAGVQTIQYQINTLMTTNGQSPFVTLFLHLEPDDEYIKENAMIIEEVLKQRIQGIKNEVGVYVTPAFPKLVYVLDEHNCLKGGKYDYLTRLAVKCSAKRMYPDYISAKKMKENYEGNVFSPMGCRSFLVPWKDENGNYKFEGRFNQGVVSINLPQIAIIAQGDEDKFWKLFDERLELCREALMCRHYALLGTSSDISPIHWQNGAIARLKKGEKIDKYLKDGYSTLSLGYIGIYETTKLIKGVSHTTPEGHDFAIKIMKYLKDRTNLWRKETGLGFSLYGTPAESLCYRFARIDKEKFGSIPDVTDKGYYTNSYHVDVREKIDAFHKLKFESEFQPLSAGGAISYIEVPNMKNNLTALEEVVKFIYDNIQYAEFNTKSDYCQVCGYDGEMIINDQNEWECPQCGNKDHNKMNVVRRTCGYLGENFWNVGKTKEIKSRVLHL

SEQ ID NO: 871 - protein, 768 aa, unidentified
  REGION 1..768: note = Category: MG60 effectors
  REGION 1..768: note = Description: MG60-80 effector
  source 1..768: note = uncultivated organism sequence
MFYSCKRNLCVVIYIYNATKTYDCAKKLIVYKSIIKGAEVMKIIKRNGAEETFDRQKIKDAIAKANNETDGTPELTDRQIDYISLVIEDHCNEMNRALSVEEIQELVETHIILQGAPETAKRYIRYRFTRNLARASNTTDNQILSLIECNNEEVKQENSNKNPTVNSVQRDYMAGEVSKDLTKRILLPEDIVKAHEEGLIHFHDADYFAQHMHNCDLVNLEDMLQNGTVISGTMIEKPHSFSTACNIATQIIAQVASNQYGGQSISLAHLAPFVQISREKITRQVRAEMEEFGIDADDEQVKSLVEKRVRDEIKRGVQTIQYQVVTLLTTNGQAPFVTVFMYLNEAKNEQEKKDLAIIIEEVLKQRIKGTKNEVGVWVTPAFPKLIYVLEEDNITEDSRFWYLTKLAAECTAKRMVPDYISEKIMLKLKIDKNGNGNCYTCMGCRSFLTPYVDENGKPKYYGRFNQGVVTINLVDVACTAARDGNKSEEKFWQVLDERLELCHRALQCRHERLEGTLSDAAPILWQYGALARLKKGEPIDKLLHGGYSTLSLGYAGLWECVYEIKGKKLTEKEGEEFGLRVMQRLNDACAEWKAAENIDYSIYGTPLESTTYKFAKCLQNRFGIIKGVTDRNYITNSYHIHVTEKIDAFSKLELESKFQKLSPGGAISYVEVPNMQQNIPAVLEVMKFIYNNIMYAELNTKSDYCQVCGYDGEIQIVEEDGKLVWRCPNCGNEDQSKMNVARRTCGYIGSQFWNQGRTQEIKERVLHL

SEQ ID NO: 872 - protein, 760 aa, unidentified
  REGION 1..760: note = Category: MG60 effectors
  REGION 1..760: note = Description: MG60-81 effector
  source 1..760: note = uncultivated organism sequence
MCVVIYIYDATKTYDCAKKLFVYKSIIKGAEVMKIIKRNGAEETFDRQKIKDAIAKANNETDGTPELTDRQIDYISLVIEDHCNEMNRALSVEEIQELVETHIILQGAPETAKRYIRYRFTRNLARASNTTDNQILSLIECNNEEVKQENSNKNPTVNSVQRDYMAGEVSKDLTKRILLPEDIVKAHEEGLIHFHDADYFAQHMHNCDLVNLEDMLQNGTVISGTMIEKPHSFSTACNIATQIIAQVASNQYGGQSISLAHLAPFVQISREKITRQVRAEMEEFGIAADDEQVKSLVEKRVRDEIKRGVQTIQYQVVTLLTTNGQAPFVTVFMYLNEAKNEQEKKDLAIIIEEVLKQRIKGTKNEVGVWVTPAFPKLIYVLEEDNITEDSRFWYLTKLAAECTAKRMVPDYISEKIMLELKIDKNGNGNCYTCMGCRSFLTPYVDENGKPKYYGRFNQGVVTINLVDVACTAARDGNKSEEKFWQVLDERLELCHRALQCRHERLEGTLSDAAPILWQYGALARLKKGEPIDKLLHGGYSTLSLGYAGLWECVYEITGKKLTEKEGEEFGLRVMQRLNDACAEWKAAENIDYSIYGTPLESTTYKFAKCLQNRFGIIKGVTDRNYITNSYHIHVTEKIDAFSKLELESKFQKLSPGGAISYVEVPNMQQNIPAVLEVMKFIYNNIMYAELNTKSDYCQVCGYDGEIQIVEEDGKLVWRCPNCGNEDQSKMNVARRTCGYIGSQFWNQGRTQEIKERVLHL

SEQ ID NO: 873 - protein, 763 aa, unidentified
  REGION 1..763: note = Category: MG60 effectors
  REGION 1..763: note = Description: MG60-82 effector
  source 1..763: note = uncultivated organism sequence
MKIIQQLYSIFVAFATVFLKNKYIIRTYKSNKKYLIDIRKMALLKDLYTRKEWGKMKVIKRDGRTIEFDREKIEVAIEKANKEVRGKEKATKDEINEIIAYIEDLGKKRMLVEDIQDVIEEKLMELDKYELAKKYIVYRYTRALVRKSNTTDESILGLIKNENKELAEENSNKNTMLASTQRDYIAGEVSRDLTKRILLPEKISKAHEEGILHFHDADYFVQPIFNCCLINIGDMLDNGTAMNGKMIETPKSFQVACTVTTQIIAAVASNQYGGQSVDLKHLGKYLRRSHDKFQKRLTEKYGGKLPKQTIDDMIRDRVKEELAAGVQTIQYQINTLMTTNGQSPFVTLFLHLEPDDEYIKENAMIIEEVLKQRIQGIKNEVGVYVTPAFPKLVYVLDEHNCLKGGKYDYLTRLAVKCSAKRMYPDYISAKKMKENYEGNVFSPMGCRSFLVPWKDENGNYKFEGRFNQGVVSINLPQIAIIAQGDEDKFWKLFDERLELCREALMCRHYALLGTSSDISPIHWQNGAIARLKKGEKIDKYLKDGYSTLSLGYIGIYETTKLIKGVSHTTPEGHDFAIKIMKYLKDRTNLWRKETGLGFSLYGTPAESLCYRFARIDKEKFGSIPDVTDKGYYTNSYHVDVREKIDAFHKLKFESEFQPLSAGGAISYIEVPNMKNNLTALEEVVKFIYDNIQYAEFNTKSDYCQVCGYDGEMIINDQNEWECPQCGNKDHNKMNVVRRTCGYLGENFWNVGKTKEIKSRVLHL

SEQ ID NO: 874 - protein, 769 aa, unidentified
  REGION 1..769: note = Category: MG60 effectors
  REGION 1..769: note = Description: MG60-83 effector
  source 1..769: note = uncultivated organism sequence
MKVIKRDGTIVEYDREKIRIAIEKANKEVSRKEKATDSEIEEIMSYIEDLKKGRILVEDIQDIIEEKLMEIKRYELAKKYITYRYTRALVRKANTTDQSIKELIEGESEYWNNENANKNARVVTTQRDYLAGITSTDITRRFLLPEDVVKAHDEGIIHFHDADYFAQNALTNCELINLEDMLQNGTIMNGVMIEKPHRFITACTIATQIILAVTSSTYGGATVSLAHLAPFVRSSYEKYYKKYKDNGLSKEQCEKFAKEDTKKEVADGVQTFNYQVNSMTNTNGQAPFLSVCMYLGETDEYKEELAMIIEEFLNQRILGFKNEKGVYITPAFPKLLYVLEEDNIHENSKYWYLTELAAKCTAKRMVPDYISEKIMKQMKVDANGDGQCYPCMGCRSFLTPYIDPVTNKPKYYGRFNQGVVTINLVDVALSSGKDLKKFWKIYDERLELCHKALQARHERLAKATSDIAPILWQHGAFARLPKGASIHPLLHGGYSTISLGYAGLYECVKYMTGKSHTDNGDGKDFAIEVMKKMNEKCAEWKDAEDIDYSVYGTPIESTTYKFAKCLQKRFGKIKGITDKNYITNSYHVPVFEEIDAFSKLKLESEFQRLSPGGAISYVETPNLQNNLEVVLQIMKFIYDNIMYAELNTKSDYCQKCGYTGEILIDDNLEWYCPNCGNRDHNTLNVARRTCGYIGSNFWNKGRTQEIKERVLHIDNKDDDCDCDECNCDHANTDTSKEEKSEEKQMNFMDYDVEEEITKSKKHMKQPAMV

SEQ ID NO: 875 - protein, 985 aa, unidentified
  REGION 1..985: note = Category: MG60 effectors
  REGION 1..985: note = Description: MG60-84 effector
  source 1..985: note = uncultivated organism sequence
MQEFAHKVAEEVMSKNTDMTVEDIQDLVVRRLMASKYKEVAKSYVEYRYLHELIRQSNTTDKTIKELIDGDNEYWNTENSNKNPRVVTTQRDYIAGVTSTDIARRLLLPKDVVTAHDEGIIHFHDMDYFAQKSLHNCFLKSTKFITKEGLRSFEDFNNGDIIEVLSIDGKYHKAVVKQYGVQPLYKYTFYNGKKENTHDVIATENHRWILKDGKETTNLKIGDKLCKAPVIYSQNLDWENLTENEQLMWCKGFGLGDGTKEYGTNSTRIRLCESKDLQYLNRFSISGCNIRNTKFKNEDREVVIYNYRKTIPEFNSIKELQCFINGLYCADGRKKQMVNGKYNFGLQSSSLEVINFLREMADTAGLYITKENERTGEITNFTTEQGRPYTILFSFNSDFDFHYTVLNKEFYGEDEVWCLEVEDTHNFILEYGIPTGNCELVNLEDMLQNGTVINGVKIEKPHRLLTAATISTQIITAVTSSSYGGCTINIAHLAPFVRDSFEYHKKKYLSRGFNEVDAEKYANEDTKKEVTDAVQTFNYQVNSMTNTNGQAPFLSVFMYLNDNPEYIKETAMLIEEFLKQRIVGFKNEVGHYVTPAFPKLLYVLDDNNITEDSKYWDLTVLAAKCTAKRMVPDYISAKIMRRDKVDKNGDGNVYGCMGCRSFLTPYVDLETNKPKYWGRFNQGVVTINLPDIALSSHGDFDEFWKLFNERTELCHKALKCRHERLALATADVAPILWRYGALARLPKGASIHPLLHNGYSTLSLGYAGLYECVKYMTGESHSHGKGFDFGIQVMQALNDKCKEWKADENIDYSLYRSPIETTTYKFAKCLKKRFGEIEGVTDKDYITNSYHINVREEIDPFDKLEIESKYQKLSPRGAISYIECADLTKNIPAVLEVLKFIYDHIMYAELNTKSDYCQVCGYEHEIEIVDEDGKLYWRCPNCGNTDQTKMNVARRTCGYIGSQFWNQGRTQEIKERYVHMDNHEE

SEQ ID NO: 876 - protein, 768 aa, unidentified
  REGION 1..768: note = Category: MG60 effectors
  REGION 1..768: note = Description: MG60-85 effector
  source 1..768: note = uncultivated organism sequence
MFCSCKNNLCVVIYIYDATKTYDCAKKLIVYKSIIKGAEVMKIIKRNGAEETFDRQKIKDAIAKANNETDGTPELTDRQIDYISLVIEDHCNEMNRALSVEEIQELVETHIILQGAPETAKRYIRYRFTRNLARASNTTDNQILSLIECNNEEVKQENSNKNPTVNSVQRDYMAGEVSKDLTKRILLPEDIVKAHEEGLIHFHDADYFAQHMHNCDLVNLEDMLQNGTVISGTMIEKPHSFSTACNIATQIIAQVASNQYGGQSISLAHLAPFVQISREKITRQVRAEMEEFGIDADDEQVKSLVEKRVRDEIKRGVQTIQYQVVTLLTTNGQAPFVTVFMYLNEAKNEQEKKDLAIIIEEVLKQRIKGTKNEVGVWVTPAFPKLIYVLEEDNITEDSRFWYLTKLAAECTAKRMVPDYISEKIMLKLKIDKNGNGNCYTCMGCRSFLTPYVDENGKPKYYGRFNQGVVTINLVDVACTAARDGSKSEEKFWQVLDERLELCHRALQCRHERLEGTLSDAAPILWQYGALARLKKGEPIDKLLHGGYSTLSLGYAGLWECVYEITGKKLTEKEGEEFGLRVMQRLNDACAEWKAAENIDYSIYGTPLESTTYKFAKCLQNRFGIIKGVTDRNYITNSYHIHVTEKIDAFSKLELESKFQKLSPGGAISYVEVPNMQQNIPAVLEVMKFIYNNIMYAELNTKSDYCQVCGYDGEIQIVEEDGKLVWRCPNCGNEDQSKMNVARRTCGYIGSQFWNQGRTQEIKERVLHL

SEQ ID NO: 877 - protein, 1032 aa, unidentified
  REGION 1..1032: note = Category: MG60 effectors
  REGION 1..1032: note = Description: MG60-86 effector
  source 1..1032: note = uncultivated organism sequence
MIVTKRDGRQVEFDKDKIVKAISKAFVEVYSTVTDEMSGFANKVATEISSKEADMTVEEIQDIVTKKLMLSRYKDVARRYIEYRYLHHLVRESNTTDKSIKELIDGENDYWNTENSNKNPRIVTTQRDYIAGITSTDIARRFLLPPEIVKAHDEGILHFHDMDYFAQKSLHNCFSGDTKLVTDLGVRSFNSFADGAVIKVKDKNGVWREATVKKYGKQKMFDVTFKTPKSEKTVTCTQNHRWILDTGEVTTNLQVGDKLFPLTDSASNYVPNTLEELRAFCFGFVLGDGCDCSDKGVQVRLCNDKNEYLEYFIKAGYKYYQVTNSNDYVAYNRTEYSKQSFLNNNAWKLLSLNQKIALFHGYYCADGRKNSHSISTTNNRLMAMIEEISALAGYYIGSKFEEHRHSNYVEDFSITTYSFIIEQKAKNWLWTVKEIKPHYNKKYKDNRQGRENSFKTCNPTMDAWCVEEPVTHTFTLSNGMVTGNCELVNLEDMLQNGTVINGVKIDKPHRLLTAATIATQIITAVTSSSYGGCSINLAHLAPFVRDSYEYHKNKYLKRGMNELDAEAFAGQDTDKEVSDAVQTFNYQVNSMTNTNGQAPFLSVFMYINDNMEYRAETVTLIAEFLRQRMIGFKNEVGHYVTPAFPKLLYVLDENNCEPNTEYWWLTKLAAECTAKRMVPDYISAKIMKRDKIDANGNGNVFACMGCRSFLTPYLDSNNKPKYWGRFNQGVVTINLPDVALSSKGDKEKFWQLFDERLELCHKAMQCRHERLALATSDVAPILWQHGALARLPKGASIHPLLHGGYSTLSLGYAGLYECVKYMTGESHSHGKGKEFGLAVMQHLNDKCNEWKEAEDIAYSPYGSPIESTTYKFAKCLKKRFGVIEGITDKDYITNSYHINVREEIDPFSKLAIEAEYQKLSQGGAISYIECADLTNNISAVLEVIKFIYNNIMYAELNTKSDYCQVCGYDGEIEIVDNNGTLSWRCPNCGNTDQTKMNVARRTCGYIGSQFWNQGRTQEIKERYVHLDNHEMK

SEQ ID NO: 878 - protein, 768 aa, unidentified
  REGION 1..768: note = Category: MG60 effectors
  REGION 1..768: note = Description: MG60-87 effector
  source 1..768: note = uncultivated organism sequence
MFCSCKKNLCVVIYIYNATKTYDCAKKLIVYKSIIKGAEVMKIIKRNGAEETFDRQKIKDAIAKANNETDGTPELTDRQIDYISLVIEDHCNEMNRALSVEEIQELVETHIILQGAPETAKRYIRYRFTRNLARASNTTDNQILSLIECNNEEVKQENSNKNPTVNSVQRDYMAGEVSKDLTKRILLPEDIVKAHEEGLIHFHDADYFAQHMHNCDLVNLEDMLQNGTVISGTMIEKPHSFSTACNIATQIIAQVASNQYGGQSISLAHLAPFVQISREKITRQVRAEMEEFGIDADDEQVKSLVEKRVRDEIKRGVQTIQYQVVTLLTTNGQAPFVTVFMYLNEAKNEQEKKDLAIIIEEVLKQRIKGTKNEVGVWVTPAFPKLIYVLEEDNITEDSRFWYLTKLAAECTAKRMVPDYISEKIMLKLKVDKNGNGNCYTCMGCRSFLTPYVDENGKPKYYGRFNQGVVTINLVDVACTAARDGSKSEEKFWQVLDERLELCHRALQCRHERLEGTLSDAAPILWQYGALARLKKGEPIDKLLHGGYSTLSLGYAGLWECVYEITGKKLTEKEGEEFGLRVMQRLNDACAEWKAAENIDYSIYGTPLESTTYKFAKCLQNRFGIIKGVTDRNYITNSYHIHVTEKIDAFSKLELESKFQKLSPGGAISYVEVPNMQQNIPAVLEVMKFIYNNIMYAELNTKSDYCQVCGYDGEIQIVEEDGKLVWRCPNCGNEDQSKMNVARRTCGYIGSQFWNQGRTQEIKERVLHL

SEQ ID NO: 879 - protein, 768 aa, unidentified
  REGION 1..768: note = Category: MG60 effectors
  REGION 1..768: note = Description: MG60-88 effector
  source 1..768: note = uncultivated organism sequence
MFCSCKKNLRVVIYIYNATKTYDCAKKSIVYKSIIKGAEVMKIIKRNGAEETFDRQKIKDAIAKANNETDGTPELTDRQIDYISLVIEDHCNEMNRALSVEEIQELVETHIILQGAPETAKRYIRYRFTRNLARASNTTDNQILSLIECNNEEVKQENSNKNPTVNSVQRDYMAGEVSKDLTKRILLPEDIVKAHEEGLIHFHDADYFAQHMHNCDLVNLEDMLQNGTVISGTMIEKPHSFSTACNIATQIIAQVASNQYGGQSISLAHLAPFVQISREKITRQVRAEMEEFGIDADDEQVKSLVEKRVRDEIKRGVQTIQYQVVTLLTTNGQAPFVTVFMYLNEAKNEQEKKDLAIIIEEVLKQRIKGTKNEVGVWVTPAFPKLIYVLEEDNITEDSRFWYLTKLAAECTAKRMVPDYISEKIMLKLKIDKNGNGNCYTCMGCRSFLTPYVDENGKPKYYGRFNQGVVTINLVDVACTAARDGNKSEEKFWQVLDERLELCHRALQCRHERLEGTLSDAAPILWQYGALARLKKGEPIDKLLHGGYSTLSLGYAGLWECVYEIKGKKLTEKEGEEFGLRVMQRLNDACAEWKAAENIDYSIYGTPLESTTYKFAKCLQNRFGIIKGVTDRNYITNSYHIHVTEKIDAFSKLELESKFQKLSPGGAISYVEVPNMQQNIPAVLEVMKFIYNNIMYAELNTKSDYCQVCGYDGEIQIVEEDGKLVWRCPNCGNEDQSKMNVARRTCGYIGSQFWNQGRTQEIKERVLHL

SEQ ID NO: 880 - protein, 768 aa, unidentified
  REGION 1..768: note = Category: MG60 effectors
  REGION 1..768: note = Description: MG60-89 effector
  source 1..768: note = uncultivated organism sequence
MFCSCKKNLCVVIYIYDATKTYDCAKKLIVYKSIIKGAEVMKIIKRNGAEETFDRQKIKDAIAKANNETDGTPELTDRQIDYISLVIEDHCNEMNRALSVEEIQELVETHIILQGAPETAKRYIRYRFTRNLARASNTTDNQILSLIECNNEEVKQENSNKNPTVNSVQRDYMAGEVSKDLTKRILLPEDIVKAHEEGLIHFHDADYFAQHMHNCDLVNLEDMLQNGTVISGTMIEKPHSFSTACNIATQIIAQVASNQYGGQSISLAHLAPFVQISREKITRQVRAEMEEFGIAADDEQVKSLVEKRVRDEIKRGVQTIQYQVVTLLTTNGQAPFVTVFMYLNEAKNEQEKKDLAIIIEEVLKQRIKGTKNEVGVWVTPAFPKLIYVLEEDNITEDSRFWYLTKLAAECTAKRMVPDYISEKIMLKLKIDKNGNGNCYTCMGCRSFLTPYVDENGKPKYYGRFNQGVVTINLVDVACTAARDGNKSEEKFWQVLDERLELCHRALQCRHERLEGTLSDAAPILWQYGALARLKKGEPIDKLLHGGYSTLSLGYAGLWECVYEITGKKLTEKEGEEFGLRVMQRLNDACAEWKAAENIDYSIYGTPLESTTYKFAKCLQNRFGIIKGVTDRNYITNSYHIHVTEKIDAFSKLELESKFQKLSPGGAISYVEVPDMQQNIPAVLEVMKFIYNNIMYAELNTKSDYCQVCGYDGEIQIVEEDGKLVWRCPNCGNEDQSKMNVARRTCGYIGSQFWNQGRTQEIKERVLHL

SEQ ID NO: 881 - protein, 768 aa, unidentified
  REGION 1..768: note = Category: MG60 effectors
  REGION 1..768: note = Description: MG60-90 effector
  source 1..768: note = uncultivated organism sequence
MFCSCKKNLCVVIYIYDATKTYDCAKKLIVYKSIIKGAEVMKIIKRNGAEETFDRQKIKDAIAKANNETDGTPELTDRQIDYISLVIEDHCNEMNRALSVEEIQELVETHIILQGAPETAKRYIRYRFTRNLARASNTTDNQILSLIECNNEEVKQENSNKNPTVNSVQRDYMAGEVSKDLTKRILLPEDIVKAHEEGLIHFHDADYFAQHMHNCDLVNLEDMLQNGTVISGTMIEKPHSFSTACNIATQIIAQVASNQYGGQSISLAHLAPFVQISREKITRQVRAEMEEFGIDADDEQVKSLVEKRVRDEIKRGVQTIQYQVVTLLTTNGQAPFVTVFMYLNEAKNEQEKKDLAIIIEEVLKQRIKGTKNEVGVWVTPAFPKLIYVLEEDNITEDSRFWYLTKLAAECTAKRMVPDYISEKIMLKLKVDKNGNGNCYTCMGCRSFLTPYVDENGKPKYYGRFNQGVVTINLVDVACTAARDGSKSEEKFWQVLDERLELCHRALQCRHERLEGTLSDAAPILWQYGALARLKKGEPIDKLLHGGYSTLSLGYAGLWECVYEITGKKLTEKEGEEFGLRVMQRLNDACAEWKAAENIDYSIYGTPLESTTYKFAKCLQNRFGIIKGVTDRNYITNSYHIHVTEKIDAFSKLELESKFQKLSPGGAISYVEVPNMQQNIPAVLEVMKFIYNNIMYAELNTKSDYCQVCGYDGEIQIVEEDGKLVWRCPNCGNEDQSKMNVARRTCGYIGSQFWNQGRTQEIKERVLHL

SEQ ID NO: 882 - protein, 768 aa, unidentified
  REGION 1..768: note = Category: MG60 effectors
  REGION 1..768: note = Description: MG60-91 effector
  source 1..768: note = uncultivated organism sequence
MFCSCKKNLRVVIYIYNATKTYDCAKKLIVYKSIIKGAEVMKIIKRNGAEETFDRQKIKDAIAKANNETDGTPELTDRQIDYISLVIEDHCNEMNRALSVEEIQELVETHIILQGAPETAKRYIRYRFTRNLARASNTTDNQILSLIECNNEEVKQENSNKNPTVNSVQRDYMAGEVSKDLTKRILLPEDIVKAHEEGLIHFHDADYFAQHMHNCDLVNLEDMLQNGTVISGTMIEKPHSFSTACNIATQIIAQVASNQYGGQSISLAHLAPFVQISREKITRQVRAEMEEFGIDADDEQVKSLVEKRVRDEIKRGVQTIQYQVVTLLTTNGQAPFVTVFMYLNEAKNEQEKKDLAIIIEEVLKQRIKGTKNEVGVWVTPAFPKLIYVLEEDNITEDSRFWYLTKLAAECTAKRMVPDYISEKIMLKLKIDKNGNGNCYTCMGCRSFLTPYVDENGKPKYYGRFNQGVVTINLVDVACTAARDGSKSEEKFWQVLDERLELCHRALQCRHERLEGTLSDAAPILWQYGALARLKKGEPIDKLLHGGYSTLSLGYAGLWECVYEITGKKLTEKEGEEFGLRVMQRLNDACAEWKAAENIDYSIYGTPLESTTYKFAKCLQNRFGIIKGVTDRNYITNSYHIHVTEKIDAFSKLELESKFQKLSPGGAISYVEVPNMQQNIPAVLEVMKFIYNNIMYAELNTKSDYCQVCGYDGEIQIVEEDGKLVWRCPNCGNEDQSKMNVARRTCGYIGSQFWNQGRTQEIKERVLHL

SEQ ID NO: 883 - protein, 763 aa, unidentified
  REGION 1..763: note = Category: MG60 effectors
  REGION 1..763: note = Description: MG60-92 effector
  source 1..763: note = uncultivated organism sequence
MKIIQQLYSIFVAFATVFLKNKYIIRTYKSNKKYLIDIRKMALLKDLYTRKEWGKMKVIKRDGRTIEFDREKIEIAIEKANKEVRGKEKATKDEINEIIAYIEDLGKKRMLVEDIQDVIEEKLMELDKYELAKKYIVYRYTRALVRKSNTTDESILGLIKNENKELAEENSNKNTMLASTQRDYIAGEVSRDLTKRILLPEKISKAHEEGILHFHDADYFVQPIFNCCLINIGDMLDNGTAMNGKMIETPKSFQVACTVTTQIIAAVASNQYGGQSVDLKHLGKYLRRSHDKFQKRLTEKYGGKLPKQTIDDMIRDRVKEELAAGVQTIQYQINTLMTTNGQSPFVTLFLHLEPDDEYIKENAMIIEEVLKQRIQGIKNEVGVYVTPAFPKLVYVLDEHNCLKGGKYDYLTRLAVKCSAKRMYPDYISAKKMKENYEGNVFSPMGCRSFLVPWKDENGNYKFEGRFNQGVVSINLPQIAIIAQGDEDKFWKLFDERLELCREALMCRHYALLGTSSDISPIHWQNGAIARLKKGEKIDKYLKDGYSTLSLGYIGIYETTKLIKGVSHTTPEGHDFAIKIMKYLKDRTNLWRKETGLGFSLYGTPAESLCYRFARIDKEKFGSIPDVTDKGYYTNSYHVDVREKIDAFHKLKFESEFQPLSAGGAISYIEVPNMKNNLTALEEVVKFIYDNIQYAEFNTKSDYCQVCGYDGEMIINDQNEWECPQCGNKDHNKMNVVRRTCGYLGENFWNVGKTKEIKSRVLHL

SEQ ID NO: 884 - protein, 1291 aa, unidentified
  REGION 1..1291: note = Category: MG60 effectors
  REGION 1..1291: note = Description: MG60-93 effector
  source 1..1291: note = uncultivated organism sequence
MKLRKVYACILTLCMLVSMLPAFAADTDASCTHKWTEKVIKEANCTQTGLVKKTCELCGDFEYEKTPFKHGEGKEVVKDATCTKPETVGLYCEKCGELIGKVQEVGKALGHDLGKGTEKKADCAGPDRVEYTCKRCGETVVEAIEGGEAAKKHDWEAKIVPATCKTKGYEARVCKACGKVEKDKELPIDGNAHVAKLGKVIREATCTTNGLGRSVCELCGKELGYITIKAGHKYGDPICDEGKEVTCGKAGYGYYVCTVCGEETEKAEIPATGKHAFVDETDIPATCTEPEKIGRICKVCGAADGEVEEIGEALGHDWDDGVYTKADCLKAEREVFTCKRCGKTRDEFIPNGEAAKGHKFVDKIVAPTCKTKGYTERTCERCDLYEKINETEIDKDAHVAKLDKTIREATCTVNGLGRYTCELCGEYLGYRAIEAKHVYGEPIFDEGKEATCGKPGYGYYVCTVCNEKTEKTEIPATGKHQFVDEFVIPATCEEPMKVGRICKVCGKADGKVQEIDKPLGHAWDDGKYMAVDCEKAERVVYTCERCGEVKEEIIPNGEAAKGHKFVDKIVAPTCKTKGYTERTCERCDLYEKINETEIDKDAHVAKLDKTIREATCTVNGLGRYTCELCGEYLGYRAIEAKHVYGAPIFDEGKEATCGKDGYGYYVCTVCGEKTDKDVIPATGKHEFVDETVIPATCTEPEKVGRICKVCGKADGKVQEIDKPLGHDWDDGELKDADCEKAERVVTTCKRCGEIREDSFEGAKPATGHKLVEKIVAPTCKTKGYTERTCERCDLYEKINETEIDKDAHVAKLDKTIREATCTVNGLGRYTCELCGEYLGYRAIEAKHVYGEPIFDEGKEATCGKPGYGYYVCTVCNEKSEKTEIPATGKHQFVDEFVIDATCEEPMKVGRICKVCGKTDGEVKTVGEKLGHDWDDGELKDADCEKAERVVYTCKRCGETKEDVIGTEVLGHKYKEKVVEPTCKTKGYKAKVCSVCGNTEVIEELEPVAGNHVAKLDKVIREATCSANGLGRYVCAECGNYIGYRAIVVEHKWGEEYANEDATAIMHKCEVCGTVEVIWKDSSDECEDGKHVIVVDPAKAATCTETGLTEGKHCSVCDKVLVKQEVIPATGHTEVVDEAKAATCTEAGLTEGKHCSVCNAVLVKQEEIPALGHTEVVDEGKAATCTEAGLTEGKHCSVCSEVLVKQEEIPATGHVEEILPAVAPTDTEPGLTEGKKCSVCGKILVEQEVIPAHEHEHNYVLKGYDFNADFTKKVATYECTICGDTYTEEMDF

SEQ ID NO: 885 - protein, 874 aa, unidentified
  REGION 1..874: note = Category: MG60 effectors
  REGION 1..874: note = Description: MG60-94 effector
  source 1..874: note = uncultivated organism sequence
MKIIETKVFKGKNIYSLKKCIRLDVDLEGYCETPSKNIEDFNFNLVNMIPELRTHRCGIDEDEGFIKRLKEGTYLAHICEHIILAIQNKLGIDVHYGKSREIKEDHYYIVFQYIYENTALEVAKLAIDIINALINKIPINYDERIEFLKEILNNEILGPSTKSICDYANKVGLPIIKLGNGEFYQIGYGKQGRIIEASISPNTSCISVDIACDKMLTKELLRTQSIPVAKGSKVKNVINLLKEAEEIGYPVVLKPQYGNKGKGVILNLKSEKELLDAYRKIKDKFKDIIIEKYHKGKDFRVCVVNYKVVAVSLRIPPFVIGNGKDTIFELINKLNEDPLRGEDHEKPLTKVKLDEEVIDAISEQRKTLMEVLDKGEKIYLRKNANLSTGGEAIDFTDEICDENINLCIRIAKTLKLDICGIDICTDDISIPIYKNGVVMEVNAAPGLRMHLNPSKGKSRDIGKEIVNMIYNNKPCNIPIVAITGTNGKTTTTRLITHTLSKMGYCVGMTSSSGIYINDECIDVGDDTGFESAKSVLLNPDVEIAVLETARGGIIKKGLAYDLADVAVITNIREDHLGIDEINSMEDLCCVKSLVGEAVKDEGYVVINADDKWSKSILNRIKSRKVYFTLNSSNEILIKKNQDDIYVYLENEDIIIINQNKKYVLCNINEVPITMNGMLKFNIENILAATSALVAMKVDYCMIKNGITTYLLNSKKNSGRFNCYNVNGVNVILDYGHNTDGYIAVLSSVKKMSSKRIFGIVGIPGDRLNKSAEEIGCISAKYFDYIIVKEDKDLRGRKQGEIANLIVDGLIKENSNKKYEVILDEEVALIKALNMAEKGDTIVVFFEEIKPLLKVIEEIASFETKRKSDSYEALN

SEQ ID NO: 886 - protein, 777 aa, unidentified
  REGION 1..777: note = Category: MG60 effectors
  REGION 1..777: note = Description: MG60-95 effector
  source 1..777: note = uncultivated organism sequence
MPKSIDLITSIWYYVKGFVDKSYKFVTDTTRLTHPRNLRQRGMDMNIIKRNGSEAVFDLNKIIVAVSKANQACEKKELSQGQINDIAEYVEFKIGKANRALSVEEIQDIVEDQIMAQGAFEVAKRYVKYRYTRSLVRKANTTDNQILSLIECNNEEVKQENSNKNPTVNSVQRDYMAGEVSKDITKRILLPQDIVEAHENGIIHFHDADYFAQHMHNCDLVNLEDMLQNGTVISDTMIEKPHSFSTACNIATQIIAQVASSQYGGQSISLTHLAPFVQISREKIRKQVIDEAVDFGSELTEEKIDKITERRLRDEVSRGVQTIQYQVVTLLTTNGQAPFVTVFMYLNEAKNEQEKKDLALIIEETLKQRIQGVKNESGVWVTPAFPKLIYVLENDNVDEDSEYFYLTELAAKCTAKRMVPDYVSEKVMLDLKGDVYTPMGCRSFLTPDRFTEAGVGNIARAKNYVEGKKKYYGRFNQGVVTINLVDVACTSGGDMTKFWQIFDERLNLCYRALMCRHNRLKGTLSDAAPILWQHGALARLDKGEPIDRLLYDGYSTISLGYAGLYECTKYMTGKSHTDENGGKEFALSVMRHMNEACDKWKEETNIDFSIYGTPLESTTYKFAKCLQKRFGIIKGVTDKNYITNSYHVHVTEKIDAFTKLKFESEFQALSPGGAISYVEVPNMQDNIPAVLQVMRFIYDNIMYAELNTKSDYCQCCGYDGEIKIVEDEHGKLIWRCPNCGNEDQDKMNVARRTCGYIGTQFWNQGRTQEIKDRVLHL

SEQ ID NO: 887 - protein, 895 aa, unidentified
  REGION 1..895: note = Category: MG60 effectors
  REGION 1..895: note = Description: MG60-96 effector
  source 1..895: note = uncultivated organism sequence
MAKALLIAEKNSVARTINAYIKRYGFKDDVTCAALSGHLVHMVEPNKYCEEWDGKWNLEVLPMIPRDFKYEVINDDRIKKIYSDLKQVIRDNHYDYLINACDPEREGQAIFYYVYNKMGCKLPVKRYWENGQTDASVKHALNNLRDGLDETGYPNLKLLTQAAYLRGQFDWLVGMNFTRAASLTMNGVAKVGRVKTAVLKICVDLEKRIIDFVPKTSYGIKTEIAEDIEAINVERLEEDSRVKYVEANYETKEEASTICETLPKSMKLISKDTLRLKDNPDKLFSLGTLQVAASKEYGYSVEQTLAIAQSLYEKKILSYPRTSNPYISSNEASLFDEMLNAIKMIPGLEGVVTYIGDKKTQDRVKTNKMYVNDKETKEAGHYALIPTGERFNFDSLSSEEKSILKLVAYRFAAIFMPSGIDEKTTYIFDAGSKYFRTTIYNTLELGYRSIYNDTPKKSKKPNINKGDMIKVSCYELYEMTSTPPRRLTDGRLVDVMINPQKYLLDNHYKKIIKETKGLGTDATRANIINELAKDKYIEIKGKGNLIYATPTGIKIIENLGDMEITSVDLTAKWETKLYDVSTGKLSVDDFKSEMLEYIKRNTEVFKNKRFNAIGDKANGRESVGKCPSCGGNIFEALNSYYCENFKREGPGCKVILSKSIKGSKVTKANLKKILAGKESTEISLKIEKDGIIKSVKKKLYFNPDSGKIEFVRPQYKALTTCSFCGGIVNASDKAAICSGCGISFARKIKGAVLEDEDLISLYHGQPTKELRFSTIKDGIPKKFNASLIYNYEKRQLGFHYKEAKKFGKCPICGEGFTGPIEGKYGAYYKCSNKVCGLIIKEEIGGVKLTSSDIDILLKGDSLPVKEFKKNDGIGSYKAALFVNRETKKLDRKFSK

SEQ ID NO: 888 - protein, 1186 aa, unidentified
  REGION 1..1186: note = Category: MG60 effectors
  REGION 1..1186: note = Description: MG60-98 effector
  source 1..1186: note = uncultivated organism sequence
MMNKVLLTDAVPDIEKYWDYEANEGKKPSDFGASSSEKVWTKCPICGTSIRRNVRFTWEKDENGVGHVIHCRTCGKRNNNNSLVVLFPDIKKYWIYEKNEYDPEYYSISSGKKVYTSCPSCGEERYIAICDLIVKRNDRYELTQCIECSPKRNVIGSIAKNYPDIDKYWDDSNASNPNEIALNSQEIIFIHCPTCDKVVKRKALNSFRRDDQTGLYMLLDCHKCATQKAGKIRGLNQSGALIDKCPEIEEWWDAENNTIEFKNITRGSHYEAQLKCPACHSSFTRQIHSFVNVKRDGRLLPVACPECGYSTKGDPKDNILKLCPEIEQWWDYEANSPYRPEQFSKGSQFKAHFICPDCEMHLYTGIHSLMKSDENGNLHIRHKGKCLKFRLMESDNNLVKQYPQIKEWWDYEENGKALPEEFTIYSGKRMHFICPQCGAKSYRRITDAFAIEANSGEPILFNCPYCRNKKILAGKNSLLDTDPELAKEWSPNNNKKANEVLSKSFNRVQWICPNCKGEYSAIIRDRKVGDDACPYCKNDKVLPGFNSLQYKNPELAKEWSNSNDMKADEVLPTSSSRVKWVCPTCHGEYYAIIRGRKVGDDACPYCRKDKLLPGYNSLLNTDPELAKEWSNSNDMKADEVLPTSSSRVKWVCPTCHGEYSAIIRERKVGDDACPYCRNDKLLPGYNSLQDKKPELAKEWSTRNTLKADAVLFTSSSRAQWVCPTCHKEYSAIIRDRKLGDDSCPHCRQTKLLKEHTSLWVVNPELAKEWSDSNDLKADEVLPTSSFRVKWVCPTCRGEYYAIIRDRKVGDDACPYCRKDKLLPGYNSLLNTDPELAKEWSNSNDLKASEVLPTSSHRAQWVCPTCHGEYFAIIRDRKVGDDACPYCKNDKVLPGFNSLQYKNPELAKEWSNSNDMKADEVLPTSSSRVKWVCPTCRGEYYAAIRDRKVGDDACPYCRNDKLLPGYNSLLNTDPELAKEWSNSNDMKADEVLPTSSSRVKWVCPTCHGEYYAAIRDRKVGDDACPYCKNDKVLPGFNSLQYKNPELAKEWSNSNDMKADEVLPTSSSRVKWVCPTCRGEYYAAIRDRKVGDDSCPYCRNKKALAGLNSLLDMQPELVEREWCYPENILIGVYPDQILESYQGKAWWKCPICKRKYFMSVKDRLMKQKRGHVACPQCRGRRCVRSFWV

SEQ ID NO: 889 - protein, 824 aa, unidentified
  REGION 1..824: note = Category: MG60 effectors
  REGION 1..824: note = Description: MG60-99 effector
  source 1..824: note = uncultivated organism sequence
MKELNDSILALVMDDTEEKLMAENTEIDKEELGLACPKCGKRIIEDGTAYRCEAGDFKCGKEILGTEISRDELQKAIAGQSDELGFRSSKTGKTFLARLVLSEAKDSLDFRFSDRNGEDSGLKCPKCGGKIVDDGKAYKCESGDFKCWKIIRGHEITREELQKALDGKSDELGFTSRDSGKPYKGRLVLNEAKDGLAVKLDSRKSDDTGLKCPKCGGKIIDDGKAYKCESGDFKCWKSIRGHEVTRDELQKVIDEGSSDELDFTDQDTGKPYTARLKLSSDKKSVEVPKPEDTGEKCPNCRNKIMETDKAYWCESCNFTCDKEILGTRISHDDLHKIVEEGNSDELDFTDHDSGKSYKAHLNLSSDKQTVDVPKPEDTGEKCPNCRNKIMETDKAYWCESCNFTCDKEILGTRISHDQLHKIVEEGRSDELDFTDHDSGKSYKARLNLSEDNKTVVVPKPKDTGIKCPKCTMKIMETDRAYWCESEACDFTCDKEILDTKITRDELKKVVLNGKSGKLDFTDKDTKKPYKGRLVLNKKKNGLHVDKLDYMKVIFAVISFVVATISFIGIFLPDLFNMNKGSITRFETTLSDKKSAQKLEEFLDANVGKIVELTIHYKQNLVYGLVPWAKYSEDSYYGVKYDPAKDGSWWWDSASAAHDVTFSHFGDNNRFYVKSFLYDKNLFEVEYRDFGGIGYCDAITRYAYQLMIPYVKNDKLAFEWQRDREKSKDYVALPSPYWVLKGTFVVNVKKGEELTDNITTLYDEFQQRKLRSDYGKDYVVPEIAKILAVDPACGERTGNGDYSFSGKSFELEPLTQQQLLQMAYN

SEQ ID NO: 890 - protein, 768 aa, unidentified
  REGION 1..768: note = Category: MG60 effectors
  REGION 1..768: note = Description: MG60-100 effector
  source 1..768: note = uncultivated organism sequence
MFCSCKKNLCVVIYIYDATKTYDCAKKSIVYKSIIKGAEVMKIIKRNGAEETFDRQKIKDAIAKANNETDGTPELTDRQIDYISLVIEDHCNEMNRALSVEEIQELVETHIILQGAPETAKRYIRYRFTRNLARASNTTDNQILSLIECNNEEVKQENSNKNPTVNSVQRDYMAGEVSKDLTKRILLPEDIVKAHEEGLIHFHDADYFAQHMHNCDLVNLEDMLQNGTVISGTMIEKPHSFSTACNIATQIIAQVASNQYGGQSISLAHLAPFVQISREKITRQVRAEMEEFGIAADDEQVKSLVEKRVRDEIKRGVQTIQYQVVTLLTTNGQAPFVTVFMYLNEAKNEQEKKDLAIIIEEVLKQRIKGTKNEVGVWVTPAFPKLIYVLEEDNITEDSRFWYLTKLAAECTAKRMVPDYISEKIMLKLKIDKNGNGNCYTCMGCRSFLTPYVDENGKPKYYGRFNQGVVTINLVDVACTAARDGNKSEEKFWQVLDERLELCHRALQCRHERLEGTLSDAAPILWQYGALARLKKGEPIDKLLHGGYSTLSLGYAGLWECVYEITGKKLTEKEGEEFGLHVMQRLNDACAEWKAAENIDYSIYGTPLESTTYKFAKCLQNRFGIIKGVTDRNYITNSYHIHVTEKIDAFSKLELESKFQKLSPGGAISYVEVPNMQQNIPAVLEVMKFIYNNIMYAELNTKSDYCQVCGYDGEIQIVEEDGKLVWRCPNCGNEDQSKMNVARRTCGYIGSQFWNQGRTQEIKERVLHL

SEQ ID NO: 891 - protein, 768 aa, unidentified
  REGION 1..768: note = Category: MG60 effectors
  REGION 1..768: note = Description: MG60-101 effector
  source 1..768: note = uncultivated organism sequence
MFCSCKKNLRVVIYIYNATKTYDCAKKLIVYKSIIKGAEVMKIIKRNGAEETFDRQKIKDAIAKANNETDGTPELTDRQIDYISLVIEDHCNEMNRALSVEEIQELVETHIILQGAPETAKRYIRYRFTRNLARASNTTDNQILSLIECNNEEVKQENSNKNPTVNSVQRDYMAGEVSKDLTKRILLPEDIVKAHEEGLIHFHDADYFAQHMHNCDLVNLEDMLQNGTVISGTMIEKPHSFSTACNIATQIIAQVASNQYGGQSISLAHLAPFVQISREKITRQVRAEMEEFGIDADDEQVKSLVEKRVRDEIKRGVQTIQYQVVTLLTTNGQAPFVTVFMYLNEAKNEQEKKDLAIIIEEVLKQRIKGTKNEVGIWVTPAFPKLIYVLEEDNITEDSRFWYLTKLAAECTAKRMVPDYISEKIMLKLKIDKNGNGNCYTCMGCRSFLTPYVDENGKPKYYGRFNQGVVTINLVDVACTAARDGNKSEEKFWQVLDERLELCHRALQCRHERLEGTLSDAAPILWQYGALARLKKGEPIDKLLHGGYSTLSLGYAGLWECVYEITGKKLTEKEGEEFGLRVMQRLNDACAEWKAAENIDYSIYGTPLESTTYKFAKCLQNRFGIIKGVTDRNYITNSYHIHVTEKIDAFSKLELESKFQKLSPGGAISYVEVPNMQQNIPAVLEVMKFIYNNIMYAELNTKSDYCQVCGYDGEIQIVEEDGKLVWRCPNCGNEDQSKMNVARRTCGYIGSQFWNQGRTQEIKERVLHL

SEQ ID NO: 892 - protein, 768 aa, unidentified
  REGION 1..768: note = Category: MG60 effectors
  REGION 1..768: note = Description: MG60-102 effector
  source 1..768: note = uncultivated organism sequence
MFCSCKKNLRVVIYIYNATKTYDCAKKLIVYKSIIKGAEVMKIIKRNGAEETFDRQKIKDAIAKANNETDGTPELTDRQIDYISLVIEDHCNEMNRALSVEEIQELVETHIILQGAPETAKRYIRYRFTRNLARASNTTDNQILSLIECNNEEVKQENSNKNPTVNSVQRDYMAGEVSKDLTKRILLPEDIVKAHEEGLIHFHDADYFAQHMHNCDLVNLEDMLQNGTVISGTMIEKPHSFSTACNIATQIIAQVASNQYGGQSISLAHLAPFVQISREKITRQVRAEMEEFGIAAEDEQVKSLVEKRVRDEIKRGVQTIQYQVVTLLTTNGQAPFVTVFMYLNEAKNEQEKKDLAIIIEEVLKQRIKGTKNEVGVWVTPAFPKLIYVLEEDNITEDSRFWYLTKLAAECTAKRMVPDYISEKIMLKLKIDKNGNGNCYTCMGCRSFLTPYVDENGKPKYYGRFNQGVVTINLVDVACTAARDGNKSEEKFWQVLDERLELCHRALQCRHERLEGTLSDAAPILWQYGALARLKKGEPIDKLLHGGYSTLSLGYAGLWECVYEITGKKLTEKEGEEFGLRVMQRLNDACAEWKAAENIDYSIYGTPLESTTYKFAKCLQNRFGIIKGVTDRNYITNSYHIHVTEKIDAFSKLELESKFQKLSPGGAISYVEVPNMQQNIPAVLEVMKFIYNNIMYAELNTKSDYCQVCGYDGEIQIVEEDGKLVWRCPNCGNEDQSKMNVARRTCGYIGSQFWNQGRTQEIKERVLHL

SEQ ID NO: 893 - protein, 769 aa, unidentified
  REGION 1..769: note = Category: MG60 effectors
  REGION 1..769: note = Description: MG60-103 effector
  source 1..769: note = uncultivated organism sequence
MKVIKRDGTIVEYDREKIRIAIEKANKEVSRKEKATDSEIEEIMSYIEDLKKGRILVEDIQDIIEEKLMEIKRYELAKKYITYRYTRALVRKANTTDQSIKELIEGESEYWNNENANKNARVVTTQRDYLAGITSTDITRRFLLPEDVVKAHDEGIIHFHDADYFAQNALTNCELINLEDMLQNGTIMNGVMIEKPHRFITACTIATQIILAVTSSTYGGATVSLAHLAPFVRSSYEKYYKKYKDNGLSKEQCEKFAKEDTKKEVADGVQTFNYQVNSMTNTNGQAPFLSVCMYLGETDEYKEELAMIIEEFLNQRILGFKNEKGVYITPAFPKLLYVLEEDNIHENSKYWYLTELAAKCTAKRMVPDYISEKIMKQMKVDANGDGQCYPCMGCRSFLTPYIDPVTKKPKYYGRFNQGVVTINLVDVALSSGKDLKKFWKIYDERLELCHKALQARHERLAKATSDIAPILWQHGAFARLPKGASIHPLLHGGYSTISLGYAGLYECVKYMTGKSHTDNGDGKDFAIEVMKKMNEKCAEWKDAEDIDYSVYGTPIESTTYKFAKCLQKRFGKIKGITDKNYITNSYHVPVFEEIDAFSKLKLESEFQRLSPGGAISYVETPNLQNNLEVVLQIMKFIYDNIMYAELNTKSDYCQKCGYTGEILIDDNLEWYCPNCGNRDHNTLNVARRTCGYIGSNFWNKGRTQEIKERVLHIDNKDDDCDCDECNCDHANTDTSKEEKSEEKQMNFMDYDVEEEITKSKKRMKQPAMV

SEQ ID NO: 894 - protein, 1094 aa, unidentified
  REGION 1..1094: note = Category: MG60 effectors
  REGION 1..1094: note = Description: MG60-105 effector
  source 1..1094: note = uncultivated organism sequence
MTVTKRDGRKVKFDRSKIVKAITKAFVEVYPDELPADTYTFCAKIADDIEARKQDLTVEEIQDIVVRKLMASKYKDVATQYVQYRYQHELIRQSNTTDKTIKELLDGENEYWKTENSNKNPKVVTTQRDYIAGVTSTDITRRFLLPKDIVKAHDEGIIHFHDADYYAQLSLHNCELINLQDMLQNGTVINGVQIDKPHRLITAATISTQIITAVTSSSYGGATINLSHLAPFVRDSREWHRRKYLSRGMSDGEADSWAMEDTQKEIADAVQTFNYQVNSMTNTNGQAPFLSVFMYLNDDPEHQEETALLIEEFLRQRILGFKNESGHYITPAFPKLLYVLDENNITEESPYWYLTVLAAQCTAKRLVPDYISAKIMRRDKVDANGNGNVYGCMGCVAGDEVITYRMDGMVYTEAFSRAWNRLTRRFAPKIQPGRAIDKYIDLEGVEIYDAVAGWTRCLRMIRNENSEMLRLRFSNGRMLDCTPDHPFETENRGVVQAADLTEEDVIRVDKDSVWTVDTANGVDDYAWMLGLLLCDSSYVSTVRVSIAATGEEEIRDRFTQCAQKYWNAQINDVLHERGVKGTYRDLVIKGDGDGKATNICSELEALFEGRVKSKRHIPNEVFNWSYSARLSFMAGMIDADGYINDHFRVPVVQIGSTNKELAIQQALLAQTLGMRASIYQNHYKGKGRGDTIRYQVSFHPTAELVDRIACKKKQDKFNENELCNPCISLTDFATLTSRTELNEKMPSYDVTTASEHFTVSGIYSHNCRSFLTPYLDAEGKPKYWGRFNQGVVTINLPDVALSSGGDMTKFWELLDERLELCHRALQCRHERLALATADVAPILWRYGALARLPKGAPIHPLLHDGYSTLSLGYAGLYECVKYMTGESHSHGKGFDFGIQVMEKLNEYTAKWKAAEHIDYSLYGSPIETTTYKFATCLKRRFGEVEGITDHGYITNSYHINVRESIDPFEKLAIEAKYQKLSPGGAISYIECSDLTGNIDAVLEVLKFIYDNIMYAELNTKSDYCQVCGYEHEIEIVDNDGVLSWRCPNCGNTDQSKMNVARRTCGYIGTQYWNQGRTEEIRDRYVHLDNHEVGE

SEQ ID NO: 895 - protein, 768 aa, unidentified
  REGION 1..768: note = Category: MG60 effectors
  REGION 1..768: note = Description: MG60-106 effector
  source 1..768: note = uncultivated organism sequence
MFCSCKKNLCVVIYIYDATKTYDCAKKLIVYKSIIKGAEVMKIIKRNGAEETFDRQKIKDAIAKANNETDGTPELTDRQIDYISLVIEDHCNEMNRALSVEEIQELVETHIILQGAPETAKRYIRYRFTRNLARASNTTDNQILSLIECNNEEVKQENSNKNPTVNSVQRDYMAGEVSKDLTKRILLPEDIVKAHEEGLIHFHDADYFAQHMHNCDLVNLEDMLQNGTVISGTMIEKPHSFSTACNIATQIIAQVASNQYGGQSISLAHLAPFVQISREKITRQVRAEMEEFGIAADDEQVKSLVEKRVRDEIKRGVQTIQYQVVTLLTTNGQAPFVTVFMYLNEAKNEQEKKDLAIIIEEVLKQRIKGTKNEVGVWVTPAFPKLIYVLEEDNITEDSRFWYLTKLAAECTAKRMVPDYISEKIMLKLKIDKNGNGNCYTCMGCRSFLTPYVDENGKPKYYGRFNQGVVTINLVDVACTAARDGSKSEEKFWQVLDERLELCHRALQCRHERLEGTLSDAAPILWQYGALARLKKGEPIDKLLHGGYSTLSLGYAGLWECVYEITGKKLTEKEGEEFGLRVMQRLNDACAEWKAAENIDYSIYGTPLESTTYKFAKCLQNRFGIIKGVTDRNYITNSYHIHVTEKIDAFSKLELESKFQKLSPGGAISYVEVPNMQQNIPAVLEVMKFIYNNIMYAELNTKSDYCQVCGYDGEIQIVEEDGKLVWRCPNCGNEDQSKMNVARRTCGYIGSQFWNQGRTQEIKERVLHL

SEQ ID NO: 896 - protein, 1020 aa, unidentified
  REGION 1..1020: note = Category: MG60 effectors
  REGION 1..1020: note = Description: MG60-107 effector
  source 1..1020: note = uncultivated organism sequence
MVVIKRNSERVDFDPRKIEVAILKAFAEVRSESDDDIRECAKRIAHEIESTGKDLSVEEIQDMVEKKLMATKYKDVAKAYVEYRYKHKLIREFNTTDKTIKELLCGESDYWNNENSNKNARVVTTQRDYIAGITSTDIARRLLLPADVVEADDEGIIHFHDKDYFAQLSLHNCFDVTTRFITSNGVKAFSDFNDCDEATVLTHTGEWKRARVRKYGKQDLYRIVLKRGHGKEHIVYATANHRWFLQDGSVTTNLHVGDSLMKTPVIANVNLDDADVFEKQLWCKGFAFGDGQYCKAWDGTKIRLCGHKNKYARIFRAAGYTCTSPGNFENGDQEAHIPRYNKNEIPEMTPAETRYFVYGLLCADGDHPTSKGNTKANEFKGIQVTGEEKNFQVYNLLNIAGYYVSGYTDITGKTNYGERSDVTRRYAIQANQSHCNWKVQAIEYAKTDYVWCLNVEDCHSFVLEGGIVTGNCELVNLEDMLQHGTVLNGVMIRKPHRLLTATTIATQIITAVTSSSYGGCTINLSHLAPFVRDSYNAYVKKYRDRGVDEQTTKEWAELDTKKEIADSVQTFNYQCNSMTNTNGQAPFLSVFMYLNDAPEYQKETAMLIEEFLNQRLLGFQNETGHYVTPAFPKLLYVLDENNITEDSEYWYLTELAAKCTAKRMVPDYMSAKIMRRDKIDKNGNGNVYGCMGCRSFLTPYVDKDGKPKYWGRFNQGVVTINLPDIALSSGGDMEKFWKIFDERMALCHKALRCRHERLALATSDVAPILWQNGALARLPKGSPIHPLLHDGYSTLSLGYAGLYECVKYMTGESHSHGKGKEFGLRVMQTLNDFCKKWKEEESIDYSLYGTPIESTTYKFSKCLKKRFGIIEGITDKDYITNSYHISVREKIDPFEKLAIEAEYQKLSPGGAISYVECADLTQNPTAVLEVMRFIYDNIMYAELNTKSDYCQVCGYDGEIQIIDENGKLLWRCPNCGNEDQTKMNVARRTCGYIGTQFWNQGRTQEIKERYVHIDNHEVGE

SEQ ID NO: 897 - protein, 854 aa, unidentified
  REGION 1..854: note = Category: MG60 effectors
  REGION 1..854: note = Description: MG60-108 effector
  source 1..854: note = uncultivated organism sequence
MKVIKRNGSEVLYNQQKIKDAVSKANAEVSRVERLSQAQITAIANNVTKIIEQSSHAVSIEDIQNYVEKEIMAMRGYEVAQKYITYRYKRALARQSNTTDERILSIIGLENEEVKQENANKNPTINSTQRDYMAGEVSKDLTTRILLPQDIVDAHNNGLIHFHDADYYAQKMHNCFTGDTKFMTHKGAKRFDSFKDGESVFVRDMHNEIRKATVHIYGEQRVQKVTFKMLGKNKKKTVKCTPNHRWILEDKKVTTALKVGDVLFSNSYSHYEKWKVEKIEFKGIEKVYCVEEPITHSFTLEDGMVTGNCDLINLEDMLQNGTVISGTMIEKPHSFHTACNITTQVIAQVASSQFGGQSFSLAHLVPFVDISRKKIKKEILEENLINKIVESDEIINKKVEFRLKEEIKRGIQTIQYQILTLMTTNGQAPFVTMFLWLDEVEEGQARDDMAMLVEEVLNQRIQGVKNEKGVYITPAFPKVIYLLDEDNIHEDSKYYYLTELAAKCTAKRMVPDYISGKVMRELKDGDIYPCMGCRSFLTVDRTTENIANAKNYNPNKRKYYGRFNQGVVTINLVDVACSSYGNMNKFWKILDERLELCHRALQERHNRLLGTPSDVSPILWQHGALARLEKDEVIDKLLYGGYSTISLGYAGLYEMCMRMTGKSHTDPEAKPFALAVMQKLNDKCNEWKEKENIDYSLYGTPMESTTFKFARCLQRRFGIIKDVTDHDYITNSYHVNVRENIDAFTKLSFESEFQKLSPGGAISYVEVPNMQDNIPAVLAVLKHIYNNIMYAELNTKSDYCQVCGYEGEIQIVRDKHKKLIWKCPNCGNTDHNKMNTARRTCGYIGTNDFNQGVT

SEQ ID NO: 898 - protein, 778 aa, unidentified
  REGION 1..778: note = Category: MG60 effectors
  REGION 1..778: note = Description: MG60-109 effector
  source 1..778: note = uncultivated organism sequence
MFCSCKKKLCVVIYIYNATKTYDCAKKLIVYKSIIKGAEVMKIIKRNGAEETFDRQKIKDAIAKANNETDGTPELTDRQIDYISLVIEDHCNEMNRALSVEEIQELVETHIILQGAPETAKRYIRYRFTRNLARASNTTDNQILSLIECNNEEVKQENSNKNPTVNSVQRDYMAGEVSKDLTKRILLPEDIVKAHEEGLIHFHDADYFAQHMHNCDLVNLEDMLQNGTVISGTMIEKPHSFSTACNIATQIIAQVASNQYGGQSISLAHLAPFVQISREKITRQVRAEMEEFGIDADDEQVKSLVEKRVRDEIKRGVQTIQYQVVTLLTTNGQAPFVTVFMYLNEAKNEQEKKDLAIIIEEVLKQRIKGTKNEVGVWVTPAFPKLIYVLEEDNITEDSRFWYLTKLAAECTAKRMVPDYISEKIMLKLKIDKNGNGNCYTCMGCRSFLTPYVDENGKPKYYGRFNQGVVTINLVDVACTAARDGSKSEEKFWQVLDERLELCHRALQCRHERLEGTLSDAAPILWQYGALARLKKGEPIDKLLHGGVFFPLARHGGYSTLSLGYAGLWECVYEITGKKLTEKEGEEFGLRVMQRLNDACAEWKAAENIDYSIYGTPLESTTYKFAKCLQNRFGIIKGVTDRNYITNSYHIHVTEKIDAFSKLELESKFQKLSPGGAISYVEVPNMQQNIPAVLEVMKFIYNNIMYAELNTKSDYCQVCGYDGEIQIVEEDGKLVWRCPNCGNEDQSKMNVARRTCGYIGSQFWNQGRTQEIKERVLHL

SEQ ID NO: 899 - protein, 763 aa, unidentified
  REGION 1..763: note = Category: MG60 effectors
  REGION 1..763: note = Description: MG60-110 effector
  source 1..763: note = uncultivated organism sequence
MYIQPIITVSDTTHKFNFVKLFFQKNKNSLRDVWRGNGMKIIKRNGEEVVFDLKKIITAISKANNEVPPSEQLAGSTINSIAENIEKQCAAENHEMNVEAIQDLVEKAIMKAGAFDIAKKYITYRYQHQLMRRANSTDSQILSLLECNNEEVKQENSNKNSTVVSVQRDYMAGEVSKDITKRFLLDEDIVKAHEEGLIHFHDADYFAQHMHNCDLVNLEDMLQNGTVISGTKIDTPHSFSTACNIATQIIAQVASSQYGGQSISLAHLAPFVEVSRKKFQRETMRVEEQTGVKFTDEQFKKIVEMRIRDEITRGVQTIQYQVVTLMTTNGQSPFITVFMYLNEAKNEQEKADLAMIIEEMLKQRYQGVKNEKGFWVTPAFPKLIYVLEPDNIEPGSKYYSLTELAAKCTARRLVPDYISEKKMLELKVDANGNGNCYPCMGCRSFLTPYLDEHGKPKYYGRFNQGVVTINLVDVACSSNGDYKSFWEIFDERLELCHKALMRRHQRLLGTPSDVAPILWQHGALARLEKGETIDKLLFGGYSTISLGYAGLCECVRYMTGKPHTDPSATPFAIEIMKHLNEKCAEWKAESNIAFSLYGTPLESTTYKFAKCLKKRFGEIPGVTDKNYITNSYHVHVTEQMDAFTKLSFESQFQELSPGGAVSYVEVPNMENNIPAVMTLLKHIYENIMYAELNTKSDCCQKCGYTGEIQIVTDSDNKLVWQCPNCGNKDQATMNVARRTCGYIGTQYWNQGRTQEIKERVLHL

SEQ ID NO: 900 - protein, 758 aa, unidentified
  REGION 1..758: note = Category: MG60 effectors
  REGION 1..758: note = Description: MG60-111 effector
  source 1..758: note = uncultivated organism sequence
MRINMIIENYKKQYSFLAFSEKSWKSLSERITKLVENKTLNSVDEIRTYLDRILCSYIDKQISIGNIRIIHNMLILLKRRKLSYSNLLQEFLSQLEIYHIHMTESFYEVLKKESVLYQNIVKSLGISDLKFCELSAFWKEYSFYFKFSVHGKSLKEVKDIFDGYYYSLNVQEQKQVMDNMDSHLDQFRYLIYHASFLDGIYQVCYTKIRDISLSLFRKVIFSWSIDQLDLLIEEYCYNQIYGGSALEKYDKIWLLIKELKPQHDEKKKHLGNECLKIKGERRTLYSYFEKIKSNLSEEDKKVIDTLYVHLSKERQEGIDGYINGLYHQNDEVGRKASNDISMLKGQFKKYLINGCLKVKGERRTLYSYFEKIKSNLSAEDRGIIDILYTHLSKERQEGIDGYISGLYHQNDEVGRKASNDISILKRQFKKYLQSGCLNLKNEPHTLYFYFRMLKSDLSEEDKKVIDTLYAHLSKERQEAIDGYISGLYRYNDNMRRKASNDILILKRQFARYLAKGDLTIRSKDRSLYSCFEKIKSNLSEEDRRIIDILYNHLSKERQEGIDGYINGLYHQNDEVGRKASNDISTLKRQFKKYLESGCLNLKNEPHTLYFYFKMLKSDLSEEDKKVIDILYARLSKEKQEEINGYINGLYHQSDEVRKKARIDLLGLRRKFERYLKIESLEVCSKKQLEVKQVLLDALKVIEMSFYRLGYTTSEYLKYKNEKMIEIMNKGNFSHYNILYIFIMESFYFIKEQEKIRSL

SEQ ID NO: 901 - protein, 768 aa, unidentified
  REGION 1..768: note = Category: MG60 effectors
  REGION 1..768: note = Description: MG60-112 effector
  source 1..768: note = uncultivated organism sequence
MFCSCKKNLRVVIYIYDATKTYDCAKKLIVYKSIIKGAEVMKIIKRNGAEETFDRQKIKDAIAKANNETDGTPELTDRQIDYISLVIEDHCNEMNRALSVEEIQELVETHIILQGAPETAKRYIRYRFTRNLARASNTTDNQILSLIECNNEEVKQENSNKNPTVNSVQRDYMAGEVSKDLTKRILLPEDIVKAHEEGLIHFHDADYFAQHMHNCDLVNLEDMLQNGTVISGTMIEKPHSFSTACNIATQIIAQVASNQYGGQSISLAHLAPFVQISREKITRQVRAEMEEFGIAADDEQVKSLVEKRVRDEIKRGVQTIQYQVVTLLTTNGQAPFVTVFMYLNEAKNEQEKKDLAIIIEEVLKQRIKGTKNEVGVWVTPAFPKLIYVLEEDNITEDSRFWYLTKLAAECTAKRMVPDYISEKIMLKLKIDKNGNGNCYTCMGCRSFLTPYVDENGKPKYYGRFNQGVVTINLVDVACTAARDGSKSEEKFWQVLDERLELCHRALQCRHERLEGTLSDAAPILWQYGALARLKKGEPIDKLLHGGYSTLSLGYAGLWECVYEITGKKLTEKEGEEFGLRVMQRLNDACAEWKAAENIDYSIYGTPLESTTYKFAKCLQNRFGIIKGVTDRNYITNSYHIHVTEKIDAFSKLELESKFQKLSPGGAISYVEVPNMQQNIPAVLEVMKFIYNNIMYAELNTKSDYCQVCGYDGEIQIVEEDGKLVWRCPNCGNEDQSKMNVARRTCGYIGSQFWNQGRTQEIKERVLHL

SEQ ID NO: 902 - protein, 768 aa, unidentified
  REGION 1..768: note = Category: MG60 effectors
  REGION 1..768: note = Description: MG60-113 effector
  source 1..768: note = uncultivated organism sequence
MFCSCKKNLRVVIYIYNATKTYDCAKKLIVYKSIIKGAEVMKIIKRNGAEETFDRQKIKDAIAKANNETDGTPELTDRQIDYISLVIEDHCNEMNRALSVEEIQELVETHIILQGAPETAKRYIRYRFTRNLARASNTTDNQILSLIECNNEEVKQENSNKNPTVNSVQRDYMAGEVSKDLTKRILLPEDIVKAHEEGLIHFHDADYFAQHMHNCDLVNLEDMLQNGTVISGTMIEKPHSFSTACNIATQIIAQVASNQYGGQSISLAHLAPFVQISREKITRQVRAEMEEFGIAADDEQVKSLVEKRVRDEIKRGVQTIQYQVVTLLTTNGQAPFVTVFMYLNEAKNEQEKKDLAIIIEEVLKQRIKGTKNEVGVWVTPAFPKLIYVLEEDNITEDSRFWYLTKLAAECTAKRMVPDYISEKIMLKLKIDKNGNGNCYTCMGCRSFLTPYVDENGKPKYYGRFNQGVVTINLVDVACTAARDGNKSEEKFWQVLDERLELCHRALQCRHERLEGTLSDAAPILWQYGALARLKKGEPIDKLLHGGYSTLSLGYAGLWECVYEITGKKLTEKEGEEFGLRVMQRLNDACAEWKAAENIDYSIYGTPLESTTYKFAKCLQNRFGIIKGVTDRNYITNSYHIHVTEKIDAFSKLELESKFQKLSPGGAISYVEVPNMQQNIPAVLEVMKFIYNNIMYAELNTKSDYCQVCGYDGEIQIVEEDGKLVWRCPNCGNEDQSKMNVARRTCGYIGSQFWNQGRTQEIKERVLHL

SEQ ID NO: 903 - protein, 843 aa, unidentified
  REGION 1..843: note = Category: MG60 effectors
  REGION 1..843: note = Description: MG60-114 effector
  source 1..843: note = uncultivated organism sequence
MIKCIECGHTISERAKKCPKCGCPVEKDIEKKMCPECGQSVNKDLDKCSYCGYPFDLVQSIDDTNSSVNKVCPECGQSVNKDLNKCSYCGYPFDLVQSVDDANSSVNKVCPECGQSVNKDLNKCSYCGYPFDLVQSVDDANSSVNKVCPECGQSVNKDLNKCSYCGYPFDLVQSVGDANSSINKVCPECRQSVNKDLDKCSYCGYPFNLVQSVDDANSSVNKVCPECGKSFDDKCDVCPHCGCFYSYQHISQFENVELNKANIESSEPKQEHQSTTDIRKTLLKRNKTTIISLSMLTILIVVGGLLYYFLVNHSEKNDWNKFGLKGSACVLRVIISTQYGDNTELVRNEKKYYFSVNGYLEKEEIDYTYHWGYRQYVKGKIVEEKDFNGITYHYTYENPLIGISEDNREYHYDKEGRLIFSVLYGDSTVYRYDDEGFLKETEVLNFQGLDGCEIQTYSNPLHVDGITKVDEYGNWIERKYEYEGEGGMIYVTENREIEYYSESSQVGNYGEAISEVSIEEYPSQLPQNRKEALDILNLVLINSYKVEEDCESEYAIPVRIEGNAEIVGIQRKGYKDGYFPFTIYRLRQIANHWQIVNEKTINENEMDGQVLIFSAKRFGLADENMPELVRINNKDYFYFIYRIAELGNGCAGCGYLRLCLYNLDSHDVLSLNYAVYGEINELLKGEFVDLEKLESYPDENRFLQKKATELTCIYRPSEEDLDMDNPKNSVKRWLLDNPGKYEPQNTTIKYTYYNTSIFDWDNYNDEKENRIENDSFIVVHDWRGSVYAYDKEKKRYFVIYGIEINGGARKVSWDNRASDVVVIDTDWCGMRINLLSGKMELLE

SEQ ID NO: 904 - protein, 1081 aa, unidentified
  REGION 1..1081: note = Category: MG60 effectors
  REGION 1..1081: note = Description: MG60-115 effector
  source 1..1081: note = uncultivated organism sequence
MKSVIDFETRSPVDIKTCGAYAYAAHPDTEVMMLAVRICGQEARVWVAPAYRHFLDTELSDDELQDIINNCEEIAAHNAPFERAIWKFKMEPLWFKPLPLEKIRCTMSQALMCNLPRKLEQAVKVWRKDAPQKDNEGHKLMMKMSKPRKFRKAELSAFPDPEKAKATQEYVYAVLSKGGIPTIKNYHQYIVYPCDEPMFKRYVEYCRQDVVAEEVLFTELPPIPERELKVWRLDQTINDRGVGIDRFHAVKIMDMVNKVEDILTEEASEITYGAVSTMKSSKAIIEWLQSRGVDTDSASKQAISDLLERPDLPSDVRRFLEIRQTIAMSSTAKYQTMLCTSCYDGRAHGTMIYHGASTGRFSGALIQPQNLTRPSTNNMNIPEGSKPLDNYDISEMDVRLAASGNIDLIQQYWKDPKVLASDCLRAMIRASEGRVFMCADYSGIEARALAYLAGEEYVLQGFRDGLDPYKVAATTIYGVKYENVDKKQRQVGKTATLACFTADTKVYTRDGVKNIVDVTKDDYVWDGENWCLTDGAYYQGVKEVVNFLGVESTPDQKWLMGENIWVESDAGKVLLETFMEIFKSCHCVEKQEISCTQDASLAGENAMCRHGTYCLEEQLSALNADENLELKQSQNTIQWSSLTREDGLIDYTQQLADVIMKQIQHMNGMEPEELKYTMNGWKIKIPSLNICVELTIGTTQGMKSTALITTMDTCREMLGVSWDETIKETPQEIDLYRMVEELCALLIFGVSIAPNIEARELLVNYLEKESIPKKSSNQCRKESVVNTTKYITSKKFFTVEKNCLSMSFGKNMFRGTRKNLIFKLDSIKDRVLSTSSRTKKSDNKENVYDLLNCGDKSRFTISTSYGPRIVHNCGYGGGYGAFLRFGADRMGIDEEEGKKIISSWRDGHPMTVKLWNKLVEASVMAMTNKGEIYSYRGVSFRYHKRFLLMKLPSGRFLFYFDPKLEDVGMAWSTPERPAFKKLVTAMTLTPEKQFVRRPLNHLILSENLTQAFCRDLMVNALFNLEEAGYPVVFHVHDEIISEVPIGYGDIKEFEEIMCKLPLWAKDLPVKAEGWVGKFYRK

SEQ ID NO: 905 - protein, 965 aa, unidentified
  REGION 1..965: note = Category: MG60 effectors
  REGION 1..965: note = Description: MG60-116 effector
  source 1..965: note = uncultivated organism sequence
MSLKIEDLETFKRHRYAVSESLSTDIVGRDREIEEISSKIDSVYCLTITGPAGVGKSRLAVAAIEHYCASHTDFEVLCAKSFSDYISALDEAIEEGRRYIIFIDDANTYPRLIELLEFLKYRNQEGNIKAILTVRDYLKGCLDSDIYMGFYEVKPLNDKSIEDALVKNTTIRNEDWLKQIAKIANGNIRVAFLAANEAIKNNKSLGSIYNQKDVLNRFYKDEMSKIDHSESLLITAGVIAFFKSIYLEQLFYIVPILKSVNLSKKSFIENVNILIKMKIVDDYHDVVKIADQCFADFLLNYTIVEKRYLKIKDLLLVGFKYYKERIVESIHTILHVYNTEEFVDHLRKEVTDACNNLEDDVSLKHDLESCFVQVIPEYVSREYIEGVENYSDKKDIKWLINVFSGLAFSNYNEIANKGILKLLKKTKNKTKEVYDAIKNTYEMRAERANERFQYQIALIKELQNGGLYNDEFNALVSSYLNFRFSYSCFTSKREMMHYTFSVDDNTAGILELRSTCWGYLFNCELSKAIDSIMDFANRHYIERNLEIIKNDLRCINTYLCEHDQSGFLNSVLYVKFIDEAKEYCFTDLLTANEKYLDFLDIVFERKLLGANYEGYEARYKNRVADYYNLHKDDIYDILNETDLFLNKYYKYQKTRLVNALVEVVDKFSNALFFLCTKNGIFPHLVIEEFLKNRNLDEAYALINQIDDETIKDEYLYNFYSYLSKENIEKDYGFIGWMNSKGDFKTNRTYHRDAMSLKNIAEKCGLDYVALLRKLYSKEKYNKFIAKAYLSYLIDNVETFKELLSLNQNLAIKIYEFLIANGEKDYESSVLIEILDVKRSYIKVFAKAFIEEEYYNDCNLDFIFEKEYCDSFLDECMKVMLSQKINFAPFKLRILISRNINQPNMERWIEKYIESNYKEDNVIELFFQALSEIDHQHKNAYLVLYYQKGHDINVLRQAILKKIPFL

SEQ ID NO: 906 - protein, 754 aa, unidentified
  REGION 1..754: note = Category: MG60 effectors
  REGION 1..754: note = Description: MG60-117 effector
  source 1..754: note = uncultivated organism sequence
MNYEEKLTQLASDYADWWNKGYEMPSMTSNLYPYDNMFSPVRVNRLTLKNRLVMAPMGNICMCDETGRPNEKMLKYFEERAKGGVGLITTGLIPVTYGIDKSLIELGDLTYFPRIDRSRTVFAPWRDLAGMCHAHGSAIFIQLTAGLGRVGNPQCLTNQLKLPRSSSFNPNWYMKDVPCLRLSDISLNKIIKKIGQGSADAKACNLDGVYLHGHEGYLIEQIANKAFNHRKLGKFADPTVFGIEMVKEIRRRVGANFPIMYRIDLSLMLNATYKAKMDNVSPLKKFKNERRIEETLEYMRELVEAGVDMFDVDLGCYDNWWLPHPPSSMPSGCFLDISEIAKKYFADNNIKSNMGLEIPVVAVGKLGYPDFAEKALRDGKCDMIMLGRPLLADAEWCNKAYAGKVSDIRPCIGCQEACLNEFVEGGHPQCAVNPRTAFEEEYSPEIPKADVVKKVAVVGAGPAGIVAADTLIKRGHKVDLYEKSGEIGGSVIPGSKPMIKYEFKNYLDYLKGVVAKLEKNESFKLFMNTAADAQSLKEKGYDSIVIAAGTVQNRPPVEGINNKNVVFAVDVLNDRNIVKDAEDIVVIGGGVVGAETAYVLRYELKKNVKVVEMDKYIMNHVCTANRGHLIHYLEEGGVELLNMTTLKKVEDGKIVVEQNINKNVPNPYITWSPILPENVENPMDALRPIKNEPVTRELKADMVVLAAGNRSAIDIYYDCVKNHSAAEIFNVGDSFKGARVFEAVRSAYRKARSI

SEQ ID NO: 907 - protein, 754 aa, unidentified
  REGION 1..754: note = Category: MG60 effectors
  REGION 1..754: note = Description: MG60-118 effector
  source 1..754: note = uncultivated organism sequence
MNYEEKLTQLASDYADWWNKGYEMPSMTSNLYPYDNMFSPVRVNRLTLKNRLVMAPMGNICMCDETGRPNEKMLKYFEERAKGGVGLITTGLIPVTYGIDKSLIELGDLTYFPRIDRSRTVFAPWRDLAGMCHAHGSAIFIQLTAGLGRVGNPQCLTNQLKLPRSSSFNPNWYMKDVPCLRLSDISLNKIIKKIGQGSADAKACNLDGVYLHGHEGYLIEQIANKAFNHRKLGKFADPTVFGIEMVKEIRRRVGANFPIMYRIDLSLMLNATYKAKMDNVSPLKKFKNERRIEETLEYMRELVEAGVDMFDVDLGCYDNWWLPHPPSSMPSGCFLDISEIAKKYFADNNIKSNMGLEIPVVAVGKLGYPDFAEKALRDGKCDMIMLGRPLLADAEWCNKAYAGKVSDIRPCIGCQEACLNEFVEGGHPQCAVNPRTAFEEEYSPEIPKADVIKKVAVVGAGPAGIVAADTLIKRGHKVDLYEKSGEIGGSVIPGSKPMIKYEFKNYLDYLKGVVAKLEKNENFKLFMNTAADAQSLKEKGYDSIVIAAGTVQNRPPVEGINNKNVVFAVDVLNDRNIVKDAEDIVVIGGGVVGAETAYVLRYELNKNVKVVEMDKYIMNHVCTANRGHLIHYLEEGGVELLNMTTLKKVEDGKIVVEQNINKNVPNPYITWSPILPENVENPMDALRPIKNEPVTRELKADMVVLAAGNRSAIDIYYDCVKNHSADEIFNVGDSFKGARVFEAVRSAYRKARSI

SEQ ID NO: 908 - protein, 757 aa, unidentified
  REGION 1..757: note = Category: MG60 effectors
  REGION 1..757: note = Description: MG60-119 effector
  source 1..757: note = uncultivated organism sequence
MIQVIKRDGSKAKFEKDKIVIAIEKAMKSASGVFVKNQAMDIANEIESEALGEDAISIYKIEDMVYYKLIDRKNPATAKSYESYKSVQAYKREQNTSDEDILGLLNQTNIDVMDENSNKNPIIASTQRDLIAGEVAKDIAKRKLIPIDLVEAHNSGAIHIHDLDYLIQPIFNCCLVDMKDMLDNGTVVNDKMIETPKSFQVACNVMTQIIAQIASNQYGGQSINISCLSPYLKKSYDKNLKLSRSILDDDEKVVEMAEALTQRDLESGIQTIQYQINTLMTSNGQSPFVTLFMHTDENDPYLSSTVKIIEEILIQRIKGIKNEQGVYVTPAFPKLIYVLDENNVHEGSKYYKLTELAAKCTAKRMYPDYISAKKMRENYEGNVFSPMGCRAFLPPYKDENGNYKFDGRFNMGVATINLPQIGILADGDEDKFFEILDKRLDLIKQVGLLRYEHLSKVTSDSSPIHFRHGAIARLKRHQSIKPLLENGYATVTIGYIGIYEASILTTGESHTSKRGHDFAMKIMKVLNEKKEEWTKEYGIAFAVYGTPAESLTHRFASIDKERFGSIENVTDKGYYTNSFHVDVREKISVFDKFDFESEFQQLSTGGCISYAEIPNMTNNINAVMTMVKYIYDHIQYAEFNTKSDYCAECGFDGEILLDEDNNWYCPNCGNKDRNTLTVVRRTCGYLGENFWNEGRTKEIKARVLHIWDMGKLENMTLPMVLESGPLFSYQVAIGIVRIALIGTIWILTLVKSGMKRP

SEQ ID NO: 909 - protein, 1041 aa, unidentified
  REGION 1..1041: note = Category: MG60 effectors
  REGION 1..1041: note = Description: MG60-120 effector
  source 1..1041: note = uncultivated organism sequence
MVGRTAVHPSRKKEEKKRKGDERHMIKVKKRTGKIVDFDESRIANAVQGALTDIGHPDAQLAQEIAVEIHSGLIADGVESITIAGIQKRVETALMSRKQFDAARAYIEYRHRKDITRALKEKAEERNRNIMKLIRNDDDDIRKENSNKDTSLVSTRFSYMAEEANKEIASEILFDKDLIEAHKAGMIHIHDMGFAALPMHNCFTRTTRFVTTEGVKSFEDFIDGEEVTVLSKDGKWHKATVHNYGKQPMQKVLFKCLKSTKEVVCTPNHRWVLADGSVTTKLKEGMTLVQLPLYEISEPKTKKQCQAFALGFILGDGFDRGKFVEARLCGPKKKYADIFKKAGYHITYPDLDNGDARVRKAPSRKQSFLDGRCWQYLDLEDKQYLFLGLYAADGRDTENEYSGRFITSADERIMKMICDISATAGYHVSSVKKETHDTPYKKEAVLYTIRFRRWQNSGGNYWSVSQISSFEDREAWCIEEPDTHSFILDGGMVTGNCDVWNLDDMLQNGTVMNGIAISKPKSLATAVTIATQIVISIAASQYGGQTFSISALAPFVRVSYEKHLKEVEADAKGSGIVMTDDQVRFVAENRLRKEIKDAVQTLQYQLISCAVSNGQAPFVSVFMYLDEKPEYKKETAMLAEEILRQRYAGIPNKQGVPVSVAFPKLLFVLDEDNVPEDSEYHYLLKMAVKCSAKRMVPDYISAKKMKEYKEGNVFPCMGCRSFLSPWKDENGNYKFYGRFNQGVVTVNLVDAALSSGKDEARFWEIMKERTDLCYRALMTRHKLLLGTKSDVAPILWQHGALARLKPGEVIDPLLFGGYSTISLGYVGLYECTLYMTGHSHTSPEGKAFAMKVMKYLNDRCDEWRAATDIGFSVYGTPEETTTDKFAKCLKKRFGIVPGITDHDYVTNSYHVNPAEKIDAFSKLALEGEFQAYSLGGEISYVEVPNMEKNLAALESVVEFMYDNTVYAEVNTKSDYCQKCGYDGEMLIDPKRMEFYCPNCGNTDYATMNITRRVCGYLSTNFPTTHGRMADISARVLHLDAE

SEQ ID NO: 910 - protein, 751 aa, unidentified
  REGION 1..751: note = Category: MG60 effectors
  REGION 1..751: note = Description: MG60-121 effector
  source 1..751: note = uncultivated organism sequence
MEENVQTNVIKRNGEEVTFDIEKIFNAIAKANKEVDPIHQMSDVQIRAVSENVAREVRKAPHAVNVEDIQDMVETGIMEMRGFEVAQKYVRYRYKRTLARKSNTTDDGILALIEQNNEEVKQENSNKNPVINSTQRDYMAGEVSRDLSRRILLPEEVVRAHEAGIIHFHDSDYYAQKEHNCDLINLEDMLQNGTVISETLIEKPHSFYTAANVTTQIVAQVASNQYGGQSFTLAHLAPFVDISRKKLRKQTAEELQAVGEEIDEKKVESIAEIRLKDEVTRGIQTIQYQLITLMTCNGQAPFVTMFMYLDEVPEGQTREDLAMLIEEVLRQRMQGVKNEKGVWITPAFPKLIYVLDEDNITEDSRYWYLTKLAAECTAKRMVPDYISAKKMKELKGDVYPCMGCRSFLTPDNEQQPEGLCNDGNKAEAGDYTPGQHKYYGRFNQGVVTINLVDVACSAVKEAEKAGTDKFDEFWKILDDRLELCHRALRCRHERLMGTPSDVAPILWQYGALARLKKGEKIDKLLFGNYSTISLGYAGLYEMCVEMTGKSHTDEEAKPFALKVMQTLNDYCMKWRKAENISYSLYGTPMESTTYKFAKCLQKRFGIIKDVTDHNYITNSYHVNVREKIDAFRKLEFESEFQKLSPGGAISYVEVPNLQDNIPAVLSVMQFIYENIMYAELNTKSDYCEVCGYDGEIQIHEDEHGKLIWVCPNCGNTDQTKMSVARRTCGYIGTQFWNQGRTQEIKDRVLHL

SEQ ID NO: 911 - protein, 768 aa, unidentified
  REGION 1..768: note = Category: MG60 effectors
  REGION 1..768: note = Description: MG60-122 effector
  source 1..768: note = uncultivated organism sequence
MFCSCKKNLCVVIYIYDATKTYDCAKKLIVYKSIIKGAEVMKIIKRNGAEETFDRQKIKDAIAKANNETDGTPELTDRQIDYISLVIEDHCNEMNRALSVEEIQELVETHIILQGAPETAKRYIRYRFTRNLARASNTTDNQILSLIECNNEEVKQENSNKNPTVNSVQRDYMAGEVSKDLTKRILLPEDIVKAHEEGLIHFHDADYFAQHMHNCDLVNLEDMLQNGTVISGTMIEKPHSFSTACNIATQIIAQVASNQYGGQSISLAHLAPFVQISREKITRQVRAEMEEFGIAADDEQVKSLVEKRVRDEIKRGVQTIQYQVVTLLTTNGQAPFVTVFMYLNEAKNEQEKKDLAIIIEEVLKQRIKGTKNEVGVWVTPAFPKLIYVLEEDNITEDSRFWYLTKLAAECTAKRMVPDYISEKIMLKLKIDKNGNGNCYTCMGCRSFLTPYVDENGKPKYYGRFNQGVVTINLVDVACTAARDGNKSEEKFWQVLDERLELCHRALQCRHERLEGTLSDAAPLLWQYGALARLKKGEPIDKLLHGGYSTLSLGYAGLWECVYEITGKKLTEKEGEEFGLRVMQRLNDACAEWKAAENIDYSIYGTPLESTTYKFAKCLQNRFGIIKGVTDRNYITNSYHIHVTEKIDAFSKLELESKFQKLSPGGAISYVEVPNMQQNIPAVLEVMKFIYNNIMYAELNTKSDYCQVCGYDGEIQIVEEDGKLVWRCPNCGNEDQSKMNVARRTCGYIGSQFWNQGRTQEIKERVLHL

SEQ ID NO: 912 - protein, 760 aa, unidentified
  REGION 1..760: note = Category: MG60 effectors
  REGION 1..760: note = Description: MG60-123 effector
  source 1..760: note = uncultivated organism sequence
MCVVIYIYNATKTYDCAKKLIVYKSIIKGAEVMKIIKRNGAEETFDRQKIKDAIAKANNETDGTPELTDRQIDYISLVIEDHCNEMNRALSVEEIQELVETHIILQGAPETAKRYIRYRFTRNLARASNTTDNQILSLIECNNEEVKQENSNKNPTVNSVQRDYMAGEVSKDLTKRILLPEDIVKAHEEGLIHFHDADYFAQHMHNCDLVNLEDMLQNGTVISGTMIEKPHSFSTACNIATQIIAQVASNQYGGQSISLAHLAPFVQISREKITRQVRAEMEEFGIAADDEQVKSLVEKRVRDEIKRGVQTIQYQVVTLLTTNGQAPFVTVFMYLNEAKNEQEKKDLAIIIEEVLKQRIKGTKNEVGVWVTPAFPKLIYVLEEDNITEDSRFWYLTKLAAECTAKRMVPDYISEKIMLKLKIDKNGNGNCYTCMGCRSFLTPYVDENGKPKYYGRFNQGVVTINLVDVACTAARDGSKSEEKFWQVLDERLELCHRALQCRHERLEGTLSDAAPILWQYGALARLKKGEPIDKLLHGGYSTLSLGYAGLWECVYEITGKKLTEKEGEEFGLRVMQRLNDACAEWKAAENIDYSIYGTPLESTTYKFAKCLQNRFGIIKGVTDRNYITNSYHIHVTEKIDAFSKLELESKFQKLSPGGAISYVEVPNMQQNIPAVLEVMKFIYNNIMYAELNTKSDYCQVCGYDGEIQIVEEDGKLVWRCPNCGNEDQSKMNVARRTCGYIGSQFWNQGRTQEIKERVLHL

SEQ ID NO: 913 - protein, 763 aa, unidentified
  REGION 1..763: note = Category: MG60 effectors
  REGION 1..763: note = Description: MG60-124 effector
  source 1..763: note = uncultivated organism sequence
MKMIQQLYSIFVAFATVFLKNKYIIRTYKSNKKYLIDIRKMALLKDLYTRKEWGKMKVIKRDGRTIEFDREKIEVAIEKANKEVRGKEKATKDEINEIIAYIEDLGKKRMLVEDIQDVIEEKLMELDKYELAKKYIVYRYTRALVRKSNTTDESILGLIKNENKELAEENSNKNTMLASTQRDYIAGEVSRDLTKRILLPEKISKAHEEGILHFHDADYFVQPIFNCCLINIGDMLDNGTAMNGKMIETPKSFQVACTVTTQIIAAVASNQYGGQSVDLKHLGKYLRRSHDKFQKRLTEKYGGKLPKQTIDDMIRDRVKEELAAGVQTIQYQINTLMTTNGQSPFVTLFLHLEPDDEYIKENAMIIEEVLKQRIQGIKNEVGVYVTPAFPKLVYVLDEHNCLKGGKYDYLTRLAVKCSAKRMYPDYISAKKMKENYEGNVFSPMGCRSFLVPWKDENGNYKFEGRFNQGVVSINLPQIAIIAQGDEDKFWKLFDERLELCREALMCRHYALLGTSSDISPIHWQNGAIARLKKGEKIDKYLKDGYSTLSLGYIGIYETTKLIKGVSHTTPEGHDFAIKIMKYLKDRTNLWRKETGLGFSLYGTPAESLCYRFARIDKEKFGSIPDVTDKGYYTNSYHVDVREKIDAFHKLKFESEFQPLSAGGAISYIEVPNMKNNLTALEEVVKFIYDNIQYAEFNTKSDYCQVCGYDGEMIINDQNEWECPQCGNKDHNKMNVVRRTCGYLGENFWNVGKTKEIKSRVLHL

SEQ ID NO: 914 - protein, 754 aa, unidentified
  REGION 1..754: note = Category: MG60 effectors
  REGION 1..754: note = Description: MG60-125 effector
  source 1..754: note = uncultivated organism sequence
MKVVKRDGKIVDFDEDRIRIAIGKANNEVDDSDKATEEEIDEIVKKIRTLKRKRILVEDIQDMIEDGLMNYKRFNLAREYITYRYNRALVRKANTTDQTIKELVDGESEYWNTENSNKNSKVVTTQRDYLAGITSTDITRRFLLPQDVVKAHDEGIIHFHDADYFAQNALTNCCLINLNDMLQNGTVINGMMIEKPHRFITACTIATQIILGVSSSQYGGCTITLTHLAPFVRDSYNRALKKYKERGLSQKEAEKFAELDTRKEIADGVQTFNYQVNSMTNTNGQAPFLSVCMYLGETKEYKKELALIIEEFLNQRILGFKNEKGVYITPAFPKLLYVLEEDNIHKDSPYWYLTELAAKCTAKRMVPDYISEKKMKEYKINQYGEGDCYPCMGCRSFLTPDRIKGNVAKAKDYVEGKGKYYGRFNQGVVTINLPDVALSSKKDEKEFWKIFDERLEICHKALRCRHERLAKITSDAAPLLWQHGAYARLGKGEKILPLLKGGYSTLSLGYAGLYECVKYMTGDSHTDGGKGEEFGLKVMQYMNDKCNKWKKEEDIDYSLYGSPIESTTYKFAKCLKKRFGTVKGITDRKYITNSYHVPVFEEIDAFSKLKLESKFQRLSPGGAISYVETPNLQNNIEVVEQIIEYIYNNIMYAELNTKSDYCQKCGYTGEILIDDNLEWYCPNCGNRDHDTLNVARRTCGYIGTNFWNKGRTEEIKERVLHIDNKDYVDTKAPKVEAKEEKKEKAKEKVSVSAN

SEQ ID NO: 915 - protein, 768 aa, unidentified
  REGION 1..768: note = Category: MG60 effectors
  REGION 1..768: note = Description: MG60-126 effector
  source 1..768: note = uncultivated organism sequence
MFCSCKKNLRVVIYIYNATKTYDCAKKLIVYKSIIKGAEVMKIIKRNGAEETFDRQKIKDAIAKANNETDGTPELTDRQIDYISLVIEDHCNEMNRALSVEEIQELVETHIILQGAPETAKRYIRYRFTRNLARASNTTDNQILSLIECNNEEVKQENSNKNPTVNSVQRDYMAGEVSKDLTKRILLPEDIVKAHEEGLIHFHDADYFAQHMHNCDLVNLEDMLQNGTVISGTMIEKPHSFSTACNIATQIIAQVASNQYGGQSISLAHLAPFVQISREKITRQVRAEMEEFGIDADDEQVKSLVEKRVRDEIKRGVQTIQYQVVTLLTTNGQAPFVTVFMYLNEAKNEQEKKDLAIIIEEVLKQRIKGTKNEVGVWVTPAFPKLIYVLEEDNITEDSRFWYLTKLAAECTAKRMVPDYISEKIMLKLKIDKNGNGNCYTCMGCRSFLTPYVDENGKPKYYGRFNQGVVTINLVDVACTAARDGNKSEEKFWQVLDERLELCHRALQCRHERLEGTLSDAAPILWQYGALARLKKGEPIDKLLHGGYSTLSLGYAGLWECVYEITGKKLTEKEGEEFGLRVMQRLNDACAEWKAAENIDYSIYGTPLESTTYKFAKCLQNRFGIIKGVTDRNYITNSYHIHVTEKIDAFSKLELESKFQKLSPGGAISYVEVPNMQQNIPAVLEVMKFIYNNIMYAELNTKSDYCQVCGYDGEIQIVEEDGKLVWRCPNCGNEDQSKMNVARRTRGYIGSQFWNQGRTQEIKERVLHL

SEQ ID NO: 916 - protein, 1323 aa, unidentified
  REGION 1..1323: note = Category: MG60 effectors
  REGION 1..1323: note = Description: MG60-127 effector
  source 1..1323: note = uncultivated organism sequence
MSNFESYLNQFRVQKGEACNYTGMTINRGSFYIPEENRTTFLSKYYDHVFKQGGSSDLIERHSDLCCVLYDLDMKIDKESEERGYTREIINSFIEISTRIMKKYFDLPVSAYQCFVLEKDKPTVKKECKKDGVHLMFPYIVTEPSIQHLIRDEIVIEAKHLFEECLNTIEDIVDISVLDKNGWMLLGSSKIDGLPYNLTGIWSYENIEDVGNTFPNRVETSEYYTPSLDLVTLLSIRRFTLADITNFKSDMQDFLESWIDDFNTIQEEKNNIHTRRFHGNINKDMKVNMKTVQSLVSILSTDRAKNYEEWIELGFCLHTISDELLQTWIEFSERVDDYRETASADCSARWGKMRETGLGLGTLHMWAKADNYKAYLEIIQNDLEYFIVKTVNSALSNKDDAKDKAKKEVNISDVIFNVVLALKQKYYHYFICSSYEKKHWYEFEDIRWVEGDADVGLKRKIREDLYDDYVAVSTKYRKLSERFQNDHPNKEKYELISAEVFKVAQKLRDATFRKRLLEEASEQLYWSRDRSKQLSSSKFEEILDVNEKLIGMKNGVYDLEKQCFREARCEDYVSLSADIEYQEYFWNDEIIQDINTFISQVLTNKDVRDYVLQTFAMCLDGQIYNEHFHIYTGCHAKGSEILMHDGTIANVENVKVGDMLMGPDSKPREVHELVNGYSQMYEIIPSKGEPFVVNEDHIMVLKATTINNVVKCKNEKRFKLSWHERDIFGFPVSKCKNFPYNGRLKYKKNVIYYKTEDDARNAIEIYRNDLIMNNLNYIKNGDVIEIPLKEYIKRMKKINGAKNYFLFKEGVDFPEKDVKIDPYMLGYWLGDGTSKAFAITTMDDIVIDYFDQKTVVDENMDKKVYHKKNNKAKTIYYSSKEKKHGKNRLLNSMKEYNIYNNKHIPSVYKFNNRQTRLELLAGLIDSDGHYNVKSKHYEITLKIEKLIDDTVYLARSLGFAVTKRTVKKTCTNNGKTGMYFNVLICGNNLNEIPVLIERKIARDRLKKKDPLRFGFKVNKLENDQYYGFKLNQDHLYLAGDFFVHHNCGSNGKSKILELFELSFGQYCSKLSIAALTQKRVSSSAATPEIARLRGRRFVVLQEPGENEILNVGLMKEMTGGDKIVARSLNKDPIEFKPQFNMILTCNQRPKIPSDDQGSWRRIRVVEFTSKFTANPDPNDPNQFMIDTDLTSKLKKWGKPFFWILTQYYKEFKKNGYKEPAEVTAATNEYQKEQDAYSEFVTDCLKLDKTSYADVKEVYTVFQEYVRYNNDQKPSKKAFEKYMNTRFGKFGRHRDSKCWKGFKIDEAALNENYGISENPEDELL

SEQ ID NO: 917 - protein, 787 aa, unidentified
  REGION 1..787: note = Category: MG60 effectors
  REGION 1..787: note = Description: MG60-128 effector
  source 1..787: note = uncultivated organism sequence
MLYDDQPISQDEEDKLNRTPFVDEIVELIDRYTEYDEKKDNHDGLVIGLEGAWGSGKTSALNLLENRFRDKNERYVVQRLDSWLAMDCTTLAAEFFKTLGAATIESGISSEYETLLQRIVRNVCGYTLRLVTWIKLKKLPKIGPKIVAHIDKMEPSKWVRKTPAHVLKFGKNVIRSSTISLKVIKIDFGKIIKDTTIRKEKEDLRVDLSKSKKYIIYMIDDIDRLNNDEIAFVMQLVKNIADFPKVIYILAYDRNIVAEALQRIDGKNGRDFMEKIIQVPIQMPEFGKAGLLRYFCDELRTIVQSESSSQNKVRFDTSQGKIIMDKVYMSIEPYLKNFRDCKRLLNAYQIRYYICSRFCAPDDLLCIVVLETFEPGAITYLINHYNAFYSSLLPESRNVSATDIKNYRDEIKQEASCSERALKILASLFPAFATKINETTSAQLINGKALIENRISERENFLSYFILSPNENAVFSDVIKDLLLNWQEEDIAEQLKQWARGGKLQSALLKIGAYCDLYNQDIKLERDRWMPILHGISSVQNIRLYANQTYTWADVPWAVVEKIIDLPIFGGNPDHVNIDTAGWIVDIFRDENVSLETLEVLMWHIGSGYEWARPESYADSAPEVEEDLFMSCKELFVRRLKGNLSKEGFFDSVMINLFLAHLMKEDMAYLNQYLASLSTIESIYPWLKVALEEETHRKFYGLKRRAWHHKDDLLAITPKSYAALVDKELDQIPEDWLSDQKWTTLVLYDAYVHQETWTQTKGAFIKEESLEEYGNKVYHARKNKKVN

SEQ ID NO: 918 - protein, 768 aa, unidentified
  REGION 1..768: note = Category: MG60 effectors
  REGION 1..768: note = Description: MG60-129 effector
  source 1..768: note = uncultivated organism sequence
MFCSCKKNLCVVIYIYDATKTYDCAKKLIVYKSIIKGAEVMKIIKRNGAEETFDRQKIKDAISKANNETDGTPELTDRQIDYISLVIEDHCNEMNRALSVEEIQELVETHIILQGAPETAKRYIRYRFTRNLARASNTTDNQILSLIECNNEEVKQENSNKNPTVNSVQRDYMAGEVSKDLTKRILLPEDIVKAHEEGLIHFHDADYFAQHMHNCDLVNLEDMLQNGTVISGTMIEKPHSFSTACNIATQIIAQVASNQYGGQSISLAHLAPFVQISREKITRQVRAEMEEFGIAADDEQVKSLVEKRVRDEIKRGVQTIQYQVVTLLTTNGQAPFVTVFMYLNEAKNEQEKKDLAIIIEEVLKQRIKGTKNEVGVWVTPAFPKLIYVLEEDNITEDSRFWYLTKLAAECTAKRMVPDYISEKIMLKLKIDKNGNGNCYTCMGCRSFLTPYVDENGKPKYYGRFNQGVVTINLVDVACTAARDGSKSEEKFWQVLDERLELCHRALQCRHERLEGTLSDAAPILWQYGALARLKKGEPIDKLLHGGYSTLSLGYAGLWECVYEITGKKLTEKEGEEFGLRVMQRLNDACAEWKAAENIDYSIYGTPLESTTYKFAKCLQNRFGIIKGVTDRNYITNSYHIHVTEKIDAFSKLELESKFQKLSPGGAISYVEVPNMQQNIPAVLEVMKFIYNNIMYAELNTKSDYCQVCGYDGEIQIVEEDGKLVWRCPNCGNEDQSKMNVARRTCGYIGSQFWNQGRTQEIKERVLHL

SEQ ID NO: 919 - protein, 768 aa, unidentified
  REGION 1..768: note = Category: MG60 effectors
  REGION 1..768: note = Description: MG60-130 effector
  source 1..768: note = uncultivated organism sequence
MFCSCKKNLCVVIYIYDATKTYDCAKKLIVYKSIIKGAEVMKIIKRNGAEETFDRQKIKDAISKANNETDGTPELTDRQIDYISLVIEDHCNEMNRALSVEEIQELVETHIILQGAPETAKRYIRYRFTRNLARASNTTDNQILSLIECNNEEVKQENSNKNPTVNSVQRDYMAGEVSKDLTKRILLPEDIVKAHEEGLIHFHDADYFAQHMHNCDLVNLEDMLQNGTVISGTMIEKPHSFSTACNIATQIIAQVASNQYGGQSISLAHLAPFVQISREKITRQVRAEMEEFGIDADDEQVKSLVEKRVRDEIKRGVQTIQYQVVTLLTTNGQAPFVTVFMYLNEAKNEQEKKDLAIIIEEVLKQRIKGTKNEVGVWVTPAFPKLIYVLEEDNITEDSRFWYLTKLAAECTAKRMVPDYISEKIMLKLKIDKNGNGNCYTCMGCRSFLTPYVDENGKPKYYGRFNQGVVTINLVDVACTAARDGNKSEEKFWQVLDERLELCHRALQCRHERLEGTLSDAAPILWQYGALARLKKGEPIDKLLHGGYSTLSLGYAGLWECVYEITGKKLTEKEGEEFGLRVMQRLNDACAEWKAAENIDYSIYGTPLESTTYKFAKCLQNRFGIIKGVTDRNYITNSYHIHVTEKIDAFSKLELESKFQKLSPGGAISYVEVPNMQQNIPAVLEVMKFIYNNIMYAELNTKSDYCQVCGYDGEIQIVEEEGKLVWRCPNCGNEDQSKMNVARRTCGYIGSQFWNQGRTQEIKERVLHL

SEQ ID NO: 920 - protein, 987 aa, unidentified
  REGION 1..987: note = Category: MG60 effectors
  REGION 1..987: note = Description: MG60-131 effector
  source 1..987: note = uncultivated organism sequence
MKKIIMACFLSVLCFQGFALTGFDADYNAALKRAKDNSKPIFILFTGSDWCSWCVKFEKEVLSKSEFLDYATNTWELVVADFPQKKKIAPELKKQYQALQKKYAVRGFPTVMLIDAKGKELCSAGYSKGGAKVWLEKFLNKLKITPLVEQYLAPIEKKVRVISEESRDEITAKVKSLEPTDYKKWLQEYKSIANKYLPKVKAISDELAKLNVPDEILEKKEELSEEVNFMMMSLESAAKMDVEKEAKRIEELRKESESTKKVERKINRVTVPKAGEGKVDSEYFAKVAMPFYKKHIVDTFVPTKKMDKKTADDVRKVRWALARYLSTGRLEFPTGEECALAEKLWRKKFRDPAVAMLFYHSLFSDAQYWRGRRIFSDAIKIHNFKREPIFGFILKSYLCKAEKHRLKVRKSDPVKPYQDACAELEKYTTDKIVDVFKKADYRILERLEELIIIPPSLSKKVGNEYLSRCMIAERAMNAAFEARGSGWASDVTEEGWKGFQDNNEIAASNLLAAVKMRPEGARAPMMLARLSGSSCVVSEADTYSWCSLAVSNSLDECAEQIQHFVHFRTSRWGGSTAFLRDFLMQCATNVDVRSTFSYAAAAAAFRKILVAEADNSVQSNALERFITPDMRTALYGMFDAYAAAPETEFMPSADMFRGMGMSLALQFRDWPKVRKYYKMIKKPLKHHVDSTWLIRTYAPAINNTHVSYLFRVLGQSKYAEQFLEAEEAVAAKDYEKAYKLYSNLQNIEKPSDGEKYIAAEGYYTMRRVIEEKKGGWVNLMPSKTGGEAIHFWGMTFLDGDGKARCHDNTRSYYRVKKPIPGIGSEFEGTIHFEKDDKNRKVWNIGWGLARVYSGFCADNNSWAYPYIAFTRDEKGDHYAIDTFTNENSNRENFKDEDKWVQLGRAPYLMVAQGDLEKSDSHSFKLLTTEDKIEIFIDRKLVYSSMLDDIINVSYMRDRIQPNGDVLPVWKVFTGSSFSDYRYRRLVK

SEQ ID NO: 921 - protein, 768 aa, unidentified
  REGION 1..768: note = Category: MG60 effectors
  REGION 1..768: note = Description: MG60-132 effector
  source 1..768: note = uncultivated organism sequence
MFCYCKKKLCVVIYIYNATKTYDCAKKLIVYKSIIKGAEVMKIIKRNGAEETFDRQKIKDAIAKANNETDGTPELTDRQIDYISLVIEDHCNEMNRALSVEEIQELVETHIILQGAPETAKRYIRYRFTRNLARASNTTDNQILSLIECNNEEVKQENSNKNPTVNSVQRDYMAGEVSKDLTKRILLPEDIVKAHEEGLIHFHDADYFAQHMHNCDLVNLEDMLQNGTVISGTMIEKPHSFSTACNIATQIIAQVASNQYGGQSISLAHLAPFVQISREKITRQVRAEMEEFGIDADDEQVKSLVEKRVRDEIKRGVQTIQYQVVTLLTTNGQAPFVTVFMYLNEAKNEQEKKDLAIIIEEVLKQRIKGTKNEVGVWVTPAFPKLIYVLEEDNITEDSRFWYLTKLAAECTAKRMVPDYISEKIMLKLKIDKNGNGNCYTCMGCRSFLTPYVDENGKPKYYGRFNQGVVTINLVDVACTAARDGSKSEEKFWQVLDERLELCHRALQCRHERLEGTLSDAAPILWQYGALARLKKGEPIDKLLHGGYSTLSLGYAGLWECVYEITGKKLTEKEGEEFGLRVMQRLNDACAEWKAAENIDYSIYGTPLESTTYKFAKCLQNRFGIIKGVTDRNYITNSYHIHVTEKIDAFSKLELESKFQKLSPGGAISYVEVPNMQQNIPAVLEVMKFIYNNIMYAELNTKSDYCQVCGYDGEIQIVEEDGKLVWRCPNCGNEDQSKMNVARRTCGYIGSQFWNQGRTQEIKERVLHL

SEQ ID NO: 922 - protein, 1292 aa, unidentified
  REGION 1..1292: note = Category: MG60 effectors
  REGION 1..1292: note = Description: MG60-133 effector
  source 1..1292: note = uncultivated organism sequence
MKLRKVYACILTLCMLVSMLPAFAADTDASCTHKWTEKVIKEANCTQTGLVKKTCELCGDFEYEKTPFKHGEGKEVVKDATCTKPETVGLYCEKCGELIGKVQEVGKALGHDLGKGTEKKADCAGPDRVEYTRKRCGETVVEAIEGGEAAKEHDWEAKIVPATCKTKGYEARVCKACGKVEKDKELPIDENAHVPKLGKVIREATCTTNGLGRSVCELCGKELGYITIKAGHKYGDPICDEGKQVTCGKAGYGYYVCTVCGEETEKAEIPATGKHTFVDETDIPATCTEPEKIGRICKVCGAADGKVEEIGEALGHDWDDGVYTKADCLKAEREVFTCKRCGKTRDEFIPNGEAAKGHKFVDKIVAPTCKTKGYTERTCERCDLYEKINETEIDKDAHVAKLDKTIREATCTVNGLGRYTCELCGEYLGYRAIEAKHVYGAPIFDEGKEATCGKDGYGYYVCAVCGEETEKDVIPATGKHEFVDETVIPATCTEPEKVGRICKVCGKADGKVQEIDKPLGHDWDDGELKDADCEKAERVVYTCERCGEVKEEIIPNGEAAKGHKFVDKIVAPTCKTKGYTERTCERCDLYEKINETEIDKDAHVAKLDKTIREATCTVNGLGRYTCELCGEYLGYRAIEAKHVYGAPIFDEGKEATCGKDGYGYYVCAVCGEETEKDVIPATGKHEFVDETVIPATCTEPEKVGRICKVCGKADGKVQEIDKPLGHDWDDGELKDADCEKAERVVYTCERCGEVKEEIIPNGEAAKGHKFVDKIVAPTCKTKGYTERTCERCDLYEKINETEIDKDAHVAKLDKTIREATCTVNGLGRYTCELCGEYLGYRAIEAKHVYGAPIFDEGKEATCGKDGYGYYVCTVCGEKSEKTEIPATGKHQFVDEFVIDATCEEPMKVGRICKVCGKVDGEVKTVGEKLGHDWDDGELKDADCEKAERVVYTCKRCGETKEDVIGTEVLGHKYKEKVVEPTCKTKGYKAYVCSVCGDAEVIEELEPVAGNHVAKLDKVIREATCSANGLGRYVCAECGDYIGYRAIVAEHKWGEEYANANATAIMHECQVCGKVEIIWQDPDFKECEEGKHEIVNDPARAATCTVNGLTAGKHCVVCGKILAQQTVIPALGHTEVVDEGKEATCTEAGLTEGKHCSVCSEVLVKQEEIPALGHTEVVDEGKAATCTEAGLTEGKHCSVCSEILVKQEEIPATGHVEEILPAVAPTDTEPGLTEGKKCSVCGKILVEQEVIPAHGHEHSYVLKGYDFNADFTKKVATYECTICGDTYTEEMDF

SEQ ID NO: 923 - protein, 768 aa, unidentified
  REGION 1..768: note = Category: MG60 effectors
  REGION 1..768: note = Description: MG60-134 effector
  source 1..768: note = uncultivated organism sequence
MFCSCKKNLRVVIYIYNATKTYDCAKKLIVYKSIIKGAEVMKIIKRNGAEETFDRQKIKDAIAKANNETDGTPELTDRQIDYISLVIEDHCNEMNRALSVEEIQELVETHIILQGAPETAKRYIRYRFTRNLARASNTTDNQILSLIECNNEEVKQENSNKNPTVNSVQRDYMAGEVSKDLTKRILLPEDIVKAHEEGLIHFHDADYFAQHMHNCDLVNLEDMLQNGTVISGTMIEKPHSFSTACNIATQIIAQVASNQYGGQSISLAHLAPFVQISREKITRQVRAEMEEFGIDADDEQVKSLVEKRVRDEIKRGVQTIQYQVVTLLTTNGQAPFVTVFMYLNEAKNEQEKKDLAIIIEEVLKQRIKGTKNEVGVWVTPAFPKLIYVLEEDNITEDSRFWYLTKLAAECTAKRMVPDYISEKIMLKLKVDKNGNGNCYTCMGCRSFLTPYVDENGKPKYYGRFNQGVVTINLVDVACTAARDGSKSEEKFWQVLDERLELCHRALQCRHERLEGTLSDAAPILWQYGALARLKKGEPIDKLLHGGYSTLSLGYAGLWECVYEITGKKLTEKEGEEFGLRVMQRLNDACAEWKAAENIDYSIYGTPLESTTYKFAKCLQNRFGIIKGVTDRNYITNSYHIHVTEKIDAFSKLELESKFQKLSPGGAISYVEVPNMQQNIPAVLEVMKFIYNNIMYAELNTKSDYCQVCGYDGEIQIVEEDGKLVWRCPNCGNEDQSKMNVARRTCGYIGSQFWNQGRTQEIKERVLHL

SEQ ID NO: 924 - protein, 794 aa, unidentified
  REGION 1..794: note = Category: MG60 effectors
  REGION 1..794: note = Description: MG60-135 effector
  source 1..794: note = uncultivated organism sequence
MNIFIFYFFFSLHFLRSKFFLYKLPLSKGGVQKGLDFDLVFLSKIDILEVQLIKIVECSTIFWIDKGECIMKVIKRSGEEVIFDVHKIENAIRKANKATSHSQMSEATILKISKQVEAQCEAMKRSPSVEEIQDMVETAIMKEQYYSVAHNYITYRYERALVRKANSTDQQILSLLERNNEEVKQENSNKNPLVNSVQRDYMAGEVSKDITKRFLLPQDIIEAHEQGLIHFHDSDYFAQHMHNCCLVNLEDMLQNGTVISETMIEKPHSFSTACNIATQIIAQVASSQYGGQSITLSHLAPFVQISREKARKEVKDEFEAMNMDVSEEKINQIAEMRVLREIEKGVQMIQYQVITLMTTNGQAPFVTVFMYLDEVEEGQTRDDLALIIEEVLKQRMQGVKNEKGVWITPAFPKLIYVLEEDNIHKTSKYYYLTELAAKCTAKRMVPDYISEKMMKQLKVDQNGDGQCYPCMGCRSFLTPYVDENGKPKYYGRFNQGVVTINLVDVACSSKGDEKRFWKIMDERLDLCYRALMCRHNRLKGTPSDVAPILWQNGALARLEKGETIDKLLYGGYSTISLGYAGLCECVQYMTGVPHTEEPGTSFGLKVMQYLNDACAKWKKENNMDFSLYGTPMESTTYKFAKKLQDRFGIIPKVTDKNYITNSYHVHVTEEINAFDKLTFEAQFQKLSPGGAISYVEVPNMENNIPAVLAVIEHIYDHIMYAELNTKSDYCQICGYTGEIQIVEDENHKLVWECPNCGNRDQEKMNVARRTCGYIGTQFWNQGRTQEIKERVLHL

SEQ ID NO: 925 - protein, 763 aa, unidentified
  REGION 1..763: note = Category: MG60 effectors
  REGION 1..763: note = Description: MG60-136 effector
  source 1..763: note = uncultivated organism sequence
MMRVVKRDGKIVDFDESRIKIAIGKANNEVDESQRATEEEIEKIVEYVKKVKKDRILVEDIQDIIENKLMEYKRFELAKAYITYRYSRALVRKANTTDQTVKELVEGNSEYWNNENSNKNARVVTTQRDYLAGITSTDITRRLLLPPEIVKAHDEGIIHFHDADYFAQNALTNCCLINLNDMLQNGTVINGVMIEKPHRFVTACTIATQIILGVSSSQYGGCTVTLTHLAPFVRDSYNRALKKYQDRNLPEEECKKFAMQDTKKEIADGVQTFNYQVNSMTNTNGQAPFLSVNMYLGETDEYKDELAMIIEEFLRQRMLGFKNEKGVYITPAFPKLLYVLEEDNIHKDSKYWYLTELAAKCTAKRMVPDYISEKMMKKLKINQYGEGDCYPCMGCRSFLTPDRVKGNVAKAKDYVEGKGKYYGRFNQGVVTINLPDVALSSKKDEKEFWKIFDERLELCHEALQLRHKRLSGITSDVAPLLWQYGAYARLDKGEKLDKLLHGGYSTLSLGYAGLYECVKYMTGDSHTDGGKGEKFALEVMQHMNDKCAEWKKAEDIDYSLYGTPIESTTYKFAKCLKKRFGTVEGVTDRNYITNSYHVPVFEEIDAFSKLKLESEFQRLSPGGAISYVETPNLQNNIEVVEQIIEFIYNNIMYAELNTKSDYCQKCGYTGEILIDDNLEWYCPNCGNRDHRTLNVARRTCGYIGTNFWNKGRTQEIKERVLHIDNKDFDAEKCTKCDENVEKHEKKTRAKVSAKEKAMASVHA

SEQ ID NO: 926 - protein, 1231 aa, unidentified
  REGION 1..1231: note = Category: MG60 effectors
  REGION 1..1231: note = Description: MG60-137 effector
  source 1..1231: note = uncultivated organism sequence
MSLKIEDLETFKRHRYAVSESLSTDIVGRDREIEEISSKIDSVYCLTITGPAGVGKSRLAVAAIEHYCANHTDFEVLCTKSFSDYISALDEAIEEGRKYVIFIDDANTYPSLIELLEFLKYRNQEGNIKAILTVRDYLKGCLDSDIYMEFYEVKPLNDKSIEDALVKNTTIRNEDWLKQIAKIANGNIRVAFLAANEAIKNNKSLDSIYNQKDVLNRFYKDEISKIDHSESLLITAGIIAFFKSIYLEQLFYIVPILKSVNLSKKSFIENVNILIKMEIVDNYHDVVKIADQCFADFLLNYTIVEKRYLKIKDLLLVGFKYYKERIVESIHTILHVYNTEEFVDHLRKEVTDACNNLEDDVSLKHGIESCFAQVIPEYVSREYIEGVEKYSDQKDIKWLINVFSGLAFSNYNEIANKGVLKLLKKTKNKTKEVYDAIKNTYEMRAERANERFQYQIALIKELQNGGLYNDEFNALVSSYLNFRFSYSCFTSKREMMHYTFSVDDNTAGILELRSACWGYLFNCELSKAIDSIMDFANRHYIERNLEIIKNDLRCINTYLCEHDQSGFLNSVLYVKFIDEAKEYCFTDLLTANKKYLDFLDIVFERKLLGKNYEGYEARYKNRVTDYYNLHKDDIYDILNETDLFLNKYYKYQKTRLVNALVEVVDKFSNALFFLCTKNGIFPHLVIEEFLKNRNLDEVYALINQIDDETIKDEYLYNFYSYLSKENIEKDYGFIGWINSKGDFKTNRTYHRDAVSLNNIAEKCGLDYVALLKKLYSKEKYNKFIAKAYLSYLIDNVETFKELLSLNQNLAIKIYEFLIANGEKDYESSVLIEILDVKRSYIKVFAKAFIKEEYYNDCNLDFIFEKEYCDSFFNECMKVMLSQKTNSASSKLRILISKNINQPNMERWIEKYIESNYKEDNVIELFFQALSEIDHQHKNAYLVLYYQKGHDINVLRQAILNKSHSYSNAKEHFGNEIKWLETLKKSLLNWNNTEEVKFIDTVIDDYKVQIKNDEIESLVDYGNQNILNELRERDLKMEVSLKDAFELYQSDEKFRDMLSSGYLSYKDGSFVNGKNDPVEFIEKLKDKKIISVEIKPVDEVGRLDYEQYLSSMKSIAKEFDNPKLASLNDYLNALIDERGWKAQEFKENTFLSRDIFSKIRNNKKNKMDKKTLVQILIGLQVSKRERDYLLELNQTSLSKYVKEDVLYSFILDAKLDIGVADELLRDIGEDGF

SEQ ID NO: 927 - protein, 768 aa, unidentified
  REGION 1..768: note = Category: MG60 effectors
  REGION 1..768: note = Description: MG60-140 effector
  source 1..768: note = uncultivated organism sequence
MFCSCKKNLRVVIYIYNATKTYDCAKKLIVYKSIIKGAEVMKIIKRNGAEETFDRQKIKDAISKANNETDGTPELTDRQIDYISLVIEDHCNEMNRALSVEEIQELVETHIILQGAPETAKRYIRYRFTRNLARASNTTDNQILSLIECNNEEVKQENSNKNPTVNSVQRDYMAGEVSKDLTKRILLPEDIVKAHEEGLIHFHDADYFAQHMHNCDLVNLEDMLQNGTVISGTMIEKPHSFSTACNIATQIIAQVASNQYGGQSISLAHLAPFVQISREKITRQVRAEMEEFGIAADDEQVKSLVEKRVRDEIKRGVQTIQYQVVTLLTTNGQAPFVTVFMYLNEAKNEQEKKDLAIIIEEVLKQRIKGTKNEVGVWVTPAFPKLIYVLEEDNITEDSRFWYLTKLAAECTAKRMVPDYISEKIMLKLKIDKNGNGNCYTCMGCRSFLTPYVDENGKPKYYGRFNQGVVTINLVDVACTAARDGNKSEEKFWQVLDERLELCHRALQCRHERLEGTLSDAAPILWQYGALARLKKGEPIDKLLHGGYSTLSLGYAGLWECVYEITGKKLTEKEGEEFGLRVMQRLNDACAEWKAAENIDYSIYGTPLESTTYKFAKCLQNRFGIIKGVTDRNYITNSYHIHVTEKIDAFSKLELESKFQKLSPGGAISYVEVPNMQQNIPAVLEVMKFIYNNIMYAELNTKSDYCQVCGYDGEIQIVEEDGKLVWRCPNCGNEDQSKMNVARRTCGYIGSQFWNQGRTQEIKERVLHL

SEQ ID NO: 928 - protein, 818 aa, unidentified
  REGION 1..818: note = Category: MG60 effectors
  REGION 1..818: note = Description: MG60-141 effector
  source 1..818: note = uncultivated organism sequence
MKDYEITDKEGYAKQGLENYVKDWKIFIDTCSILHPAAEKFWVHVIPYLDEYKNKIIIPFRSVEELEKHAKNTERPKLAEDAKNSLKKVKQLVAAGYVEIRGEKTDNFADNVFQVVFTKFRLNHKMLLITQDNGLARDIYALNGSKSVKAYPVHVKQINQYGYLSNFQWGDENGHAEKNELRRSTGAAASKPSTAPKSAPKSVTVTETEADIDDDDAFEVCTAVTKISDAPLGVSHVPKENETVYAGSAPVKLMRALAAGGEGVIYQTNTPYVAKIYKKEKLTKRRYEKIKRMLSHSFSCEGICYPIAALYNSKKEFVGYLMPKAKGKELQKSIFIKPLFLKNFPNWKKRDTVELCITILKKIQYLHDKNIIMGDINPSNILVVSPKEVYFVDTDSYQIEDFPCPVGTVNYTAPEIQRKHFANFLRTEGNENFAVATLLFMIMLPGKPPYSQQGGEDPIDNIIKMDFSYPFGDNTNRKTPDGPWRYIWSHLTYDLKKAFYNTFRGDGEHASESTRLSADEWLPIFTYYLELLDSGKFGKQDPMSEELFPTRHKKNPKAEYVTCKLCGNEVEEHQCQNGICRPCLNRGEVYRCARCGREIMYTNYQKYIKNAKKHDVCPECFRYRREIRMRPTCIDCGTQFAISNSEYEFLKSKGFEVPKRCKACRERKKNQSQTPIPLPFHRPTMTRVPTVPSRPTPTPTPKPKPKGGTFCFITTAVCEYYGKDDRCAELNALRNFRDTWLTHQPDGPALIAEYYRSAPLLVSKMKQSEHFGAYCQTLWEDYLKPCLAYIRENAYEACKQRYIDMVHYMESEFKTKTI

SEQ ID NO: 929 - protein, 832 aa, unidentified
  REGION 1..832: note = Category: MG60 effectors
  REGION 1..832: note = Description: MG60-142 effector
  source 1..832: note = uncultivated organism sequence
MSLSFFATCPKGLENLLLRELVTLGACEVKETVAGVSFKGDFTLGMRVCLWTRLASRVLLEISEFYAGTDTDLYLGALAVDYEKYFEVSNTIAVSFKGTSEAIRNTQYGALKIKDAVCDYFLKRNGIRPNVDKDNPDILITCHLDRKDNAHLLFDLSGNALHMRDFNRHTGMAPLKENLACAMLLRSGYNGSNLVDPMCGSGTLLLEAAAMATDTAPGICRDHYGFLQLKLCDRSAYTSLVEEMHKRSREGMLKFKQSGYKLFGFDADERIIDIALENAKKSGFADIIRFQVQSVETLVNPFDDLNDETQNKNAPSLFVITNPPYGQRMGNFNELISLYTKLGAVFKEQFRGAVCAVISSSEDLLSCLRLHADKIYKLYNGELLCQLRIFSIRQGEEGSESLSKDNLATDFANRLRKNLLKMNKWAKTLGLEAYRVYDADVPEYAAAIDYYKGYYVISTYKAQNKVSEKIEKRHELDMLGATIEVTGVSGSKVILKSREVKKGNSQYERLREDNSALIEIREGPFAFKVNLYDYLDTGLFLDGRLIRQYLYEHASNCSVLNLFAYTCSASVAAALGGASLITSVDMSKTYLEWGYENLLLNQIEAHSHEFIQADVLAFVSKDPEHKYDLIYVDPPTFSNSKRMQNTFDVRRDHLQLLGNLTRFLRDGGEVVFCTNLRSFRIDERLDEFGYSVTDLSSKTLPFDFKRNEHIHHCYSLIYHEKERRCEPVAFVSSNVNPKWSKVLHGIKKTNEQEIIPKNKSVNGRPSRASTTVRFNASGMTEIHTDGNRDTSAFRHNNKRNFKSSKLRPAALRPKSSAKPRVFGPEGVKEGVQ

SEQ ID NO: 930 - protein, 1179 aa, unidentified
  REGION 1..1179: note = Category: MG60 effectors
  REGION 1..1179: note = Description: MG60-143 effector
  source 1..1179: note = uncultivated organism sequence
MINLESFKNLYEVRKTVRFSLLKQNYDDVFKCEENVLKDISFLNTLVWYEWQIIKIQKKEDWKLLQDLLSKDIFEDVIKNAFQILKNQICTVIYNKVVFDTKKSEQKQRYKIYLKTATWKELSAFIPTDYDKNSDYIPEENFYKVKDSEIWYAIKIVSKLIIDNDFIKKDTELHNRLSQINRYNPNFWNFFELNTLNPFTVNRWKISEIINSYEISLNQYKETLVNLNKEAYTIANAILSDRYFENCRNQKESDGTVRYLFHIFSNCKNSSEKNVWQINHLILLVNKYESLKNGKKKYTNDEIELKIKRLNKELRQLAKVRSELLWYQIHLIDNFQTEKFSFLIQSWKYYFVWMKKMWWENNLSQFQEFIDGLESGDDKLLYLDSMTWGGFKRLFLSKQSDVVFTDGIRIKDLNRTILAKEEEILQLKKWIIEKIEKDINIYISKVTNDIFNEINSKEKIKFIEYLSQKWKKVDNLFKLWKKNRKQLIYGKELKEFGNSLYNFDSIKEQFNLDKLEKEYSDLVQKLLIKIKDKKYEIWKNNFKSLSFLWDNFKDRKFENLDDLKNYFNDSWYKVIVKNVNLEKILKQVKAWELEIFQIKSKDMPFHQDFINDKNCWIIEGVKTEKGGSFKKDLNTLYFEQFFQDIAEWNKNTRIGADFKIRWINSSENNDYKSFWKKEKNQLRHSNNKENIEKFKNRFKRDRYSIEFSINLNATNHLTEEDFNTKISNKLKEKRETWSLRILSLDHGESSFLTYKIYQVEGNKYSIINQWWNFDNFKEVQDWEDKTTKRQENMQIDEEKVLYKDQKILDSYITKYHAMIQDQKRERQVEEAIKHFARKSISKIKEIISADTIDKNKEWVSDTTKANVKKFIQRSIDKTWNKEKDSIVSVLGKFYFDYNKYSFKKYFPDQENIKEKIDTYLKEIQELLDDESKLIAFCNEVKKSFDWVSLADIDKLYNTPFYSYKTNFSLQLEQINNLKKWYVSALIGTISKWVRNWDVDVIALENNLLYYGVDNSKSFQKHMWAENHATFAEALINKLSFCLDKETSESYQFCYPIKVKDRKKLKDKNNGILFFVDQDTTSLICPQCEGKLKRDKADWEDYLYHNDENLAWDGCEEDPFEIKKSEGKKWEYNWIIFENWDDLATYNIGRKGVLMLEKIKENPEETDLLIRDNDWDGLVK

SEQ ID NO: 931 - protein, 750 aa, unidentified
  REGION 1..750: note = Category: MG60 effectors
  REGION 1..750: note = Description: MG60-144 effector
  source 1..750: note = uncultivated organism sequence
MIGILRLNLPLNWKREAIAVPEEAKTHVHVIKRNGEEVTFDLSKIENAIKAANNEVDKLHQLNEYQVHAIADNLEKQIESMSHAVHVEDIQDMVETGIMEMRGYEVAQKYVRYRYKRELARKSNTTDNGILALIDHMNEEVNQENSNKNPVINSTQRDYMAGEVSKDLTKRMLLPEDIVEAHEAGIIHFHDSDYYAQKEHNCDLINLEDMLQNGTVISETMIEKPHSFFTACNVTTQIVAQVASNQYGGQTFTLSHLAPFVDVSRKKLRAQVIEERKDCGESLDDAIIDKITEKRLLNEVKSGIQTIQYQLITLMTCNGQAPFVTMFMYLDEVPEGQTRDDLALIIEEVLNQRIKGVKNEKGIWITPAFPKLIYVLDEDNITTDSKYWYLTELAAKCTAKRMVPDYISAKVMREMKDGDVYPCMGCRSFPTKEDGIRNPDGSRKYYGRFNQGVVTINLVDVACSSYGDMDKFWKILDERLELCHKALRCRHERLLGTISDVAPILWQHGALARLKKGEKIDKLLFGGYSTISLGYAGLCEMCVRMIGKTHTSEEGKKFALAVMQKLNDKCAEWKAAENISYSVYGTPMESTTYKFAKNLQKRFGIIPGVTDKNYITNSYHVHVTEHIDAFSKLKFESEFQKLSPGGAISYVEVPNLQNNIDAVLEVMKFIYDNILYAELNTKSDYCEKCGYDGEIKIVTDDYGKLVWECPNCGNRDQNTLFVARRTCGYIGTQFWNQGRTQEIKDRVLHL

SEQ ID NO: 932 - protein, 750 aa, unidentified
  REGION 1..750: note = Category: MG60 effectors
  REGION 1..750: note = Description: MG60-145 effector
  source 1..750: note = uncultivated organism sequence
MIGILRLNLPLNWKREAIAVPEEAKTHVHVIKRNGEEVTFDLSKIENAIKAANNEVDKLHQLNEYQVHAIADNLEKQIESMSHAVHVEDIQDMVETGIMEMRGYEVAQKYVRYRYKRELARKSNTTDNGILALIDHMNEEVNQENSNKNPVINSTQRDYMAGEVSKDLTKRMLLPEDIVEAHEAGIIHFHDSDYYAQKEHNCDLINLEDMLQNGTVISETMIEKPHSFFTACNVTTQIVAQVASNQYGGQTFTLSHLAPFVDVSRKKLRAQVIEERKDCGESLDDAIIDKITEKRLLTEVKSGIQTIQYQLITLMTCNGQAPFVTMFMYLDEVPEGQTRDDLALIIEEVLNQRIKGVKNEKGIWITPAFPKLIYVLDEDNITTDSKYWYLTELAAKCTAKRMVPDYISAKVMREMKDGDVYPCMGCRSFPTKEDGIRNPDGSRKYYGRFNQGVVTINLVDVACSSYGDTDKFWKILDERLELCHKALRCRHERLLGTISDVAPILWQHGALARLKKGEKIDKLLFGGYSTISLGYAGLCEMCVRMIGKTHTSEEGKKFALAVMQKLNDKCAEWKAAENISYSVYGTPMESTTYKFAKNLQKRFGIIPGVTDKNYITNSYHVHVTEHIDAFSKLKFESEFQKLSPGGAISYVEVPNLQNNIDAVLEVMKFIYDNILYAELNTKSDYCEKCGYDGEIKIVTDDYGKLVWECPNCGNRDQNTLFVARRTCGYIGTQFWNQGRTQEIKDRVLHL

SEQ ID NO: 933 - protein, 768 aa, unidentified
  REGION 1..768: note = Category: MG60 effectors
  REGION 1..768: note = Description: MG60-146 effector
  source 1..768: note = uncultivated organism sequence
MFCSCKKKLCVVIYIYNATKTYDCAKKLIVYKSIIKGAEVMKIIKRNGAEETFDRQKIKDAIAKANNETDGTPELTDRQIDYISLVIEDHCNEMNRALSVEEIQELVETHIILQGAPETAKRYIRYRFTRNLARASNTTDNQILSLIECNNEEVKQENSNKNPTVNSVQRDYMAGEVSKDLTKRILLPEDIVKAHEEGLIHFHDADYFAQHMHNCDLVNLEDMLQNGTVISGTMIEKPHSFSTACNIATQIIAQVASNQYGGQSISLAHLAPFVQISREKITRQVRAEMEEFGIAADDEQVKSLVEKRVRDEIKRGVQTIQYQVVTLLTTNGQAPFVTVFMYLNEAKNEQEKKDLAIIIEEVLKQRIKGTKNEVGVWVTPAFPKLIYVLEEDNITEDSRFWYLTKLAAECTAKRMVPDYISEKIMLKLKIDKNGNGNCYTCMGCRSFLTPYVDENGKPKYYGRFNQGVVTINLVDVACTAARDGNKSEEKFWQVLDERLELCHRALQCRHERLEGTLSDAAPILWQYGALARLKKGEPIDKLLHGGYSTLSLGYAGLWECVYEITGKKLTEKEGEEFGLRVMQRLNDACAEWKAAENIDYSIYGTPLESTTYKFAKCLQNRFGIIKGVTDRNYITNSYHIHVTEKIDAFSKLELESKFQKLSPGGAISYVEVPNMQQNIPAVLEVMKFIYNNIMYAELNTKSDYCQVCGYDGEIQIVEEDGKLVWRCPNCGNEDQSKMNVARRTCGYIGSQFWNQGRTQEIKERVLHL

SEQ ID NO: 934 - protein, 768 aa, unidentified
  REGION 1..768: note = Category: MG60 effectors
  REGION 1..768: note = Description: MG60-147 effector
  source 1..768: note = uncultivated organism sequence
MFCYCKKKLCVVIYIYNATKTYDCAKKLIVYKSIIKGAEVMKIIKRNGAEETFDRQKIKDAIAKANNETDGTPELTDRQIDYISLVIEDHCNEMNRALSVEEIQELVETHIILQGAPETAKRYIRYRFTRNLARASNTTDNQILSLIECNNEEVKQENSNKNPTVNSVQRDYMAGEVSKDLTKRILLPEDIVKAHEEGLIHFHDADYFAQHMHNCDLVNLEDMLQNGTVISGTMIEKPHSFSTACNIATQIIAQVASNQYGGQSISLAHLAPFVQISREKITRQVRAEMEEFGIDADDEQVKSLVEKRVRDEIKRGVQTIQYQVVTLLTTNGQAPFVTVFMYLNEAKNEQEKKDLAIIIEEVLKQRIKGTKNEVGVWVTPAFPKLIYVLEEDNITEDSRFWYLTKLAAECTAKRMVPDYISEKIMLKLKIDKNGNGNCYTCMGCRSFLTPYVDENGKPKYYGRFNQGVVTINLVDVACTAARDGSKSEEKFWQVLDERLELCHRALQCRHERLEGTLSDAAPILWQYGALARLKKGEPIDKLLHGGYSTLSLGYAGLWECVYEITGKKLTEKEGEEFGLRVMQRLNDACAEWKAAENIDYSIYGTPLESTTYKFAKCLQNRFGIIKGVTDRNYITNSYHIHVTEKIDAFSKLELESKFQKLSPGGAISYVEVPNMQQNIPAVLEVMKFIYNNIMYAELNTKSDYCQVCGYDGEIQIVEEDGKLVWRCPNCGNEDQSKMNVARRTCGYIGTQFWNQGRTQEIKERVLHL

SEQ ID NO: 935 - protein, 816 aa, unidentified
  REGION 1..816: note = Category: MG60 effectors
  REGION 1..816: note = Description: MG60-148 effector
  source 1..816: note = uncultivated organism sequence
MQTNKQLNLAFDFVQYTGQNIFLTGKAGTGKTTFLKSLKEKSPKRMIVVAPTGVAAINAGGVTIHSFFQLSFAPQIGLENVQEKQNRFNKEKINIIRSLDLLVIDEISMVRADILDAIDRVLRRFRNRNRPFGGVQVLMIGDLQQLAPVVKNDEWNLLKREYETVYFFSSKALRETSYVSIELTHVFRQQDDKFIAILNKVRNNQLDQNALEALNNRFIPNFEPDDSEGFITLCTHNLHAHRINEAKLIQLKTNKQLFTAEVEGKFPEYSYPTEFKLEVKVGAQVMFVKNDPEPEKLFYNGKIGQVTRINQDIIYVICPDEEEEIAVTQLLWENVKYTIDKNSAEISESVEGSFYQYPLKLAWAITIHKSQGLTFERAIIDAEASFAHGQVYVALSRCKTLEGMVLSSQISNRSIINDGTVSGFIQNVEENQPGDKELNDSKLAYQKDLLIDVFRFENVKMQVNIISKLLRENSSAIPEVVTEHIRKIKSAVYSDLVDVSEKFRNQITQLLSVQPDIEQNQKLLERVSKAADYFSEKVKAILIDDFAKADLDVDNRTLRKQLKNSSGRLTEETELKLASFEICRTGFNVKQLLDTRAKTLIENNKPAPKKQKAKEIINLESIPHPELYNTLREWRLEKASELEKPAFFVFSQKTLIEMVNYLPVETATLKLINGFGSRKIEQFGADIIQIIQNYCDENNVQRMEIPLKEVKEKKPKIDTKKASFELYQSGKTVAEVAKERALTTSTIENHLAHYVKLGELDISKLISKEKLKIITDYFEKAESKSFGDAKAALGDNVSYGELRMGLSYLESLNEKK

SEQ ID NO: 936 - protein, 768 aa, unidentified
  REGION 1..768: note = Category: MG60 effectors
  REGION 1..768: note = Description: MG60-149 effector
  source 1..768: note = uncultivated organism sequence
MFCSCKKNLCVVIYIYDATKTYDCAKKLIVYKSIIKGAEVMKIIKRNGAEETFDRQKIKDAIAKANNETDGTPELTDRQIDYISLVIEDHCNEMNRALSVEEIQELVETHIILQGAPETAKRYIRYRFTRNLARASNTTDNQILSLIECNNEEVKQENSNKNPTVNSVQRDYMAGEVSKDLTKRILLPEDIVKAHEEGLIHFHDADYFAQHMHNCDLVNLEDMLQNGTVISGTMIEKPHSFSTACNIATQIIAQVASNQYGGQSISLAHLAPFVQISREKITRQVRAEMEEFGIDADDEQVKSLVEKRVRDEIKRGVQTIQYQVVTLLTTNGQAPFVTVFMYLNEAKNEQEKKDLAIIIEEVLKQRIKGTKNEVGVWVTPAFPKLIYVLEEDNITEDSRFWYLTKLAAECTAKRMVPDYISEKIMLELKIDKNGNGNCYTCMGCRSFLTPYVDENGKPKYYGRFNQGVVTINLVDVACTAARDGNKSEEKFWQVLDERLELCHRALQCRHERLEGTLSDAAPILWQYGALARLKKGEPIDKLLHGGYSTLSLGYAGLWECVYEITGKKLTEKEGEEFGLRVMQRLNDACAEWKAAENIDYSIYGTPLESTTYKFAKCLQNRFGIIKGVTDRNYITNSYHIHVTEKIDAFSKLELESKFQKLSPGGAISYVEVPNMQQNIPAVLEVMKFIYNNIMYAELNTKSDYCQVCGYDGEIQIVEEDGKLVWRCPNCGNEDQSKMNVARRTCGYIGSQFWNQGRTQEIKERVLHL

SEQ ID NO: 937 - protein, 768 aa, unidentified
  REGION 1..768: note = Category: MG60 effectors
  REGION 1..768: note = Description: MG60-150 effector
  source 1..768: note = uncultivated organism sequence
MFCSCKKNLRVVIYIYDATKTYDCAKKLIVYKSIIKGAEVMKIIKRNGAEETFDRQKIKDAIAKANNETDGTPELTDRQIDYISLVIEDHCNEMNRALSVEEIQELVETHIILQGAPETAKRYIRYRFTRNLARASNTTDNQILSLIECNNEEVKQENSNKNPTVNSVQRDYMAGEVSKDLTKRILLPEDIVKAHEEGLIHFHDADYFAQHMHNCDLVNLEDMLQNGTVISGTMIEKPHSFSTACNIATQIIAQVASNQYGGQSISLAHLAPFVQISREKITRQVRAEMEEFGIAADDEQVKSLVEKRVRDEIKRGVQTIQYQVVTLLTTNGQAPFVTVFMYLNEAKNEQEKKDLAIIIEEVLKQRIKGTKNEVGVWVTPAFPKLIYVLEEDNITEDSRFWYLTKLAAECTAKRMVPDYISEKIMLKLKIDKNGNGNCYTCMGCRSFLTPYVDENGKPKYYGRFNQGVVTINLVDVACTAARDGSKNEEKFWQVLDERLELCHRALQCRHERLEGTLSDAAPILWQYGALARLKKGEPIDKLLHGGYSTLSLGYAGLWECVYEITGKKLTEKEGEEFGLRVMQRLNDACAEWKAAENIDYSIYGTPLESTTYKFAKCLQNRFGIIKGVTDRNYITNSYHIHVTEKIDAFSKLELESKFQKLSPGGAISYVEVPNMQQNIPAVLEVMKFIYNNIMYAELNTKSDYCQVCGYDGEIQIVEEDGKLVWRCPNCGNEDQSKMNVARRTCGYIGSQFWNQGRTQEIKERVLHL

SEQ ID NO: 938 - protein, 844 aa, unidentified
  REGION 1..844: note = Category: MG60 effectors
  REGION 1..844: note = Description: MG60-151 effector
  source 1..844: note = uncultivated organism sequence
MPLDERIARLKKKLLTSPYEVCMARAYHFTQAYKETEGLDPAMRNALALKKTLENQKIFIYPDEFLAGSKTEKFLAGPLSVERGDFLRTLQMEMDILHLKQRPFLITEEEKKLFREVILPYWDGKTLRDHKAKEWEKKGLIDRKQGFFKRLFRMIKFMRYVGRENLRKIAGANRKAPLTFRRLKNLHALRYELACNNPSPAVFCFDVQGHLSLGVNKVIENGMDGIIKKAEDRLKRLEVEEPYNEKKKNFLKAVIISLESAIRYSERFAKLAEEMAKKTEDEKEKSRLLLIAKHCRHVPRYKPRTFHEALQSAWITHLVGEIQYGTHEVFAPGRIDQFLYPFYENDIRSGRITRDEAKALIQEFLIKLESNVEPIPEVGMETNAVLGNSQHVVTIGGLKRDGEDGTNELSYLILEAYEEMGGAVNQLAVRISKKTPFDFLKRACAVFRKANGIAFYNDEAIIEGLLADGMSIEDARDYCIVGCIETSGQSNTHGCVGGHELVLPVVLMQTLTRGKEPPPFIGQKEGIDCGDPSSFKTFEDFISAFKKQLAHQIKILVEATEGKDKAYREILPAPYVSALMDDCIEKAMDVTEGGARYDFTSIDVRGLATLVDSLLAIKRFVYEKKELSLTEFIKIIRNNFKGHEVLRQRIINEAPKFGRGDREADEMAKNVLHWIYEISQRYRNIRGGRFRVCYYSYGNHVIDGFMLGATPDGRLKGEPISNGVSPVNMGDFSCGPMGPMRSVAKFPPREISSGIALNMRFHPSFIKTQEGLITFAKMIKTYFEMGGMHIQPNVVSSETLRDAQKNPERYRDLIVKVSGYSAYFTDLGKSIQEDIISRYEFCRS

SEQ ID NO: 939 - protein, 1216 aa, unidentified
  REGION 1..1216: note = Category: MG60 effectors
  REGION 1..1216: note = Description: MG60-152 effector
  source 1..1216: note = uncultivated organism sequence
MKRSFILFLLFILIVAIFVLPSLFTSSPKVQHLLKDTVSRELKAKVNYSDITWYWFPLPHLAFREAKVESPNFILYGSNAEIYPDWLSMLHGRFGVAGISLDDFHLLIKKISNDQDTSPNLPRWIKVRNGFIEISKNVSLPFPFPFKDRRPYIKKLYGKIGIDGPSVRLDLKGNTRQAQLIELKGNADLHQLTYSLKGHLRQFDLSALKINKLTKVKQFPHYGFINLDFSVSGNGVERSEGHIKAYSNCFVSGKSKKRVSAIFSCGSLELRYKYADGEANVVLESLDFKHPRLHLTGTLHFWKKDGLPWLKVDAKGRRLDLAEIRKVLLALSIRDKDVDDYCNVIRAGTVNWARVHLDAPASKWHSLSDMYIEGRAEDVKVYVKDEDFFVDSVSGPFEIVDGVLHVKEGLARLRNTKGSSGRLIFGLSKGREQFKLDIVLSAPPEDVKWALMKFTHEDTLHRELKRLSKLSGRIVGRLIIGDKKHDKKVKVQVQEARLSAFYKTLGAKVSIVQAHARYFDDTFSVSNFSGGVGPNFFKDVSAKVSWKDGHFKIKVNRGMGSVLAESILDFCNRFNLGQEFIDKYHVSASGRFRVKRLNLFFDAKVPSSFSYLVAGSPLGVSVETSLLPHKVFLKGGKLLVSTDKVSASRLKLSMAGSRFAIGLDLDHNHFHRWSGSVKVSGPIRRNLWKWLEKKGVELDEFTPRVPFFVRDFKLRFTKGEPREFVGTLYWKDDGISLFINARKSKGLFDLKRLSINAAGKRAELSFLKALGIKKRFSLGFKGELLGDTLDSILVENNMLDGRLQGDFSFGFSAHEKKAYSIDGRIHIEGFRWIWGLNDNLRFKKLDIEANKSHRGNISGLIRLFDDKIGINGTFKNGVGRLVCSLNLSAPVLSSQTISFIQKMSEAQKGTDAGTSSLSDQEQAKLFRELAKRLDLKIGFKVKEARYAVTDFSKEKKQGSHEVVLKNLKGNAEVQKSRLKRLEAFSDDTCGLDVYLKKERIGDRVISEFSVITPKGRQALFEQVLDCLGVEQDLITGPVTFNLYLRGGERVLLGNGNLGIKAKDGYIHRFGLISKIFSVVNIVDIFSLNKGLLEGTSPYKKMLIDAKIASGRVHLEKAYIKGSGINFYGTGDVYLDSKMLDLIIFVQPLKTVDTIITSLPIIGGIIGGKNKSLFAIPVKVSGDWNDPKVDTLQTKTVTDIFKKLIFNVLTAPFSLGH

SEQ ID NO: 940 - protein, 813 aa, unidentified
  REGION 1..813: note = Category: MG60 effectors
  REGION 1..813: note = Description: MG60-153 effector
  source 1..813: note = uncultivated organism sequence
MQTNKQLDLAFDFVQFTGQNIFLTGKAGTGKTTFLKSLKEKSPKRMIVVAPTGVAAINAGGVTIHSFFQLSFAPQIGLENVQEKQNRFNKEKINIIRSLDLLVIDEISMVRADILDAIDRVLRRFRNRNRPFGGVQVLMIGDLQQLAPVIKNDEWNLLKREYETVYFFSSKALRETSYVSIELTHVFRQQDDKFIAILNKVRNNQLDQNALESLNERYIPNFKPDDSEGFITLCTHNLHAHRINEAKLIQLKTNKQLFTAKVEGKFPEYSYPTEFKLEVKVGAQVMFVKNDPEPEKLFYNGKIGQVTRINQDIIYVICPDEEEEIAVTQLLWENVKYTIDKKTAEISESVEGSFYQYPLKLAWAITIHKSQGLTFERAIIDAEASFAHGQVYVALSRCKTLEGMVLSSQISNRSIINDGTVSGFIQNVEENQPGDKELSDSKLAYQKDLLLDVFRFENIKMHVNIISKLLRENSSAIPEVVTEHIRKIKSAVYSDLVDVSEKFQNQITHLLSAQPDIEQNPKLLERVSKAAGYFSEKVKAILIDNFSKADLDVDNRTLRKQLKNSSGRLTEETELKLASFEICKAGFQVKQLLDTRAKTLIDNNKPTSKKQKAKEIINLESIPHPELYNTLRAWRLEKASELEKPAFFVFSQKTLIEMVNYLPVETATLKLINGFGSRKIEQFGADIIQIIQKYCDENNVQRMEIPLKEVVEKKPKIDTKKLSFELYQAGKIVAEIAKERALTTNTIENHLAHYVKLGELDISKLISKEKLKIITDYFEKAESKSFGEAKTALGEQVSYGELRMGLSYFESRE

SEQ ID NO: 941 - protein, 750 aa, unidentified
  REGION 1..750: note = Category: MG60 effectors
  REGION 1..750: note = Description: MG60-154 effector
  source 1..750: note = uncultivated organism sequence
MVKKFLSKGAYHYQNDFFNDKIGFVILGGNMMRVIKRNGHTVDFDATKIENAILKAMKCGSGIIDEQCAKDIAREIEEWHRYSDGDISIYRIEGQVFEKLIEKGQILTAKAYEGYRKVREFQRETNTIDNEIYGIVNQTNKEAMEENSNKDATVLATQRDLIAGEFSKDYCRRLLLPPKIVQAHDDGIIHFHDMDYYIQKMHNCDLVNLKDMFAQGTVINDKLIETPKSLQTACTVATQIVQQVANGQYGGQTISLAHLSPYVRISYEKHKKNVINEGKMIGIDYSDEQIEKIAKSRLKDEIKAGIQTIQYQINTFSTTNGQAPFLSVFMYLKEEPEYIEETAMLIEETLRQRYVGMKNPVGAYVTPAFPKLLYVLDDNNVPQDSKYRYLTDLAVKCVAKRMMPDFISAKIMRENYEGQVFPCMGCRSFLSPWKDENGEYKWYGRFNQGVVTLNLADAGLSADHNLDNFWKILDERLELCKEALLLRHESLKGTIADVSPIHWRYGALARLKSGEKIDKLLENGYSTISLGYIGLYECVVALIGQTHTSKEGNELATKIMERLREACDSWKEETGLGFGLYGTPAESTTYTFARALKKRFGIVPGVTDKDYLTNSYHVNVREHIDAFSKLEVEAKFQKLSSGGAISYVEVTNMSQNLDALSALIDYMYETIQYAEINTKSDYCQECGFDGEILLDENREWYCPNCGNRNHKTLNVCRRTCGYLGDNFWNQGRTQEIAERFVHLDNHLYGE

SEQ ID NO: 942 - protein, 768 aa, unidentified
  REGION 1..768: note = Category: MG60 effectors
  REGION 1..768: note = Description: MG60-155 effector
  source 1..768: note = uncultivated organism sequence
MFCSCKKNLRVVIYIYNATKTYDCAKKLIVYKSIIKGAEVMKIIKRNGAEETFDRQKIKDAISKANNETDGTPELTDRQIDYISLVIEDHCNEMNRALSVEEIQELVETHIILQGAPETAKRYIRYRFTRNLARASNTTDNQILSLIECNNEEVKQENSNKNPTVNSVQRDYMAGEVSKDLTKRILLPEDIVKAHEEGLIHFHDADYFAQHMHNCDLVNLEDMLQNGTVISGTMIEKPHSFSTACNIATQIIAQVASNQYGGQSISLAHLAPFVQISREKITRQVRAEMEEFGIAADDEQVKSLVEKRVRDEIKRGVQTIQYQVVTLLTTNGQAPFVTVFMYLNEAKNEQEKKDLAIIIEEVLKQRIKGTKNEVGVWVTPAFPKLIYVLEEDNITEDSRFWYLTKLAAECTAKRMVPDYISEKIMLKLKIDKNGNGNCYTCMGCRSFLTPYVDENGKPKYYGRFNQGVVTINLVDVACTAARDGNKSEEKFWQVLDERLELCHRALQCRHERLEGTLSDAAPILWQYGALARLKKGEPIDKLLHGGYSTLSLGYAGLWECVYEIKGKKLTEKEGEEFGLRVMQRLNDACAEWKAAENIDYSIYGTPLESTTYKFAKCLQNRFGIIKGVTDRNYITNSYHIHVTEKIDAFSKLELESKFQKLSPGGAISYVEVPNMQQNIPAVLEVMKFIYNNIMYAELNTKSDYCQVCGYDGEIQIVEEDGKLVWRCPNCGNEDQSKMNVARRTCGYIGSQFWNQGRTQEIKERVLHL

SEQ ID NO: 943 - protein, 769 aa, unidentified
  REGION 1..769: note = Category: MG60 effectors
  REGION 1..769: note = Description: MG60-156 effector
  source 1..769: note = uncultivated organism sequence
MKVIKRDGTIVEYDREKIRIAIEKANKEVSRKEKATDSEIEEIMSYIEDLKKGRILVEDIQDIIEEKLMEIKRYELAKKYITYRYTRALVRKANTTDQSIKELIEGESEYWNNENANKNARVVTTQRDYLAGITSTDITRRFLLPEDVVKAHDEGIIHFHDADYFAQNALTNCELINLEDMLQNGTIMNGVMIEKPHRFITACTIATQIILAVTSSTYGGATVSLAHLAPFVRSSYEKYYKKYKENGLSKEQCEKFAKEDTKKEVADGVQTFNYQVNSMTNTNGQAPFLSVCMYLGETDEYKEELAMIIEEFLNQRILGFKNEKGVYITPAFPKLLYVLEEDNIHENSKYWYLTELAAKCTAKRMVPDYISEKIMKQMKVDANGDGQCYPCMGCRSFLTPYIDPVTKKPKYYGRFNQGVVTINLVDVALSSGKDLKKFWKIYDERLELCHKALQVRHERLAKATSDIAPILWQHGAFARLPKGASIHPLLHGGYSTISLGYAGLYECVKYMTGKSHTDNGDGKDFAIEVMKKMNEKCAEWKEAEDIDYSVYGTPIESTTYKFAKCLQKRFGKIKGITDKNYITNSYHVPVFEEIDAFSKLKLESEFQRLSPGGAISYVETPNLQNNLEVVLQIMKFIYDNIMYAELNTKSDYCQKCGYTGEILIDDNLEWYCPNCGNRDHNTLNVARRTCGYIGSNFWNKGRTQEIKERVLHIDNKDDDCDCDECNCDHANTDTSKEEKSEEKQMNFMDYDVEEEITKSKKHMKQPAMV

SEQ ID NO: 944 - protein, 868 aa, unidentified
  REGION 1..868: note = Category: MG60 effectors
  REGION 1..868: note = Description: MG60-157 effector
  source 1..868: note = uncultivated organism sequence
MRVIPKDTKLRATVYKNFTIWDIFVAIGVIGIEVLIGFSNLPGKVWIMLVAGVIMAPLFFPTDDGGRFYQNIVSMIQFRFMKKAYVGAEIKRFVPYKEIRDDGIIVYPDYFARVISVGQTEFRLLDEGMQNTKIAYFERVLKLTDIGASMDIVKIDRPINFDAFSASLFERVEKEKNELKKAVLEDRISQIDRLNNETKQFRPYYYIVIYDAKEDSLKDNTDTAVQMLNQMGLDSVILGQKEVVNFLKYCHTRFFDEREIDNVEPKDYVDYIMPKKLKFAGRNYTVDDVKAFTMTISDYPLSVANAWGSEIFNIDNTKVVLKIRPVDRLKAVKRIDKVVMELGSREENIRKASELIAKESHVESMGATLMSLQNENEVLFDCSLTVTAFNNANEDQLSFRKSIRHRIIQEGFKINNLSSQQINGFLASNISQVRSLKRYERGINSSSLAAVFPFVETSIIDEPNGIILGCNSHPVALDITKRDGSHTNSNVLILGKPGSGKTYAVKSIITQLYADNWRIHVLDVENEFSTLAKNVGGMIIDVGSATQGRINPFHIYGLLTDDGKQASPENIFDAHLIALESFFKIILEGISSDALEYINNLVVKCYEKRGITKSTDCSKFTAAQFPTFDDLMKILQEQPREGINPLDLANLQRAETYVAKFASGGRYASLWNGPSTLTTSSQFTVFNFQSLLSNKNTVVANAQMLLVMRYLEQEVINARDQNRDGKNLIRTAIVAEEAHAFTDPKFPVALDFLYQMAKRIRKYAGALFFITQNLRDGRSTPEIEAKTTAIFNCCQYSFIFSLPPQDINDLVELYKSSGGINEAEQQEIVTNQQGTAFLISSATERTSFSIVTTGVVESLFIREDEKQL

SEQ ID NO: 945 - protein, 773 aa, unidentified
  REGION 1..773: note = Category: MG60 effectors
  REGION 1..773: note = Description: MG60-158 effector
  source 1..773: note = uncultivated organism sequence
MSAAYGITIFSVRRVDFACQSPTTGHRKGLTSMKIIKRNGSEAVFDIMKIITAVTKANNVVKEDEQLTPMQIRRIAESVENSCLGMNRALSVEEIQDLVEHQIMAHGAYEVAKQYITYRYTRSLVRKSNTTDEKILSLIESNNEEVKQENSNKNPTVNAVQRDYMAGEVSKDLTARMLLPKEIVDAHEAGIIHFHDADYFAQHMHNCDLVNLEDMLQNGTVISGTLIEKPHSFSTACNISTQIIAQIASNQYGGQSISLTHLAPFVDISRQKIRKTVLEEIRTLGAAPDEAAISKVVEDRLREEIRRGVQTIQYQVVTLMTTNGQAPFITVFMYLGEARNEQEKHDLAIIIEETLKQRIEGVKNEKGVWITPAFPKLIYVLEEDNIHEGTKYWELTKLAARCTAKRMVPDYISEKKMRELKLSKGETPGHGDVYTCMGCRSFLTPDRSGNGWNNIANAGNYEPGKPKYYGRFNQGVVTINLVDVALSSGGAVDKFWRIFDERLELCYEALMCRHNRLKGTLSDAAPILWQYGALARLGKGEPIDKLLYGGYSTISLGYAGLYECVKYMTGKSHTDPAATPFALEVMQHMNDKCAEWKQKENIDFSLYGTPLESTTYKFAKCLQKRFGIIEGITDKNYITNSYHIHVSEHINAFDKLAFESQFQALSPGGAISYVEVPNMQNNIDAVLQVMQFIYENIMYAELNTKSDYCQICGFDGEIEIKEDKDGKLVWTCPQCGNTDQSKMNVARRTCGYIGTQYWNQGRTQEIRDRVLHL

SEQ ID NO: 946 - protein, 756 aa, unidentified
  REGION 1..756: note = Category: MG60 effectors
  REGION 1..756: note = Description: MG60-159 effector
  source 1..756: note = uncultivated organism sequence
MSFYDRRTTWLTPCGFTYSKADPLRDKDTLSERTRTIMKIIKRNGSEAEFDKNKIIRAISKANITVDESIRLTGKQIDRIAESVVLSCERLGRSPGVEEVQDMVEHQIMAHGAFEVAKNYITYRYTHDLIRRSNTTDEKILSLIECNNEEAKQENSNKNPVINSTQRDYMAGEVSRDLTDRLLLPPDIVKAHEEGIIHFHDTDYFAQHMHNCDLVNLEDMLQNGTVVTGTMLERPHSFSTACNIATQIIAQVASNQYGGQSISLAHLAPFVQVSREKIRRSVIAESKDFEIPLNEEQITNIVERRLREEISRGVQTIQYQVLTLLTTNGQAPFVTVFMYLGEAKNEREKKDLAMIIEETLEQRYKGVKNETGVWVTPAFPKLIYVLEEDNITEDSEYWYLTKLAAKCTAKRLVPDYISEKKMKELKEGNCFPVMGCRSALSPWKDENGNYKFYGRFNQGVVTLNLVDIACSSGGNYDKFWKIFDERLDLCYRALMCRHNRLMGTLSDAAPILWQYGACARLKKGEPIDKLLVGGYSTISLGYAGLCECVRYMTGKSHTDPSATPFALEVMRHMNDACEKWKKETTIGFGLYGTPLESTTYKFAKCLQKRFGIIPGVTDKGYITNSYHVHVTEHIDAFEKLKFESQFQALSTGGAISYVEVPNMQQNLDAVLEIIKFIYDNIMYAELNTKSDYCQVCGYDGEIEIKERDGKLVWVCPNCGNDDQNKMNVARRTCGYIGTQFWNQGRTQEIKERVLHL

SEQ ID NO: 947 - protein, 753 aa, unidentified
  REGION 1..753: note = Category: MG60 effectors
  REGION 1..753: note = Description: MG60-160 effector
  source 1..753: note = uncultivated organism sequence
MLEIVKRDCSKTNFDKQKIFNAIMKAMKSGSGIVKSEIAEKIANEIEHEAKSMEEIDIYQIEAMVFQKLIENNQILTAKAYESYRSVREFQRNTTNSTDDVILELLAGQSEYWNEENSNKNAMLITTQRDYIAGIESEDISKRMLLTPEIVHAQENGIAHFHDIDYFAMKAMYNCCLINLEDMLQNGTVISNVLIEKPHSFSTACNVATQIIAQVASSQFGGQTISLSHLAPFVDISRQRIKKQVEKELINANLSSVEYHNLVDSIVAERLKEEIKKGVQTIQYQVVTLMTTNGQAPFLSVFMYLNEVKDKQTKHDLAMLIEEVLLQRIQGVKNEKGVWVTPAFPKLLYVLEEDNIHKDSPYYYLTELAAKCTAKRMVPDYISEKKMKEYKIDKNGKGQCFPAMGCRSFLSPYLDKNNQPKYYGRFNQGVVTINLADVALSALKEYEESKFNLHDTSVESIFWKVLDERLELCHRTLRLRHERLKGTVSDVAPILWQHGAIARLDKGEKIDKLLYNDYSTISLGYAALYECVKTITGHSLTDNGIGEKFGLQVMQRLTDKCNQWKEEENIGYSVYGTPLESTTYKFAKCLRKRFGVIEGITDRDYVTNSYHIPVFENINAFDKLLIESKFQKLSAGGAISYVEVPNLTDNIEIVIQIIQYIYEHIMYAELNTKSDYCHVCGYDKEIEIVTDENTGKLIWKCPQCGNTDQRKMSVTRRTCGYLGSNFWNQGRTQEIKERVLHIDDIDLNESENV

SEQ ID NO: 948 - protein, 1045 aa, unidentified
  REGION 1..1045: note = Category: MG60 effectors
  REGION 1..1045: note = Description: MG60-161 effector
  source 1..1045: note = uncultivated organism sequence
MIKVIKRDCSEIQFDKNKISKAILKAMKNGSGIIKPKIADDIANEIEQYCIDNQFDNIDISDIESIVYDKLISKKQRLTAKAYEGYRRIREFQRENVNTTDEEIEELLTGTSEYWMNENSNKDEKLVTTQRDYMAGIVSKDMSRRYLLTPEIVQAHDEGIIHFHDVDYFGQKTLHNCFSADTEFVTSCGVKKFSDFHDGDNVVVLDKDGMWRNATVKQFGKQEMYDVTFQSTRRTKTVTCTKNHRWILNDGSVTTNLKIGDSLIGLKDMLCTYKTETYDECNLFALGFLIGDGCDHNSANYYQVRLCGHKIEYADIFKKAGYKIDNIGDTNDLIAYKTGTIKQDFINSKAWKYMDRKSRALLFLGLYAADGTVNANKICTTDERIAEFIRDNSCLCGYHITSETTEIRDTNYKKDSKLIAFRFSKHQPMNQLWKVKSIVPHYNYHYENRGNKKEENAPINAWCVVEPITHSFTLSNGMVTGNCDLIDLEDMLQNGTVISGTLIEKPHSFSTACNIATQIIAQVASSQYGGQTITLSHLAPFVDVSRKKIREEVEEELNYINGGGIYKDQLSTIDEITESRLAKEVKKGVQTIQYQVVTLMTTNGQAPFLSVNMYLNEVKDEQTKADLALIIEEVLKQRIQGVKNEQGVWITPAFPKLLYVLEDDNIHEGDKYWYLTKLAAQCTAKRMVPDYISEKKMLEYKVDKNGNGNCYPCMGCRSFLTPYVDTNGKPKYYGRFNQGVVTINLPDIALSSNGDVETFWEIFDERTELCHKALQIRHKRLEGTPSDVAPILWRYGALARLKKGEVIDKLLHGGYSTLSLGYAGLYECVKFMTGNSHTDGDKGEKFGLEVMQALNDKCNKWKKEENIDYSLYGSPIESTTYKFAKCLKKRFGVIEGITDRDYITNSYHVPVFEKIDPFTKLSIESKFQKLSPGGAISYIECADLTHNTEAVLKVMQFIYDNIMYAELNTKSDYCQVCGYDGEIKIVDENNELIWECPNCGNRDKNKMNVARRTCGYIGSNFWNKGRTEEIAERYVHLDDHEHEVE

SEQ ID NO: 949 - protein, 921 aa, unidentified
  REGION 1..921: note = Category: MG60 effectors
  REGION 1..921: note = Description: MG60-162 effector
  source 1..921: note = uncultivated organism sequence
MKIVKRNGTEVEFDIKKIINAITKANETVEEKDKLSIEEIKNISDCVMVRVSQLPVDTNVEVIQDIVEEELDKHNASYTLKRNYMLYRYQHNELRKSNTIDKTILSLIKCENEDIKQENSNKNPVIISTQRDYMAGEVSKDLMRRYFIDPDLMKAHDEGLIHIHDMDYILQNCHNCDLINLEDMLNNGTVISGTAIDKPHSFSTACNIATQIIAQVASSQYGGQSITLSHLAPFVDVSRKAILKELKEEFPSIDEDKLKEVCHRRLLKEINKGVQIIQYQVVTLMTTNGQAPFITVFMYLNECKDEQTKNDLALIIEEVLKQRIIGVKNEKGVYITPAFPKLIYVLQEDNIEKGSKYYYLTELAAKCTAKRMVPDYISEKIMKEMKEGQVYPSMGAVVPESKVYWKIDGKAYYGPIEKMYHSMIDRYDDLEEDCQFGQEGNPNKDINLKDYNVEIYDNGAGKYVKCLMMNMNLASQFRMYKIRTYNPIDDTDINLVVTHDHPMMKLKSEFDPNLVTIDWNDPKDIDNKCEEIQAEYLKTGDYVFFTKEQRGIRTVEIVDQTIPKPVQILKVPIINNYDFVYDVTTETEHFMVNNLWSHNCRSFLTPWKDKNGKYKFYGRFNQGVCTINLIDVACSSGKNIDKFWKIFDERLDMCRRVLMIKHNRLLGTVSDVAPILWQNGALARLNKGEKIDKLLYGGYSTISLGYAGLYECVYYMTGKSHTDPSVKDFALSIMQHMNDICNKWKKETNIGFSVYGTPLESVTYKFAKCLKKRFGEIPEVTDHNYITNSYHCNVREHINAFDKLTMESEFQRLSPGGAISYVEVPNMQNNIPAVLQLLKHIYNTIMYAEINTKSDYCHECGYTGEIVIEENKDHKLIWKCPNCGNTDQTKMNVARRTCGYIGTNFWNQGRTQEIKDRVLHL

SEQ ID NO: 950 - protein, 768 aa, unidentified
  REGION 1..768: note = Category: MG60 effectors
  REGION 1..768: note = Description: MG60-163 effector
  source 1..768: note = uncultivated organism sequence
MFCSCKKNLCVVIYIYNATKTYDCVKKLIVYKSIIKGAEVMKIIKRNGAEETFDRQKIKDAIAKANNETDGTPELTDRQIDYISLVIEDHCNEMNRALSVEEIQELVETHIILQGAPETAKRYIRYRFTRNLARASNTTDNQILSLIECNNEEVKQENSNKNPIVNSVQRDYMAGEVSKDLTKRILLPEDIVKAHEEGLIHFHDADYFAQHMHNCDLVNLEDMLQNGTVISGTMIEKPHSFSTACNIATQIIAQVASNQYGGQSISLAHLAPFVQISREKITRQVRAEMEEFGIDADDEQVKSLVEKRVRDEIKRGVQTIQYQVVTLLTTNGQAPFVTVFMYLNEAKNEQEKKDLAIIIEEVLKQRIKGTKNEVGVWVTPAFPKLIYVLEEDNITEDSRFWYLTKLAAECTAKRMVPDYISEKIMLKLKIDKNGNGNCYTCMGCRSFLTPYVDENGKPKYYGRFNQGVVTINLVDVACTAARDGSKSEEKFWQVLDERLELCHRALQCRHERLEGTLSDAAPILWQYGALARLKKGEPIDKLLHGGYSTLSLGYAGLWECVYEITGKKLTEKEGEEFGLRVMQRLNDACAEWKAAENIDYSIYGTPLESTTYKFAKCLQNRFGIIKGVTDRNYITNSYHIHVTEKIDAFSKLELESKFQKLSPGGAISYVEVPNMQQNIPAVLEVMKFIYNNIMYAELNTKSDYCQVCGYDGEIQIVEEDGKLVWRCPNCGNEDQSKMNVARRTCGYIGSQFWNQGRTQEIKERVLHL

SEQ ID NO: 951 - protein, 773 aa, unidentified
  REGION 1..773: note = Category: MG60 effectors
  REGION 1..773: note = Description: MG60-164 effector
  source 1..773: note = uncultivated organism sequence
MSAAYGITIFSVRRVDFACQSPTTGHRKGLTSMKIIKRNGSEAVFDIMKIITAVTKANNVVKEDEQLTPMQIRRIAESVENSCLGMNRALSVEEIQDLVEHQIMAHGAYEVAKQYITYRYTRSLVRKSNTTDEKILSLIESNNEEVKQENSNKNPTVNAVQRDYMAGEVSKDLTARMLLPKEIVDAHEAGIIHFHDADYFAQHMHNCDLVNLEDMLQNGTVISGTLIEKPHSFSTACNISTQIIAQIASNQYGGQSISLTHLAPFVDISRQKIRKTVLEEIRTLGAAPDEAAISKVVEDRLREEIRRGVQTIQYQVVTLMTTNGQAPFITVFMYLGEARNEQEKHDLAIIIEETLKQRIEGVKNEKGVWITPAFPKLIYVLEEDNIHEGTKYWELTKLAARCTAKRMVPDYISEKKMRELKLSKGETPGHGDVYTCMGCRSFLTPDRSGNGWNNIANAGNYEPGKPKYYGRFNQGVVTINLVDVALSSGGAVDKFWRIFDERLELCYEALMCRHNRLKGTLSDAAPILWQYGALARLGKGEPIDKLLYGGYSTISLGYAGLYECVKYMTGKSHTDPAATPFALEVMQHMNDKCAEWKQKENIDFSLYGTPLESTTYKFAKCLQKRFGLVEGITDKNYITNSYHIHVSEHINAFDKLAFESQFQALSPGGAISYVEVPNMQSNIDAVLQVMQFIYENIMYAELNTKSDYCQICGFDGEIEIKEDKDGKLVWTCPQCGNTDQSKMNVARRTCGYIGTQYWNQGRTQEIRDRVLHL

SEQ ID NO: 952 - protein, 756 aa, unidentified
  REGION 1..756: note = Category: MG60 effectors
  REGION 1..756: note = Description: MG60-165 effector
  source 1..756: note = uncultivated organism sequence
MQQSIFDVCVIIGLWFKKKRRSEVFTMKVIKRDGHIVDYSPDKIEEAVSKANLEVSEEDRVSDIQIRNIIKYIEGLHKKRMLVEDIQDVIEKRLMTLGKYELAKEYITYRYTRELVRRSNTTDKSIKELIDGESEYWNTENSNKNAKVVTTQRDYLAGITSTDITRRFLLPEDIVTAHDQGIIHFHDADYFAQNALHNCDLINLDDMLQNGTNINGVMIEKPHRFLTAMTIATQLITAVSSSQYGGCTITLTHLAPFVRSSKEFYLKKYKNRKLTKAQVEKFANEDLKKEITDGVQTFQYQINSMTTTNGQAPFLSVCMYLGETEEYKDELAMIIEEVLKQRMEGMKNEKGVYITPAFPKLLYVLEEENINPKGKYYYLTELAARCTAKRMVPDYISEKVMKENKINSLGNGECFPCMGCRSFLTPDRMFNVGNISKALNYVENKGKYYGRFNQGVVTINLPDVALTSGKDMELFWKVFDDRLELCHRALQIRHKRLSKVTSDVAPILWQHGALARLEKGESIHELLHHGYSTISLGYAGLYECVKYMTGHSHTDNGKGHEFALEVMQHMNDKCNEWKEAEDIDYSLYGTPIESTTYKFAKCLRDRFGKIKGITDRDYITNSYHVPVFEEIDAFTKLKLESEFQRLSPGGAISYIETPNLENNIDVVMEVINFIYENIMYAELNTKSDYCQKCGYNGEILLDDDLEWYCPECGNRDHDTLNVARRTCGYIGTNFWNKGRTQEIKERVVHIDNKDDE

SEQ ID NO: 953 - protein, 1231 aa, unidentified
  REGION 1..1231: note = Category: MG60 effectors
  REGION 1..1231: note = Description: MG60-166 effector
  source 1..1231: note = uncultivated organism sequence
MSLKIEDLETFKRHRYAVSESLSTDIVGRDREIEEISSKIDSVYCLTITGPAGVGKSRLAVAAIEHYCASHTDFEVLCTKSFSDYISALDEAIEEGRRYIIFIDDANTYPRLIELLEFLKYRNQEGNIKAILTVRDYLKGCLDSDIYMGFYEVKPLNDKSIEDALVKNTTIRNEDWLKQIAKIANGNIRVAFLAANEAIKNNKSLGSIYNQKDVLNRFYKDEMSKIDHSESLLITAGVIAFFKSIYLEQLFYIVPILKSVNLSKKSFIENVNILIKMKIVDDYHDVVKIADQCFADFLLNYTIVEKRYLKIKDLLLVGFKYYKERIVESIHTILHVYNTEEFVDHLRKEVTDACNNLEDDVSLKHDLESCFVQVIPEYVSREYIEGVENYSDKKDIKWLINVFSGLAFSNYNEIANKGILKLLKKTKNKTKEVYDAIKNTYEMRAERANERFQYQIALIKELQNGGLYNDEFNALVSSYLNFRFSYSCFTSKREMMHYTFSVDDNTAGILELRSTCWGYLFNCELSKAIDSIMDFANRHYIERNLEIIKNDLRCINTYLCEHDQSGFLNSVLYVKFIDEAKEYCFTDLLTANEKYLDFLDIVFERKLLGANYEGYEARYKNRVADYYNLHKDDIYDILNETDLFLNKYYKYQKTRLVNALVEVVDKFSNALFFLCTKNVIFPHLVIEEFLKNRNLDEAYALINQIDDETIKDEYLYNFYSYLSKENIEKDYGFIGWMNSKGDFKTNRTYHRDAMSLKNIAEKCGLDYVALLRKLYSKEKYNKFIAKAYLSYLIDNVETFKELLSLNQNLAIKIYEFLIANGEKDYESSVLIEILDVKRSYIKVFAKAFIEEEYYNDCNLDFIFEKEYCDSFLDECMKVMLSQKINFAPFKLRILISRNINQPNMERWIEKYIESNYKEDNVIELFFQALSEIDHQHKNAYLVLYYQKGHDINVLRQAILKKSHSYSNAKEHFGNEIKWLETLKKSLLNWNNTEEVKFIDTVIDDYKVRIKNDEIESLVDYGNQNILNELRERDFKTEVPLKDAFELYQSNKKFRDMLSSGYLSYKDGSFVNGKNDAVKFIDKLKDKKIICVEIKPVDKVGRLDYEQYLSSMKSIAKEFDNPKLVSLNDYLNALIAERKWNAQEFKDYTFLSRDIFSKIRNNKKNKMDKRTLVQILIGLRVSKRERDYLLELNQTSLSKYVKEDVLYSFILDAKLDIEVADELLRDIGEDGF

SEQ ID NO: 954 - protein, 783 aa, unidentified
  REGION 1..783: note = Category: MG60 effectors
  REGION 1..783: note = Description: MG60-167 effector
  source 1..783: note = uncultivated organism sequence
MMRVVKRDGKIVDFDESRIKIAIGKANNEVDESQRATEEEIEKIVEYVKKVKKDRILVEDIQDIIENKLMEYKRFELAKAYITYRYSRALVRKANTTDQTVKELVEGNSEYWNNENSNKNARVVTTQRDYLAGITSTDITRRLLLPPEIVKAHDEGIIHFHDADYFAQNALTNCCLINLNDMLQNGTVINGVMIEKPHRFVTACTIATQIILGVSSSQYGGCTVTLTHLAPFVRDSYNRSLKKYQDRNLPEEECKKFAMQDTKKEIADGVQTFNYQVNSMTNTNGQAPFLSVNMYLGETDEYKDELAMIIEEFLRQRMLGFKNEKGVYITPAFPKLLYVLEEDNIHKDSKYWYLTELAAKCTAKRMVPDYISEKMMKKLKINQYGEGDCYPCMGCRSFLTPDRVKGNVAKAKDYVEGKGKYYGRFNQGVVTINLPDVALSSKKDEKEFWKIFDERLELCHEALQLRHKRLSGITSDVAPLLWQYGAYARLNKGEKLDKLLHGGYSTLSLGYAGLYECVKYMTGDSHTDGGKGEKFALEVMQHMNDKCAEWKKAEDIDYSLYGTPIESTTYKFAKCLKKRFGTVEGVTDRNYITNSYHVPVFEEIDAFSKLKLESEFQRLSPGGAISYVETPNLQNNIEVVEQIIEFIYNNIMYAELNTKSDYCQKCGYTGEILIDDNLEWYCPNCGNRDHRTLNVARRTCGYIGTNFWNKGRTQEIKERVLHIDNKDFDAEKCTKCDEEANVASKCCNDSNESTECDKNVEKHEKKTRAKVSAKEKAMASVHA

SEQ ID NO: 955 - protein, 818 aa, unidentified
  REGION 1..818: note = Category: MG60 effectors
  REGION 1..818: note = Description: MG60-168 effector
  source 1..818: note = uncultivated organism sequence
MQTNKQLDLARNFVQYTGQNIFLTGKAGTGKTTFLKSLKEHSPKRMIVVAPTGVAAINAGGVTIHSFFQLSFAPQIGLENDRDKQNRFNKEKISIIRSLDLLVIDEISMVRADTLDAIDRVLRRFRSKSKPFGGVQVLMIGDLQQLAPVVKNEEWGLLRREYETVFFFSSKVLRKTSFVSIELTEVFRQHDDKFISILNKVRDNQLDQKSLEALNKRYLPGFVPGEDEGFITLCTHNIQAHRINESKLIQLKTDKKSYTAEIEGKFPEYSYPTDFKLVVKPGAQVMFVKNDPEPEKRFYNGKIGKITRFEEDVIYVNCPGDMEEIAVTPLLWENVKYTIDTKTAEISESVEGTFMQYPLKLAWAITIHKSQGLTFEKAIIDAGASFAHGQVYVALSRCKTLEGMVLSTPISERSIINDGTVSGFIQNVEENQPGEIELKNAKLAYQKELLFDIFSFETVKMQVNIINKLLRENSSSVPEVVVEHLKKIKSAVYSDLVEVAEKFQKQISTLLKDQPDVEQNNQLLERISKAATYFSEKTETIIETDFTRADLEVDNRVLRKQLKNSSTKLLEEANLKQVSFAICKNGFNVKELLTERAKAIVANNKPAGKKKKAKEIVNPENIPHPELYNTLREWRLEKAHEIEKPAFVVFSQKTLVELVNYLPVETATLKLINGFGERKIEQFGAGIIEIIRDYCDKNNIQRAEIPLKEGKEKKPKIDTKKVSFEMFKEGKTVEEIAVERALTPGTIENHLAHFVRLGELDIKLILDNDKLKKITDYFKSTKNKSFGDAKAHFGDAISYGELRMGLSYLESLEQTQSK

SEQ ID NO: 956 - protein, 753 aa, unidentified
  REGION 1..753: note = Category: MG60 effectors
  REGION 1..753: note = Description: MG60-169 effector
  source 1..753: note = uncultivated organism sequence
MKKLNIDHAQRSLILSRLEEKGIQEFVEFLQSKFKSESITRIMGSSHLFINSCPLCGHVGCFNIDSTMGIFNCFSCRGSGNAADLPMLFTNDIQEGLQALQEFTGLTLQLDKEDVQAQRKTNLYADVTEIYHKQLLDNEVVLNYLIQVRKRQIETIEKMQTGFCTSRADTSSQLKELGYSDEEKSKVLVPEGLFVYPYPDRYGVIQRFNTKNYFKATMRVSDGTQKVIEGYSIDKKKLLFNPNQKYAYGIIVEGEQDFAAIIENGDGNVVAMGGSPSADQINELRQFKKLYLCFDSDEPGKAFTQKVNNTLPDVKIYSIEIPHGYKDIDEYYTSYSNPVPVQSLLDSAQELINTESHGSVINNKVMLKNRDWQIEFDLTQLDIAKQMYKGNLKNTVNGKIVDNKNSIFLPNGMPKPLIEYADKLSQTIDEHYNCNFNKKTLFELSDIFYFSYNKPDIIKAAAVQLLEIEDKKERDACIASLTDKSFRNSVVREIIATENEMLKDQAVHYPLIKPGQAYIISEENPVAYIYFNKSEDDGKGNLIEMPCLLSSDKRIITLSDYTKVSPNQIVIVDGRFRLRDVIKGPLLSTDFCSLKQGYAKRYIEGEIEQEYLKPEYIIRKFEELFAKVYYNPDSNIYKVLALFSYATYLADLFGVLPYIYCTAQKGSGKSTILALLSKLCFNSVFVTDVTTASFIRISNLCATLIVDEFEGHSSRSKNQEDDLIPLIKSGYSKSSGGATRTNIEETYILLLKW

SEQ ID NO: 957 - protein, 844 aa, unidentified
  REGION 1..844: note = Category: MG60 effectors
  REGION 1..844: note = Description: MG60-170 effector
  source 1..844: note = uncultivated organism sequence
MPLDERIGRLKKKLLTSPYEVCMARAYHFTQAYKETEGLDPAIRNALALKKTLENQKIFIYPDEFLAGSKTEKFLSGPLSVERGDFLRTLQMEMDILHLKQRPFLITEEEKKLFREVILPYWDGKTLRDHKAKEWEKKGLIDRKQGFFKRLFRMIKFMRYVGRENLRKIAGANRKAPLTFRRLKNLHALRYELACNNPSPAVFCFDVQGHLSLGVNKVIENGMEGIIKKAEDRLKRLEVEEPYNEKKKNFLKAVTISLESAIRYSEKFAELSEEIAKKTEDEKEKNRLLLIAKHCRHVPRYKPRTFHEALQSAWITHLVGEIQYGTHEVFAPGRIDQFLYPFYENDIKSGRITRDEAKALIQEFLIKLESNVEPIPEVGMETNAVLGNSQHVVTIGGLKKDGEDGTNELSYLILEAYEEIGGAVNQLAVRISKKTPFDFLKRACAVFRKANGIAFYNDEAIIEGLLADGMSIEDARDYCIVGCIETSGQSNTHGCVGGHELVLPVVLIQTLTRGKEPPPFIGQKEGIDCGDPSSFKTFEDFISAFKKQLAHQIKILVEATEGKDKAYREILPAPYVSALMDDCIEKTMDVTEGGARYDFTSIDVRGLATLVDSLLAIKRFVYEKKELSLTDFIKIIRNNFKGHEVLRQRIINEAPKSGRGDGEADEMAKNVLHWIYEISQRYRNIRGGRFRVCYYSYGNHVIDGFMLGATPDGRLKGEPISNGVSPVNMGDFSCGPMGPMRSVAKFPPREISSGIALNMRFHPSFIKTEEGLITFAKMIKTYFEMGGMHIQPNVVSSETLMDAQKNPERYRDLIVKVSGYSAYFTDLGKSIQEDIISRYEFCRS

SEQ ID NO: 958 - protein, 625 aa, unidentified
  REGION 1..625: note = Category: MG60 effectors
  REGION 1..625: note = Description: MG60-171 effector
  source 1..625: note = uncultivated organism sequence
MQEEYLFKDNETICAFLKRLKDKDIASYKEILNETHCSKAYNDLKEHILQTLASLNRVKKAQELSKHKEYDLIRIYEEIQSMPSALFSYFKVSMNDIEAAMSASKKRLYLFKISNKDLSYAETSSQGKRKSRGRENLHTMYLKALLDGNKAFDIGSGSIYFRRKTDFGYTKETWEKGHHYAELKDRFLYPIISKRRYTVDHLQFHLSMTINYNADKNCKNINEMVNETIRNGAIEHIIGIDRGERNLLYASVIDLHGNIIEQCSLNIIPNKHNDLGTDYLKLLKERESIRQEERRSWDSIEKINELKTGYVSQAVHQVVKMVLKYHAIIVLEDLNEGFIRSRQKRERTVYAQFEKQLIEKLNYLVDKGIAEGEPGSATNGYQLTNPTNNNVKSNQSGILFYIPAWNTSNIDPTTGFVNLFNLRYQNREKTREFFDKFKSIKYNSEKKWLEFTFDYNDFTSKGKETQTIWTVCTYGPRIEAHKDSPKIWKKKTVEDINNKWLGFFNKWNITISEDLKEQIVKQDKKEFYKHLLDLFKLTLQMRNSDDKDDYIISPVMNTAHKFFKSCKDDTTLPIDADANGAYNIARKGLMWIKQMKDYKDTKKFKPDLKNRKWLNFAQQKPYKDE

SEQ ID NO: 959 - protein, 763 aa, unidentified
  REGION 1..763: note = Category: MG60 effectors
  REGION 1..763: note = Description: MG60-172 effector
  source 1..763: note = uncultivated organism sequence
MMRVVKRDGKIVDFDESRIKIAIGKANNEVDESQRATEEEIEKIVEYVKKVKKDRILVEDIQDIIENKLMEYKRFELAKAYITYRYSRALVRKANTTDQTVKELVEGNSEYWNNENSNKNARVVTTQRDYLAGITSTDITRRLLLPPEIVQAHDEGIIHFHDADYFAQNALTNCCLINLNDMLQNGTVINGVMIEKPHRFVTACTIATQIILGVSSSQYGGCTVTLTHLAPFVRDSYNRSLKKYQDRNLPEEECKKFAMQDTKKEIADGVQTFNYQVNSMTNTNGQAPFLSVNMYLGETDEYKDELAMIIEEFLKQRMLGFKNEKGVYITPAFPKLLYVLEEDNIHKDSKYWYLTELAAKCTAKRMVPDYISEKMMKKLKINQYGEGDCYPCMGCRSFLTPDRVKGNVAKAKDYVEGKGKYYGRFNQGVVTINLPDVALSSKKDEKEFWKIFDERLELCHEALQLRHKRLSGITSDVAPLLWQYGAYARLNKGEKLDKLLHGGYSTLSLGYAGLYECVKYMTGDSHTDGGKGEKFALEVMQHMNDKCAEWKKAEDIDYSLYGTPIESTTYKFAKCLKKRFGTVEGITDRNYITNSYHVPVFEEIDAFSKLKLESEFQRLSPGGAISYVETPNLQNNIEVVEQIIEFIYNNIMYAELNTKSDYCQKCGYTGEILIDDNLEWYCPNCGNRDHRTLNVARRTCGYIGTNFWNKGRTQEIKERVLHIDNKDFDAEKCTKCDENVEKPEKKTRAKVSAKEKAMASVHA

SEQ ID NO: 960 - protein, 783 aa, unidentified
  REGION 1..783: note = Category: MG60 effectors
  REGION 1..783: note = Description: MG60-173 effector
  source 1..783: note = uncultivated organism sequence
MMRVVKRDGKIVDFDESRIKIAIGKANNEVDESQRATEEEIEKIVEYVKKIKKDRILVEDIQDIIENKLMEYKRFELAKAYITYRYSRALVRKANTTDQTVKELVEGNSEYWNNENSNKNARVVTTQRDYLAGITSTDITRRLLLPPEIVKAHDEGIIHFHDADYFAQNALTNCCLINLNDMLQNGTVINGVMIEKPHRFVTACTIATQIILGVSSSQYGGCTVTLTHLAPFVRDSYNRSLKKYQDRNLPEEECKKFAMQDTKKEIADGVQTFNYQVNSMTNTNGQAPFLSVNMYLGETDEYKDELAMIIEEFLKQRMLGFKNEKGVYITPAFPKLLYVLEEDNIHKDSKYWYLTELAAKCTAKRMVPDYISEKMMKKLKINQYGEGDCYPCMGCRSFLTPDRVKGNVAKAKDYVEGKGKYYGRFNQGVVTINLPDVALSSKKDEKEFWKIFDERLELCHEALQLRHKRLSGITSDVAPLLWQYGAYARLDKGEKLDKLLHGGYSTLSLGYAGLYECVKYMTGDSHTDGGKGEKFALEVMQHMNDKCAEWKKAEDIDYSLYGTPIESTTYKFAKCLKKRFGTVEGITDRNYITNSYHVPVFEEIDAFSKLKLESEFQRLSPGGAISYVETPNLQNNIEVVEQIIEFIYNNIMYAELNTKSDYCQKCGYTGEILIDDNLEWYCPNCGNRDHRTLNVARRTCGYIGTNFWNKGRTQEIKERVLHIDNKDFDAEKCTKCDEEANVVSKCCNDSNESTECNKNVEKHEKKTRAKVSAKEKAMASVHA

SEQ ID NO: 961 - protein, 1222 aa, unidentified
  REGION 1..1222: note = Category: MG60 effectors
  REGION 1..1222: note = Description: MG60-174 effector
  source 1..1222: note = uncultivated organism sequence
MLESFKDLYEVRKTVRFSLLKQNYEDFCKFENNILKDISFLNSLLKFEDEIKNIQKSNGKKMQDLLSKDILEDIIKNSFQTLKNQICSVIYNKVVFDTKTSERNKRYLIYIKTETWENLDFFIPKDYNNNWNYIPEEDFYKVKDSEIWYAIKFISKLIIDNELIPFNEGKFRNKLKNINKYNSNFWNFFELNTLNPFTVNRWKISEIVNSYELSLSQYKETLEDLNKEASTIANTILSDRYFENCRNQNESDGTVRYLFHIFSNCKNSSEKNIWQINHLILLVNKYESLKNGKKKYTNDEIEPKIKRLNKELRQLAKVRSELLWYQIHLIDNFQTEKFSFLIQSWKYYFVGMKKIWWENNLSQFQEFIDGLEGGNDKLLYLDSMTWGWFKKLFLSKQSDVVFTDGTRIKDLNGSILAKEEEILQLKKWIIEKIEKDINTFISKVTNDIFNEINSKEKIKFIEYLSQKWKKVDNLFKLWKKNKKQLIYGKELKEFCNSLYNFDSIKETYNLTKLEKEYLNQVMILLQTIKDKKYKIGTVEKDLSFLWGGFVEKAFDILDDLKNYFNDLGYKVIQKDVDLEKMLKQVKTWELEIFQIKSKDMPFHQDFINDRNCWIIEEVKNEKSDGFKKDLNTLYFEEFFKDIKNNNRNSRIWADFKIRWINSSENNDYESFWKKEKNQLRHSNNKENIEKFKNRFKRDRYSIEFSINLNATNHLTEEDFNTKISNKLKEKRETWSLRILSLDHGESSFLTYKIYQVEGNKYSIINQGWNFDNFKEIQDWEDKTTKRQENIQIDEKAIPYKDQKILDNYITKYHAMIQDQKRERQVEEAIKHFARKSISKIKEIISADTVDKNKEWVSDITKANVKKFIQYAIGHKEVFSLSNEENSIRNKNKGSNKSIENKKNGVEYSKRIEEFFQNKRLDVISLWEDTIRFDKINIFHILDYEFHFSYIKQEEWFIQQFPDQENIKEKIDYYLNQIQELLDDENKLIAFCNEIKNSFDGKSLADIDKLYNTPFYAYKNNFSLQLEQINNLKKWYASVLVGTISKRIMNGEVDIIVLENNLLYYGVDNSESFQKHMWAENHATFAEALINKLSFCLDKETSESYQFCYPIKVTERPQKFKNKNNGILFFVDENTTSLICPKCDQKLNRSKQDGDDHLHHNNKNPAWDECKKEPFEIQKSKNIVGEYQGMLFHDWDDLATYNIAKKALEYLEYLESQNNDETK

SEQ ID NO: 962 - protein, 885 aa, unidentified
  REGION 1..885: note = Category: MG60 effectors
  REGION 1..885: note = Description: MG60-175 effector
  source 1..885: note = uncultivated organism sequence
MKIIKRDGTIVDYDPEKIRVAIGKANNEVSKKEKATEEDINNIISYIEDLKKSRILVEDIQDIIEKKLMEIGKYQLAKQYITYRYTRALVRKANTTDQSIKELIDGESEYWNTENSNKNARVVTTQRDYLAGITSTDITRRFLLPEDVVKAHDEGIIHFHDADYFAQNALHNCDLINLEDMLQNGTSINGVMIEKPHRFLTAMTIATQIITAVNSSQYGGVTVTMTHLAPFVRESYKRILKKYQDRKFSKEDCEKYAKEDLRKEVKDGVQTFQYQINSMTTTNGQAPFLSVCLYLGETEEYKEELAMIIEEVLKQRTLGMKNEKGVYITPAFPKLIYVLEEDNMHENSKYWYLTELAAKCTAKRMVPDYISEKKMLELKVDKNGEGHCYPCMGCRSFLTPYVDPKTNKPKYYGRFNQGVVTINLVDAALSSGKDMEKFWKLFDERLELCHKALKIRHERLSKATSDVAPILWQHGALARLKKGESIHPLLHGGYSTLSLGYAGLYECVKYMTGHSHTDNGVGKEFGLKVMQKLNDKCKEWKEQEDIDYSVYGTPIESTTYKFSKCLRKRFGKIKGITDRDYITNSYHVPVFEEIDAFSKLKLESEFQQLSPGGAISYVETPNLQDNLEVVLQIIKFIYNNIMYAELNTKSDYCQKCGYDGEILIDDNLEWYCPNCGNRDHDTLNVARRTCGYIGSNFWNKGRTLINLYLPEIIAFKRGMINMRYNKIRKMDIADGPGVRVSIFMQGCTFNCKNCFNPETHDFNGGKEFTDSTINRVLELCENENIEGLSILGGEPMNPKNIEGTTKLAKAFKQKFPDKNLWAWSGFRFDKELKDKEVVKYLDVLVDGQYMDDLHNPTLKWKGSSNQRVINVQESLKKNEVILMQS

SEQ ID NO: 963 - protein, 755 aa, unidentified
  REGION 1..755: note = Category: MG60 effectors
  REGION 1..755: note = Description: MG60-176 effector
  source 1..755: note = uncultivated organism sequence
MHELIEKREPKEEKPMKIIKRNGAEVVFDIDKIIMAVTKANDAVDEKVRMTPLQIERISQSVQIACEEMGRSPSVEEIQDLVEKAIMAHGAFEVAKEYITYRYTRSLLRQSNTTDDRILSLIECNNEEVKQENANKNPTINAVQRDYMAGEVSKDITSRILLPKEVVDAHEAGIIHFHDADYYAQHMHNCDLVNLEDMLQNGTVISGTLIEKPHSFSTACNIATQIIAQVASNQYGGQSISLTHLAPFVQVSREKIRKTVEREMAAFGVAPAEETISKVVEDRLREEVRRGVQTIQYQVVTLMTTNGQAPFITVFMYLNEAKSEQEKKDLAMIIEETLRQRYEGVKNEKGVWITPAFPKLIYVLEEDNVREGTPYWYLTRLAAQCTAKRMVPDYISEKKMREYKLSKGETPGHGDVYTCMGCRSFLTPDRSGNGWDNVARAGNYEPGKPKYYGRFNQGVVTINLVDVALSSGRDMTKFWEVFEDRLELCHRALRCRHERLKGTLSDAAPILWQYGALARLPKGEPIDKLLYGGYSTISLGYAGLYECVKYMTGKSHTDDEAKPFALSVMQKMNDKCLQWKTAENIDYSLYGTPLESTTYKFAKCLQKRFGLIPGITDKSYITNSYHVHVTEPIDAFTKLRFEAEFQQLSPGGAISYVEVPNMQNNIDAVLEVMQFIYDNIMYAELNTKSDYCQVCGYDGEIEIKEDDGKLVWVCPQCGNTDQNKMNVARRTCGYIGTQFWNQGRTQEIKDRVLHL

SEQ ID NO: 964 - protein, 768 aa, unidentified
  REGION 1..768: note = Category: MG60 effectors
  REGION 1..768: note = Description: MG60-177 effector
  source 1..768: note = uncultivated organism sequence
MFCSCKKNLRVVIYIYDATKTYDCAKKLIVYKSIIKGAEVMKIIKRNGAEETFDRQKIKDAIAKANNETDGTPELTDRQIDYISLVIEDHCNEMNRALSVEEIQELVETHIILQGAPETAKRYIRYRFTRNLARASNTTDNQILSLIECNNEEVKQENSNKNPTVNSVQRDYMAGEVSKDLTKRILLPEDIVKAHEEGLIHFHDADYFAQHMHNCDLVNLEDMLQNGTVISGTMIEKPHSFSTACNIATQIIAQVASNQYGGQSISLAHLAPFVQISREKITRQVRAEMEEFGIAADDEQVKSLVEKRVRDEIKRGVQTIQYQVVTLLTTNGQAPFVTVFMYLNEAKNEQEKKDLAIIIEEVLKQRIKGTKNEVGVWVTPAFPKLIYVLEEDNITEDSRFWYLTKLAAECTAKRMVPDYISEKIMLKLKIDKNGNGNCYTCMGCRSFLTPYVDENGKPKYYGRFNQGVVTINLVDVACTAARDGNKSEEKFWQVLDERLELCHRALQCRHERLEGTLSDAAPILWQYGALARLKKGEPIDKLLHGGYSTLSLGYAGLWECVYEITGKKLTEKEGEEFGLRVMQRLNDACAEWKAAENIDYSIYGTPLESTTYKFAKCLQNRFGIIKGVTDRNYITNSYHIHVTEKIDAFSKLELESKFQKLSPGGAISYVEVPNMQQNIPAVLEVMKFIYNNIMYAELNTKSDYCQVCGYDGEIQIVEEDGKLVWRCPNCGNEDQSKMNVARRTCGYIGSQFWNQGRTQEIKERVLHL

SEQ ID NO: 965 - protein, 1488 aa, unidentified
  REGION 1..1488: note = Category: MG60 effectors
  REGION 1..1488: note = Description: MG60-178 effector
  source 1..1488: note = uncultivated organism sequence
MKVNDSSLIDCYTRLPSHTARNIRELVESANLESRNALWREIDRFMTDISTAIQPFVFFIIGEWGEGKTTAFEGYLKFESEKANIQSTLISARTLFNCLKKIKEKEILESNVTSAILVAAILWAIVDEEKARGTKSYNIPDPRSLSIRDAVDYVYNALDCLFSSMKPSNKRLVVFIDEFEEILTIREEEIKDLIISGIVEFIEGKLGIISEKGKYAGMFHLVVSVTPAAYHMLGKDKRLTQLIGRFKRRIYRYQLKSITKEEAYRYIIAAIKYSFNRKQFDIPFSSPGIINTCYFITKGNLGALTQLFNILLTQSRSESPYKCKMYRIDYKRFLKYVKGKTIFVYGDEAKIIDEKFFNMLRMLEEELRNYPNIRRNNLINIFDIIWLLSVEYEPKSKLEIMRKLGLQEVDDVDTCVNILNGLFRARKRKMGKTIYEVYYVPWYSGIEEDLRKLFSEMSAILNLKLDDETIEKIIDLLTFYEISDDRLIPYLIWPAQETDSYYLVELTEGLIQEEEAIEIRRQFIKYVKDEGIRRDKMLIISHEILKNLYPAPEITYLDFIIDRNDRMRLWREARRELINNLLPEEKYINALSKLFENQSPLYGLKYGSEVFYLLEHSTGDVKYEIPTLIRVFVRPPDEEEINKFVKFLKNFMPPLTLIFHAHGFQKVQETIKITCGKVLELCTLQFVLLSQTTLLQLISYLKAIEEEKNSSHKRLLDEDKLKIRFKEIFEELEFPKIISEIIRDGIDKGWIIRDLDLQSTSDPSNLVDAFICFLSYPKRKMTIGDVWNFYKQLNELKIFGTKPGFSPRDIESYQQFYNYAQDLIKNGFLKIDGQYVEPVLTKIEERILKIIDNYDSSPIPISELKERFVTIAKTSNLFKDVFLNALEKRGIIEIRKNLLFKADIAERQEKLQRLYNTFKARIEKLKEEKIINVFRFVVSTKERGCNVIDPFEIEKFVDKIYHKVEYAQLSDENLFLRLATFLINFLNYHLNERIGIFTLINKAYNEALKERALFKQEIDNVKKKIHKIVVFLSSISHVPIEQIQLDELTTLKEIHYDVESVFSKSPGKSEVKDAVSKDSEAYKKFWIKRVKELRSSPIEYDFLNYGYYQLIKKKEKSKQLLLKIKDLISRIEEKERNIGERFNKLQEYLIRIEKMKSVDNENEFLGPSFSGELAQLLEKNIKSPTFYFKDIKNLTDVKSFLDNFLKEMIDIFENIRISVESLSNLQQSEFLIKKLYDFQAKKYNLSKKFLENSSYSQQLIELWTQFEKSISDQLKALKDEYEKELRIIKKTYIGSAVVSRIQELAKKISDKLISLKEKIQTNTKKILSLVKESIDELEKLYKRADQLYFAIEAVVGDSSKKKEAEYLHDEITVVSKEWKQLEKIFVAENSDSAEIIEFKKFLDMKSLLFSSLQKLEEILLTSGRLDNLDLKIFEITKEISEKEQTNIPISSIISYILNNVNQKLTENEILFKLYKLSNYGLIQINVVA

SEQ ID NO: 966 - protein, 756 aa, unidentified
  REGION 1..756: note = Category: MG60 effectors
  REGION 1..756: note = Description: MG60-179 effector
  source 1..756: note = uncultivated organism sequence
MQQSIFLVCVIIGLWFKKKRRSEVFIMKVIKRDGHIVDYSPDKIEEAVNKANLEVSEEDRVSDIQIRNIIKYIEGLHKKRMLVEDIQDVIEKRLMTLGKYELAKEYITYRYTRELVRRSNTTDKSIKELIDGESEYWNTENSNKNAKVVTTQRDYLAGITSTDITRRFLLPEDIVTAHDQGIIHFHDADYFAQNALHNCDLINLDDMLQNGTNINGVMIEKPHRFLTAMTIATQLITAVSSSQYGGCTITLTHLAPFVRSSKEFYLKKYKERKLTKAQIEKFAMEDLKKEITDGVQTFQYQINSMTTTNGQAPFLSVCMYLGETEEYKEELAMIIEEVLKQRMEGMKNEKGVYITPAFPKLLYVLEEENINPKGKYYYLTELAARCTAKRMVPDYISEKVMKENKINSLGNGDCFPCMGCRSFLTPDRMFNVGNISKALNYVENKGKYYGRFNQGVVTINLPDVALTSGKDMELFWKVFDDRLELCHRALQIRHKRLSKVTSDVAPILWQHGALARLEKGESIHELLHHGYSTISLGYAGLYECVKYMTGHSHTDNGKGHDFAIEVMQYMNDKCSEWKEAEDIDYSLYGTPIESTTYKFAKCLRDRFGKIKGITDRDYITNSYHVPVFEEIDAFTKLKLESEFQRLSPGGAISYIETPNLENNIDVVMEVINFIYENIMYAELNTKSDYCQKCGYSGEILLDDDLEWYCPECGNRDHDTLNVARRTCGYIGTNFWNKGRTQEIKERVVHIDNKDDE

SEQ ID NO: 967 - protein, 774 aa, unidentified
  REGION 1..774: note = Category: MG60 effectors
  REGION 1..774: note = Description: MG60-180 effector
  source 1..774: note = uncultivated organism sequence
MEKKIGRNDPCPCGSGKKFKHCCGKTPVLRALTQEEWEELYHSLNQRLIQYLRQPRFVDDFESAWDLYWDGEYEIEELNRLSKWEMGTFVNFLVFGYLLLSSNRSVIDHFLNKYRADLTLPERTMLDNMRKAFYGVYEVQEVRPGQGMKVKNIFDGTEFEIKEISGSKETVKWDVISGYICKIGEHYEFTGFINFVPRQIVGSLQAMLLNEHRMYQDEIESVNFSVFLKNNAFIVDQFIREYDAKPPVIVNKEGDEIVLCKLTYKIREKEKVLEWFASNSMFDIIPEKGKKTGDSRAHYTWWLKGDVARRLMYSKKEIKEPYSVFADVVIEKTSMTVELTSERRRDIAKTYLKKQLGNLIRLTKTEIKSLEEAQDEHKGDLNLHQSEHDELMMDPEVQKLIKQRMENYYYEEWVDKPIPALGGLTPIEAYSEAPDELEELLKTFEQQELRNKSNLNVYHLDVDKLRAHIAKMARESTADIPDSNFGEEEKLLVSGITYRIMQQFEIDPDKKNEFVIKEDRMGIFWIDEHPIIGVILDIRKNTITVDVLGITDKIISTDDVLYIFPPEKEDILLMTIDNMMRGIARGFEFYQQHNLELTSKAGRAFHAMITMLPEICELIIATVEKYSNKEVNITMKELRKDQCGKTVFIMKRKTLELAEEDFFRAILYPEKFFGPYLKLPQSKIKKFTDRFVRFIAYMASMCLFSLEYKRRYEFDDQRFDNLFFFVYDKQSKVLAEQLLPILEINGGCTPKNIERLKAYIPLHNFRLLRKVTIP

SEQ ID NO: 968 - protein, 1231 aa, unidentified
  REGION 1..1231: note = Category: MG60 effectors
  REGION 1..1231: note = Description: MG60-181 effector
  source 1..1231: note = uncultivated organism sequence
MSLKIEDLETFKRHRYAVSESLSTDIVGRDREIEEISSKIDSVYCLTITGPAGVGKSRLAVAAIEHYCANHTDFEVLCTKSFSDYISALDEAIEEGRKYVIFIDDANTYPRLIELLEFLKYRNQEGNIKAILTVRDYLKGCLDSDIYMEFYEVKPLNDKSIEDALVKNTTIRNEDWLKQIAKIANGNIRVAFLAANEAIKNNKSLDSIYNQKDVLNRFYKDEISKIDHSESLLITAGIIAFFKSIYLEQLFYIVPILKSVNLSKKSFIENVNILIKMEIVDNYHDVVKIADQCFADFLLNYTIVEKRYLKIKDLLLVGFKYYKERIVESIHTILHVYNTEEFVDHLRKEVTDACNNLEDDVSLKHGIESCFAQVIPEYVSREYIEGVEKYSDQKDIKWLINVFSGLAFSNYNEIANKGVLKLLKKTKNKTKEVYDAIKNTYEMRAERANERFQYQIALIKELQNGGLYNDEFNALVSSYLNFRFSYSCFTSKREMMHYTFSVDDNTAGILELRSACWGYLFNCELSKAIDSIMDFANRHYIERNLEIIKNDLRCINTYLCEHDQSGFLNSVLYVKFIDEAKEYCFTDLLTANKKYLDFLDIVFERKLLGKNYEGYEARYKNRVTDYYNLHKDDIYDILNETDLFLNKYYKYQKTRLVNALVEVVDKFSNALFFLCTKNGIFPHLVIEEFLKNRNLDEVYALINQIDDETIKDEYLYNFYSYLSKENIEKDYGFIGWINSKGDFKTNRTYHRDAVSLNNIAEKCGLDYVALLKKLYSKEKYNKFIAKAYLSYLIDNVETFKELLSLNQNLAIKIYEFLIANGEKDYESSVLIEILDVKRSYIKVFAKAFIKEEYYNDCNLDFIFEKEYCDSFFNECMKVMLSQKTNSASSKLRILISKNINQPNMERWIEKYIESNYKEDNVIELFFQALSEIDHQHKNAYLVLYYQKGHDINVLRQAILNKSHSYSNAKEHFGNEIKWLETLKKSLLNWNNTEEVKFIDTVIDDYKVQIKNDEIESLVDYGNQNILNELRERDLKTEVSLKDAFELYQSDEKFRDMLSSGYLSYKDGSFVNGKNDPVKFIEKLKDKKIISVEIKPVDEVGRLDYEQYLSSMKSIAKEFDNPKLASLNDYLNALIDERGWKAQEFKENTFLSRDIFSKIRNNKKNKMDKKTLVQILIGLQVSKRERDYLLELNQTSLSKYVKEDVLYSFILDAKLDIGVADELLRDIGEDGF

SEQ ID NO: 969 - protein, 755 aa, unidentified
  REGION 1..755: note = Category: MG60 effectors
  REGION 1..755: note = Description: MG60-182 effector
  source 1..755: note = uncultivated organism sequence
MHELIEKREPKEEKPMKIIKRNGAEVVFDIDKIIMAVTKANDAVDEKVRMTPLQIERISQSVQIACEEMGRSPSVEEIQDLVEKAIMAHGAFEVAKEYITYRYTRSLLRQSNTTDDRILSLIECNNEEVKQENANKNPTINAVQRDYMAGEVSKDITSRILLPKEVVDAHEAGIIHFHDADYYAQHMHNCDLVNLEDMLQNGTVISGTLIEKPHSFSTACNIATQIIAQVASNQYGGQSISLTHLAPFVQVSREKIRKTVEREMAAFGVAPAEETISKVVEDRLREEVRRGVQTIQYQVVTLMTTNGQAPFITVFMYLNEAKSEQEKKDLAMIIEETLRQRYEGVKNEKGVWITPAFPKLIYVLEEDNVREGTPYWYLTRLAAQCTAKRMVPDYISEKKMREYKLSKGETPGHGDVYTCMGCRSFLTPDRSGNGWDNVARAGNYEPGKPKYYGRFNQGVVTINLVDVALSSGRDMTKFWEVFEDRLELCHRALRCRHERLKGTLSDAAPILWQYGALARLPKGEPIDKLLYGGYSTISLGYAGLYECVKYMTGKSHTDDEAKPFALSVMQKMNDKCLQWKTAENIDYSLYGTPLESTTYKFAKCLQKRFGLIPGITDKSYITNSYHVHVTEPIDAFTKLRFEAEFQQLSPGGAISYVEVPNMQNNIDAVLEVMQFIYDNIMYAELNTKSDYCQVCGYDGEIEIKEDDGKLIWVCPQCGNTDQNKMNVARRTCGYIGTQFWNQGRTQEIKDRVLHL

SEQ ID NO: 970 - protein, 768 aa, unidentified
  REGION 1..768: note = Category: MG60 effectors
  REGION 1..768: note = Description: MG60-183 effector
  source 1..768: note = uncultivated organism sequence
MFCSCKKKLCVVIYIYNATKTYDCAKKLIVYKSIIKGAEVMKIIKRNGAEETFDRQKIKDAIAKANNETDGTPELTDRQIDYISLVIEDHCNEMNRALSVEEIQELVETHIILQGAPETAKRYIRYRFTRNLARASNTTDNQILSLIECNNEEVKQENSNKNPTVNSVQRDYMAGEVSKDLTKRILLPEDIVKAHEEGLIHFHDADYFAQHMHNCDLVNLEDMLQNGTVISGTMIEKPHSFSTACNIATQIIAQVASNQYGGQSISLAHLAPFVQISREKITRQVRAEMEEFGIDADDEQVKSLVEKRVRDEIKRGVQTIQYQVVTLLTTNGQAPFVTVFMYLNEAKNEQEKKDLAIIIEEVLKQRIKGTKNEVGVWVTPAFPKLIYVLEEDNITEDSRFWYLTKLAAECTAKRMVPDYISEKIMLELKIDKNGNGNCYTCMGCRSFLTPYVDENGKPKYYGRFNQGVVTINLVDVACTAARDGNKSEEKFWQVLDERLELCHRALQCRHERLEGTLSDAAPILWQYGALARLKKGEPIDKLLHGGYSTLSLGYAGLWECVYEITGKKLTEKEGEEFGLRVMQRLNDACAEWKAAENIDYSIYGTPLESTTYKFAKCLQNRFGIIKGVTDRNYITNSYHIHVTEKIDAFSKLELESKFQKLSPGGAISYVEVPNMQQNIPAVLEVMKFIYNNIMYAELNTKSDYCQVCGYDGEIQIVEEDGKLVWRCPNCGNEDQSKMNVARRTCGYIGSQFWNQGRTQEIKERVLHL

SEQ ID NO: 971 - protein, 750 aa, unidentified
  REGION 1..750: note = Category: MG60 effectors
  REGION 1..750: note = Description: MG60-184 effector
  source 1..750: note = uncultivated organism sequence
MVKKFLSKGAYHYQNNFFNDKIGFVILGGNMMRVIKRNGHTVDFDATKIENAILKAMKCGSGIIDEQCAKDIAREIEEWHRYSDGDISIYRIEGQVFEKLIEKGQILTAKAYEGYRKVREFQRETNTIDNEIYGIVNQTNKEAMEENSNKDATVLATQRDLIAGEFSKDYCRRLLLPPKIVQAHDDGIIHFHDMDYYIQKMHNCDLVNLKDMFAQGTVINDKLIETPKSLQTACTVATQIVQQVANGQYGGQTISLAHLSPYVRISYEKHKKNVINEGKMIGIDYSDEQIEKIAKSRLKDEIKAGIQTIQYQINTFSTTNGQAPFLSVFMYLKEEPEYIEETAMLIEETLRQRYVGMKNPVGAYVTPAFPKLLYVLDDNNVPQDSKYRYLTDLAVKCVAKRMMPDFISAKIMRENYEGQVFPCMGCRSFLSPWKDENGEYKWYGRFNQGVVTLNLADAGLSADHNLDNFWKILDERLELCKEALLLRHESLKGTIADVSPIHWRYGALARLKSGEKIDKLLENGYSTISLGYIGLYECVVALIGQTHTSKEGNELATKIMERLREACDSWKEETGLGFGLYGTPAESTTYTFARALKKRFGIVPGVTDKDYLTNSYHVNVREHIDAFSKLEVEAKFQKLSSGGAISYVEVTNMSQNLDALSALIDYMYETIQYAEINTKSDYCQECGFDGEILLDENREWYCPNCGNRNHKTLNVCRRTCGYLGDNFWNQGRTQEIAERFVHLDNHLYGE

SEQ ID NO: 972 - protein, 768 aa, unidentified
  REGION 1..768: note = Category: MG60 effectors
  REGION 1..768: note = Description: MG60-185 effector
  source 1..768: note = uncultivated organism sequence
MFCSCKKKLCVVIYIYNATKTYDCAKKLIVYKSIIKGAEVMKIIKRNGAEETFDRQKIKDAIAKANNETDGTPELTDRQIDYISLVIEDHCNEMNRALSVEEIQELVETHIILQGAPETAKRYIRYRFTRNLARASNTTDNQILSLIECNNEEVKQENSNKNPTVNSVQRDYMAGEVSKDLTKRILLPEDIVKAHEEGLIHFHDADYFAQHMHNCDLVNLEDMLQNGTVISGTMIEKPHSFSTACNIATQIIAQVASNQYGGQSISLAHLAPFVQISREKITRQVRAEMEEFGIAADDEQVKSLVEKRVRDEIKRGVQTIQYQVVTLLTTNGQAPFVTVFMYLNEAKNEQEKKDLAIIIEEVLKQRIKGTKNEVGVWVTPAFPKLIYVLEEDNITEDSRFWYLTKLAAECTAKRMVPDYISEKIMLKLKIDKNGNGNCYTCMGCRSFLTPYVDENGKPKYYGRFNQGVVTINLVDVACTAARDGSKNEEKFWQVLDERLELCHRALQCRHERLEGTLSDAAPILWQYGALARLKKGEPIDKLLHGGYSTLSLGYAGLWECVYEITGKKLTEKEGEEFGLRVMQRLNDACAEWKAAENIDYSIYGTPLESTTYKFAKCLQNRFGIIKGVTDRNYITNSYHIHVTEKIDAFSKLELESKFQKLSPGGAISYVEVPNMQQNIPAVLEVMKFIYNNIMYAELNTKSDYCQVCGYDGEIQIVEEDGKLVWRCPNCGNEDQSKMNVARRTCGYIGSQFWNQGRTQEIKERVLHL

SEQ ID NO: 973 - protein, 755 aa, unidentified
  REGION 1..755: note = Category: MG60 effectors
  REGION 1..755: note = Description: MG60-186 effector
  source 1..755: note = uncultivated organism sequence
MHELIEKREPKEEKPMKIIKRNGAEVVFDIDKIIMAVTKANDAVDEKVRMTPLQIERISQSVQIACEEMGRSPSVEEIQDLVEKAIMAHGAFEVAKEYITYRYTRSLLRQSNTTDDRILSLIECNNEEVKQENANKNPTINAVQRDYMAGEVSKDITSRILLPKEVVDAHEAGIIHFHDADYYAQHMHNCDLVNLEDMLQNGTVISGTLIEKPHSFSTACNIATQIIAQVASNQYGGQSISLTHLAPFVQVSREKIRKTVEREMAAFGVAPAEETISKVVEDRLREEVRRGVQTIQYQVVTLMTTNGQAPFITVFMYLNEAKSEQEKKDLAMIIEETLRQRYEGVKNEKGVWITPAFPKLIYVLEEDNVREGTPYWYLTRLAAQCTAKRMVPDYISEKKMREYKLSKGETPGHGDVYTCMGCRSFLTPDRSGNGWDNVARAGNYEPGKPKYYGRFNQGVVTINLVDVALSSGRDMTKFWEVFEDRLELCHRALRCRHERLKGTLSDAAPILWQYGALARLPKGEPIDKLLYGGYSTISLGYAGLYECVKYMTGKSHTDDEAKPFALSVMQKMNDKCLQWKTAENIDYSLYGTPLESTTYKFAKCLQKRFGLVPGITDKSYITNSYHVHVTEPIDAFTKLRFEAEFQQLSPGGAISYVEVPNMQNNIDAVLEVMQFIYDNIMYAELNTKSDYCQVCGYDGEIEIKEDDGKLIWVCPQCGNTDQNKMNVARRTCGYIGTQFWNQGRTQEIKDRVLHL

SEQ ID NO: 974 - protein, 755 aa, unidentified
  REGION 1..755: note = Category: MG60 effectors
  REGION 1..755: note = Description: MG60-187 effector
  source 1..755: note = uncultivated organism sequence
MHELIEKREPKEEKPMKIIKRNGAEVVFDIDKIIMAVTKANDAVDEKVRMTPLQIERISQSVQIACEEMGRSPSVEEIQDLVEKAIMAHGAFEVAKEYITYRYTRSLLRQSNTTDDRILSLIECNNEEVKQENANKNPTINAVQRDYMAGEVSKDITSRILLPKEVVDAHEAGIIHFHDADYYAQHMHNCDLVNLEDMLQNGTVISGTLIEKPHSFSTACNIATQIIAQVASNQYGGQSISLTHLAPFVQVSREKIRKTVEREMAAFGVAPAEETISKVVEDRLREEVRRGVQTIQYQVVTLMTTNGQAPFITVFMYLNEAKSEQEKKDLAMIIEETLRQRYEGVKNEKGVWITPAFPKLIYVLEEDNVREGTPYWYLTRLAAQCTAKRMVPDYISEKKMREYKLSKGETPGHGDVYTCMGCRSFLTPDRSGNGWDKVARAGNYEPGKPKYYGRFNQGVVTINLVDVALSSGRDMTKFWEVFEDRLELCHRALRCRHERLKGTLSDAAPILWQYGALARLPKGEPIDKLLYGGYSTISLGYAGLYECVKYMTGKSHTDDEAKPFALSVMQKMNDKCLQWKTAENIDYSLYGTPLESTTYKFAKCLQKRFGLVPGITDKSYITNSYHVHVTEPIDAFTKLRFEAEFQQLSPGGAISYVEVPNMQNNIDAVLEVMQFIYDNIMYAELNTKSDYCQVCGYDGEIEIKEDDGKLIWVCPQCGNTDQNKMNVARRTCGYIGTQFWNQGRTQEIKDRVLHL

SEQ ID NO: 975 - protein, 755 aa, unidentified
  REGION 1..755: note = Category: MG60 effectors
  REGION 1..755: note = Description: MG60-188 effector
  source 1..755: note = uncultivated organism sequence
MHELIEKREPKEEKPMKIIKRNGAEVVFDIDKIIMAVTKANDAVDEKVRMTPLQIERISQSVQIACEEMGRSPSVEEIQDLVEKAIMAHGAFEVAKEYITYRYTRSLLRQSNTTDDRILSLIECNNEEVKQENANKNPTINAVQRDYMAGEVSKDITSRILLPKEVVDAHEAGIIHFHDADYYAQHMHNCDLVNLEDMLQNGTVISGTLIEKPHSFSTACNIATQIIAQVASNQYGGQSISLTHLAPFVQVSREKIRKTVEREMAAFGVAPAEETISKVVEDRLREEVRRGVQTIQYQVVTLMTTNGQAPFITVFMYLNEAKSEQEKKDLAMIIEETLRQRYEGVKNEKGVWITPAFPKLIYVLEEDNVREGTPYWYLTRLAAQCTAKRMVPDYISEKKMREYKLSKGETPGHGDVYTCMGCRSFLTPDRSGNGWDNVARAGNYEPGKPKYYGRFNQGVVTINLVDVALSSGRDMTKFWEVFEDRLELCHRALRCRHERLKGTLSDAAPILWQYGALARLPKGEPIDKLLYGGYSTISLGYAGLYECVKYMTGKSHTDDEAKPFALSVMQKMNDKCLQWKTAENIDYSLYGTPLESTTYKFAKCLQKRFGLVPGITDKSYITNSYHVHVTEPIDAFTKLRFEAEFQQLSPGGAISYVEVPNMQSNIDAVLEVMQFIYDNIMYAELNTKSDYCQVCGYDGEIEIKEDDGKLVWVCPQCGNTDQNKMNVARRTCGYIGTQFWNQGRTQEIKDRVLHL

SEQ ID NO: 976 - protein, 773 aa, unidentified
  REGION 1..773: note = Category: MG60 effectors
  REGION 1..773: note = Description: MG60-189 effector
  source 1..773: note = uncultivated organism sequence
MSAAYGITIFSVRRVDFACQSPTTGHRKGLTSMKIIKRNGSEAVFDIMKIITAVTKANNVVKEDEQLTPMQIRRIAESVENSCLGMNRALSVEEIQDLVEHQIMAHGAYEVAKQYITYRYTRSLVRKSNTTDEKILSLIESNNEEVKQENSNKNPTVNAVQRDYMAGEVSKDLTARMLLPKEIVDAHEAGIIHFHDADYFAQHMHNCDLVNLEDMLQNGTVISGTLIEKPHSFSTACNISTQIIAQIASNQYGGQSISLTHLAPFVDISRQKIRKTVLEEIRTLGAAPDEAAISKVVEDRLREEIRRGVQTIQYQVVTLMTTNGQAPFITVFMYLGEARNEQEKHDLAIIIEETLKQRIEGVKNEKGVWITPAFPKLIYVLEEDNIHEGTKYWELTKLAARCTAKRMVPDYISEKKMRELKLSKGETPGHGDVYTCMGCRSFLTPDRSGNGWNNIANAGNYEPGKPKYYGRFNQGVVTINLVDVALSSGGAVDKFWRIFDERLELCYEALMCRHNRLKGTLSDAAPILWQYGALARLGKGEPIDKLLYGGYSTISLGYAGLYECVKYMTGKSHTDPAATPFALEVMQHMNDKCAEWKQKENIDFSLYGTPLESTTYKFAKCLQKRFGLVEGITDKNYITNSYHIHVSEHVNAFDKLAFESQFQALSPGGAISYVEVPNMQSNIDAVLQVMQFIYENIMYAELNTKSDYCQICGFDGEIEIKEDKDGKLVWTCPQCGNTDQSKMNVARRTCGYIGTQYWNQGRTQEIRDRVLHL

SEQ ID NO: 977 - protein, 896 aa, unidentified
  REGION 1..896: note = Category: MG60 effectors
  REGION 1..896: note = Description: MG60-191 effector
  source 1..896: note = uncultivated organism sequence
MAKTSTFAEATKRNVLEFARYKDFDRSLVQLGRRGGKYQKAADRIDSVLGKASRGESNPFHGLKVTKHGENRVDKCVKYDLGDGIRLITIQDSGVVLFCFAGTHTECDEWLDRNRGSTLIRDSKGQIKLNPLNIVKEGFAGFREPLKPITGKLYELIKPDYYFDKLVDSLPRSVVREIEGLEAWASDEDLLAIAERIDDQEVSDAFLDVFALLKKDEIEKAVERIRLFMGESQPIAMLTKEEIAALAESDQIRKISPNDPNYPEVLRHFARHGSYMDWMLYLHPDQQDIVDRTFSGPAKLVGVSGSGKTCVIVKRAIRLARDNPDEKVLVLTLNRQLARLIEDMVEAAAVEEIASRVLVLPLFRLCQELLHRFEPKNDRLYDDITWKSHEHIDEIWREFYRCELNNNDAAVLLPLHDSLISRGIDAEEYIREEFDWIRSAFPPDRRTDYLHAERVGRSYPLDKRFRAIILEGLEAWELKMKHIGVTDYLGLSTALNRHLDKLHEEYRFVLIDESQDFGTIEFRLVRRLTMEGQDSLFLCGDAAQQVQTKHGSLRDAGINIPSARSIRLTKNYRNSREILSAAYEVLVNNLSEEMLDSPDFDVLDPEHGNFSSSAPLILEADSLEEEIAYAREFVEDVVENKGEQKCCIALCGYSLYQIQEFGKRIGVPVLDGNIVVGKEDLYLSDLEHTKGFEFDAMLILNCKHGVIPNPGVPEKEQYRDLARFYVAMTRAKNHLVLSFSSTQSPYLVGVDEYFLSERWENYIDRERLRIVGVPLTIDEIRADHEQIEHVPDLLDMSGTEFLYTRHAIGLSSLLIDKLRRLIAGSKTRGAGGKQTPIGWRSIRAAAHDIEVYPGSRQVFGAEGLRQFRELVEKISEIDETSEQSPACPNWRPTKKR

SEQ ID NO: 978 - protein, 1025 aa, unidentified
  REGION 1..1025: note = Category: MG60 effectors
  REGION 1..1025: note = Description: MG60-192 effector
  source 1..1025: note = uncultivated organism sequence
MEKFKNIFEVRKALRFELKASKITRENLEKENIYKNPVNILYKNKLEKWLNYSRTVFENDLKYFLDNSKNIILNLEKIKNLLDNTRFSEIFVEKKIFELIDKDFYIKFAKNKLSWWRSSSLQEIKKNLDWKWINLIKNYYLEIFENIENLIISIENLSEKESSFSKNEIKKFLRKISLEFIRIYNFLEKFDIKNKDFNKNLKEYIKKVINFKTFFEEIKSYYFISENQSSWILVRRFWFNEKSLKRRQPKEIKEELEENLKSFNEKLEIKEKLEEERQKLIQDFDLKLKTEKFEELLHPEKWSEIRKKKEKTKEEQEKLDDIDNQFKELKKLRNKDEEISKKTQELNRYKKDLWNLKVKINNLEKELENNLALTHYAKLLTNEINWEKLYYLVLIPIENKFILDEYISDEWNLEILEYNTLTFSALKKLALSYDWTMGIYWDKKEEINKKSNLKRWIVDLYIDLENWERQEEFYKIKRYVINLIKTYKNIFGNIYFDFKRLYDTKSLDEFKIEFDKQWYNLKWKNIDLEIIKKLEKEWKLEFYQIYNKDFYKNPDFFDIPYSIKEQKEERQRRRKSQNVKWNNNLFTIYWENFINDIANWNEEVRLNSDCWYFVKLKKEDKENHRYDRNKIIWNFGLIFNPGKKLTKKYDEKENIKKFNEIYKKEIKKVKNKSFIWIDRWEKELLTFCLIDENWNCIKNKNWEYIIWDFNLINNKWDFIPKDKCKYIDISWKEYKDLLGNFLPDFTHPENIISWKKSFQFDDEKNLYYFKLNHNARLYLLEWENKRYKIVNKEWKEIFLKDENWNNVIDYYLLFQSEVYKRHILKKTWNIKLEDVQELRWWYISNIIKQLNNWIVKYNWIIILENLDKTQIDEKWNIYKTNKEKVLEKTLWATIYQEIETLLNRKYNYFIFKDQDIWWLQLTPKVNNISDIKNLEKSKKNVNLWNIVFIDEYLTSKECPICKNQLFRDKKKWDNVYHNEKYPWNNWCSFDTRTNTYWFDFIKSWDDLAAYNIAKKGKEYIENLSN

SEQ ID NO: 979 - protein, 755 aa, unidentified
  REGION 1..755: note = Category: MG60 effectors
  REGION 1..755: note = Description: MG60-193 effector
  source 1..755: note = uncultivated organism sequence
MHELIEKREPKEEKPMKIIKRNGAEVVFDIDKIIMAVTKANDAVDEKVRMTPLQIERISQSVQIACEEMGRSPSVEEIQDLVEKAIMAHGAFEVAKEYITYRYTRSLLRQSNTTDDRILSLIECNNEEVKQENANKNPTINAVQRDYMAGEVSKDITSRILLPKEVVDAHEAGIIHFHDADYYAQHMHNCDLVNLEDMLQNGTVISGTLIEKPHSFSTACNIATQIIAQVASNQYGGQSISLTHLAPFVQVSREKIRKTVEREMAAFGVAPAEETISKVVEDRLREEVRRGVQPIQYQVVTLMTTNGQAPFITVFMYLNEAKSEQEKKDLAMIIEETLRQRYEGVKNEKGVWIAPAFPKLIYVLEEDNVREGTPYWYLTRLAAQCTAKRMVPDYISEKKMREYKLSKGETPGHGDVYTCMGCRSFLTPDRSGNGWDNVARAGNYEPGKPKYYGRFNQGVVTINLVDVALSSGRDMTKFWEIFEDRLELCHRALRCRHERLKGTLSDAAPILWQYGALARLPKGEPIDKLLYGGYSTISLGYAGLYECVKYMTGKSHTDDEAKPFALSVMQKMNDKCLQWKTAENIDYSLYGTPLESTTYKFAKCLQKRFGLIPGITDKSYITNSYHVHVTEPIDAFTKLRFEAEFQQLSPGGAISYVEVPNMQNNIDAVLEVMQFIYDNIMYAELNTKSDYCQVCGYDGEIEIKEDDGKLVWVCPQCGNTDQNKMNVARRTCGYIGTQFWNQGRTQEIKDRVLHL

SEQ ID NO: 980 - protein, 768 aa, unidentified
  REGION 1..768: note = Category: MG60 effectors
  REGION 1..768: note = Description: MG60-194 effector
  source 1..768: note = uncultivated organism sequence
MFCSCKKKLCVVIYIYDATKTYDCAKKLIVYKSIIKGAEVMKIIKRNGAEETFDRQKIKDAIAKANNETDGTPELTDRQIDYISLVIEDHCNEMNRALSVEEIQELVETHIILQGAPETAKRYIRYRFTRNLARASNTTDNQILSLIECNNEEVKQENSNKNPTVNSVQRDYMAGEVSKDLTKRILLPEDIVKAHEEGLIHFHDADYFAQHMHNCDLVNLEDMLQNGTVISGTMIEKPHSFSTACNIATQIIAQVASNQYGGQSISLAHLAPFVQISREKITRQVRAEMEEFGIDADDEQVKSLVEKRVRDEIKRGVQTIQYQVVTLLTTNGQAPFVTVFMYLNEAKNEQEKKDLAIIIEEVLKQRIKGTKNEVGVWVTPAFPKLIYVLEEDNITEDSRFWYLTKLAAECTAKRMVPDYISEKIMLELKIDKNGNGNCYTCMGCRSFLTPYVDENGKPKYYGRFNQGVVTINLVDVACTAARDGNKSEEKFWQVLDERLELCHRALQCRHERLEGTLSDAAPILWQYGALARLKKGEPIDKLLHGGYSTLSLGYAGLWECVYEITGKKLTEKEGEEFGLRVMQRLNDACAEWKAAENIDYSIYGTPLESTTYKFAKCLQNRFGIIKGVTDRNYITNSYHIHVTEKIDAFSKLELESKFQKLSPGGAISYVEVPNMQQNIPAVLEVMKFIYNNIMYAELNTKSDYCQVCGYDGEIQIVEEDGKLVWRCPNCGNEDQSKMNVARRTCGYIGSQFWNQGRTQEIKERVLHL

SEQ ID NO: 981 - protein, 755 aa, unidentified
  REGION 1..755: note = Category: MG60 effectors
  REGION 1..755: note = Description: MG60-195 effector
  source 1..755: note = uncultivated organism sequence
MHELIEKREPKEEKPMKIIKRNGAEVVFDIDKIIMAVTKANDAVDEKVRMTPLQIERISQSVQIACEEMGRSPSVEEIQDLVEKAIMAHGAFEVAKEYITYRYTRSLLRQSNTTDDRILSLIECNNEEVKQENANKNPTINAVQRDYMAGEVSKDITSRILLPKEVVDAHEAGIIHFHDADYYAQHMHNCDLVNLEDMLQNGTVISGTLIEKPHSFSTACNIATQIIAQVASNQYGGQSISLTHLAPFVQVSREKIRKTVEREMAAFGVAPAEETISKVVEDRLREEVRRGVQPIQYQVVTLMTTNGQAPFITVFMYLNEAKSEQEKKDLAMIIEETLRQRYEGVKNEKGVWIAPAFPKLIYVLEEDNVREGTPYWYLTRLAAQCTAKRMVPDYISEKKMREYKLSKGETPGRGDVYPCMGCRSFLTPDRSGNGWDNVARAGNYEPGKPKYYGRFNQGVVTINLVDVALSSGRDMTKFWEIFEDRLELCHRALRCRHERLKGTLSDAAPILWQYGALARLKKGEKIDKLLYGGYSTISLGYAGLYECVKYMTGKSHTDDEAKPFALSVMQKMNDKCLQWKTAENIDYSLYGTPLESTTYKFAKCLQKRFGLIPGITDKSYITNSYHVHVTEPIDAFTKLRFEAEFQQLSPGGAISYVEVPNMQNNIDAVLEVMQFIYDNIMYAELNTKSDYCQVCGYDGEIEIKEDDGKLVWVCPQCGNTDQNKMNVARRTCGYIGTQFWNQGRTQEIKDRVLHL

SEQ ID NO: 982 - protein, 817 aa, unidentified
  REGION 1..817: note = Category: MG60 effectors
  REGION 1..817: note = Description: MG60-196 effector
  source 1..817: note = uncultivated organism sequence
MAETLICTQCGSHKLKKLSDTQYVCDSCGTTTDLDLFNNEIGLKLNLAMTTRQTAKFDEAKSLYEQVKSILRPDQCAPEVYFGLFACEYKVLFELDNRTGNRVPIFYSSSESNVFDNKNLKKALEQARDVSFSKFEEYNELAMKVEAARMSYQKLSKLVTPFDIFICFKKTDLDGISDTRDYSTAMSLYSKLVDKFPKYHIFFSEKTLAEIPLTEYEPNIYYALHTSKILMVVSSKRDYLESQWVKNEWTRFLAINKANAIIPIYLKGTNVNIFPSEILKNNAYEEGDYDRIFTSIDSIMNSERYVKERDAEKKRKKDEIFEEVQKRLSKSFNAPNSNLSNMFKRMINDLSDGVFENAQKICDSIFNVDAEHPLAWLYSYLIDKKLTSLEQLKDQYESNWTEDRAIKKAIEFSKIDGYQDERNKIEDELYKWISYMVTEAIDLTHRKKYDDARSKLVKVATHVEEFGRDHRFDYFYHNFLLEMNCTNTNDLVSLQGIEKNAYFSKALKYANENQHIQLDEIIKVAKDNASKYQEQIIKNNTQLEASFAKLDLAVKSKFDEGNKLIELCHENEKEAKIKIKNFEDEAKKSKEQVILQKAEIIEKKAELAKYYSSRSEKMSRFLCNIRAIILGTVTYSILFIYAPGTVILSFTFIIPLLIIAILFNFINISIHKRQRDGRTIKGFVIFGIISGMILLNIPLLIGYSRNRYYKKIDSKTRKLDNDIYSKDQQLKTIEDKKQIDIKSEKEFIDRRMQYAKKVTEIMDTITSRSNQLKKDYPIFSLDKGITLKVKLEKDMNMFKESMVKLDEQIYDISHIAF

SEQ ID NO: 983 - protein, 755 aa, unidentified
  REGION 1..755: note = Category: MG60 effectors
  REGION 1..755: note = Description: MG60-197 effector
  source 1..755: note = uncultivated organism sequence
MHELIEKREPKEEKPMKIIKRNGAEVVFDIDKIIMAVTKANDAVDEKVRMTPLQIERISQSVQIACEEMGRSPSVEEIQDLVEKAIMAHGAFEVAKEYITYRYTRSLLRQSNTTDDRILSLIECNNEEVKQENANKNPTINAVQRDYMAGEVSKDITSRILLPKEVVDAHEAGIIHFHDADYYAQHMHNCDLVNLEDMLQNGTVISGTLIEKPHSFSTACNIATQIIAQVASNQYGGQSISLTHLAPFVQVSREKIRKTVEREMAAFGVAPAEETISKVVEDRLREEVRRGVQTIQYQVVTLMTTNGQAPFITVFMYLNEAKSEQEKKDLAMIIEETLRQRYEGVKNEKGVWITPAFPKLIYVLEEDNVREGTPYWYLTRLAAQCTAKRMVPDYISEKKMREYKLSKGETPGHGDVYTCMGCRSFLTPDRSGNGWDNVARAGNYEPGKPKYYGRFNQGVVTINLVDVALSSGRDVTKFWEVFEDRLELCHRALRCRHERLKGTLSDAAPILWQYGALARLPKGEPIDKLLYGGYSTISLGYAGLYECVKYMTGKSHTDDEAKPFALSVMQKMNDKCLQWKTAENIDYSLYGTPLESTTYKFAKCLQKRFGLVPGITDKSYITNSYHVHVTEPIDAFTKLRFEAEFQQLSPGGAISYVEVPNMQNNIDAVLEVMQFIYDNIMYAELNTKSDYCQVCGYDGEIEIKEDDGKLIWVCPQCGNTDQNKMNVARRTCGYIGTQFWNQGRTQEIKDRVLHL

SEQ ID NO: 984 - protein, 755 aa, unidentified
  REGION 1..755: note = Category: MG60 effectors
  REGION 1..755: note = Description: MG60-198 effector
  source 1..755: note = uncultivated organism sequence
MHELIEKREPKEEKPMKIIKRNGAEVVFDIDKIIMAVTKANDAVDEKVRMTPLQIERISQSVQIACEEMGRSPSVEEIQDLVEKAIMAHGAFEVAKEYITYRYTRSLLRQSNTTDDRILSLIECNNEEVKQENANKNPTINAVQRDYMAGEVSKDITSRILLPKEVVDAHEAGIIHFHDADYYAQHMHNCDLVNLEDMLQNGTVISGTLIEKPHSFSTACNIAAQIIAQVASNQYGGQSISLTHLAPFVQVSREKIRKTVEREMAVFGVSPAEETISKVVEDRLREEVRRGVQTIQYQVVTLMTTNGQAPFITVFMYLNEAKNEQEKKDLAMIIEETLRQRYEGVKNEKGVWITPAFPKLIYVLEEDNVREGTPYWYLTRLAAQCTAKRMVPDYISEKKMREYKLSKGETPGHGDVYTCMGCRSFLTPDRSGNGWDNVARAGNYEPGKPKYYGRFNQGVVTINLVDVALSSGRDMTKFWEVFEDRLELCHRALRCRHERLKGTLSDAAPILWQYGALARLPKGEPIDKLLYGGYSTISLGYAGLYECVKYMTGKSHTDDEAKPFALSVMQKMNDKCLQWKTAENIDYSLYGTPLESTTYKFAKCLQKRFGLIPGITDKSYITNSYHVHVTEPIDAFTKLRFEAEFQQLSPGGAISYVEVPNMQNNIDAVLEVMQFIYDNIMYAELNTKSDYCQVCGYDGEIEIKEDDGKLIWVCPQCGNTDQNKMNVARRTCGYIGTQFWNQGRTQEIKDRVLHL

SEQ ID NO: 985 - protein, 832 aa, unidentified
  REGION 1..832: note = Category: MG60 effectors
  REGION 1..832: note = Description: MG60-199 effector
  source 1..832: note = uncultivated organism sequence
MSLSFFATCPKGLENLLLKELVSLGATEVKETVAGVSFKGDFALGMRVCMWTRLASRVLLEISEFYAGTDTDLYLGALAVDYEKYFEVSNTIAVSFKGTSEAIRNTQYGALKIKDAVCDYFLKRNGIRPNVDKDNPDILITCHLDRKDNAHLLFDLSGNALHMRDFNRHTGMAPLKENLACAMLLRSGYNGSNLVDPMCGSGTLLLEAAAMATDTAPGICRDHYGFLQLKLCDRSAYTSLVEEMHKRSREGMLKFKQSGYKLFGFDADERIIDIALENAKKSGFADIIQFQVQSVETLVNPFDDLNDETQNKNAPSFFVITNPPYGQRMGNFNELISLYTKLGAVFKEQFRGAVCAVISSSEDLLSCLRLHADKIYKLYNGELLCQLRIFSIRQGEEGSESLSKDNLATDFANRLRKNLLKMNKWAKTLGLEAYRVYDADVPEYAAAIDYYKGYYVISTYKAQNKVSEKIEKRHELDMLGATIEVTGVSGSKVILKSREVKKGNSQYERLREDNSALIEIREGPFAFKVNLYDYLDTGLFLDGRLIRQYLYEHASNCSVLNLFAYTCSASVAAALGGASLITSVDMSKTYLEWGYENFLLNQIEAHSHEFIQADVLAFVSKDPEHKYDLIYVDPPTFSNSKRMQNTFDVRRDHLQLLGNLTRFLRDGAEVVFCTNLRSFRIDERLDEFGYSVTDLSSKTLPFDFKRNEHIHHCYSLIYHEKERRCEPVAFVSSNVNPKWSKVLYGIRKTNEQEITPKNKSVNGRPSRASTMVRFNASGMTEIHTDGNRDTSAFRHNNNRNFKSSKLRPAALRPKSSAKPRVFGPEGVKEGVQ

SEQ ID NO: 986 - protein, 1202 aa, unidentified
  REGION 1..1202: note = Category: MG60 effectors
  REGION 1..1202: note = Description: MG60-200 effector
  source 1..1202: note = uncultivated organism sequence
MFDDLKNLYEVRKTVRFELKPYRKTREVLKWNDSYDNLDAFIKHIKEDFQKDFNWNEFCKWQYQYFLDESRILFDFISHHICIHISDDDWNIKTTTSIQFNFKWLKGIFKNIPALKKCLDFKSLMKKILEIEEEYSECFRFFEMEKERKNEKQSDISEYLRKIAFLNRNTLTIFQFLWNNQERTTDEHILKRYQAMLSDLWETFEKLNNTIIASHQNETTGACFGKFTFNKYALFRREAEDLKEKYKQHKQKVEKYVDRMIQDEDFTEDNGRNITIDTWTIHKLVLKKENSGLQSILKTFNFHRDLDEVISELDEINGNLLNQYIQEFQDEYKKDTSIIDVEFHVFKTKEWREMKIYDKTGKPPKLKELFDRDYNATIKVQPWQTLEGYEYLYLIWKENTTWEEKKKQKLANKFLRILFKQEFINSDFNTIKKFRDALSRQRGKIRQDVRTSGREFIQEAMIRYYGNILEKDWYYFLALTRKEDIPDNSIENITMEKYIRNMAEKWDFSIFLYSQLSFRSLEKLCLMEDGDLIIHSELTEQWNKYKNQKKDIEWGCRHHKTSFDKYCEECNLVKEGKQKQFLERFRDHIVDAIEKLRNDSKYKGEDWSIFIPEIEKLSSIEKIVHFIDEKFYKLKKKYINANKVFELAEQWKVLLFQLYNKDFSIYDENFVSHEERLEENEHWEATKMQSSTKRASNKQPNLFTLYWKEIFQLSDTSLWQEGGIFFRKADTEKIEKRFRNNKFFWAFDVRFNKWKVIAKTKLCEKKEKFQQSTIDAINIITKRNVVNNQKIKENIVFVGIDRGKKEHLSIGFYDNNLNHLWIIGNTNFVKKIGVNQINFSICFRSKITYFDDQTELNIYKQIATNEYYFDEYWKVEEGHHLELLGLRDYHVKRIFTQDINGNYFVWLKNGWRFILNKWKYWYKIVDKDNNELVLHDTLDGKEIIDYYLLFESERYKRILDINSELQYSTNMKNLKKWYIAIVKDFFKQKIQEFSEKWKEIVFALENQSTNKGTITKDYKGASIISEIEEELLNSFVYLKYKAKSLLNGIQLGITIKKDELNTLSKSGKKTNAEYGHYWHFLFVNPDFTSEACPVCNKDINLFDIDRWNDKEENKNNQKSLSKLYWHWKWKLWESNMHHCDNPGNCPNIESHISTQNTSKCDYHMKDNRKWFDFLTSWDDLATYNIAKKAKEYLEFLSEQSSR

SEQ ID NO: 987 - protein, 755 aa, unidentified
  REGION 1..755: note = Category: MG60 effectors
  REGION 1..755: note = Description: MG60-201 effector
  source 1..755: note = uncultivated organism sequence
MHELIEKREPKEEKPMKIIKRNGAEVVFDIDKIIMAVTKANDAVDEKVRMTPLQIERISQSVQIACEEMGRSPSVEEIQDLVEKAIMAHGAFEVAKEYITYRYTRSLLRQSNTTDDRILSLIECNNEEVKQENANKNPTINAVQRDYMAGEVSKDITSRILLPKEVVDAHEAGIIHFHDADYYAQHMHNCDLVNLEDMLQNGTVISGTLIEKPHSFSTACNIATQIIAQVASNQYGGQSISLTHLAPFVQVSREKIRKTVEREMAAFGVAPAEETISKVVEDRLREEVRRGVQTIQYQVVTLMTTNGQAPFITVFMYLNEAKSEQEKKDLAMIIEETLRQRYEGVKNEKGVWITPAFPKLIYVLEEDNVREGTPYWYLTRLAAQCTAKRMVPDYISEKKMREYKLSKGETPGHGDVYTCMGCRSFLTPDRSGNGWDNVAGAGNYEPGKPKYYGRFNQGVVTINLVDVALSSGRDMTKFWEVFEDRLELCHRALRCRHERLKGTLSDAAPILWQYGALARLPKGEPIDKLLYGGYSTISLGYAGLYECVKYMTGKSHTDDEAKPFALSVMQKMNDKCLQWKTAENIDYSLYGTPLESTTYKFAKCLQKRFGLIPGITDKSYITNSYHVHVTEPIDAFTKLRFEAEFQQLSPGGAISYVEVPNMQNNIDAVLEVMQFIYDNIMYAELNTKSDYCQVCGYDGEIEIKEDDGKLIWVCPQCGNTDQNKMNVARRTCGYIGTQFWNQGRTQEIKDRVLHL

SEQ ID NO: 988 - protein, 755 aa, unidentified
  REGION 1..755: note = Category: MG60 effectors
  REGION 1..755: note = Description: MG60-202 effector
  source 1..755: note = uncultivated organism sequence
MHELIEKREPKEEKPMKIIKRNGAEVVFDIDKIIMAVTKANDAVDEKVRMTPLQIERISQSVQIACEEMGRSPSVEEIQDLVEKAIMAHGAFEVAKEYITYRYTRSLLRQSNTTDDRILSLIECNNEEVKQENANKNPTINAVQRDYMAGEVSKDITSRILLPKEVVDAHEAGIIHFHDADYYAQHMHNCDLVNLEDMLQNGTVISGTLIEKPHSFSTACNIATQIIAQVASNQYGGQSISLTHLAPFVQVSREKIRKTVEREMAAFGVAPAEETISKVVEDRLREEVRRGVQTIQYQVVTLMTTNGQAPFITVFMYLNEAKSEQEKKDLAMIIEETLRQRYEGVKNEKGVWITPAFPKLIYVLEEDNVREGTPYWYLTRLAAQCTAKRMVPDYISEKKMREYKLSKGETPGHGDVYTCMGCRSFLTPDRSGNGWDNVARAGNYEPGKPKYYGRFNQGVVTINLVDVALSSGRDMTKFWEVFEDRLELCHRALRCRHERLKGTLSDAAPILWQYGALARLPKGEPIDKLLYGGYSTISLGYAGLYECVKYMTGKSHTDDEAKPFALSVMQKMNDKCLQWKTAENIDYSLYGTPLESTTYKFAKCLQKRFGLVPGITDKSYITNSYHVHVTEPIDAFTKLRFEAEFQQLSPGGAISYVEVPNMQNNIDAVLEVMQFIYDNIMYAELNTKSDYCQVCGYDGEIEIKEDDGKLVWVCPQCGNTDQNKMNVARRTCGYIGTQFWNQGRTQEIKDRVLHL

SEQ ID NO: 989 - protein, 761 aa, unidentified
  REGION 1..761: note = Category: MG60 effectors
  REGION 1..761: note = Description: MG60-203 effector
  source 1..761: note = uncultivated organism sequence
MHKAALPFGAVMFALYSSVSYFSEGCFSVMKIIKRNGSEAAFDISKIIVAIGKANATVDESIRMTPVQIQRIAESVVLSCERLGRSPSVEEVQDMVEKQIMAHGAFEVAKNYITYRYTRTLVRQSNTTDDKILSLIECNNEEAKQENSNKNPVVNSTQRDYMAGEVSRDITNRILLPKEIVEAHNEGVIHFHDTDYFAQHMHNCDLVNLEDMLQNGTVITGTLIERPHSFSTACNIATQIIAQVASNQYGGQSISLAHLAPFVDVSRKKIRAQVEAEMAELGVERDEAKLSSIVEKRLREEIRRGVQTIQYQVVTLLTTNGQAPFVTVSMYLGEAKNEQEKKDLAMVIEETLLQRYQGVKNEKGVWVTPAFPKLIYTLDEDNIYPDSPYYYLTELAAKCTARRMVPDYISAKKMRELKGDVYTCMGCRSFLTPDRFTDAGVGNIANALNYEPGKHKYYGRFNQGVVTINLPDVALSSGGNVEKFWQIFEDRLELCHRALQYRHNRLKGTLSDAAPILWQYGACARLKKGEPIDKLLYDGYSTISLGYAGLYECVKFMTGRSHTDPTATPFALQIMQKMNDKCKQWKEAENIDYSLYGTPLESTTYKFAKCLQKRFGIIPGVTDKGYITNSYHVHVTEKIDAFTKLGFEAQFQHLSPGGAISYVEVPDMQNNIEAVLQVMRFIYDNIIYAELNTKSDYCQKCGWDGEITIKEQDGKLVWTCPQCGNQDQDTMNVARRTCGYIGTQFWNQGRTQEIKDRVLHL

SEQ ID NO: 990 - protein, 768 aa, unidentified
  REGION 1..768: note = Category: MG60 effectors
  REGION 1..768: note = Description: MG60-204 effector
  source 1..768: note = uncultivated organism sequence
MFCSCKKNLCVVIYIYDATKTYDCAKKLIVYKSIIKGAEVMKIIKRNGAEETFDRQKIKDAIAKANNETDGTPELTDRQIDYISLVIEDHCNEMNRALSVEEIQELVETHIILQGAPETAKRYIRYRFTRNLARASNTTDNQILSLIECNNEEVKQENSNKNPTVNSVQRDYMAGEVSKDLTKRILLPEDIVKAHEEGLIHFHDADYFAQHMHNCDLVNLEDMLQNGTVISGTMIEKPHSFSTACNIATQIIAQVASNQYGGQSISLAHLASFVQISREKITRQVRAEMEEFGIAADDEQVKSLVEKRVRDEIKRGVQTIQYQVVTLLTTNGQAPFVTVFMYLNEAKNEQEKKDLAIIIEEVLKQRIKGTKNEVGVWVTPAFPKLIYVLEEDNITEDSRFWYLTKLAAECTAKRMVPDYISEKIMLKLKIDKNGNGNCYTCMGCRSFLTPYVDENGKPKYYGRFNQGVVTINLVDVACTAARDGNKSEEKFWQVLDERLELCHRALQCRHERLEGTLSDAAPILWQYGALARLKKGEPIDKLLHGGYSTLSLGYAGLWECVYEITGKKLTEKEGEEFGLRVMQRLNDACAEWKAAENIDYSIYGTPLESTTYKFAKCLQNRFGIIKGVTDRNYITNSYHIHVTEKIDAFSKLELESKFQKLSPGGAISYVEVPNMQQNIPAVLEVMKFIYNNIMYAELNTKSDYCQVCGYDGEIQIVEEDGKLVWRCPNCGNEDQSKMNVARRTCGYIGSQFWNQGRTQEIKERVLHL

SEQ ID NO: 991 - protein, 755 aa, unidentified
  REGION 1..755: note = Category: MG60 effectors
  REGION 1..755: note = Description: MG60-205 effector
  source 1..755: note = uncultivated organism sequence
MHELIEKREPKEEKPMKIIKRNGAEVVFDIDKIIMAVTKANDAVDEKVRMTPLQIERISQSVQIACEEMGRSPSVEEIQDLVEKAIMAHGAFEVAKEYITYRYTRSLLRQSNTTDDRILSLIECNNEEVKQENANKNPTINAVQRDYMAGEVSKDITSRILLPKEVVDAHEAGIIHFHDADYYAQHMHNCDLVNLEDMLQNGTVISGTLIEKPHSFSTACNIATQIIAQVASNQYGGQSISLTHLAPFVQVSREKIRKTVEREMAAFGVAPAEETISKVVEDRLREEVRRGVQTIQYQVVTLMTTNGQAPFITVFMYLNEAKSEQEKKDLAMIIEETLRQRYEGVKNEKGVWITPAFPKLIYVLEEDNVRDGTPYWYLTRLAAQCTAKRMVPDYISEKKMREYKLSKGETPGHGDVYTCMGCRSFLTPDRSGNGWDNVARAGNYEPGKPKYYGRFNQGVVTINLVDVALSSGRDMTKFWEVFEDRLELCHRALRCRHERLKGTLSDAAPILWQYGALARLPKGEPIDKLLYGGYSTISLGYAGLYECVKYMTGKSHTDDEAKPFALSVMQKMNDKCLQWKTAENIDYSLYGTPLESTTYKFAKCLQKRFGLIPGITDKSYITNSYHVHVTEPIDAFTKLRFEAEFQQLSPGGAISYVEVPNMQNNIDAVLEVMQFIYDNIMYAELNTKSDYCQVCGYDGEIEIKEDDGKLIWVCPQCGNTDQNKMNVARRTCGYIGTQFWNQGRTQEIKDRVLHL

SEQ ID NO: 992 - protein, 761 aa, unidentified
  REGION 1..761: note = Category: MG60 effectors
  REGION 1..761: note = Description: MG60-206 effector
  source 1..761: note = uncultivated organism sequence
MHKAALPFGAVMFALYSSVSYFSEGCFSVMKIIKRNGSEAAFDISKIIVAIGKANATVDESTRMTPVQIQRIAESVVLSCEKLGRSPSVEEVQDMVEKQIMAHGAFEVAKNYITYRYTRTLVRQSNTTDDKILSLIECNNEEAKQENSNKNPVVNSTQRDYMAGEVSRDITNRILLPKEIVEAHNEGVIHFHDTDYFAQHMHNCDLVNLEDMLQNGTVITGTLIERPHSFSTACNIATQIIAQVASNQYGGQSISLAHLAPFVDVSRKKIRAQVEAEMAELGVERDEAKLSSIVEKRLREEIRRGVQTIQYQVVTLLTTNGQAPFVTVSMYLGEAKNEQEKKDLALVIEETLLQRYQGVKNEKGVWVTPAFPKLIYTLDEDNIYPDSPYYYLTELAAKCTARRMVPDYISAKKMRELKGDVYTCMGCRSFLTPDRFTDAGVGNIANALNYEPGKHKYYGRFNQGVVTINLPDVALSSGGNVEKFWQIFEDRLELCHRALQYRHNRLKGTLSDAAPILWQYGACARLKKGEPIDKLLYDGYSTISLGYAGLYECVKFMTGRSHTDPTATPFALQIMQKMNDKCKQWKEAENIDYSLYGTPLESTTYKFAKCLQKRFGIIPGVTDKGYITNSYHVHVTEKIDAFTKLGFEAQFQHLSPGGAISYVEVPDMQNNIEAVLQVMRFIYDNIIYAELNTKSDYCQKCGWDGEIIIKEQDGKLVWTCPQCGNQDQDTMNVARRTCGYIGTQFWNQGRTQEIKDRVLHL

SEQ ID NO: 993 - protein, 768 aa, unidentified
  REGION 1..768: note = Category: MG60 effectors
  REGION 1..768: note = Description: MG60-207 effector
  source 1..768: note = uncultivated organism sequence
MFCSCKKNLCVVIYIYNATKTYDCAKKLIVYKSIIKGAEVMKIIKRNGAEETFDRQKIKDAIAKANNETDGTPELTDRQIDYISLVIEDHCNEMNRALSVEEIQELVETHIILQGAPETAKRYIRYRFTRNLARASNTTDNQILSLIECNNEEVKQENSNKNPTVNSVQRDYMAGEVSKDLTKRILLPEDIVKAHEEGLIHFHDADYFAQHMHNCDLVNLEDMLQNGTVISGTMIEKPHSFSTACNIATQIIAQVASNQYGGQSISLAHLAPFVQISREKITRQVRAEMEEFGIAADDEQVKSLVEKRVRDEIKRGVQTIQYQVVTLLTTNGQAPFVTVFMYLNEAKNEQEKKDLAIIIEEVLKQRIKGTKNEVGVWVTPAFPKLIYVLEEDNITEDSRFWYLTKLAAECTAKRMVPDYISEKIMLKLKIDKNGNGNCYTCMGCRSFLTPYVDENGKPKYYGRFNQGVVTINLVDVACTAARDGSKSEEKFWQVLDERLELCHRALQCRHERLEGTLSDAAPILWQYGALARLKKGEPIDKLLHGGYSTLSLGYAGLWECVYEITGKKLTEKEGEEFGLRVMQRLNDACAEWKAAENIDYSIYGTPLESTTYKFAKCLQNRFGIIKGVTDRNYITNSYHIHVTEKIDAFSKLELESKFQKLSPGGAISYVEVPNMQQNIPAVLEVMKFIYNNIMYAELNTKSDYCQVCGYDGEIQIVEEDGKLVWRCPNCGNEDQSKMNVARRTCGYIGSQFWNQGRTQEIKERVLHL

SEQ ID NO: 994 - protein, 755 aa, unidentified
  REGION 1..755: note = Category: MG60 effectors
  REGION 1..755: note = Description: MG60-208 effector
  source 1..755: note = uncultivated organism sequence
MHELIEKREPKEEKPMKIIKRNGAEVVFDIDKIIMAVTKANDAVDEKVRMTPLQIERISQSVQIACEEMGRSPSVEEIQDLVEKAIMAHGAFEVAKEYITYRYTRSLLRQSNTTDDRILSLIECNNEEVKQENANKNPTINAVQRDYMAGEVSKDITSRILLPKEVVDAHEAGIIHFHDADYYAQHMHNCDLVNLEDMLQNGTVISGTLIEKPHSFSTACNIATQIIAQVASNQYGGQSISLTHLAPFVQVSREKIRKTVEREMAAFGVAPAEETISKVVEDRLREEVRRGVQTIQYQVVTLMTTNGQAPFITVFMYLNEAKSEQEKKDLAMIIEETLRQRYEGVKNEKGVWITPAFPKLIYVLEEDNVREGTPYWYLTRLAAQCTAKRMVPDYISEKKMREYKLSKGETPGHGDVYTCMGCRSFLTPDRSGNGWDNVARAGNYEPGKPKYYGRFNQGVVTINLVDVALSSGRDVTKFWEVFEDRLELCHRALRCRHERLKGTLSDAAPILWQYGALARLPKGEPIDKLLYGGYSTISLGYAGLYECVKYMTGKSHTDDEAKPFALSVMQKMNDKCLQWKTAENIDYSLYGTPLESTTYKFAKCLQKRFGLIPGITDKSYITNSYHVHVTEPIDAFTKLRFEAEFQQLSPGGAISYVEVPNMQNNIDAVLEVMQFIYDNIMYAELNTKSDYCQVCGYDGEIEIKEDDGKLIWVCPQCGNTDQNKMNVARRTCGYIGTQFWNQGRTQEIKDRVLHL

SEQ ID NO: 995 - protein, 939 aa, unidentified
  REGION 1..939: note = Category: MG60 effectors
  REGION 1..939: note = Description: MG60-209 effector
  source 1..939: note = uncultivated organism sequence
MFNFTPKIGEKEISIVKALTTNEIEDLRNRIASYDPFQLFEVNPHNDKEIICPICGNGNGENHTGVKPSNENNHWIFHCFKCERFNGDLLSVIASENNLSTKGEDFFKVLTIGARIINFNFNLNHTTFSSNKKTKKDVPKAELDLIHTDILETQKNLRDLIEEQGGKWRGLTLETLEHFHCGYILNWIPPKIRLKYAQGQRDKLPVTSRRVILPTQNHYNAVMIDSDRNTENKSYWKMHAGHKEPFGLDFIPADADLIIIVEGEVDAMSIYQATDTNIYVFSTGGAGEKKFISELEEKFQGRKLPHIIILFDSDESGRNGANNLRENLIQRGFLVVVKFIDESDIKIDSNDILQEQGDAALKLRLDNLISAAQIEFAEIEKEMAESEAKRKSDPLYLDEETRAKLFGGGITDFDNAERLVLLFGDKFRYFKDLDRWVFYTNDFWTIAPTGKSSALFHFGRKTAEFIEFNATADADKKIAENFVKKFENHRYLSPICSMVKGLEEIYITQEDLDKHQMLLNCANGVVDLETGKLYKHDPSLYFTKKSPVVYNPECNSIDFEKFMQDVLPNEETRRAVLRYLGYCLCGDIREEKALFIVGDGRNGKGTLAKVLMAILDDYATPFKIDALLQRRFDKDGDAATPEFAKLEGRRLAIANEIPQGKNLDVAHFKDLTGGDQISIRRLHQEATTIKNPTHHFILCGQHYPEIKDANDLGLRERIIAVRFPQSFTGENCDPNLKKKLLTPENLSGALNILVQECINWQREGLIISDDMKAEKQEYLDANNFIQDFISEYCVFDADKKILRKELLSVLKENYRSEIAGLSDQALTDMLKKIEGVEYKNNIGKKHLSYFYGIGLSDEKQNSLEFAAVNKNDKTFNLQEHSNNLSDSEAEKLVLKMESEGYSNEEIIEELIKGGIDSSFAHEHLNHLKPENIPDHCIPF

SEQ ID NO: 996 - protein, 755 aa, unidentified
  REGION 1..755: note = Category: MG60 effectors
  REGION 1..755: note = Description: MG60-210 effector
  source 1..755: note = uncultivated organism sequence
MHELIEKREPKEEKPMKIIKRNGAEVVFDIDKIIMAVTKANDAVDEKVRMTPLQIERISQSVQIACEEMGRSPSVEEIQDLVEKAIMAHGAFEVAKEYITYRYTRSLLRQSNTTDDRILSLIECNNEEVKQENANKNPTINAVQRDYMAGEVSKDITSRILLPKEVVDAHEAGIIHFHDADYYAQHMHNCDLVNLEDMLQNGTVISGTLIEKPHSFSTACNIATQIIAQVASNQYGGQSISLTHLAPFVQVSREKIRKTVEREMAAFGVAPADETISKVVEDRLREEVRRGVQTIQYQVVTLMTTNGQAPFITVFMYLNEAKSEQEKKDLAMIIEETLRQRYEGVKNEKGVWITPAFPKLIYVLEEDNVREGTPYWYLTRLAAQCTAKRMVPDYISEKKMREYKLSKGETPGHGDVYTCMGCRSFLTPDRSGNGWDNVARAGNYEPGKPKYYGRFNQGVVTINLVDVALSSGRDMTKFWEVFEDRLELCHRALRCRHERLKGTLSDAAPILWQYGALARLPKGEPIDKLLYGGYSTISLGYAGLYECVKYMTGKSHTDDEAKPFALSVMQKMNDKCLQWKTAENIDYSLYGTPLESTTYKFAKCLQKRFGLVPGITDKSYITNSYHVHVTEPIDAFTKLRFEAEFQQLSPGGAISYVEVPNMQNNIDAVLEVMQFIYDNIMYAELNTKSDYCQVCGYDGEIEIKEDDGKLVWVCPQCGNTDQNKMNVARRTCGYIGTQFWNQGRTQEIKDRVLHL

SEQ ID NO: 997 - protein, 783 aa, unidentified
  REGION 1..783: note = Category: MG60 effectors
  REGION 1..783: note = Description: MG60-211 effector
  source 1..783: note = uncultivated organism sequence
MMRVVKRDGKIVDFDESRIKIAIGKANNEVDESQRATEEEIEKIVEYVKKVKKDRILVEDIQDIIENKLMEYKRFELAKAYITYRYSRALVRKANTTDQTVKELVEGNSEYWNNENSNKNARVVTTQRDYLAGITSTDITRRLLLPPEIVKAHDEGIIHFHDADYFAQNALTNCCLINLNDMLQNGTVINGVMIEKPHRFVTACTIATQIILGVSSSQYGGCTVTLTHLAPFVRDSYNRSLKKYQDRNLPEEECKKFAMQDTKKEIADGVQTFNYQVNSMTNTNGQAPFLSVNMYLGETDEYKDELAMIIEEFLRQRMLGFKNEKGVYITPAFPKLLYVLEEDNIHKDSKYWYLTELAAKCTAKRMVPDYISEKMMKKLKINQYGEGDCYPCMGCRSFLTPDRVKGNVAKAKDYVEGKGKYYGRFNQGVVTINLPDVALSSKKDEKEFWKIFDERLELCHEALQLRHKRLSGITSDVAPLLWQYGAYARLNKGEKLDKLLHGGYSTLSLGYAGLYECVKYMTGDSHTDGGKGEKFALEVMQHMNDKCAEWKKAEDSDYSLYGTPIESTTYKFAKCLKKRFGTVEGVTDRNYITNSYHVPVFEEIDAFSKLKLESEFQRLSPGGAISYVETPNLQNNIEVVEQIIEFIYNNIMYAELNTKSDYCQKCGYTGEILIDDNLEWYCPNCGNRDHRTLNVARRTCGYIGTNFWNKGRTQEIKERVLHIDNKDFDAEKCTKCDEDVNVVSKCCNDSNESTESDKNVEKHEKKTRAKVSAKEKAMASVHA

SEQ ID NO: 998 - protein, 762 aa, unidentified
  REGION 1..762: note = Category: MG60 effectors
  REGION 1..762: note = Description: MG60-212 effector
  source 1..762: note = uncultivated organism sequence
MRVVKRDGKIVDFDESRIKIAIGKANNEVDESQRATEEEIEKIVEYVKKVKKDRILVEDIQDIIENKLMEYKRFELAKAYITYRYSRALVRKANTTDQTVKELVEGNSEYWNNENSNKNAKVVTTQRDYLAGITSTDITRRLLLPPEIVKAHDEGIIHFHDADYFAQNALTNCCLINLNDMLQNGTVINGVMIEKPHRFLTACTIATQIILGVSSSQYGGCTVTLTHLAPFVRDSYNRILKKYQDRNLPEEECKKFAMQDTKKEIADGVQTFNYQVNSMTNTNGQAPFLSVNMYLGETDEYKDELAMIIEEFLKQRMLGFKNEKGVYITPAFPKLLYVLEEDNIHKDSKYWYLTELAAKCTAKRMVPDYISEKMMKKLKINQYGEGDCYPCMGCRSFLTPDRVKGNVAKAKDYVEGKGKYYGRFNQGVVTINLPDVALSSKKDEKEFWKIFDERLELCHEALQLRHKRLSGITSDVAPLLWQYGAYARLDKGEKLDKLLHGGYSTLSLGYAGLYECVKYMTGDSHTDGGKGEKFALEVMQHMNDKCAEWKKAEDIDYSLYGTPIESTTYKFAKCLKKRFGTVEGITDRNYITNSYHVPVFEEIDAFSKLKLESEFQRLSPGGAISYVETPNLQNNIEVVEQIIEFIYNNIMYAELNTKSDYCQKCGYTGEILIDDNLEWYCPNCGNRDHRTLNVARRTCGYIGTNFWNKGRTQEIKERVLHIDNKDFDAEKCTKCDENVEKHEKKTRAKVSAKEKAIASVHA

SEQ ID NO: 999 - protein, 763 aa, unidentified
  REGION 1..763: note = Category: MG60 effectors
  REGION 1..763: note = Description: MG60-213 effector
  source 1..763: note = uncultivated organism sequence
MYIQPIITVSDTTHKFNFVKLFFQKNKNSLRDVWRGNGMKIIKRNGEEVVFDLKKIITAISKANNEVPPSEQLAGSTINSIAENIEKQCAAENHEMNVEAIQDLVEKAIMKAGAFDIAKKYITYRYQHQLMRRANSTDSQILSLLECNNEEVKQENSNKNSTVVSVQRDYMAGEVSKDITKRFLLDEDIVKAHDEGLIHFHDADYFAQHMHNCDLVNLEDMLQNGTVISGTKIDTPHSFSTACNIATQIIAQVASSQYGGQSISLAHLAPFVEVSRKKFQRETMRVEEQTGVKFTDEQFKKIVEMRIRDEITRGVQTIQYQVVTLMTTNGQSPFITVFMYLNEAKNEQEKADLAMIIEEMLKQRYQGVKNEKGFWVTPAFPKLIYVLEPDNIEPGSKYYSLTELAAKCTARRLVPDYISEKKMLELKVDANGKGNCYPCMGCRSFLTPYLDEHGKPKYYGRFNQGVVTINLVDVACSSNGDYKSFWEIFDERLELCHKALMRRHQRLLGTPSDVAPILWQHGALARLEKGETIDKLLFGGYSTISLGYAGLCECVRYMTGKPHTDPSATPFAIEIMKHLNEKCAEWKAESNIAFSLYGTPLESTTYKFAKCLKKRFGEIPGVTDKNYITNSYHVHVTEQMDAFTKLSFESQFQELSPGGAVSYVEVPNMENNIPAVMTLLKHIYENIMYAELNTKSDCCQKCGYTGEIQIVTDSDNKLVWQCPNCGNKDQATMNVARRTCGYIGTQYWNQGRTQEIKERVLHL

SEQ ID NO: 1000 - protein, 756 aa, unidentified
  REGION 1..756: note = Category: MG60 effectors
  REGION 1..756: note = Description: MG60-214 effector
  source 1..756: note = uncultivated organism sequence
MQQSIFDVCVIIGLWFKKKRRSEVFTMKVIKRDGHIVDYSPDKIEEAVSKANLEVSEEDRVSDIQIRNIIKYIEGLHKKRMLVEDIQDVIEKRLMTLGKYELAKEYITYRYTRELVRRSNTTDKSIKELIDGESEYWNTENSNKNAKVVTTQRDYLAGITSTDITRRFLLPEDIVTAHDQGIIHFHDADYFAQNALHNCDLINLDDMLQNGTNINGVMIEKPHRFLTAMTIATQLITAVSSSQYGGCTITLTHLAPFVRSSKEFYLKKYKNRKLTKAQVEKFATEDLKKEITDGVQTFQYQINSMTTTNGQAPFLSVCMYLGETEEYKDELAMIIEEVLKQRMEGMKNEKGVYITPAFPKLLYVLEEENINPKGKYYYLTELAARCTAKRMVPDYISEKVMKENKINSLGNGECFPCMGCRSFLTPDRMFNVGNISKALNYVENKGKYYGRFNQGVVTINLPDVALTSGKDMELFWKVFDDRLELCHRALQIRHKRLSKVTSDVAPILWQHGALARLEKGESIHELLHHGYSTISLGYAGLYECVKYMTGHSHTDNGKGHEFALEVMQHMNDKCNEWKEAEDIDYSLYGTPIESTTYKFAKCLRDRFGKIKGITDRDYITNSYHVPVFEEIDAFTKLKLESEFQRLSPGGAISYIETPNLENNIDVVMEVINFIYENIMYAELNTKSDYCQKCGYNGEILLDDDLEWYCPECGNRDHDTLNVARRTCGYIGTNFWNKGRTQEIKERVVHIDNKDDE

SEQ ID NO: 1001 - protein, 753 aa, unidentified
  REGION 1..753: note = Category: MG60 effectors
  REGION 1..753: note = Description: MG60-215 effector
  source 1..753: note = uncultivated organism sequence
MLEIVKRDCSKTNFDKQKIFNAIMKAMKSGSGIVKSEIAEKIANEIENEVKSMEEIDIYQIEAMVFQKLIENNQILTAKAYESYRSVREFQRNTTNSTDDAILELLAGQSEYWNEENSNKNAMLITTQRDYMAGIESEDISKRMLLTPEIVHAHENGIIHFHDIDYFAMKAMYNCCLINLEDMLQNGTVISNVLIEKPHSFSTACNVATQIIAQVASSQFGGQTISLSHLAPFIDVSRQKIKKQVEKELINANLTSVEYHNLVDSIVAKRLKEEIKKGVQTIQYQVVTLMTTNGQAPFLSVFMYLNEVKDKQTKHDLAMLIEEVLLQRIQGVKNEKGVWVTPAFPKLLYVLEEDNIHKNSPYYYLTELAAKCTVKRMVPDYISEKKMKECKIDKNGKGQCFPCMGCRSFLSPYLDKNSQPKYYGRFNQGVVTINLADVALSALKEYEESKLNLHNTSVESIFWKILDERLELCHRTLRLRHERLKGTVSDVAPILWQHGAIARLNKGEKIDKLLYNDYSTISLGYAALYECVKAITKHTLTDNGIGEKFGLQVMQRLTDKCNQWKEEENIGYSVYGTPLESTTYKFAKCLRKRFGVIEGITDRDYVTNSYHIPVFENINAFDKLLIESKFQKLSAGGAISYVEVPNLTDNIEIVIQIIQYIYEHIMYAELNTKSDYCHVCGYDKEIEIVTDANTGKLIWKCPQCGNTDQRKMSVTRRTCGYLGSNFWNQGRTQEIKERVLHIDDMDLNESENV

SEQ ID NO: 1002 - protein, 768 aa, unidentified
  REGION 1..768: note = Category: MG60 effectors
  REGION 1..768: note = Description: MG60-216 effector
  source 1..768: note = uncultivated organism sequence
MFCSCKKNLCVVIYIYDATKTYDCAKKLIVYKSIIKGAEVMKIIKRNGAEETFDRQKIKDAIAKANNETDGTPELTDRQIDYISLVIEDHCNEMNRALSVEEIQELVETHIILQGAPETAKRYIRYRFTRNLARASNTTDNQILSLIECNHEEVKQENSNKNPTVNSVQRDYMAGEVSKDLTKRILLPEDIVKAHEEGLIHFHDADYFAQHMHNCDLVNLEDMLQNGTVISGTMIEKPHSFSTACNIATQIIAQVASNQYGGQSISLAHLAPFVQISREKITRQVRAEMEEFGIDADDEQVKSLVEKRVRDEIKRGVQTIQYQVVTLLTTNGQAPFVTVFMYLNEAKNEQEKKDLAIIIEEVLKQRIKGTKNEVGVWVTPAFPKLIYVLEEDNITEDSRFWYLTKLAAECTAKRMVPDYISEKIMLKLKIDKNGNGNCYTCMGCRSFLTPYVDENGKPKYYGRFNQGVVTINLVDVACTAARDGNKSEEKFWQVLDERLELCHRALQCRHERLEGTLSDAAPILWQYGALARLKKGEPIDKLLHGGYSTLSLGYAGLWECVYEITGKKLTEKEGEEFGLRVMQRLNDACAEWKAAENIDYSIYGTPLESTTYKFAKCLQNRFGIIKGVTDRNYITNSYHIHVTEKIDAFSKLELESKFQKLSPGGAISYVEVPNMQQNIPAVLEVMKFIYNNIMYAELNTKSDYCQVCGYDGEIQIVEEDGKLVWRCPNCGNEDQSKMNVARRTCGYIGSQFWNQGRTQEIKERVLHL

SEQ ID NO: 1003 - protein, 769 aa, unidentified
  REGION 1..769: note = Category: MG60 effectors
  REGION 1..769: note = Description: MG60-218 effector
  source 1..769: note = uncultivated organism sequence
MKVIKRDGTIVEYDREKIRIAIEKANKEVSRKEKATDSEIEEIMSYIEDLKKGRILVEDIQDIIEEKLMEIKRYELAKKYITYRYTRALVRKANTTDQSIKELIEGESEYWNNENANKNARVVTTQRDYLAGITSTDITRRFLLPEDVVKAHDEGIIHFHDADYFAQNALTNCELINLEDMLQNGTIMNGVMIEKPHRFITACTIATQIILAVTSSTYGGATVSLAHLAPFVRSSYEKYYKKYKDNGLSKEQCEKFAKEDTKKEVADGVQTFNYQVNSMTNTNGQAPFLSVCMYLGETDEYKEELAMIIEEFLNQRILGFKNEKGVYITPAFPKLLYVLEEDNIHENSKYWYLTELAAKCTAKRMVPDYISEKIMKQMKVDANGDGQCYPCMGCRSFLTPYIDPVTKKPKYYGRFNQGVVTINLVDVALSSGKDLKKFWKIYDERLELCHKALQARHERLAKATSDIAPILWQHGAFARLPKGASIHPLLHGGYSTISLGYAGLYECVKYMTGKSHTDNGDGKDFAIEVMKKMNEKCAEWKDAEDIDYSVYGTPIESTTYKFAKCLQKRFGKIKGITDKNYITNSYHVPVFEEIDAFSKLKLESEFQRLSPGGAISYVETPNLQNNLEVVLQIMKFIYDNIMYAELNTKSDYCQKCGYTGEILIDDNLEWYCPNCGNRDHNTLNVARRTCGYIGSNFWNKGRTQEIKERVLHIDNKDDDCDCDECNCDHANTDTNKEEKSEEKQMNFIDYDVEEEITKSKKRMKQPAMV

SEQ ID NO: 1004 - protein, 755 aa, unidentified
  REGION 1..755: note = Category: MG60 effectors
  REGION 1..755: note = Description: MG60-219 effector
  source 1..755: note = uncultivated organism sequence
MHELIEKREPKEEKPMKIIKRNGAEVVFDIDKIIMAVTKANDAVDEKVRMTPLQIERISQSVQIACEEMGRSPSVEEIQDLVEKAIMAHGAFEVAKEYITYRYTRSLLRQSNTTDDRILSLIECNNEEVKQENANKNPTINAVQRDYMAGEVSKDITSRILLPKEVVDAHEAGIIHFHDADYYAQHMHNCDLVNLEDMLQNGTVISGTLIEKPHSFSTACNIATQIIAQVASNQYGGQSISLTHLAPFVQVSREKIRKTVEREMAAFGVVPAEETISKVVEDRLREEVRRGVQTIQYQVVTLMTTNGQAPFITVFMYLNEAKSEQEKKDLAMIIEETLRQRYEGVKNEKGVWITPAFPKLIYVLEEDNVREGTPYWYLTRLAAQCTAKRMVPDYISEKKMREYKLSKGETPGHGDVYTCMGCRSFLTPDRSGNGWDNVARAGNYEPGKPKYYGRFNQGVVTINLVDVALSSGRDMTKFWEVFEDRLELCHRALRCRHERLKGTLSDAAPILWQYGALARLPKGEPIDKLLYGGYSTISLGYAGLYECVKYMTGKSHTDDEAKPFALSVMQKMNDKCLQWKTAENIDYSLYGTPLESTTYKFAKCLQKRFGLIPGITDKSYITNSYHVHVTEPIDAFTKLRFEAEFQQLSPGGAISYVEVPNMQNNIDAVLEVMQFIYDNIMYAELNTKSDYCQVCGYDGEIEIKEDDGKLIWVCPQCGNTDQNKMNVARRTCGYIGTQFWNQGRTQEIKDRVLHL

SEQ ID NO: 1005 - protein, 1226 aa, unidentified
  REGION 1..1226: note = Category: MG60 effectors
  REGION 1..1226: note = Description: MG60-220 effector
  source 1..1226: note = uncultivated organism sequence
MKVIKRNGSEVLYNQQKIKDAVSKANAEVSRVERLSQAQITAIANNVTKIIEQSSHAVSIEDIQNYVEKEIMAMRGYEVAQKYITYRYKRALARQSNTTDERILSIIGLENEEVKQENANKNPTINSTQRDYMAGEVSKDLTTRILLPQDIVDAHNNGLIHFHDADYYAQKMHNCFTGDTKFMTHKGAKRFDSFKDGESVFVRDMHNEIRKATVHIYGEQRVQKVTFKMLGKNKKKTVKCTPNHRWILEDKKVTTALKVGDVLFSNSYSHYEKWKVEKIEFKGIEKVYCVEEPITHSFTLEDGMVTGNCDLINLEDMLQNGTVISGTMIEKPHSFHTACNITTQVIAQVASSQFGGQSFSLAHLVPFVDISRKKIKKEILEENLINKIVESDEIINKKVEFRLKEEIKRGIQTIQYQILTLMTTNGQAPFVTMFLWLDEVEEGQARDDMAMLVEEVLNQRIQGVKNEKGVYITPAFPKVIYLLDEDNIHEDSKYYYLTELAAKCTAKRMVPDYISGKVMRELKEGDIYPCMGCVDGAEVVTYKYLDNVYVESFERMWNRLSNYFKVELQPNKKDFVMKTPGVKIYDHQSGYVDNYGIIKNHTNRWLQISFSNGRVLTCTPDHPFETTDKRIIMAKDLTPNDMINIDTLSNYSSNNLISMKENRAWLYGFALCDSTYYDNFTASIAENSENEIKEFFTNMLLSEYKLETKCIYRNRGEKGKYIDLRAVSNNDNSLMNLKLDFIKAFEGKAKKDRHIPNEVFSWQNSAKLAFLAGMIDADGYLNSSMRLTKIQLGSTNKELAIQQALLAQTCGMPSRIYLNHYKSNCRDMIRYRVEFIPSIDLLKYIKCEKKYSLKDSTIARKNSSISDNDFVTITSVDELEKAGFSYDVTTESEHFTVSGLYSHNCRSFLTVDRTKENLGNAKNYNPNKHKYYGRFNQGVVTINLVDVACSSYGDMNKFWEILDERLELCHRALKERHKRLLGTPSDVAPILWQHGALARLEKGEKIDKLLYDGYSTISLGYAGLYEMCMRMTEKSHTDPEAKPFALAVMQKLNDKCNEWKEKENIDYSLYGTPMESTTFKFARCLQRRFGIIKDVTDHDYITNSYHVNVRENIDAFTKLSFESEFQKLSPGGAISYVEVPNMQDNIPAVLAVLKHIYNNIMYAELNTKSDYCQVCGYEGEIQIVRDKHKKLIWKCPNCGNTDHNKMNTARRTCGYIGTNDFNQGVT

SEQ ID NO: 1006 - protein, 752 aa, unidentified
  REGION 1..752: note = Category: MG60 effectors
  REGION 1..752: note = Description: MG60-221 effector
  source 1..752: note = uncultivated organism sequence
MIFLLIFIKNTISCGHQQKQTQNIVSKVTSYFFYKLSSLIPMAIKKVIKRNGSEAVYDPEKIRVAIQKANHEVPEDDQASDFLISEIIRSLELAKKWTVPIEEIQDFIEMQLIKMNKAELAKKYIIYRYQRALVRKANTTDDSILTLIHNDNKEVGQENSNKDASIASTQRDLIAWEVSKDLTRRMLLPDDIREAHDEGVLHFHDMDYFIQPIFNCCLVNIKDMFENGTVMNGKLVETPKSFQVACTVMTQIIASVASSQYGGQSVNIKHLGKYLYATKQKYLKKYKESCPELSDEEIQKIVDIRVKDELASWVQTIQYQINTLMTTNGQSPFVTLFLELDEKDEYIQETAEIIEEIFKQRLQGIKNEVWVYVTPAFPKLVYVLDECNILKGGKYDYLTKLAVKCSAKRMYPDYISAKKMREIECGNVFAPMGCRSFLAPWKDENWEYKFEGRFNQWVVTINLPQIWILANHSEEKYFKLLDERLELCRKALMCRHERLKGTVSDISPIHWQYWAIARLKKGEKIDKYLYGWYSTISLGYIGLYESSILITGEPHTTEKWQAFALKVMRTLKAAVTKWKEESGIGFALYGTPAESLCYRFAKIDKKKFGEIKDVTDKWYYTNSYHVDVREHIDALSKLAFEAQFQSISTWGAISYIEMPNMQKNLPALESLVQFMYDNIMYAEFNTKSDYCHCCGFDGEIIVNEDNEWECPQCHNKNQRKMNVTRRTCWYLGENFWNAGKTKEISKRVLHVS

SEQ ID NO: 1007 - protein, 783 aa, unidentified
  REGION 1..783: note = Category: MG60 effectors
  REGION 1..783: note = Description: MG60-222 effector
  source 1..783: note = uncultivated organism sequence
MMRVVKRDGKIVDFDESRIKIAIGKANNEVDESQRATEEEIEKIVEYVKKVKKDRILVEDIQDIIENKLMEYKRFELAKAYITYRYSRALVRKANTTDQTVKELVEGNSEYWNNENSNKNARVVTTQRDYLAGITSTDITRRLLLPPEIVKAHDEGIIHFHDADYFAQNALTNCCLINLNDMLQNGTVINGVMIEKPHRFVTACTIATQIILGVSSSQYGGCTVTLTHLAPFVRDSYNRSLKKYQDRNLPEEECKKFAMQDTKKEIADGVQTFNYQVNSMTNTNGQAPFLSVNMYLGETDEYKDELAMIIEEFLRQRMLGFKNEKGVYITPAFPKLLYVLEEDNIHKDSKYWYLTELAAKCTAKRMVPDYISEKMMKKLKINQYGEGDCYPCMGCRSFLTPDRVKGNVAKAKDYVEGKGKYYGRFNQGVVTINLPDVALSSKKDEKEFWKIFDERLELCHEALQLRHKRLSGITSDVAPLLWQYGAYARLNKGEKLDKLLHGGYSTLSLGYAGLYECVKYMTGDSHTDGGKGEKFALEVMQHMNDKCAEWKKAEDIDYSLYGTPIESTTYKFAKCLKKRFGTVEGVTDRNYITNSYHVPVFEEIDAFSKLKLESEFQRLSPGGAISYVETPNLQNNIEVVEQIIEFIYNNIMYAELNTKSDCCQKCGYTGEILIDDNLEWYCPNCGNRDHRTLNVARRTCGYIGTNFWNKGRTQEIKERVLHIDNKDFDAEKCTKCDEDVNVVSKCCNDSNESTESDKNVEKHEKKTRAKVSAKEKAMASVHA

SEQ ID NO: 1008 - protein, 1125 aa, unidentified
  REGION 1..1125: note = Category: MG60 effectors
  REGION 1..1125: note = Description: MG60-223 effector
  source 1..1125: note = uncultivated organism sequence
MLEIVKRDCSKTNFDKQKIFNAIMKAMKSGSGIVKSEIAEKIANEIENEVKSMEEIDIYQIEAMVFQKLIENNQILTAKAYESYRSVREFQRNTTNSTDDAILELLAGQSEYWNEENSNKNAMLITTQRDYMAGIESEDISKRMLLTPEIVHAHENGIIHFHDIDYFAMKAMYNCCLINLEDMLQNGTVISNVLIEKPHSFSTACNVATQIIAQVASSQFGGQTISLSHLAPFIDVSRQKIKKQVEKELINANLTSVEYHNLVDSIVAKRLKEEIKKGVQTIQYQVVTLMTTNGQAPFLSVFMYLNEVKDKQTKHDLAMLIEEVLLQRIQGVKNEKGVWVTPAFPKLLYVLEEDNIHKNSPYYYLTELAAKCTVKRMVPDYISEKKMKECKIDKNGKGQCFPCMGCVDGKEVVTYKYNNDVYTESFERMWDRLSKYFEISKQPNLVDFVMKTHGVKIYDQKAGFVDNYGIIKNHNSEWLRITFSNGRTIMCTPDHPFETTDGRVISAKNLTENDFIEIDKTSSFKTPSIYTMKENRAWLYGFALCDSTYYDGFTASIASVNETEIETNFVNIINDEYGLNTNSINRERGKKGTYKDLRVVSNGDNEYIKLRIELIKAFEGKAKANRHIPNEVFSWTQNAKLAFIAGMIDADGYLNTTAKKAIVQIGSINKELAIQQALLVQTCGMFAKIYHNHYNANHKDKIRYRVEFTPTEKLLSFIKCNKKTDLFNSILKNTKKSIADTNICAITNVEHIHKEGFSYDVTTSSEHFTVSGIYSHNCRSFLSPYLDKNSQPKYYGRFNQGVVTINLADVALSALKEYEESKLNLHNTSVESIFWKILDERLELCHRTLRLRHERLKGTVSDVAPILWQHGAIARLNKGEKIDKLLYNDYSTISLGYAALYECVKAITKHTLTDNGIGEKFGLQVMQRLTDKCNQWKEEENIGYSVYGTPLESTTYKFAKCLRKRFGVIEGITDRDYVTNSYHIPVFENINAFDKLLIESKFQKLSAGGAISYVEVPNLTDNIEIVIQIIQYIYEHIMYAELNTKSDYCHVCGYDKEIEIVTDTNTGKLIWKCPQCGNTDQRKMSVTRRTCGYLGSNFWNQGRTQEIKERVLHIDDMDLNESENV

SEQ ID NO: 1009 - protein, 921 aa, unidentified
  REGION 1..921: note = Category: MG60 effectors
  REGION 1..921: note = Description: MG60-224 effector
  source 1..921: note = uncultivated organism sequence
MKIVKRNGTEVEFDIKKIINAITKANKTVEEKDKLSIEEIKNISDCVMVRVSQLPVDTNVEVIQDIVEEELDKHNASYTLKRNYMLYRYQHNELRKSNTIDKTILSLIKCENEDIKQENSNKNPVIISTQRDYMAGEVSKDLMRRYFIDPDLMKAHDEGLIHIHDMDYILQNCHNCDLINLEDMLNNGTVISGTAIDKPHSFSTACNIATQIIAQVASSQYGGQSITLSHLAPFVDVSRKAILKELKEEFSSIDDDKLKEVCHRRLLKEINKGVQIIQYQVVTLMTTNGQAPFITVFMYLNECKDEQTKNDLALIIEEVLKQRIIGVKNEKGVYITPAFPKLIYVLQEDNIEKGSKYYYLTELAAKCTAKRMVPDYISEKIMKEMKEGQVYPSMGAVVPESKVYWKIDGKAYYGPIEKMYHSMIDRYDDLEEECQFGQEGNPNKDIDLKDYNIEIYDNGAGKYVKCLMMNMNLASQFRMYKIRTYNPIDDTDINLVVTHDHPMMKLKSGFDPNLVTIDWNDPKDIDNKCEEIQAEYLKTGDYVFFAKEQRGIRTVEIVDQTIPKPVQILKVPIINNYDFVYDVTTESEHFMVNNLWSHNCRSFLRPWKDENGKYKFYGRFNQGVCTINLIDVACSSGKNIEKFWKIFDERLDMCRRVLMIKHNRLLGTVSDVAPILWQNGALARLNKGEKIDKLLYGGYSTISLGYAGLYECVYYMTGKSHTDPSVKDFALSIMQHMNDMCAKWKKETNIGFSVYGTPLESVTYKFAKCLKKRFGEIPEVTDHNYITNSYHCNVREHINAFDKLTMESEFQRLSPGGAISYVEVPNMQNNIPAILQLLKHIYNTIMYAEINTKSDYCHECGYTGEIVIEENEDHKLIWKCPNCGNTDQTKMNVARRTCGYIGTNFWNQGRTQEIKDRVLHL

SEQ ID NO: 1010 - protein, 1019 aa, unidentified
  REGION 1..1019: note = Category: MG60 effectors
  REGION 1..1019: note = Description: MG60-225 effector
  source 1..1019: note = uncultivated organism sequence
MKIIKRNGEEAIFDYHKIEIAISKANLEAPMKEQLSAETIHNIALNIEKQCQKENHEMNVEDIQDIVEKEIMKAGAFDIAKKYITYRYQHELMRKANSTDSQIMSLLECNNEEVKQENSNKNSTVVSVQRDYMAGEVSKDITKRFLLDEDIVQAHNEGIIHFHDSDYFAQHMHNCLAKETRFITDKGVRSFADFSDGERVTVLTKDGNWKGATVKKYGTQKLYRFTFYNSKKEHTQQVLATENHRWYLADGTVTTALKEGDKLVSAPVLYHQDEDYHSFNENEKLLWCKGFALGDSTVEYLAADTQNNSTRIRLCGEKDSQWLERFSIAGCKVREQVFENGDKSAVVYDYHKEIPAFKNVGEIRAFLNGLYCADGKMAVNNPHSRTYRIQSSNKTVIDFLREYAPVAGLYITAENDLTGENGRPYTILFSFNPDFSFAYTVLSKEFAREDEVWCLEVDDEHNFVLANGIVTGNCDLVNLEDMLQNGTVISGTKIDTPHSFSTACNIATQIIAQVASSQYGGQSISLTHLAPFVDVSRKKIAREMHRMEEETGVYYTEAQFNHIVHERLKDEITRGVQTIQYQVVTLMTTNGQSPFVTVFMYLNEAKDAQTKADLALIIEEVLKQRYQGVKNEAGYWVTPAFPKLIYVLEEDNINEGAPYFYLTELAAKCTARRMVPDYISEKKMKSLKEGNCYPCMGCRSFLTVYRDENGKPKFYGRFNQGVVTINLVDVACSSGGDYDKFWQILDERLKLCYRALMARHRRLLGTPSDVAPILWQNGALARLKKGEVIDKLLYNGYSTISLGYAGLCECVRYMTGKSHTDSEATPFALRVMKTLNEACDKWREKTNIAFSIYGTPMESTTYKFAKCLKRRFGEIEGVTDKNYITNSYHIHVTEKVDAFTKLTFESQFQELSPGGAVSYVEVPNMEGNIPAVIALLKHIYEKIMYAELNTKSDCCQKCGYTGEIRIVTDSENKLVWQCPQCGNTDQSTMNVARRTCGYIGTQFWNQGRTQEIKERVLHL

SEQ ID NO: 1011 - protein, 1020 aa, unidentified
  REGION 1..1020: note = Category: MG60 effectors
  REGION 1..1020: note = Description: MG60-226 effector
  source 1..1020: note = uncultivated organism sequence
MVVIKRNGERVDFDPRKIEVAILKAFAEVRSESDDDIRECAKRIAHEIESTGKDLSVEEIQDMVEKKLMATKYKNVAKAYVEYRYKHKLIREFNTTDKTIKELLCGESDYWNNENSNKNARVVTTQRDYIAGITSTDIARRLLLPADVVEADDEGIIHFHDKDYFAQLSLHNCFDVTTRFITSNGVKAFSDFNDCDEATVLTHTGEWKRARVRKYGKQDLYRIVLKRGHGKEHIVYATANHRWFLQDGSVTTNLHVGDSLMKTPVIANVNLDDADVFEKQLWCKGFAFGDGQYCKAWDGTKIRLCGHKNKYARIFRAAGYTCTSPGNFENGDQEAHIPRYNKNEIPEMTPAETRYFVYGLLCADGDHPTSKGNTKANEFKGIQVTGEEKNFQVYNLLNIAGYYVSGYTDITGKTNYGERSDVTRRYAIQANQSHCNWKVQAIEYAKTDYVWCLNVEDCHSFVLEGGIVTGNCELVNLEDMLQHGTVLNGVMIRKPHRLLTATTIATQIITAVTSSSYGGCTINLSHLAPFVRDSYNAYVKKYRDRGVDEQTTKEWAELDTKKEIADSVQTFNYQCNSMTNTNGQAPFLSVFMYLNDAPEYQKETAMLIEEFLNQRLLGFQNETGHYVTPAFPKLLYVLDENNITEDSEYWYLTELAAKCTAKRMVPDYMSAKIMRRDKIDKNGNGNVYGCMGCRSFLTPYVDKDGKPKYWGRFNQGVVTINLPDIALSSGGDMEKFWKIFDERMALCHKALRCRHERLALATSDVAPILWQNGALARLPKGSPIHPLLHDGYSTLSLGYAGLYECVKYMTGESHSHGKGKEFGLRVMQTLNDFCKKWKEEESIDYSLYGTPIESTTYKFSKCLKKRFGIIEGITDKDYITNSYHISVREKIDPFEKLAIEAEYQKLSPGGAISYVECADLTQNPTAVLEVMRFIYDNIMYAELNTKSDYCQVCGYDGEIQIIDENGKLSWRCPNCGNEDQTKMNVARRTCGYIGTQFWNQGRTQEIKERYVHIDNHEVGE

SEQ ID NO: 1012 - protein, 1093 aa, unidentified
  REGION 1..1093: note = Category: MG60 effectors
  REGION 1..1093: note = Description: MG60-227 effector
  source 1..1093: note = uncultivated organism sequence
MMNQEKSIESNIIREDERVILKKGAYEDGEFTETLPADLTDIDDWAFLDARFGGRETIEIPPCVKRIGGAAFAGCDLKYLVIPPSVESIGKDGEEGVFSGSQLENVTLSAQIEELPVWAFCECGKLRRVELPKHLRKIGMSAFYYCYSMEEIRFPEMLERIEEGAFSSCHSLQKIDLPKYLREIGDEAFEHCSSLEEIHLSESLERIGNEAFYSCSSLKEIHLPESLKHIGERAFFRCEQLRRVVFPDHEVLLGKGIFEYCSSELEICNVHVGDRSHCVEGWAYHDMPIKDVTISADVKEIENGAFSLCSRLEAVSFEEPSQLEKIGFSAFCGCKNLNHIQLPDSIRILDDSSFSECESIEQIDLPRGLLRLGNKVFARCKRLKQIIIPQGVQEIGHEMFSLCGSLERVQLPDSVAVISDRMFAYCTSLPEIDLPGNVIEIGNEAFHGCAKLNICIPRSVTKIGFRAFAATALKEVVIPTGVKEIASQTFENCEMLRKVTLPEGLEKIGTRAFASCSALEEIEIPDSVTHIDALAFQNCTALRSIVLSEHTKVEQGPEINSYDVPIDEYRSGVMWTQTEDEDVAAYQELLRRVVSIRPKAWNEEREENKEEKIAFNQEQKRAVEAIQGPVMIISCAGAGKTTVLLERARQMVRMGIAPEKILITTFSRAAAYDMRERFERNADICGVKFSTIHGLCRIILTSAYFYEADVVLSDEEKIRFFMECHSKKNEQDGFVGFYMDISGRISRYIIGHYEQSLPEIENKPELSKLEQDDTFLHLYHAYQAFKKARKKLDYDDLLVETHKCLASNEAIRNHWQGMLDYIMIDEYQDTSRLQAEIFFLLAGKKRNICVVGDDDQSIYAFRGTQKQVFDLFMKKYPDAQKRFLGMNYRSREYIIRAADCLIRHNRNRLEKNLEADRKEPGNILLKKASGRENQAYIVVECIKRLLQSGSNPSDIAILYRIRNESSMVVRLLEEAGIAYDKKESVEEMIQRIVAGGEKHDLQPHEDGHGVVLSTFHAAKGLEWKYVFIISANQGITPLKRLTESVDIEEERRLFYVAVTRAKDTLAILYIENNMASEDNSMQKPSMFLSEMGL

SEQ ID NO: 1013 - protein, 1267 aa, unidentified
  REGION 1..1267: note = Category: MG60 effectors
  REGION 1..1267: note = Description: MG60-228 effector
  source 1..1267: note = uncultivated organism sequence
MNEQISHLTSYIEALKKISSEAEIRGNFLNLLRKTLIKEDNFEWRTVEQSVHQKGLFVGRIDLSVGRVVFEFKRSLKDKKKRREGIQQLKTYLSSDEFKDAPFGILTDGKTFEVYKLENGELYPVDNFSLPDFEHLPDLSEEEVKALKKFLYKLDAYLLGNLKVPLTSSTIVRFFGYNSQVFAKVYSALREAYERVKDLKEVSLKFNQWKRYMELVYGKNLQDELFFRHTYLSVLIKILSGKLLEVPYDSIWELLSGEVFERFGIKNYVDKDFFGWIFEEEIKNDLDELFEEIDRLLEFKFEMGNLSEELEEDLLKELYQNIVTRGEREILGEYYTPDWLVERILGEVLKDKDIRTLKVLDPACGSGSFLFFAIKRKREENVPLREILSSVIGLDINPLAVLIARSNYLLALGKEFLKNRHEEIFLPVYTADALRVYVSKHTDLYGSKISVELNGFKVEIPIPPKSSDREQDLKITDLYIERIVEWAKEQVPKKEERFVEDFWRWLERNYPEEEKIISPYFAGYSRSFERQILELVRKKGDDIWTFVLKNIYKPLFLKEKFDLIVGNPPWLVYNSMHRGLQKFFEEFLKAYRIKYGGHLKTHLELATAFLVLTAGFYLKPEGEIAFVMPHSLLNGDQNSWFRKSYHSLMAQERNFPTLSLDILKIFDLKEVSPLFNVPSVVIFAKKKNEGFKKEIPATVFKGKLPKRNARFGEAQKYLTEIDKTLYFVETGKVNYWVYDPQRLGVSPYKNHFREGATIVPRSFWFVEIEKSPYGFSEKSIPIRSKKLGDEKVEFELRGNVPKRFFFKTLLSKRLYPFGFTEFDLVVLPLKITSKEEEELKELKEEIDTVYRWLREYKATGKDYEDLFAKTVNLASSITEFVQNPEYTEKSKKELLDYLLRFKELLTDEATYFCSNPDLPSYYWWESENADFSKPYEVLKHVKSATKPEKFYKLLDYYDFRNKVSIGECPNCGEILDRKPEKVFKCPNCGFEVNLSSAGDILKKWVNLSREVPKPFKDWLLEAQELWEKHRGEKADKDNIIDWLNYRNKLTNQPVEGGYLVLYTTSGSNLAALWIKNSPKFVIDTKTFFGLFETLEEAIYVSTLLNSPLISHKVKEYQSKGLFGARDFHKVIFNLPIPPYDPADPLHQKLVIFGKKARKKAMHPVIRNWLKGVHPNRIRTLGRWVVENELKEIDKLVAQLLELDVNLSFPKKDFRFFKTEKEAKKWIKENKERIDNEKVYPAKVLAVKYEIPFSKIAEFEVGVEFESV

SEQ ID NO: 1014 - protein, 755 aa, unidentified
  REGION 1..755: note = Category: MG60 effectors
  REGION 1..755: note = Description: MG60-229 effector
  source 1..755: note = uncultivated organism sequence
MHELIEKREPKEEKPMKIIKRNGAEVVFDIDKIIMAVTKANDAVDEKVRMTPLQIERISQSVQIACEEMGRSPSVEEIQDLVEKAIMAHGAFEVAKEYITYRYTRSLLRQSNTTDDRILSLIECNNEEVKQENANKNPTINAVQRDYMAGEVSKDITSRILLPKEVVDAHEAGIIHFHDADYYAQHMHNCDLVNLEDMLQNGTVISGTLIEKPHSFSTACNIATQIIAQVASNQYGGQSISLTHLAPFVQVSREKIRKTVEREMAAFGVAPAEETISKVVEDRLREEVRRGVQTIQYQVVTLMTTNGQAPFITVFMYLNEAKSEQEKKDLAMIIEETLRQRYEGVKNEKGVWITPAFPKLIYVLEEDNVREGTPYWYLTRLAAQCTAKRMVPDYISEKKMREYKLSKGETPGHGDVYTCMGCRSFLTPDRSGNGWDNVARAGNYEPGKPKYYGRFNQGVVTINLVDVALSSGRDMTKFWEVFEDRLELCHRALRCRHERLKGTLSDAAPILWQYGALARLPKGEPIDKLLYGGYSTISLGYAGLYECVKYMTGKSHTDDEAKPFALSVMQKMNDKCLQWKTAENIDYSLYGTPLESTTYKFAKCLQKRFGLIPGITDKSYITNSYHVHVTEPIDAFTKLRFEAEFQQLSPGGAISYVEVPNMQQNLDAVLEVMKFIYDHIMYAELNTKSDYCQVCGYDGEIEIKEDDGKLIWVCPQCGNTDQNKMNVARRTCGYIGTQFWNQGRTQEIKDRVLHL

SEQ ID NO: 1015 - protein, 756 aa, unidentified
  REGION 1..756: note = Category: MG60 effectors
  REGION 1..756: note = Description: MG60-230 effector
  source 1..756: note = uncultivated organism sequence
MQQSIFDVCVIIGLWFKKKRRSEVFTMKVIKRDGHIVDYSPDKIEEAVSKANLEVSEEDRVSDIQIRNIIKYIEGLHKKRMLVEDIQDVIEKRLMTLGKYELAKEYITYRYTRELVRRSNTTDKSIKELIDGESEYWNTENSNKNAKVVTTQRDYLAGITSTDITRRFLLPEDIVTAHDQGVIHFHDADYFAQNALHNCDLINLDDMLQNGTNINGVMIEKPHRFLTAMTIATQLITAVSSSQYGGCTITLTHLAPFVRSSKEFYLKKYKDRKLTKAQVEKFAAEDLKKEITDGVQTFQYQINSMTTTNGQAPFLSVCMYLGETEEYKDELAMIIEEVLKQRMEGMKNEKGVYITPAFPKLLYVLEEENINPKGKYYYLTELAARCTAKRMVPDYISEKVMKENKINSLGNGECFPCMGCRSFLTPDRMFNVGNISKALNYVENKGKYYGRFNQGVVTINLPDVALTSGKDMELFWKVFDDRLELCHRALQIRHKRLSKVTSDVAPILWQHGALARLEKGESIHELLHHGYSTISLGYAGLYECVKYMTGHSHTDNGKGHEFALEVMQHMNDKCNEWKEAEDIDYSLYGTPIESTTYKFAKCLRDRFGKIKGITDRDYITNSYHVPVFEEIDAFTKLKLESEFQRLSPGGAISYIETPNLENNIDVVMEVINFIYENIMYAELNTKSDYCQKCGYNGEILLDDDLEWYCPECGNRDHDTLNVARRTCGYIGTNFWNKGRTQEIKERVVHIDNKDDE

SEQ ID NO: 1016 - protein, 768 aa, unidentified
  REGION 1..768: note = Category: MG60 effectors
  REGION 1..768: note = Description: MG60-231 effector
  source 1..768: note = uncultivated organism sequence
MFCSCKKNLRVVIYIYDATKTYDCAKKLIVYKSIIKGAEVMKIIKRNGAEETFDRQKIKDAIAKANNETDGTPELTDRQIDYISLVIEDHCNEMNRALSVEEIQELVETHIILQGAPETAKRYIRYRFTRNLARASNTTDNQILSLIECNNEEVKQENSNKNPTVNSVQRDYMAGEVSKDLTKRILLPEDIVKAHEEGLIHFHDADYFAQHMHNCDLVNLEDMLQNGTVISGTMIEKPHSFSTACNIATQIIAQVASNQYGGQSISLAHLAPFVQISREKITRQVRAEMEEFGIDADDEQVKSLVEKRVRDEIKRGVQTIQYQVVTLLTTNGQAPFVTVFMYLNEAKNEQEKKDLAIIIEEVLKQRIKGTKNEVGVWVTPAFPKLIYVLEEDNITEDSRFWYLTKLAAECTAKRMVPDYISEKIMLKLKIDKNGNGNCYTCMGCRSFLTPYIDENGKPKYYGRFNQGVVTINLVDVACTAARDGNKSEEKFWQVLDERLELCHRALQCRHERLEGTLSDAAPILWQYGALARLKKGEPIDKLLHGGYSTLSLGYAGLWECVYEITGKKLTEKEGEEFGLRVMQRLNDACAEWKAAENIDYSIYGTPLESTTYKFAKCLQNRFGIIKGVTDRNYITNSYHIHVTEKIDAFSKLELESKFQKLSPGGAISYVEVPNMQQNIPAVLEVMKFIYNNIMYAELNTKSDYCQVCGYDGEIQIVEEDGKLVWRCPNCGNEDQSKMNVARRTCGYIGSQFWNQGRTQEIKERVLHL

SEQ ID NO: 1017 - protein, 768 aa, unidentified
  REGION 1..768: note = Category: MG60 effectors
  REGION 1..768: note = Description: MG60-232 effector
  source 1..768: note = uncultivated organism sequence
MFCSCKKNLCVVIYIYNATKTYGCAKKLIVYKSIIKGAEVMKIIKRNGAEETFDRQKIKDAIAKANNETDGTPELTDRQIDYISLVIEDHCNEMNRALSVEEIQELVETHIILQGAPETAKRYIRYRFTRNLARASNTTDNQILSLIECNNEEVKQENSNKNPTVNSVQRDYMAGEVSKDLTKRILLPEDIVKAHEEGLIHFHDADYFAQHMHNCDLVNLEDMLQNGTVISGTMIEKPHSFSTACNIATQIIAQVASNQYGGQSISLAHLAPFVQISREKITRQVRAEMEEFGIDADDEQVKSLVEKRVRDEIKRGVQTIQYQVVTLLTTNGQAPFVTVFMYLNEAKNEQEKKDLAIIIEEVLKQRIKGTKNEVGVWVTPAFPKLIYVLEEDNITEDSRFWYLTKLAAECTAKRMVPDYISEKIMLKLKIDKNGNGNCYTCMGCRSFLTPYVDENGKPKYYGRFNQGVVTINLVDVACTAARDGSKSEEKFWQVLDERLELCHRALQCRHERLEGTLSDAAPILWQYGALARLKKGEPIDKLLHGGYSTLSLGYAGLWECVYEITGKKLTEKEGEEFGLRVMQRLNDACAEWKAAENIDYSIYGTPLESTTYKFAKCLQNRFGIIKGVTDRNYITNSYHIHVTEKIDAFSKLELESKFQKLSPGGAISYVEVPNMQQNIPAVLEVMKFIYNNIMYAELNTKSDYCQVCGYDGEIQIVEEDGKLVWRCPNCGNEDQSKMNVARRTCGYIGSQFWNQGRTQEIKERVLHL

SEQ ID NO: 1018 - protein, 757 aa, unidentified
  REGION 1..757: note = Category: MG60 effectors
  REGION 1..757: note = Description: MG60-233 effector
  source 1..757: note = uncultivated organism sequence
MKVVKRDGTIVDFDEERIRTAISKANNEVEKDEVATEKEIEEIVDYVKHLKKKRILVEDIQDLIENKLMEFKRFSLAREYITYRYNRALIRKANTTDQSIKELIDGTSEYWNSENSNKNAKIVTTQRDYLAGITSTDITRRLLLTPEIVKAHDEGIIHFHDADYFAQNALNNCCLINLNDMLQNGTVINGMMIEKPHRFITACTIATQIILGVSSSQYGGCTVTLTHLAPFVRDSYNRHLKRYEDRNLPHKKAKEYAMQDTKKEIADGVQTFNYQVNSMTNTNGQAPFLSVNMYLGETEEYKEELAMIIEEFLNQRILGFKNEKGVYITPAFPKLLYVLEEDNIHKDSKYWYLTELAAKCTAKRMVPDYISEKMMKQLKINQYGEGDCYPCMGCRSFLTPDRVKGNLSKAKDYVEGKGKYYGRFNQGVVTINLPDVALSSKQNMDEFWKIFDERLELCHKALQLRYKRLSMITSDAAPLLWQHGAFARLGKGEKILPLLHNGYSTLSLGYAGLYECVKYMTGKSHTDGNEGENFGLEVMQHMNDKCAEWKAAEDIDYSLYGSPIESTTYKFAKCLKNRFGTVKGITDRNYITNSYHVPVFEEIDAFSKLKLESKFQRLSPGGAISYVETPNLQNNIEAVEEIIEFIYNNIMYAEINTKSDYCQKCGFDGEILTDENLEWYCPNCGNRDHDTLNVARRTCGYIGTNFWNKGRTQEIKERVLHVDNKDYEAPHAHCEHENCECEEKVKEDVKVGVQIQF

SEQ ID NO: 1019 - protein, 804 aa, unidentified
  REGION 1..804: note = Category: MG60 effectors
  REGION 1..804: note = Description: MG60-234 effector
  source 1..804: note = uncultivated organism sequence
MNQGSPLVSIIVRTKDRPHLLKEALESIEVQTYRPLEVVLVNDGGCALPKEVYEALLKDIPLQWIDLEENQGRARAGNKGIEAARGDYIGFLDDDDRFLPHHVELLVACLEGWDYKVCYSDAEICQRVFDPSQKVYEIKDCRPFASRDFDLLDLLLENFIPLPCILFTRRCLLEAGGFDPTFELYEDWDLLLRIGNLHPFYHVPEVTVRYIQWSQKLQIAQGEYHQGLQQISYGRIIEKHRQLLTPEMAKAILRVFKDLERTQARLNQVTDECKMLEKALREEREKEKHLTGRIRQLSERIESLTHEQRKLQESHQEVLKEKRSLEHQLALIRGSRAWRFIQRYGRLRNALRSSLKPFKGKRIEHLQKGLRVVKTEGVKGLQRRVSQYVTLPSVKRGIYPYVPVDGKEVSLGRIAEDLPLSVTVIIPTRNAGPEFGRTLKKIRNQEGLKDLEILVIDSGSHDKTLDMAREAGARVLEISPEEFHHAGTRNLAAQHARGDVLVFTVQDATPAGDDWLYRLVQPIQQGKADAVSARQIPRTDADLFARWATWGYFEYLGYAEDTVRQGVDARRMDIHQRRRLFHLDSVCLAIPKGLFERYPFQRAYAEDLDLGKRLFERGHALLAQVSNAVIHSHNRPADYFFLREYVNVKSLQAILGQCPEPRPLKEILSTLAWAYDQFCAEVGPWMEAMGKEHKPPSEAMGQLMARLREAFKRGERRVSPGERDPLLYRWLNEDGECQAHVLKVLEGRFLGVLGSLREYLSSHSDWGFPLPEVAVALHKCFAVAAGGAVAEMGGELPSKLIKGI

SEQ ID NO: 1020 - protein, 763 aa, unidentified
  REGION 1..763: note = Category: MG60 effectors
  REGION 1..763: note = Description: MG60-235 effector
  source 1..763: note = uncultivated organism sequence
MMRVVKRDGKIVDFDESRIKMAIGKANNEVDESQRATEEEIEKIVEYVKKIKKDRILVEDIQDIIENKLMEYKRFELAKAYITYRYSRALVRKANTTDQTVKELVEGNSEYWNNENSNKNARVVTTQRDYLAGITSTDITRRLLLPPEIVKAHDEGIIHFHDADYFAQNALTNCCLINLNDMLQNGTVINGVMIEKPHRFVTACTIATQIILGVSSSQYGGCTVTLTHLAPFVRDSYNRSLKKYQDRNLPEEECKKFAMQDTKKEIADGVQTFNYQVNSMTNTNGQAPFLSVNMYLGETDEYKDELAMIIEEFLKQRMLGFKNEKGVYITPAFPKLLYVLEEDNIHKDSKYWYLTELAAKCTAKRMVPDYISEKMMKKLKINQYGEGDCYPCMGCRSFLTPDRVKGNVAKAKDYVEGKGKYYGRFNQGVVTINLPDVALSSKKDEKEFWKIFDERLELCHEALQLRHKRLSGITSDVAPLLWQYGAYARLNKGEKLDKLLHGGYSTLSLGYAGLYECVKYMTGDSHTDGGKGEKFALEVMQHMNDKCAEWKKAEDIDYSLYGTPIESTTYKFAKCLKKRFGTVEGITDRNYITNSYHVPVFEEIDAFSKLKLESEFQRLSPGGAISYVETPNLQNNIEVVEQIIEFIYNNIMYAELNTKSDYCQKCGYTGEILIDDNLEWYCPNCGNRDHRTLNVARRTCGYIGTNFWNKGRTQEIKERVLHIDNKDFDAEKCTKCDENVEKPEKKTRAKVSAKEKAMASVHA

SEQ ID NO: 1021 - protein, 781 aa, unidentified
  REGION 1..781: note = Category: MG60 effectors
  REGION 1..781: note = Description: MG60-236 effector
  source 1..781: note = uncultivated organism sequence
MIISGTRYCVFALHKQQYLVWFVKYRKINANYVEIIEVPYRGVFNMENRDQMSEIHVKTNVIKRNGQEVSFDISKIINAIGKANKEVESIHQMNEFQIRAVADMIAKRIASFPHAVNVEDIQDMVEKGIMEMRGYEVAQKYVRYRYKREISRKSNTTDDGILSLIDLSNEEVKQENSNKNPVINSTQRDYMAGEVSKDLTKRLLLPEDIVKAHEEGIIHFHDADYFAQREHNCDLINLEDMLQNGTVISQTLIEKPHSFFTACNVTTQIVAQVASNQYGGQSFTLAHLAPFVDVSRKKITKEVMEERKETGESMDPGIIEKIVERRLKEEIKSGIQTIQYQLITLMTCNGQAPFVTMFMYLDEVPDGQTRKDLAMIIEEVLRQRMQGVKNEKGVWITPAFPKLIYVLDEDNIHDDSPYYYLTKLAAECTAKRMVPDYISAKIMKQMKNGDVYPCMGCRSFLTPDTEGLGPKGQHKYYGRFNQGVVTINLVDVACSSGGDMDKFWKILEDRLELCHRALRCRHERLLGTVSDVAPILWQYGALARLKKGETIDKLLFNNYSTISLGYAGLYEMCVRMLGVSHTTEEGRKFALAVMQKLNDKCAEWRKKENISYSVYGTPMESTTYKFAKCLQKRFGIIPGVTDKNYITNSYHVHVTEKIDAFHKLKFESEFQKLSPGGAISYIEVPNMQTNIPAVLTVMKYIYENIMYAELNTKSDYCMVCGYDGEIKIVEDENGKLVWECPNCGNRDQHKMSVARRTCGYIGTQFWNQGRTQEIKDRVLHL

SEQ ID NO: 1022 - protein, 772 aa, unidentified
  REGION 1..772: note = Category: MG60 effectors
  REGION 1..772: note = Description: MG60-237 effector
  source 1..772: note = uncultivated organism sequence
MLQGSFLLYMESRILNELKDIPEQKLVVGPIVQQLIQGGWKFEQLIFGKNEWKIPKTPSEASKREKGHSFDYFPVDIAVFDTPENCGDYRHILFIIECKQPTVEVGLQQLETYLSLEPHAKLGIWANNPESASEALYVYKNAKGLSLPQKGTIKQLPSISSSLSPNSEALCFDNMVIPSKDILYHAFSDLLDKVVAQDGNVTRREEQLDQLCNLVLLKLDSDKQGKIDTTSEVYFRPFATDSATASFIKEKFASFIDVYPDIFVSKSDQELRFDDTTIHEVVERLCRFNLIDISADTVSIAFQVLRSAALKQEEGQYFTPKQVIQAAIKLMDVSLSDIIIDPACGTGGFLIQSLIEMKDRYPNQEKEISRWAQLHIYGIDKDAIGIKLTKAIMQILNDGSAHCVRGDSVLTHTWKNKYQHLLSNQFKNGRFTKIFTNPPFGTNLKIKYSEAKKSGLSLLEYVETGKDIELGLLMFNRCYDLLKEGGRLCIVLPETYFFSPSYKYVRDWAFTRMKPICVANVPMDAFQGFCRAKTNLYIFEKLPSDFSGYTGSEEVLFLNPSTCGIYKNGSDRFVVDAQGKRTDVIDNKLLDCSIQVANGDLSNAFSVPLQKVIASDVLVPQYYDLSLQSPFETLTDKLNVQSISIGDLIDSGIISLFNGHGSPSNDLRNGCIPYVKVSDIRNLRINVNPTNLIPLELATKFWKSDHSNLKEWDLISPSRASSNIGEFAILLPGEENIVLTKEVFIIRVNPNSLGIDAFYLLWALSLMQTRKQ

SEQ ID NO: 1023 - protein, 769 aa, unidentified
  REGION 1..769: note = Category: MG60 effectors
  REGION 1..769: note = Description: MG60-238 effector
  source 1..769: note = uncultivated organism sequence
MKVIKRDGTIVEYDREKIRIAIEKANKEVSRKEKATDSEIEEIMSYIEDLKKGRILVEDIQDIIEEKLMEIKRYELAKKYITYRYTRALVRKANTTDQSIKELIEGESEYWNNENANKNARVVTTQRDYLAGITSTDITRRFLLPEDVVKAHDEGIIHFHDADYFAQNALTNCELINLEDMLQNGTIMNGVMIEKPHRFITACTIATQIILAVTSSTYGGATVSLAHLAPFVRSSYEKYYKKYKDNGLSKEQCEKFAKEDTKKEVADGVQTFNYQVNSMTNTNGQAPFLSVCMYLGETDEYKEELAMIIEEFLNQRILGFKNEKGVYITPAFPKLLYVLEEDNIHENSKYWYLTELAAKCTAKRMVPDYISEKKMKELKVDKNGDGQCYPCMGCRSFLTPYIDPVTNKPKYYGRFNQGVVTINLVDVALSSGKDLKKFWKIYDERLELCHKALQARHERLAKATSDIAPILWQHGAFARLPKGASIHPLLHGGYSTISLGYAGLYECVKYMTGKSHTDNGDGKDFAIEVMKKLNEKCQEWKEAEDIDYSVYGTPIESTTYKFAKCLQKRFGKIKGITDKNYITNSYHVPVFEEIDAFSKLKLESEFQRLSPGGAISYVETPNLQNNLEVVLQIMKFIYDNIMYAELNTKSDYCQKCGYTGEILIDDNLEWYCPNCGNRDHNTLNVARRTCGYIGSNFWNKGRTQEIKERVLHIDNKDDDCDCDECNCDHANTDTSKEEKSEEKQMNFMDYDVEEEITKSKKRMKQPAMV

SEQ ID NO: 1024 - protein, 768 aa, unidentified
  REGION 1..768: note = Category: MG60 effectors
  REGION 1..768: note = Description: MG60-239 effector
  source 1..768: note = uncultivated organism sequence
MFCSCKKNLCVVIYIYNATKTYDCAKKLIVYKSIIKGAEVMKIIKRNGAEETFDRQKIKDAIAKANNETDGTPELTDRQIDYISLVIEDHCNEMNRALSVEEIQELVETHIILQGAPETAKRYIRYRFTRNLARASNTTDNQILSLIECNNEEVKQENSNKNPTVNSVQRDYMAGEVSKDLTKRILLPEDIVKAHEEGLIHFHDADYFAQHMHNCDLVNLEDMLQNGTVISGTMIEKPHSFSTACNIATQIIAQVASNQYGGQSISLAHLAPFVQISREKITRQVRAEMEEFGIDADDEQVKSLVEKRVRDEIKRGVQTIQYQVVTLLTTNGQAPFVTVFMYLNEAKNEQEKKDLAIIIEEVLKQRIKGTKNEVGVWVTPAFPKLIYVLEEDNITEDSRFWCLTKLAAECTAKRMVPDYISEKIMLKLKIDKNGNGNCYTCMGCRSFLTPYVDENGKPKYYGRFNQGVVTINLVDVACTAARDGSKSEEKFWQVLDERLELCHRALQCRHERLEGTLSDAAPILWQYGALARLKKGEPIDKLLHGGYSTLSLGYAGLWECVYEITGKKLTEKEGEEFGLRVMQRLNDACAEWKAAENIDYSIYGTPLESTTYKFAKCLQNRFGIIKGVTDRNYITNSYHIHVTEKIDAFSKLELESKFQKLSPGGAISYVEVPNMQQNIPAVLEVMKFIYNNIMYAELNTKSDYCQVCGYDGEIQIVEEDGKLVWRCPNCGNEDQSKMNVARRTCGYIGSQFWNQGRTQEIKERVLHL

SEQ ID NO: 1025 - protein, 768 aa, unidentified
  REGION 1..768: note = Category: MG60 effectors
  REGION 1..768: note = Description: MG60-240 effector
  source 1..768: note = uncultivated organism sequence
MFCSCKKKLCVVIYIYNATKTYDCAKKLIVYKSIIKGAEVMKIIKRNGAEETFDRQKIKDAIAKANNETDGTPELTDRQIDYISLVIEDHCNEMNRALSVEEIQELVETHIILQGAPETAKRYIRYRFTRNLARASNTTDNQILSLIECNNEEVKQENSNKNPTVNSVQRDYMAGEVSKDLTKRILLPEDIVKAHEEGLIHFHDADYFAQHMHNCDLVNLEDMLQNGTVISGTMIEKPHSFSTACNIATQIIAQVASNQYGGQSISLAHLAPFVQISREKITRQVRAEMEEFGIDADDEQVKSLVEKRVRDEIKRGVQTIQYQVVTLLTTNGQAPFVTVFMYLNEAKNEQEKKDLAIIIEEVLKQRIKGTKNEVGVWVTPAFPKLIYVLEEDNITEDSRFWYLTKLAAECTAKRMVPDYISEKIMLKLKVDKNGNGNCYTCMGCRSFLTPYVDENGKPKYYGRFNQGVVTINLVDVACTAARDGNKSEEKFWQVLDERLELCHRALQCRHERLEGTLSDAAPILWQYGALARLKKGEPIDKLLHGGYSTLSLGYAGLWECVYEITGKKLTEKEGEEFGLRVMQRLNDACAEWKAAENIDYSIYGTPLESTTYKFAKCLQNRFGIIKGVTDRNYITNSYHIHVTEKIDAFSKLELESKFQKLSPGGAISYVEVPNMQQNIPAVLEVMKFIYNNIMYAELNTKSDYCQVCGYDGEIQIVEEDGKLVWRCPNCGNEDQSKMNVARRTCGYIGSQFWNQGRTQEIKERVLHL

SEQ ID NO: 1026 - protein, 778 aa, unidentified
  REGION 1..778: note = Category: MG60 effectors
  REGION 1..778: note = Description: MG60-241 effector
  source 1..778: note = uncultivated organism sequence
MLHCLKKCAAGNGWDRSERIENSEQHRETGKAQGENTMKIIKRNGAEETFRIEKIIVAITKANNAAEEAERLTPLQIDRIAQAVEIRCEEMNRSLSVEEIQDLVEDQIMAHGAFEVAKRYITYRYTRSLVRQSNTTDDRILSLIECNNEEVKQENANKNPTINAVQRDYMAGEVSKDITRRILLPRDIVEAHEAGIIHFHDADYYAQHMHNCDLVNLEDMLQNGTVISGTLIEKPHSFSTACNIATQIIAQIASNQYGGQSISLTHLAPFVDVSRRKIRESVVREIRELGAEAAEERISKIVEERLREEIKRGVQTIQYQVVTLMTTNGQAPFITVFMYLGEARNPQEKHDLAIIIEETLRQRYQGVKNEKGVWITPAFPKLIYVLEEDNIHEDSKYFYLTRLAAECTARRMVPDYISEKKMRELKLSKGETPGNGDVYTCMGCRSFLTPDSSGNGWDNVANAGNYEPGKPKYYGRFNQGVVTLNLVDVALSSGKEMDKFWKIFDERLDLCYRALMCRHERLKGTLSDAAPILWQYGALARLPKGEPIDKLLYNGYSTISLGYAGLYECVKYMTGKSHTDPSATPFALDVMRYLNAACAKWRAETHIDFSLYGTPLESTTYKFAKCLQKRFGIVPGVTDKSYITNSYHIHVTEKINAFDKLAFESQFQALSPGGAISYVEVPDMQNNIDAVLEVMKFIYDNIMYAELNTKSDYCQVCGYDGEIEVLEDTDGKLVWTCPNCGNTDQSKMNVARRTCGYIGTQFWNQGRTQEIKERVLHL

SEQ ID NO: 1027 - protein, 763 aa, unidentified
  REGION 1..763: note = Category: MG60 effectors
  REGION 1..763: note = Description: MG60-242 effector
  source 1..763: note = uncultivated organism sequence
MYIQPIITVSDTTHKFNFVKLFFQKNKNSLRDVRRGNGMKIIKRNGEEVVFDLKKIITAISKANNEVPPSEQLAGSTINSIAENIEKQCAAENHEMNVEAIQDLVEKAIMKAGAFDIAKKYITYRYQHQLMRRANSTDSQILSLLECNNEEVKQENSNKNSTVVSVQRDYMAGEVSKDITKRFLLDEDIVKAHDEGLIHFHDADYFAQHMHNCDLVNLEDMLQNGTVISGTKIDTPHSFSTACNIATQIIAQVASSQYGGQSISLAHLAPFVEVSRKKFQRETMRVEEQTGVKFTDEQFKKIVEMRIRDEITRGVQTIQYQVVTLMTTNGQSPFITVFMYLNEAKNEQEKADLAMIIEEMLKQRYQGVKNEKGFWVTPAFPKLIYVLEPDNIEPGSKYYSLTELAAKCTARRLVPDYISEKKMLELKVDANGKGNCYPCMGCRSFLTPYLDEHGKPKYYGRFNQGVVTINLVDVACSSNGDYKSFWEIFDERLELCHKALMRRHQRLLGTPSDVAPILWQHGALARLEKGEKIDKLLFGGYSTISLGYAGLCECVRYMTGKPHTDPSATPFAIEIMKHLNEKCAEWKAASNIAFSLYGTPLESTTYKFAKCLKKRFGEIPGVTDKNYITNSYHVHVTEQMDAFTKLSFESQFQELSPGGAVSYVEVPNMENNIPAVMTLLKHIYENIMYAELNTKSDCCQKCGYTGEIQIVTDSDNKLVWQCPNCGNKDQATMNVARRTCGYIGTQYWNQGRTQEIKERVLHL

SEQ ID NO: 1028 - protein, 768 aa, unidentified
  REGION 1..768: note = Category: MG60 effectors
  REGION 1..768: note = Description: MG60-243 effector
  source 1..768: note = uncultivated organism sequence
MFCSCKKNLCVVIYIYNATKTYDCAKKLIVYKSIIKGAEVMKIIKRNGAEETFDRQKIKDAIAKANNETDGTPELTDRQIDYISLVIEDHCNEMNRALSVEEIQELVETHIILQGAPETAKRYIRYRFTRNLARASNTTDNQILSLIECNNEEVKQENSNKNPTVNSVQRDYMAGEVSKDLTKRILLPEDIVKAHEEGLIHFHDADYFAQHMHNCDLVNLEDMLQNGTVISGTMIEKPHSFSTACNIATQIIAQVASNQYGGQSISLAHLAPFVQISREKITRQVRAEMEEFGIDADDEQVKSLVEKRVRDEIKRGVQTIQYQVVTLLTTNGQAPFVTVFMYLNEAKNEQEKKDLAIIIEEVLKQRIKGTKNEVGVWVTPAFPKLIYVLEEDNITEDSRFWYLTKLAAECTAKRMVPDYISEKIMLKLKIDKNGNGNCYTCMGCRSFLTPYVDENGKPKYYGRFNQGVVTINLVDVACTAARDGSKSEEKFWQVLDERLELCHRALQCRHERLEGTLSDAAPILWQYGALARLKKGEPIDKLLHGGYSTLSLGYAGLWECVYEITGKKLTEKEGEEFGLRVMQRLNDACAEWKAAENIDYSIYGTPLESTTYKFAKCLQNRFGIIKGVTDRNYITNSYHIHVTEKIDAFRKLELESKFQKLSPGGAISYVEVPNMQQNIPAVLEVMKFIYNNIMYAELNTKSDYCQVCGYDGEIQIVEEDGKLVWRCPNCGNEDQSKMNVARRTCGYIGSQFWNQGRTQEIKERVLHL

SEQ ID NO: 1029 - protein, 768 aa, unidentified
  REGION 1..768: note = Category: MG60 effectors
  REGION 1..768: note = Description: MG60-244 effector
  source 1..768: note = uncultivated organism sequence
MFCSCKKKLCVVIYIYNATKTYDCAKKLIVYKSIIKGAEVMKIIKRNGAEETFDRQKIKDAIAKANNETDGTPELTDRQIDYISLVIEDHCNEMNRALSVEEIQELVETHIILQGAPETAKRYIRYRFTRNLARASNTTDNQILSLIECNNEEVKQENSNKNPTVNSVQRDYMAGEVSKDLTKRILLPEDIVKAHEEGLIHFHDADYFAQHMHNCDLVNLEDMLQNGTVISGTMIEKPHSFSTACNIATQIIAQVASNQYGGQSISLAHLAPFVQISREKITRQVRAEMEEFGIAADDEQVKSLVEKRVRDEIKRGVQTIQYQVVTLLTTNGQAPFVTVFMYLNEAKNEQEKKDLAIIIEEVLKQRIKGTKNEVGVWVTPAFPKLIYVLEEDNITEDSRFWYLTKLAAECTAKRMVPDYISEKIMLKLKVDKNGNGNCYTCMGCRSFLTPYVDENGKPKYYGRFNQGVVTINLVDVACTAARDGSKSEEKFWQVLDERLELCHRALQCRHERLEGTLSDAAPILWQYGALARLKKGEPIDKLLHGGYSTLSLGYAGLWECVYEITGKKLTEKEGEEFGLRVMQRLNDACTEWKAAENIDYSIYGTPLESTTYKFAKCLQNRFGIIKGVTDRNYITNSYHIHVTEKIDAFSKLELESKFQKLSPGGAISYVEVPNMQQNIPAVLEVMKFIYNNIMYAELNTKSDYCQVCGYDGEIQIVEEDGKLVWRCPNCGNEDQSKMNVARRTCGYIGSQFWNQGRTQEIKERVLHL

SEQ ID NO: 1030 - protein, 927 aa, unidentified
  REGION 1..927: note = Category: MG60 effectors
  REGION 1..927: note = Description: MG60-245 effector
  source 1..927: note = uncultivated organism sequence
MTKELSGVRVIELKTDLRKDQFWDRYERCFKTYHALYNEVPCWGLDWVEQKTQNQTSRELGCERVDLTAQRKALYERTDRTISYEQFSNCLKALWLGLLNCQQGNHMYTKLFEGAIQTDQMTAEDWAVLTEYVADPKSHNSQFLFRVSNTLKHIGFFSRPPFTATLFAPERKAITKDVMSDLKGWIEMKRMTEESYAAEEVQIQQMKAEVPVRIRQSLLRFFDTCIGLNLIGHFDERVHHYLRDCIIPALQQRTIPTEHFYLKSNRKDVGQKHIDFSLDIKFYELLAEMPELWNTLETSEDDLIPKPLILKHLHLLEAIMSHRAHRKTAAYAFVGEADYHRFYYLLGGNYTKHLISATGSELPDRVIWDNDKDVLMRNGRKVERLYVKVGDRKENFNFEVYTIAMNTKGLRGHRSTLKPTSYLQDLQIWSNPEGESTYLNFVRKGTERSAICKEPVLVYRNGAFFLRLSMSVEGMRASEEHIALQYYLSAAATGSDLSKDTEKTVERFNLIQGKTYKVMSVDLGIRSPFAWAVTESTITGVANPSQILNSGEMEIADDPDYTELFYAYKNLGHLIGQVKSSSKGKGLKADSHLVDMIHTVQRFFADYKVAGQRRSQIFEQFSKDPDPLYQMDQMMKRYENNLESVKKDFSFLINILFKYVTLQFGALRNRRRSYLSQNQMADQKFDQDFKWLNILEQRKRVTRSLSYLGTDNSRIPICLEQQKLDYNGCKDNFLKQLASKIVRIAHQNDCCLIVLEDLEGYGKTLNQRDENFLTAFWSPKRVKDAIINAAQWYGIGVVTVSEAQTSQVHHESGRIGYRKGRDLFFLTPDGQIESVPSDINAAKNIGHRFFSRHTDLHQVYLKGSDEGAKRMKGCLLYQFGSLEAARTHLTGTGPTWYLDGVEWIDKTERNLRRDLLKQRVEIEKMPF

SEQ ID NO: 1031 - protein, 768 aa, unidentified
  REGION 1..768: note = Category: MG60 effectors
  REGION 1..768: note = Description: MG60-246 effector
  source 1..768: note = uncultivated organism sequence
MFCSCKKNLRVVIYIYNATKTYDCAKKLIVYKSIIKGAEVMKIIKRNGAEETFDRQKIKDAIAKANNETDGTPELTDRQIDYISLVIEDHCNEMNRALSVEEIQELVETHIILQGAPETAKRYIRYRFTRNLARASNTTDNQILSLIECNNEEVKQENSNKNPTVNSVQRDYMAGEVSKDLTKRILLPEDIVKAHEEGLIHFHDADYFAQHMHNCDLVNLEDMLQNGTVISGTMIEKPHSFSTACNIATQIIAQVASNQYGGQSISLAHLAPFVQISREKITRQVRAEMEEFGIDADDEQVKSLVEKRVRDEIKRGVQTIQYQVVTLLTTNGQAPFVTVFMYLNEAKNEQEKKDLAIIIEEVLKQRIKGTKNEVGVWVTPAFPKLIYVLEEDNITEDSRFWYLTKLAAECTAKRMVPDYISEKIMLKLKIDKNGNGNCYTCMGCRSFLTPYVDENGKPKYYGRFNQGVVTINLVDVACTAARDGSKNEEKFWQALDERLELCHRALQCRHERLEGTLSDAAPILWQYGALARLKKGEPIDKLLHGGYSTLSLGYAGLWECVYEITGKKLTEKEGEEFGLRVMQRLNDACAEWKAAENIDYSIYGTPLESTTYKFAKCLQNRFGIIKGVTDRNYITNSYHIHVTEKIDAFSKLELESKFQKLSPGGAISYVEVPNMQQNIPAVLEVMKFIYNNIMYAELNTKSDYCQVCGYDGEIQIVEEDGKLVWRCPNCGNEDQSKMNVARRTCGYIGSQFWNQGRTQEIKERVLHL

SEQ ID NO: 1032 - protein, 768 aa, unidentified
  REGION 1..768: note = Category: MG60 effectors
  REGION 1..768: note = Description: MG60-247 effector
  source 1..768: note = uncultivated organism sequence
MFCSCKKNLRVVIYIYNATKTYDCAKKLIVYKSIIKGAEVMKIIKRNGAEETFDRQKIKDAISKANNETDGTPELTDRQIDYISLVIEDHCNEMNRALSVEEIQELVETHIILQGAPETAKRYIRYRFTRNLARASNTTDNQILSLIECNNEEVKQENSNKNPTVNSVQRDYMAGEVSKDLTKRILLPEDIVKAHEEGLIHFHDADYFAQHMHNCDLVNLEDMLQNGTVISGTMIEKPHSFSTACNIATQIIAQVASNQYGGQSISLAHLAPFVQISREKITRQVRAEMEEFGIAADDEQVKSLVEKRVRDEIKRGVQTIQYQVVTLLTTNGQAPFVTVFMYLNEAKNEQEKKDLAIIIEEVLKQRIKGTKNEVGVWVTPAFPKLIYVLEEDNITEDSRFWYLTKLAAECTAKRMVPDYISEKIMLKLKVDKNGNGNCYTCMGCRSFLTPYVDENGKPKYYGRFNQGVVTINLVDVACTAARDGNKSEEKFWQVLDERLELCHRALQCRHERLEGTLSDAAPILWQYGALARLKKGEPIDKLLHGGYSTLSLGYAGLWECVYEITGKKLTEKEGEEFGLRVMQRLNDACAEWKAAENIDYSIYGTPLESTTYKFAKCLQNRFGIIKGVTDRNYITNSYHIHVTEKIDAFSKLELESKFQKLSPGGAISYVEVPNMQQNIPAVLEVMKFIYNNIMYAELNTKSDYCQVCGYDGEIQIVEEDGKLVWRCPNCGNEDQSKMNVARRTCGYIGSQFWNQGRTQEIKERVLHL

SEQ ID NO: 1033 - protein, 768 aa, unidentified
  REGION 1..768: note = Category: MG60 effectors
  REGION 1..768: note = Description: MG60-248 effector
  source 1..768: note = uncultivated organism sequence
MFCSCKKNLRVVIYIYNATKTYDCAKKLIVYKSIIKGAEVMKIIKRNGAEETFDRQKIKDAIAKANNETDGTPELTDRQIDYISLVIEDHCNEMNRALSVEEIQELVETHIILQGAPETAKRYIRYRFTRNLARASNTTDNQILSLIECNNEEVKQENSNKNPTVNSVQRDYMAGEVSKDLTKRILLPEDIVKAHEEGLIHFHDADYFAQHMHNCDLVNLEDMLQNGTVISGTMIEKPHSFSTACNIATQIIAQVASNQYGGQSISLAHLAPFVQISREKITRQVRAEMEEFGIDADDEQVKSLVEKRVRDEIKRGVQTIQYQVVTLLTTNGQAPFVTVFMHLNEAKNEQEKKDLAIIIEEVLKQRIKGTKNEVGVWVTPAFPKLIYVLEEDNITEDSRFWYLTKLAAECTAKRMVPDYISEKIMLKLKIDKNGNGNCYTCMGCRSFLTPYVDENGKPKYYGRFNQGVVTINLVDVACTAARDGNKSEEKFWQVLDERLELCHRALQCRHERLEGTLSDAAPILWQYGALARLKKGEPIDKLLHGGYSTLSLGYAGLWECVYEITGKKLTEKEGEEFGLRVMQRLNDACAEWKAAENIDYSIYGTPLESTTYKFAKCLQNRFGIIKGVTDRNYITNSYHIHVTEKIDAFSKLELESKFQKLSPGGAISYVEVPNMQQNIPAVLEVMKFIYNNIMYAELNTKSDYCQVCGYDGEIQIVEEDGKLVWRCPNCGNEDQSKMNVARRTCGYIGSQFWNQGRTQEIKERVLHL

SEQ ID NO: 1034 - protein, 755 aa, unidentified
  REGION 1..755: note = Category: MG60 effectors
  REGION 1..755: note = Description: MG60-249 effector
  source 1..755: note = uncultivated organism sequence
MYELIEKREPKEEKPMKIIKRNGAEVVFDIDKIIMAVTKANDAVDEKVRMTPLQIERISQSVQIACEEMGRSPSVEEIQDLVEKAIMAHGAFEVAKEYITYRYTRSLLRQSNTTDDRILSLIECNNEEVKQENANKNPTINAVQRDYMAGEVSKDITSRILLPKEVVDAHEAGIIHFHDADYYAQHMHNCDLVNLEDMLQNGTVISGTLIEKPHSFSTACNIATQIIAQVAPNQYGGQSISLTHLAPFVQVSREKIRKTVEREMAAFGVAPAEETISKVVEDRLREEVRRGVQTIQYQVVTLMTTNGQAPFITVFMYLNEAKSEQEKKDLAMIIEETLRQRYEGVKNEKGVWITPAFPKLIYVLEEDNVREGTPYWYLTRLAAQCTAKRMVPDYISEKKMREYKLSKGETPGHGDVYTCMGCRSFLTPDRSGNGWDNVARAGNYEPGKPKYYGRFNQGVVTINLVDVALSSGRDMTKFWEVFEDRLELCHRALRCRHERLKGTLSDAAPILWQYGALARLPKGEPIDKLLYGGYSTISLGYAGLYECVKYMTGKSHTDDEAKPFALSVMQKMNDKCLQWKTAENIDYSLYGTPLESTTYKFAKCLQKRFGLVPGITDKSYITNSYHVHVTEPIDAFTKLRFEAEFQQLSPGGAISYVEVPNMQNNIDAVLEVMQFIYDNIMYAELNTKSDYCQVCGYDGEIEIKEDDGKLIWVCPQCGNTDQNKMNVARRTCGYIGTQFWNQGRTQEIKDRVLHL

SEQ ID NO: 1035 - protein, 909 aa, unidentified
  REGION 1..909: note = Category: MG60 effectors
  REGION 1..909: note = Description: MG60-250 effector
  source 1..909: note = uncultivated organism sequence
MNKVILTDAVPDIEKYWDYEANEGKKPSDFGASSSEKVWTKCPICGTSVRRNVRFTWEKDANGVGHVIHCRTCGKRNNNNSLVVLFPDIKKYWTYEKNEHDPEYYSISSGKKVYTRCPSCGEERYIAICDLIVNRNDRYELTQCIDCSLTLNPRRNVIGSIAKNYPDIDKYWDDKNVSKPDEIALNSQEIIFIHCPTCDKLIKRRALNSFRRDDQTGIYTLLDCHKCAAQKAGKIRGLNQSGALIDECPEIKEWWDAENNTIELKNITRGTHYKAQLKCPACHSSFTRQIHSFVSTKRDGRLLPVACPECGYSSKGDPNDNILRLCPEVDKWWDYEANSPYRPEQFTKGSQFQAHFICPDCGMHLYAGIHSLLKSDENGELHIRHKGNCLKYRSIESDNNLVKQYPQIKEWWDYEENGKALPEKFTIYSGKRMHFICPTCGAKSYRRITDAFAIEANSGEPILFNCPYCRNKKALSGKNSLLDTDPELAKEWSNSNNLKASEVLPTSSSRAKWVCPTCHGEYSAIIRDRKVDDNACPYCRNDKLLPGYNSLQDKKPELAKEWSTRNTLKADTVLFTSSSRVKWVCPTCHKEYSAIIRDRKLGDDSCPYCRQRRLLREHTSLWAVNPALAKEWSTKNPKKADEVLSSSCNSVLWICPTCHGEYSAIIRDRKVGDDACPYCKNDKVLPGFNSLQYKNPELAEEWSANNELKANEVLPTSSSRVKWVCPTCRGEYYAAIRDRKVGDDACPYCKNDKVLPGFNSLQYKNPELAEEWSANNELKANEVLPTSSSRVKWVCPTCRGEYYAAIRDRKVGDDACPYCKNDKVLPGYNSLKVRQPELVEREWCYPENILIGVYPDQILESYPGQAWWKCPTCKRKYLMSVKDRLMKQKRGHVACPQCRGRRRVRSFWV

SEQ ID NO: 1036 - protein, 768 aa, unidentified
  REGION 1..768: note = Category: MG60 effectors
  REGION 1..768: note = Description: MG60-251 effector
  source 1..768: note = uncultivated organism sequence
MFCSCKKNLRVVIYIYNATKTYDCAKKLIVYKSIIKGAEVMKIIKRNGAEETFDRQKIKDAIAKANNETDGTPELTDRQIDYISLVIEDHCNEMNRALSVEEIQELVETHIILQGAPETAKRYIRYRFTRNLARASNTTDNQILSLIECNNEEVKQENSNKNPTVNSVQRDYMAGEVSKDLTKRILLPEDIVKAHEEGLIHFHDADYFAQHMHNCDLVNLEDMLQNGTVISGTMIEKPHSFSTACNIATQIIAQVASNQYGGQSISLAHLAPFVQISREKITRQVRAEMEEFGIAADDEQVKSLVEKRVRDEIKRGVQTIQYQVVTLLTTNGQAPFVTVFMYLNEAKNEQEKKDLAIIIEEVLKQRIKGTKNEVGVWVTPAFPKLIYVLEEDNITEDSRFWYLTKLAAECTAKRMVPDYISEKIMLKLKIDKNGNGNCYTCMGCRSFLTPYVDENGKPKYYGRFNQGVVTINLVDVACTAARDGSKSEEKFWQVLDERLELCHRALQCRHERLEGTLSDAAPILWQYGALARLKKGEPIDKLLHGGYSTLSLGYAGLWECVYEITGKKLTEKEGEEFGLRVMQRLNDACAEWKAAENIDYSIYGTPLESTTYKFAKCLQNRFGIIKGVTDRNYITNSYHIHVTEKIDAFSKLELESKFQKLSPGGAISYVEVPNMQQNIPAVLEVMKFIYNNIMYAELNTKSDYCQVCGYDGEIQIVEEDGKLVWRCPNCGNEDQSKMNVARRTCGYIGSQFWNQGRTQEIKERVLHL

SEQ ID NO: 1037 - protein, 1240 aa, unidentified
  REGION 1..1240: note = Category: MG60 effectors
  REGION 1..1240: note = Description: MG60-252 effector
  source 1..1240: note = uncultivated organism sequence
MLKNQILKLTELTNKKELDKESDINSFLNKLPTIQKMFIVQNLLTELISIKNPFLETKNKMIEKIENNCYKYYKYTIQIKQIYDYCALKKPENSINYVLLKGKEAEIVLHEFEESRKNFITNFFFELRNNNILMMKIIKEIDINYYEQLGYFLTQFLYHNTTNTNFSQDELNLMLYLVMEDTVNNKFPDELTFEFLFNLNTEKEKMFLYYFVKNLTKKVEIRNYLTNIFHDLILNLESKNQKLSMNTTTLIREVLNLNNQNNQNNNDIVSDEKDDEYSRKTTMNAHDLLKNFKSLFNNADILNPEKKNTLRQTMISTKKKIEKVETKDDDLNLKKFKSEFDNCTINVETLRIKTFFEETNYTKNELYQSLNDLCNKNENRTSLENNFMEYLLCLKMESLKNETKKYTELYSNQMIYESFMESKKDNIKTEDEGNNIDEKYINNFMTITEFIQNLFEKILQSIDSLPYTIKCLLFFLDKLISKKYEQFKISTYQSSIIKLKFFFDGFILPILQNPFYNGCISDGVISDTTVENLKIISVIVEKFTSSNLFKIVNENIDPYYIIFNKFIVEHMQDFLKIHIAIDESIKNRFEPPKVLMELFESKDLNERNINYDFFKYNENESIQYQSVCFSYFDLMMFINTTEKENIKSYLESNGDIKSDYQLLLKYKIKNFEEGCKNNLSGKKKEFFYITNLKYKESFLKKIKSLTEEKEEFLDNYYKNQKSNSNMSENILLLKQCLIEVMIYLNKINKEDISSFIKRKNKLVLHHNSQINKYLLNKKYIGYKNIFEEKNNLSNINHIIKQKNFFSKLCLSQDAMEDGDFLEDIFPRIITKLKIELGHLIDYAKYERIIFCITFLQINIRNLPQIYRSNNFSKLFVEIINDVQNMIKGLQDNILNQYLFKIRGGDKLNLILSKYSQEIKSMEKYYTINYLFNKLTPHIPSKNKDEINKEKTIKQAKNTPSKKISSLSKSQIFFQPQNLIDLIPKKSILNFINEFHNYPASLKGIDDDVFSIEKKDEIPKLLHNYFNEIINLLQEEKMVKKYNQDDLVSICYDFENYILLKMHDKLLPDFPSKCDEFIYKKCLRLDFITPENMNADKKMINEDLLLTVTEYINKIDIKYTPIDKINMFGKAFQILQDSMSFSSGKSDVGTDDVLPLLHYVMIKAKPKMIYTNYVFCKYYINQNLLKKQTGFLLAQIGMFVKIICNMKFSNLKGVTEEQFGVDEEMPEDLKDIENKFEKLNP

SEQ ID NO: 1038 - protein, 1310 aa, unidentified
  REGION 1..1310: note = Category: MG60 effectors
  REGION 1..1310: note = Description: MG60-253 effector
  MOD_RES 998..1001: note = Any amino acid
  source 1..1310: note = uncultivated organism sequence
MSNFESYLNQFRVQKGEACNYTGMTINRGSFYIPEENRTTFLSKYYDHVFKQGGSSDLIERHSDLCCVLYDLDMKIDKESEERGYTREIINSFIEISTRIMKKYFDLPVSAYQCFVLEKDKPTVKKECKKDGVHLMFPYIVTEPSIQHLIRDEIVIEAKHLFEECLNTIEDIVDISVLDKNGWMLLGSSKIDGLPYNLTGIWSYENIEDVGNTFPNRVETSEYYTPSLDLVTLLSIRRFTLADITNFKSDMQDFLESWIDDFNTIQEEKNNIHTRRFHGNINKDMKVNMKTVQSLVSILSTDRAKNYEEWIELGFCLHTISDELLQTWIEFSERVDDYRETASADCSARWGKMRETGLGLGTLHMWAKADNYKAYLEIIQNDLEYFIVKTVNSALSNKDDAKDKAKKEVNISDVIFNVVLALKQKYYHYFICSSYEKKHWYEFEDIRWVEGDADVGLKRKIREDLYDDYVAVSTKYRKLSERFQNDHPNKEKYELISAEVFKVAQKLRDATFRKRLLEEASEQLYWSRDRSKQLSSSKFEEILDVNEKLIGMKNGVYDLEKQCFREARCEDYVSLSADIEYQEYFWNDEIIQDINTFISQVLTNKDVRDYVLQTFAMCLDGQIYNEHFHIYTGCHAKGSEILMHDGTIANVENVKVGDMLMGPDSKPREVHELVNGHSQMYEIIPSKGEPFVVNEDHIMVLKATTINNVVKCKNEKRFKLSWHERDIFGFPVSKCKNFPYNGRLKYKKNVIYYKTEDDARNAIEIYRNDLIMNNLNYIKNGDVIEIPLKEYIKRMKKINGAKNYFLFKEGVDFPAKDVKIDPYMLGYWLGDGTSKAFAITTMDDIVIDYFDQKTVVDENMDKKVYHKKNNKAKTIYYSSKERKPGKNRLLNAMKEYNIYNNKHIPSVYKFNNRQTRLELLAGLIDSDGHYNVKSKHYEITLKIEKLIDDTVYLARSLGFAVTKRTVKKTCTNNGKTGMYFNVLICGNNLNEIPVLIEXXXXFKVNKLKNDQYYGFKLNQDHLYLAGDFFVHHNCGSNGKSKILELFELSFGQYCSKLSIAALTQKRVSSSAATPEIARLRGRRFVVLQEPGENEILNVGLMKEMTGGDKIVARSLNKDPIEFKPQFNMILTCNQRPKIPSDDQGSWRRIRVVEFTSKFTANPDPNDPNQFMIDTDLTSKLKKWGKPFFWILTQYYKEFKKNGYKEPAEVTAATNEYQKEQDAYSEFVTDCLKLDKTSYADVKEVYTVFQEYVRYNNDQKPSKKAFEKYMNTRFGKFGRHRDSKCWKGFKIDEAALNENYGISENPEDELL

SEQ ID NO: 1039 - protein, 806 aa, unidentified
  REGION 1..806: note = Category: MG60 effectors
  REGION 1..806: note = Description: MG60-254 effector
  source 1..806: note = uncultivated organism sequence
MTSSSDLKKHAKFFRSLQEPFDPGPFKENLNVLEPRVDIEDTKSKACSVLTSPRKKVKPQVNLQEETSVMPESPATPKRKIWIPSVSSSELDTLIMNASEILDRALISKERGFCQFWTQRVGEISEKLSSLTETDYAGSDLKLLNESYRRAGGKSWFSITTSCPPNRNSSKIFSQLLQSSVPDCTVCEVTHSKTKLGVWQRREQVNLTGKKYKTLKVRLFPNKDQEDMLIGDSSRLRWYENAYNDIFPLDDYMKLIDKAKEDGEERPPLINWKTFQSKLKDYEYLEEQIGNMVDETHKTSMPVVYKQLKLKKGCKNILEDIALKEEINRKENERKKLEKEDKKKRENDGQEKIELTMSKEDKKVYRKKLKEDRKIATKNKRLRAKEEVENKKKAKLEEIQAKKQEREDQKKIAQTMPKDERKLYEAKLAEDRKIAAEEEAKNKKPRNTNEYPYPSWMENTFGKIISSKTNERIIRGAVANFTQNLNSAVSNYFNGNIKSFELRYRTAKDKHEFINFTDEHLPVWYKDVHGSYSYRFPIGHANKRRTSITWNDLMKTHKGSVIIIQDKQTKCWYGCLPVERDWYPPFDHRSENQGPMKKGEAIGLDPGMRKFLAGFTTTGETIYFGDRAFKIIGDLYSKISWIDSELAQYRAKMLDLSLEQKENLCKEKQAYWNRVKNLVTEMHWKCIRFLVLNYEYIFLEDFSTKGCIKKKPKGQDLSPLVKRILGQYSFYKFKQRLAYSCDKYGRKLILVHPARTTKDCPYCGNEQNVERSETYDCPKCNRILDRDQHSALNVLVKGMSILESRN

SEQ ID NO: 1040 - protein, 773 aa, unidentified
  REGION 1..773: note = Category: MG60 effectors
  REGION 1..773: note = Description: MG60-255 effector
  source 1..773: note = uncultivated organism sequence
MKIIKRNGSEAVFDIMKIISAVTRANNVVEEADRLTPMQIRRIAESVENSCLSMNRALSVEEIQDLVENQIMAHGAFEVAKNYITYRYTRTLVRKSNTTDEKILSLIESNNEEVKQENSNKNPTVNAVQRDYMAGEVSKDLTARVLLPQDIVDAHNEGIIHFHDADYFAQHMHNCDLVNLEDMLQNGTVISGTLIEKPHSFSTACNIATQIIAQIASNQYGGQSISLTHLAPFVDISRQKIRRSVLEEIKSFGVQPSEEAITNVVETRLRRKIRESVVREIRELGAEAAEERISKIVEERLREEIKRGVQTIQYQVVTLMTTNGQAPFITVFMYLGEARNEQERKDLAIIIEETLRQRIEGVKNEKGVWITPAFPKLIYVLEEDNITEDSPYWELTKLAARCTAKRMVPDYISEKKMRELKLSKGETPGHGDVYTCMGCRSFLTPDRSGTGWNNVANAGNYEPGKPKYYGRFNQGVVTINLVDIALSSGGGLDKFWKIFDDRLDLCYRALMCRHNRLKGTLSDAAPILWQYGALARLKKGEPIDKLLYGGYSTISLGYAGLYECVKYMTGKSHTDPAATPFALDIMHHLNDACAKWKAETDIDFSLYGTPLESTTYKFAKCLQKRFGIVPGITDKNYITNSYHIHVTEHINAFDKLAFESQFQALSPGGAISYVEVPNMQQNLDAVLEVMKFIYDHIMYAELNTKSDYCQVCGYDGEIEIKEDEDGKLIWTCPQCGNTDQSKMNVARRTCGYIGTQYWNQGRTQEIRDRVLHL

SEQ ID NO: 1041 - protein, 768 aa, unidentified
  REGION 1..768: note = Category: MG60 effectors
  REGION 1..768: note = Description: MG60-256 effector
  source 1..768: note = uncultivated organism sequence
MFCSCKKNLCVVIYIYDATKTYDCAKKLIVYKSIIKGAEVMKIIKRNGAEETFDRQKIKDAIAKANNETDGTPELTDRQIDYISLVIEDHCNEMNRALSVEEIQELVETHIILQGAPETAKRYIRYRFTRNLARASNTTDNQILSLIECNNEEVKQENSNKNPTVNSVQRDYMAGEVSKDLTKRILLPEDIVKAHEEGLIHFHDADYFAQHMHNCDLVNLEDMLQNGTVISGTMIEKPHSFSTACNIATQIIAQVASNQYGGQSISLAHLAPFVQISREKITRQVRAEMEEFGIAADDEQVKSLVEKRVRDEIKRGVQTIQYQVVTLLTTNGQAPFVTVFMYLNEAKNEQEKKDLAIIIEEVLKQRIKGTKNEVGVWVTPAFPKLIYVLEEDNITEDSRFWYLTKLAAECTAKRMVPDYISEKIMLKLKIDKNGNGNCYTCMGCRSFLTPYVDENGKPKYYGRFNQGVVTINLVDVACTAARDGNKSEEKFWQVLDERLELCHRALQCRHERLEGTLSDAAPILWQYGALARLKKGEPIDKLLHGGYSTLSLGYAGLWECVYEIKGKKLTEKEGEEFGLRVMQRLNDACAEWKAAENIDYSIYGTPLESTTYKFAKCLQNRFGIIKGVTDRNYITNSYHIHVTEKIDAFSKLELESKFQKLSPGGAISYVEVPNMQQNIPAVLEVMKFIYNNIMYAELNTKSDYCQVCGYDGEIQIVEEDGKLVWRCPNCGNEDQSKMNVARRTCGYIGSQFWNQGRTQEIKERVLHL

SEQ ID NO: 1042 - protein, 755 aa, unidentified
  REGION 1..755: note = Category: MG60 effectors
  REGION 1..755: note = Description: MG60-257 effector
  source 1..755: note = uncultivated organism sequence
MHELIEKREPKEEKPMKIIKRNGAEVVFDIDKIIMAVTKANDAVDEKVRMTPLQIERISQSVQIACEEMGRSPSVEEIQDLVEKAIMAHGAFEVAKEYITYRYTRSLLRQSNTTDDRILSLIECNNEEVKQENANKNPTINAVQRDYMAGEVSKDITSRILLPKEVVDAHEAGIIHFHDADYYAQHMHNCDLVNLEDMLQNGTVISGTLIEKPHSFSTACNIATQIIAQVASNQYGGQSISLTHLAPFVQVSREKIRKTVEREMAAFGVAPAEETISKVVEDRLREEVRRGVQTIQYQVVTLMTTNGQAPFITVFMYLNEAKNEQEKKDLAMIIEETLRQRYEGVKNEKGVWITPAFPKLIYVLEEDNVREGTPYWYLTRLAAQCTAKRMVPDYISEKKMREYKLSKGETPGHGDVYTCMGCRSFLTPDRSGNGWDNVARAGNYEPGKPKYYGRFNQGVVTINLVDVALSSGRDMTKFWEVFEDRLELCHRALRCRHERLKGTLSDAAPILWQYGALARLPKGEPIDKLLYGGYSTISLGYAGLYECVKYMTGKSHTDDEAKPFALSVMQKMNDKCLQWKTAENIDYSLYGTPLESTTYKFAKCLQKRFGLVPGITDKSYITNSYHVHVTEPIDAFTKLRFEAEFQQLSPGGAISYVEVPNMQNNIDAVLEVMQFIYDNIMYAELNTKSDYCQVCGYDGEIEIKEDDGKLIWVCPQCGNTDQNKMNVARRTCGYIGTQFWNQGRTQEIKDRVLHL

SEQ ID NO: 1043 - protein, 800 aa, unidentified
  REGION 1..800: note = Category: MG60 effectors
  REGION 1..800: note = Description: MG60-258 effector
  source 1..800: note = uncultivated organism sequence
MSLHFVLLRCIITQDVVLGIDNERYIKGLEHSGGSLMTRVFFAPYRLLLNCGEGTRKRLIRRSRKDMKIIKRSGTEVEFDISKIVAAVAKANKEVVEKDRLTREQINEIAKKVTLTCSGMNRTASVEEIQDMVENEIMEAQAFAVARKYITYRYTRALVRKANSTDEQILSLIECNNEEVKQENSNKNPVVNSVQRDYMAGEVSKDIAKRILLPEDVVKAHEEGIIHFHDSDYFAQHMHNCCLVNLEDMLQNGTVISETMIDKPKSFSTACNIATQSIAQIASSQYGGQSITLSHLAPFVDVSRKKYLKMVQEEFEEAGLALDHNQIAKIAELRVREEIKRGVQMIQYQVITLMTTNGQAPFVTVFMYLNEVPEGQTRDDLALVIEEMLRQRILGVKNEKGVYITPAFPKLIYVLEEDNITEDSKYWYLTKMAATCTAKRMVPDYISEKIMKKLKGGDVYACMGCRSFLTPDRFTEAGVGNIANAGNYDPNKHKYWGRFNQGVVTINLVDVACSSEGDMDKFWNIMDERLELCHKALMCRHERLLGTPSDVAPILWQYGALARLKRGEKIDRLLFDGYSTISLGYAGLCECTRYMTGLSHTNPEATPFAMEVMQHLNDACAKWKAESNIDFSIYGTPLESTTYKFAKCLQKRFGVIEGVTDKNYITNSYHVHVTEKIDAFSKLSFEAKFQELSPGGAVSYVEVPNMQNNIDAVLAVMKHIYDNIMYAELNTKSDYCQKCGYDGEIQIAENTDGKLVWKCPNCGNTDEETMNVARRTCGYIGTQFWNQGRTQEIQERVLHL

SEQ ID NO: 1044 - protein, 760 aa, unidentified
  REGION 1..760: note = Category: MG60 effectors
  REGION 1..760: note = Description: MG60-259 effector
  source 1..760: note = uncultivated organism sequence
MKIIKRSGTEVVFDIDKIVNAIRAANLEVEESSRLTDRQVVYAAQNVAEACENAGHTVSVEEIQDLVEDEIMRLDCYEVARHYIIYRYVQSLKRQKNTTDDKILSLIECNNEEVKQENSNKNPTVNSVQRDYMAGEISKDLTQRVLLPQEIVDAHNEGLIHFHDSDYFAQHMHNCDLVNLEDMLQNGTVISGTLIEKPHSFSTACNIATQIIAQVASSQYGGQSISLTHLAPFVEVSRQKIRGEVARELEELGVSASPEKVREVVEDRLRDEIRRGVQTIQYQVVTLMTTNGQAPFVTVFMYLNEARTPQEKHDLAMIVEETLRQRYEGVKNEAGVWITPAFPKLIYVLEDDNVHENSPYFYLTQLAAKCTAKRMVPDYISEKKMRELKLSKGETAGNGDCYTCMGCRSFLTPDRSGNGDCYTCMGCRSFLTPDRSGNGFNNVANALNYDPNKPKYYGRFNQGVVTINLPDVALSSHQDMDKFWKIFDERLELCHRALLCRHERLMGTLSDAAPILWQYGALARLKKGETIDKLLVGGYSTISLGYAGLYECVKYMTGHSHTEKEGTPFAMAVMQRMNDKCAEWKAESDIDFSLYGTPLESTTYKFAKCLQRRFGIIPGVTDKGYITNSYHVHVSEEIDAFDKLKFEGMFQQLSPGGAISYVEVPNMQDNLKAVIRVMQYIYDNIMYAELNTKSDYCQVCGYDGEIKIVEDDGKLVWECPNCGNRDQEKMNVARRTCGYIGTQFWNQGRTEEIRDRVLHL

SEQ ID NO: 1045 - protein, 768 aa, unidentified
  REGION 1..768: note = Category: MG60 effectors
  REGION 1..768: note = Description: MG60-260 effector
  source 1..768: note = uncultivated organism sequence
MFCSCKKNLCVVIYIYNATKTYDCVKKLIVYKSIIKGAEVMKIIKRNGAEETFDRQKIKDAISKANNETDGTPELTDRQIDYISLVIEDHCNEMNRALSVEEIQELVETHIILQGAPETAKRYIRYRFTRNLARASNTTDNQILSLIECNNEEVKQENSNKNPTVNSVQRDYMAGEVSKDLTKRILLPEDIVKAHEEGLIHFHDADYFAQHMHNCDLVNLEDMLQNGTVISGTMIEKPHSFSTACNIATQIIAQVASNQYGGQSISLAHLAPFVQISREKITRQVRAEMEEFGIAADDEQVKSLVEKRVRDEIKRGVQTIQYQVVTLLTTNGQAPFVTVFMYLNEAKNEQEKKDLAIIIEEVLKQRIKGTKNEVGVWVTPAFPKLIYVLEEDNITEDSRFWYLTKLAAECTAKRMVPDYISEKIMLKLKIDKNGNGNCYTCMGCRSFLTPYVDENGKPKYYGRFNQGVVTINLVDVACTAARDGSKSEEKFWQVLDERLELCHRALQCRHERLEGTLSDAAPILWQYGALARLKKGEPIDKLLHGGYSTLSLGYAGLWECVYEITGKKLTEKEGEEFGLRVMQRLNDACAEWKAAENIDYSIYGTPLESTTYKFAKCLQNRFGIIKGVTDRNYITNSYHIHVTEKIDAFSKLELESKFQKLSPGGAISYVEVPNMQQNIPAVLEVMKFIYNNIMYAELNTKSDYCQVCGYDGEIQIVEEDGKLVWRCPNCGNEDQSKMNVARRTCGYIGSQFWNQGRTQEIKERVLHL

SEQ ID NO: 1046 - protein, 768 aa, unidentified
  REGION 1..768: note = Category: MG60 effectors
  REGION 1..768: note = Description: MG60-261 effector
  source 1..768: note = uncultivated organism sequence
MFCSCKKNLCVVIYIYDATKTYDCAKKLIVYKSIIKGAEVMKIIKRNGAEETFDRQKIKDAIAKANNETDGTPELTDRQIDYISLVIEDHCNEMNRALSVEEIQELVETHIILQGAPETAKRYIRYRFTRNLARASNTTDNQILSLIECNNEEVKQENSNKNPTVNSVQRDYMAGEVSKDLTKRILLPEDIVKAHEEGLIHFHDADYFAQHMHNCDLVNLEDMLQNGTVISGTMIEKPHSFSTACNIATQIIAQVASNQYGGQSISLAHLAPFVQISREKITRQVRAEMEEFGIAADDEQVKSLVEKRVRDEIKRGVQTIQYQVVTLLTTNGQAPFVTVFMYLNEAKNEQEKKDLAIIIEEVLKQRIKGTKNEVGVWVTPAFPKLIYVLEEDNITEDSRFWYLTKLAAECTAKRMVPDYISEKIMLELKIDKNGNGNCYTCMGCRSFLTPYVDENGKPKYYGRFNQGVVTINLVDVACTAARDGNKSEEKFWQVLDERLELCHRALQCRHERLEGTLSDAAPILWQYGALARLKKGEPIYKLLHGGYSTLSLGYAGLWECVYEITGKKLTEKEGEEFGLRVMQRLNDACAEWKAAENIDYSIYGTPLESTTYKFAKCLQNRFGIIKGVTDRNYITNSYHIHVTEKIDAFSKLELESKFQKLSPGGAISYVEVPNMQQNIPAVLEVMKFIYNNIMYAELNTKSDYCQVCGYDGEIQIVEEDGKLVWRCPNCGNEDQSKMNVARRTCGYIGSQFWNQGRTQEIKERVLHL

SEQ ID NO: 1047 - protein, 756 aa, unidentified
  REGION 1..756: note = Category: MG60 effectors
  REGION 1..756: note = Description: MG60-262 effector
  source 1..756: note = uncultivated organism sequence
MHELIEKREPKEEKPMKIIKRNGAEVVFDIDKIIMAVTKANDAVDEKVRMTPLQIERISQSVQIACEEMGRSPSVEEIQDLVEKAIMAHGAFEVAKEYITYRYTRSLLRQSNTTDDRILSLIECNNEEVKQENANKNPTINAVQRDYMAGEVSKDITSRILLPKEVVDAHEAGIIHFHDADYYAQHMHNCDLVNLEDMLQNGTVISGTLIEKPHSFSTACNIATQIIAQVASNQYGGQSISLTHLAPFVQVSREKIRKTVEREMAAFGVAPAEETISKVVEDRLREEVRRGVQTIQYQVVTLMTTNGQAPFITVFMYLNEAKSEQEKKDLAMIIEETLRQRYEGVKNEKGVWITPAFPKLIYVLEEDNVREGTPYWYLTRLAAQCTAKRMVPDYISEKKMREYKLSKGETPGHGDVYTCMGCRSFLTPDRSGNGWDNVARAGNYEPGKPKYYGRFNQGVVTINLVDVALSSGRDMTKFWEVFEDRLELCHRALRCRHERLKGTLSDAAPILWQYGALARLPKGEPIDKLLYGGYSTISLGYAGLYECVKYMTGKSHTDDEAKPFALSVMQKMNDKCLQWKTAENIDYSLYGTPLESTTYKFAKCLQKRFGLIPGITDKSYITNSYHVHVTEPIDAFTKLRFEAEFQQLSPGGAISYVEVPNMQNNIDAVLEVMQFIYDNIMYAELNTKSDYCQVCGYDGEISIREDEDGKLVWVCPQCGNTDQSKMNVARRTCGYIGTQFWNQGRTQEIKDRVLHL

SEQ ID NO: 1048 - protein, 1076 aa, unidentified
  REGION 1..1076: note = Category: MG60 effectors
  REGION 1..1076: note = Description: MG60-263 effector
  source 1..1076: note = uncultivated organism sequence
MEKMQKLYEVRKSLRFELKPSKITFEKIKKEWIFNNNIFESQIFSQKFNEINFQAEEKENNYLFSINENKLNELVKRCDVKIENIKNIKEFIEDNPNELWRVWIDNEKIKIIDKDLKYILEEKSSWKKVFWNPEKKDKKTWNKWAQSNFTVKWKKWLFLTFDDIDAYFEEIRSTKNKKPKAWDFTNMFIDKISFLLKQYEVRKYQLWLNTKWNIEENEKKLFQTKRERISRIRSFLWMFLKLESVISVLNFNYKDNFSEFPVELKEIIISFNEDEDVNDIISEIELIFSESNLYLHKNIERKFSLNIRAINPNPENTKDNKIKTENEIFKDIEVLEEKISKLKNLKAQIKWERKDKKNSWDTNWKEHKKNKWDDVLKKLNPKWEESLFSKLTELRRDLEEVHLTHFAVLLEKEGLFYLALENKRVNNSKNWEIKKINNLELWKFFTKSNSWESKFLNYNVITFQWLRRLCLEESSSMKTENFLNKNNGKWTKWSNQQKKSININWRDEEYFDDLKDYLKFILKNNTDKIGVNFTENDFKEWKDIKWDENLENLEKIINKQWYKANWENFNFENLKKLEEEWNIELFQIYNKDFLIDKDFVTSNSDKEKFERIEYTKEQLKKEWKKFIPKYKDEYKKHKRNLFTIYWQDLFNDEENNQIRIKQEWKFYIRLAWEEEGERKISDNFSIKNKKRYSENKIFADFNLLLNPNTSNISKRCKQNKEFQKKYIKDFNLDIKGLNPKYYIGLDQWVNSLVSYCVMDENENIVTDKNWKPEIWDLSLVISNWENQGQFVEVEDTIIVWWDKWVWSEDKWILEQEEPNKRILKIDGNIKVFDYAEAIYSESYKRRKEIEKYCNNEIDFDEVSNLKKGYSSFVLHKIEQLAKKYSPAIISLEYLQDQKNKSRFVNKNWEWKKIDKQSENPKIYRFWTSTIECIEDALLKKFQFWYGKTENWKKQLVPFFSNKEELYKKGLQLWNIIFIDEKDTSVLCPSCKELLTRCKNPYHEEEWKRWGLYTDEDTKNIYWQFRKVFDILKHNPYNVCNWNSSEKNEKFSFIKSWDDLATYNIAKKWLEYIKNLK

SEQ ID NO: 1049 - protein, 1043 aa, unidentified
  REGION 1..1043: note = Category: MG60 effectors
  REGION 1..1043: note = Description: MG60-264 effector
  source 1..1043: note = uncultivated organism sequence
MIINNKRKEYKNKQMQINTSYDKDENISDNKKKTENIKVINGMGLNLDIKNKYQNGILSDEKSINLLGKNNNNSNSNCPIKIIKLNNINNFEVDGVSNNFDNQNGNKSNITHDSKYDSRRNFYIRNNSMKNINSKMVNSNFHNNVENVIFSNNNNIMLIDKNLSFNSERLDSRNAIKINKLKDDYIDYLQKEFEDKSKNNVQLDTSNKELLKKCNELILNNRLLNESLTDKNNKLTKISEENQYMKNEYNKSMANFRKMQEKTKVYEDQINLLKSNNTNNEKIIKELRQQIEQANSNLKKVKSEYEEKLKKTEEKYKNEIEENKKNMETLYNNKILGDDKNINNEKKIKSLMDEISYLKEKNQELIKDLETKEKTIELMYNDNAKLMNEANLKQGKLDQSYRQINDLKIILKHKESIINTFKMNIGENDRISLNKSNSCSFMKLDTSDVISENLTKLLNDNEENRMKLEVLNNRLKSIDEIRKKYHNLVKDNKAIPLTNNYSFNSRNSVNFTKEKLNTSFYSNCKNTNNKNNSQGEIDLKDNIENYNINKELNQSVRRSFLSSLSLNILNNSGIKNEENNNKNEKVIKKYIIDTSKDKDKDKDKDIKANILEGDKDKKPVISERFKSVEKKSIPFRGRNFYKRDENKNKRLLRQTTFENEENQKILHKRELEEESKDSRGSDEDSDKIKITTYVPKNFTFSGDEVIYEQNTEQIVNTTEGENNGSCYLYGIDRNDLFHIFDINNKIWLESKKIFDLNLDEKSSSFKTDYQYEGTLLYNTLRGVYILTGENTDTLYFFNSKSSSISKICKFNSSHNNGSMMFDNNENCLYVFGGKNITSCEYYSFYDRKVCKLPNLNIDRANSSFIISNNKIFAFFGFSYENDDYVRTIEYIDYNKKDKWIELNNITLLKNDISFDVESVSTMYYKQNASKILIYSGIQGEDEDFITEYYLIYDVRSNTMDKINKWNIKQYKNIGKKWKDYEITGNDPKGFHFAKNSRFILLPDNCIPEGYNENDIIEVLIDYKNNVHFIVQEKNKIDVYRGEM

SEQ ID NO: 1050 - protein, 768 aa, unidentified
  REGION 1..768: note = Category: MG60 effectors
  REGION 1..768: note = Description: MG60-265 effector
  source 1..768: note = uncultivated organism sequence
MFCSCKKNLRVVIYIYNATKTYDCAKKLIVYKSIIKGAEVMKIIKRNGAEETFDRQKIKDAISKANNETDGTPELTDRQIDYISLVIEDHCNEMNRALSVEEIQELVETHIILQGAPETAKRYIRYRFTRNLARASNTTDNQILSLIECNNEEVKQENSNKNPTVNSVQRDYMAGEVSKDLTKRILLPEDIVKAHEEGLIHFHDADYFAQHMHNCDLVNLEDMLQNGTVISGTMIEKPHSFSTACNIATQIIAQVASNQYGGQSISLAHLAPFVQISREKITRQVRAEMEEFGIAADDEQVKSLVEKRVRDEIKRGVQTIQYQVVTLLTTNGQAPFVTVFMYLNEAKNEQEKKDLAIIIEEVLKQRIKGTKNEVGVWVTPAFPKLIYVLEEDNITEDSRFWYLTKLAAECTAKRMVPDYISEKIMLKLKIDKNGNGNCYTCMGCRSFLTPYVDENGKPKYYGRFNQGVVTINLVDVACTAARDGSKSEEKFWQVLDERLELCHRALQCRHERLEGTLSDAAPILWQYGALARLKKGEPIDKLLHGGYSTLSLGYAGLWECVYEITGKKLTEKEGEEFGLRVMQRLNDACAEWKAAENIDYSIYGTPLESTTYKFAKCLQNRFGIIKGVTDRNYITNSYHIHVTEKIDAFSKLELESKFQKLSPGGAISYVEVPNMQQNIPAVLEVMKFIYNNIMYAELNTKSDYCQVCGYDGEIQIVEEDGKLVWRCPNCGNEDQSKMNVARRTCGYIGSQFWNQGRTQEIKERVLHL

SEQ ID NO: 1051 - protein, 755 aa, unidentified
  REGION 1..755: note = Category: MG60 effectors
  REGION 1..755: note = Description: MG60-266 effector
  source 1..755: note = uncultivated organism sequence
MHELIEKREPKEEKPMKIIKRNGAEVVFDIDKIIMAVTKANDAVDEKVRMTPLQIERISQSVQIACEEMGRSPSVEEIQDLVEKAIMAHGAFEVAKEYITYRYTRSLLRQSNTTDDRILSLIECNNEEVKQENANKNPTINAVQRDYMAGEVSKDITSRILLPKEVVDAHEAGIIHFHDADYYAQHMHNCDLVNLEDMLQNGTVISGTLIEKPHSFSTACNIATQIIAQVASNQYGGQSISLTHLAPFVQVSREKIRKTVEREMAAFGVAPAEETISKVVEDRLREEVRRGVQTIQYQVVTLMTTNGQAPFITVFMYLNEAKSEQEKKDLAMIIEETLRQRYEGVKNEKGVWITPAFPKLIYVLEEDNVREGTPYWYLTRLAAQCTAKRMVPDYISEKKMREYKLSKGETPGHGDVYTCMGCRSFLTPDRSGNGWDNVARAGNYEPGKPKYYGRFNQGVVTINLVDVALSSGRDMTKFWEVFEDRLELCHRALRCRHERLKGTLSDAAPILWQYGALARLPKGEPINKLLYGGYSTISLGYAGLYECVKYMTGKSHTDDEAKPFALSVMQKMNDKCLQWKTAENIDYSLYGTPLESTTYKFAKCLQKRFGLIPGITDKSYITNSYHVHVTEPIDAFTKLRFEAEFQQLSPGGAISYVEVPNMQNNIDAVLEVMQFIYDNIMYAELNTKSDYCQVCGYDGEIEIKEDDGKLVWVCPQCGNTDQNKMNVARRTCGYIGTQFWNQGRTQEIKDRVLHL

SEQ ID NO: 1052 - protein, 760 aa, unidentified
  REGION 1..760: note = Category: MG60 effectors
  REGION 1..760: note = Description: MG60-267 effector
  source 1..760: note = uncultivated organism sequence
MEEMEMNVKMNVIKRNGKEVPFDITKIVNAIGKANNEVDHVHQMNDYQIRAVADNIAHKIAGYSHAANVEDIQDMVETGIMEMRGYEVAQKYVRYRYKREISRKSNTTDDGILSLIDLSNEEVKQENSNKNPVINSTQRDYMAGEVSKDLTKRLLLPEEIVKAHEAGIIHFHDADYYAQREHNCDLINLEDMLQNGTVISQTMIEKPHSFFTACNVTTQIVAQVASNQYGGQSFTLAHLAPFVDISRQKIKKEVIAERKETGESMDESIIEKIVERRLKEEIKSGIQTIQYQLITLMTCNGQAPFVTMFMYLDEVPDGRTRKDLAMIIEEVLRQRMQGVKNEKGIWITPAFPKLIYVLDEDNIHDDSPYYYLTRLAAECTAKRMVPDYISAKIMKNLKHGDVYPCMGCRSFLTPDTEGLGENGKHKYYGRFNQGVVTINLVDVACSSGGDMDKFWEILEDRLELCHRALRCRHERLLGTVSDVAPILWQYGAIARLKKGETIDKLLFNNYSTISLGYAGLYEMCVRMLGVSHTTDEGRKFALAVMQKLNDKCSEWRAAENISYSVYGTPMESTTYKFAKCLQKRFGIIPGVTDKNYITNSYHVHVSEHIDAFHKLKFESDFQRLSPGGAISYIEVPNMQTNIPAVLTVMKYIYENIMYAELNTKSDYCMACGYDGEIRIIEDETGKLIWECPNCGNRDQHKMSVARRTCGYIGTQFWNQGRTQEIKGSPPFVSMQKLRIPRKLRNPYAQVEVVISSPRYG

SEQ ID NO: 1053 - protein, 768 aa, unidentified
  REGION 1..768: note = Category: MG60 effectors
  REGION 1..768: note = Description: MG60-268 effector
  source 1..768: note = uncultivated organism sequence
MFCSCKKNLSVVIYIYDATKTYDCAKKLIVYKSIIKGAEVMKIIKRNGAEETFDRQKIKDAIAKANNETDGTPELTDRQIDYISLVIEDHCNEMNRALSVEEIQELVETHIILQGAPETAKRYIRYRFTRNLARASNTTDNQILSLIECNNEEVKQENSNKNPTVNSVQRDYMAGEVSKDLTKRILLPEDIVKAHEEGLIHFHDADYFAQHMHNCDLVNLEDMLQNGTVISGTMIEKPHSFSTACNIATQIIAQVASNQYGGQSISLAHLAPFVQISREKITRQVRAEMEEFGIDADDEQVKSLVEKRVRDEIKRGVQTIQYQVVTLLTTNGQAPFVTVFMYLNEAKNEQEKKDLAIIIEEVLKQRIKGTKNEVGVWVTPAFPKLIYVLEEDNITEDSRFWYLTKLAAECTAKRMVPDYISEKIMLKLKIDKNGNGNCYTCMGCRSFLTPYVDENGKPKYYGRFNQGVVTINLVDVACTAARDGNKSEEKFWQVLDERLELCHRALQCRHERLEGTLSDAAPILWQYGALARLKKGEPIDKLLHGGYSTLSLGYAGLWECVYEITGKKLTEKEGEEFGLRVMQRLNDACAEWKAAENIDYSIYGTPLESTTYKFAKCLQNRFGIIKGVTDRNYITNSYHIHVTEKIDAFSKLELESKFQKLSPGGDISYVEVPNMQQNIPAVLEVMKFIYNNIMYAELNTKSDYCQVCGYDGEIQIVEEDGKLVWRCPNCGNEDQSKMNVARRTCGYIGSQFWNQGRTQEIKERVLHL

SEQ ID NO: 1054 - protein, 941 aa, unidentified
  REGION 1..941: note = Category: MG60 effectors
  REGION 1..941: note = Description: MG60-269 effector
  source 1..941: note = uncultivated organism sequence
MDFLSLSSEYQSYVDYIDNSLIIMKYFITFYQSLQNSFKIFSKNTRESLNTLFSNLIQFDNRSTFSKKFFEFYRLFEKYLTKLDLLSEKILTQIVEPTLDIQKHFKLKTDIEIKNLFEIIKSTINQKKKLEIIKQNYFDYSKAAEAQEKSLVEVMDDENQQNINYQNNILTKLRMESAEECEKYRNMVNETNKLYNDNNKKYFPIISSLKDCEEQRLYFIYSNFQKFISILTEQKNSLNFVVSNYENEDVFKVKIDDDMIMYQEKFSYTFKQNERFKKEDFILYDIYRRNIESIINSSNKLIKQNNIPVPNIDINFVSNENNIPIKLEQNDDISFQSLFNSNSYNINRKIFVAFENKLKTDGNFARNVIDKMLDDIFTKVLYKKYENKNQFDKLTDVLIDISMNSSIQNELFDVNYGILFIAEKTFYYDRITNSKYYLCKALSEKYQNFRNKVYWKRMLNYKKNSLIESLVEKEAMKKIKKDKIPTQQSSTFSFLWRSNSVDNNCINLISNNEKKRLTEKVKKLELFDILRDFLIHFGNFNLDLTISNDIIIEIASEDNIYSEQISFFVTFMNSNMYCVKNKKLKKYKKKENKKDIIVNKKILTSNNTKLRHILISLNSSIKYLQLKDYINLNLLNKTFYPISQKIIYKKFFLKQEQILEQEKHFKMWFNILHYDPNEIPYEKLLQDALDYNSPIIDLIQADVIRTFFDEDQENYRKKLQNILIAISYTYPKISYVQGMNYIVSFFLKITNNEKKSYDLMSCLLGKTDYGKSLLNEFEMIKKCFYVFERLIFIYLPELSYVLKKNNVSSSYYISPWFITLFTNSLSGNNTKIILRIIDMLILEGYNCIIRIGLVLLKHYQENLIKMKFEELLHFLINELKEKYEFFHNNNYEKFIELYNDMKIPKGLINNIENEYEIEKKVLKIREKDERIEKEKENEITI

SEQ ID NO: 1055 - protein, 1180 aa, unidentified
  REGION 1..1180: note = Category: MG60 effectors
  REGION 1..1180: note = Description: MG60-270 effector
  source 1..1180: note = uncultivated organism sequence
MAKIIQTLFIYISTREKEVEIMVIIKRNGKESLFEKSKIRNAIRKANAEAEAENQLSEGQIYLIADEIEEIAEKRSRALNVEEIQDLVEDKIMNCGKYEVARKYIKYRYNRELNRRSNTTDEKILSLIECENEEAKQENANKNPTIASVQRDYMAGEVSKDLTKRILLPQEIVDAHEKGIIHFHDADYYSQHIHNCDLINLEDMLQNGTVISGTLIEKPHSFSTACNIATQIIAQVASSQYGGQSITLSHLAPFVDVSRQKIMQKTKKAFDEAEMTYTEDQLKAVVENKVKEEIEKGVQIIQYQVVTLMTTNGQAPFITVFMYLNEVKDEQTKHDLAMIIEEVLKQRIQGVKNEKGVWITPAFPKLIYALEEDNIKEGSKYWYLTELAAKCTAKRMVPDYISEKKMLELKGDAYPCMGCVDGKETVKVKGVFSENPNEETLEIKLPIEKLWKEMSKKYQVKLQPNGKDYFIETPDLLIYDQKKGFVKNYGIIKNHNSDWLIITFSNGAKIKCTEDHPFETEDGRIIKAKDLTDADVIAHETDKLCYPKNIERIPAGVSDGFSYDVTTESEHFTVSGIYSHNCRSFLTPDRFTDNGAGNIANAKNYKPNEHKYYGRFNQGVVTINLPDAALSAKGDMNEFWKILDERLELCHKALKCRHERLLGTPTSIAPILWQYGALARLGKDEKIDKLLFGGYSTISLGYAGLWECVYGLIKKKITEPEGKELGLKIMQTLNDYCSKWKVDENIDYSLYGTPLESTTYKFAKCLQDRFGVVEGVSDKNYITNSYHIKVTEKVNAFEKLKFESEFQALSPGGAISYIEVPDMKDNIAAVLEVIKFIYDNIMYAELNTKSDYCQECGYDGEIQIVQEGNKLVWRCPNCGNEDQSKLNIARRTCGKQSSEIATIKNDRTSGKPRLYNNFEDYKAGNPEPSSQSNKNSKNSNYKVCDICGRHEKHIIGYYGKKLCNKHYNQIKKYGHVLENSPRTIYDKNEIKVEGEIAYIELYDKLYNVVALAMIDAEDINKVKYSKWRLNCNGYVISTNKFDGKTTFLHRRILNNTNQFVDHINGNVLDNRKQNLRLVTKSQNQMNVNYKGVSKTKNDKHYAHIKIKGKAINLGVYVDEEDALYARYFAEKLLFKEYRFPKEEPFVLTNRKNEIENYVRNRLEKYKDVITNDAENTKNAA

SEQ ID NO: 1056 - protein, 1239 aa, unidentified
  REGION 1..1239: note = Category: MG60 effectors
  REGION 1..1239: note = Description: MG60-271 effector
  source 1..1239: note = uncultivated organism sequence
MLKNQILKLTELTNKKELDKESDINSFLNKLPTIQKMFIVQNLLTELISIKNPFLETKNKMIEKIENNCYKYYKYTIQIKQIYDYCALKKPENSINYVLLKGKEAEIVLHEFEESRKNFITNFFFELRNNNILMMKIIKEIDINYYEQLGYFLTQFLYHNTTNTNFSQDELNLMLYLVMEDTVNNKFPDELTFEFLFNLNTEKEKMFLYYFVKNLTKKVEIRNYLTNIFHDLILNLESKNQKLSMNTTTLIREVLNLNNQNNQNNNDIVSDEKDDEYSRKTTMNAHDLLKNFKSLFNNADILNPEKKNTLRQTMISTKKKIEKVETKDDDLNLKKFKSEFDNCTINVETLRIKTFFEETNYTKNELYQRLNDLCNKNENRTSLENNFMEYLLCLKMESLKNETKKYTELYSNQMIYESFMESKKDNIKTEDEGNNIDEKYINNFMTITEFIQNLFEKILQSIDSLPYTIKCLLFFLDKLISKKYDIKLSSYQSSIIKLKFFFDGFILPILQNPFYNGCISDGVISDTTVENLKIISVIVEKFTSNNLFKIVNENIDPYYIIFNKFIVEHMQDFLKIHIAIDESIKNRFEPPKVLMELFESKDLNERNINYDFFKYNENESIQYQSVCFSYFDLMMFINTTEKENIKSYLESNGDIKSDYQLLLKYKIKNFEEGCKNNLSGGKKEFFYITNLKYKESFLKKIKSLTEEKEEFLDNYYKNQKSNSDMNENILLLKQCLIEVMIYLNKINKEDISSFIKRKNKLVLHHNSQINKYLLNKKYIGYKNIFEEKNNLSNINHIIKQKNFFSKLCLSQDAMEDGDFLEDIFPRIITKLKIELGHLIDYAKYERIIFCITFLQINIRNLPQIYRSNNFSKLFVEIINDVQNMIKGLQDNILNQYLFKIRGGDKLNLILSKYSQEIKSMEKYYTINYLFNKLTPHIPSKNKDEINKEKTIKQVKNTPSKKISSLSKSQIYFQPQNLIDLIPKKSILNFINEFHNYPASLKGIDDDVFSIEKKDEIPKLLHNYFNEIINLLQEEKMVKKYNQDDLVSICYDFENYILLKMHDKLLPDFPSKCDEFLYKKCLRLDFITPENMNADKKMINEDLLLTVTEYINKIDIKYTPIDKINMFGKAFQILQDSMSFSSGKSDVGTDDVLPLLHYVMIKAKPKMIYTNYVFCKYYINQNLLKKQTGFLLAQIGMFVKIICNMKFSNLKGVTEEQFGVDEEMPEDLKDIENKFEKLNP

SEQ ID NO: 1057 - protein, 755 aa, unidentified
  REGION 1..755: note = Category: MG60 effectors
  REGION 1..755: note = Description: MG60-272 effector
  source 1..755: note = uncultivated organism sequence
MHELIEKREPKEEKPMKIIKRNGAEVVFDIDKIIMAVTKANDAVDEKVRMTPLQIERISQSVQIACEEMGRSPSVEEIQDLVEKAIMAHGAFEVAKEYITYRYTRSLLRQSNTTDDRILSLIECNNEEVKQENANKNPTINAVQRDYMAGEVSKDITSRILLPKEVVDAHEAGIIHFHDADYYAQHMHNCDLVNLEDMLQNGTVISGTLIEKPHSFSTACNIATQIIAQVASNQYGGQSISLTHLAPFVQVSREKIRKTVEREMAAFGVAPADETISKVVEDRLREEVRRGVQTIQYQVVTLMTTNGQAPFITVFMYLNEAKSEQEKKDLAMIIEETLRQRYEGVKNEKGVWITPAFPKLIYVLEEDNVREGTPYWYLTRLAAQCTAKRMVPDYISEKKMREYKLSKGETPGHGDVYTCMGCRSFLTPDRSGNGWDNVARAGNYEPGKPKYYGRFNQGVVTINLVDVALSSGRDMTKFWEVFEDRLELCHRALRCRHERLKGTLSDAAPILWQYGALARLPKGEPIDKLLYGGYSTISLGYAGLYECVKYMTGKSHTDDEAKPFALSVMQKMNDKCLQWKTAENIDYSLYGTPLESTTYKFAKCLQKRFGLIPGITDKSYITNSYHVHVTEPIDAFTKLRFEAEFQQLSPGGAISYVEVPNMQNNIDAVLEVMQFIYDNIMYAELNTKSDYCQVCGYDGEIEIKEDDGKLIWVCPQCGNTDQNKMNVARRTCGYIGTQFWNQGRTQEIKDRVLHL

SEQ ID NO: 1058 - protein, 924 aa, unidentified
  REGION 1..924: note = Category: MG60 effectors
  REGION 1..924: note = Description: MG60-273 effector
  source 1..924: note = uncultivated organism sequence
MNLILYVNIVFIFYLTYSEELNKINFNKISFEYKYKANKRYLLNNKNQKLNNIVNIYNPYEKIAYISNTKNENGDLFITTNSENKNDNTRLVYGLKKDFTNYFRDNEGSYRIVMTNLESDNIYPSITSLTINKEEYLISFSHDGVFESLDYNKGHAYGRYSYTAIGYTSNVNKNTFIKLKYYNNSNYVLNSHIAKDGKSNFFFLIKINFRNGNLTKNRPDPVNETRVEKGFIGALATCFEIKEYIECLYTNSERYYKASIFDVLNFGNLYSKIIDENIVSEPQLFSKCIYFKDSIGAFIYYLSQNIQPILTFLKLTTPSPLSDDFNLDNYLGPITLNSNSKFDLGYGYASNDLIKLNDNNIIFTSVSNNYENIIIILIKLLKEDKNILINYYNIELNNEYNIKIYKDITTFTINNLFGIGMTNYNYSLSSSKTYSNYFIIGINSSNNISISEEIDIFDEDNIYGFKIKEININIDNNIFGYYFSGIQIINILNENLTDDNLGFYLYSNNSDKKIELNESVLYDDIINFKVIEDLGVKKDLYSIAFLPIISEANSTDYISIPDSIELFPENYANLEYFYQPDIFYGKKAFISFGVKNCYKTCQTCSYYGNHINHHCESCSTKYPYNTFNNCYNLTFKETNILTNEIISTQVNIIDTQNISSEIQEISRETSKNHDKDCDIKALFKKQCLYDEKYSKTNKDLIKDIKQSFKEHSLDDILEDLIKINEDFIIEKENVLYQITTSYNQNNKIYYNLSSIKLGKCEQILKANNNLTENESLIIFKVEYYIEGYIIPLIDYEVYNPRTKNKINLNLCQSEKIDIIHHITIDENELFKYDPESDYYNDICYAYTTTDETDIILKDRREEFLKNNLTLCENNCQFKGYDPKFHIVNCKCDIKTDLQCIFDSNFDIKRLTYNFLDIKNIINIL

SEQ ID NO: 1059 - protein, 920 aa, unidentified
  REGION 1..920: note = Category: MG60 effectors
  REGION 1..920: note = Description: MG60-274 effector
  source 1..920: note = uncultivated organism sequence
MASKFHWNASYSIYDKYFQCGKFIDLDKFDCPCETFGYNAFEKPPLTTEEKQLMHRFTFDAEQKHFTDMQIFAWQTKQRFWELYEELKFPFPENATITDNLIYPEKFDYQMERELQKRFCALKCYYNPRECYHNENHIGKLDKLMKKDFHQQFNPRFEKQFERNSVPKLKWKSKTSYPKEGLNELVDNDLGIWSKLFYDENGIAINFSLFTKENCEYGENVKYLGRPYCHFETKKFLDVIIALIEVTKDSFDNAQLEANKVYSESIECKGPIRRPILNQMPWGPVSFNEENPPCKGYMCNFVKRGNNFWNLEQYKIHKLHCCRYFSKHHYWMFTHSDKFVCNSGKIGQLYGPAMTRDACIVYPCNQTYCNQTCTCKFCTRRGECSSDLHKKHLARPTFKGNNLVMEDLSLECLVQKSSQCQEHWVTHPDKFKRKEDIEVEKNLYFHNGKLVKTPRDIAVQIIKFSGIKKSCDNCKEDVEDHFKEHMFPHLQCKLCLFMLRDATFWKMICYICNKNMVNFSAEQIKRHKRYHEKGFFGCQFCKYKTQKKFNMTRHLEEVHNHYKSSDEDISDCDESEGVSAGDNELSIHDSESGTEWDSNSDNEYGDDSDTDEYDDSLFKQDLFDPFVVKVKRKTRLFPEKEYVCTEAQCDKKFFYERNLHRHINSEHGENNEYSCGQCKKIFNRKDTLARHQFEVHGNLGDGTYRFPGTTSINNNFSCEQCGVKFKRKPYLKRHINEVHQLQDRQYDCEKCGKKFTRQEKMKRHIHDVHELQDGQYVCEECGKKFKRQQDMKRHIHEVHELQDGQYVCEECGKKFKRQQDMKRHMHEVHELHDRQYVCEECGQKFERQENMKTHIHEVHEKEDPQYPCEKCDKKFKRKYHLNRHIHDKHDSSGWEYICDLCGKSFKSKSNLKEHLHTHKM

SEQ ID NO: 1060 - protein, 768 aa, unidentified
  REGION 1..768: note = Category: MG60 effectors
  REGION 1..768: note = Description: MG60-275 effector
  source 1..768: note = uncultivated organism sequence
MFCSCKKNLCVVIYIYDATKTYDCAKKLIVYKSIIKGAEVMKIIKRNGAEETFDRQKIKDAIAKANNETDGTPELTDRQIDYISLVIEDHCNEMNRALSVEEIQELVETHIILQGAPETAKRYIRYRFTRNLARASNTTDNQILSLIECNNEEVKQENSNKNPTVNSVQRDYMAGEVSKDLTKRILLPEDIVKAHEEGLIHFHDADYFAQHMHNCDLVNLEDMLQNGTVISGTMIEKPHSFSTACNIATQIIAQVASNQYGGQSISLAHLAPFVQISREKITRQVRAEMEEFGIDADDEQVKSLVEKRVRDEIKRGVQTIQYQVVTLLTTNGQAPFVTVFMYLNEAKNEQEKKDLAIIIEEVLKQRIKGTKNEVGVWVTPAFPKLIYVLEEDNITEDSRFWYLTKLAAECTAKRMVPDYISEKIMLKLKIDKNGNGNCYTCMGCRSFLTPYVDENGKPKYYGRFNQGVVTINLVDVACTAARDGNKSEEKFWQVLDERLELCHRALQCRHERLEGTLSDAAPILWQYGALARLKKGEPIDKLLHGGYSTLSLGYAGLWECVYEIKGKKLTEKEGEEFGLRVMQRLNDACAEWKAAENIDYSIYGTPLESTTYKFAKCLQNRFGIIKGVTDRNYITNSYHIHVTEKIDAFSKLELESKFQKLSPGGAISYVEVPNMQQNIPAVLEVMKFIYNNIIYAELNTKSDYCQVCGYDGEIQIVEEDGKLVWRCPNCGNEDQSKMNVARRTCGYIGSQFWNQGRTQEIKERVLHL

SEQ ID NO: 1061 - protein, 755 aa, unidentified
  REGION 1..755: note = Category: MG60 effectors
  REGION 1..755: note = Description: MG60-276 effector
  source 1..755: note = uncultivated organism sequence
MHELIEKREPKEEKPMKIIKRNGAEVVFDIDKIIMAVTKANDAVDEKVRMTPLQIERISQSVQIACEEMGRSPSVEEIQDLVEKAIMAHGAFEVAKEYITYRYTRSLLRQSNTTDDRILSLIECNNEEVKQENANKNPTINAVQRDYMAGEVSKDITSRILLPKEVVDAHEAGIIHFHDADYYAQHMHNCDLVNLEDMLQNGTVISGTLIEKPHSFSTACNIATQIIAQVASNQYGGQSISLTHLAPFVQVSREKIRKTVEREMAAFGVAPAEETISKVVEDRLREEVRRGVQTIQYQVVTLMTTNGQAPFITVFMYLNEAKSEQEKKDLAMIIEETLRQRYEGVKNEKGVWITPAFPKLIYVLEEDNVREGTPYWYLTRLAAQCTAKRMVPDYISEKKMREYKLSKGETPGNGDVYTCMGCRSFLTPDRSGNGWDNVARAGNYEPGKPKYYGRFNQGVVTINLVDVALSSGRDMTKFWEVFEDRLELCHRALRCRHERLKGTLSDAAPILWQYGALARLPKGEPIDKLLYGGYSTISLGYAGLYECVKYMTGKSHTDDEAKPFALSVMQKMNDKCLQWKTAENIDYSLYGTPLESTTYKFAKCLQKRFGLIPGITDKSYITNSYHVHVTEPIDAFTKLRFEAEFQQLSPGGAISYVEVPNMQNNIDAVLEVMQFIYDNIMYAELNTKSDYCQVCGYDGEIEIKEDDGKLIWVCPQCGNTDQNKMNVARRTCGYIGTQFWNQGRTQEIKDRVLHL

SEQ ID NO: 1062 - protein, 755 aa, unidentified
  REGION 1..755: note = Category: MG60 effectors
  REGION 1..755: note = Description: MG60-277 effector
  source 1..755: note = uncultivated organism sequence
MHELIEKREPKEEKPMKIIKRNGAEVVFDIDKIIMAVTKANDAVDEKVRMTPLQIERISQSVQIACEEMGRSPSVEEIQDLVEKAIMAHGAFEVAKEYITYRYTRSLLRQSNTTDDRILSLIECNNEEVKQENANKNPTINAVQRDYMAGEVSKDITSRILLPKEVVDAHEAGIIHFHDADYYAQHMHNCDLVNLEDMLQNGTVISGTLIEKPHSFSTACNIATQIIAQVASNQYGGQSISLTHLAPFVQVSREKIRKTVEREMAAFGVAPAEETISKVVEDRLREEVRRGVQTIQYQVVTLMTTNGQAPFITVFMYLNEAKSEQEKKDLAMIIEETLRQRYEGVKNEKGVWITPAFPKLIYVLEEDNVREGTPYWYLTRLAAQCTAKRMVPDYISEKKMREYKLSKGETPGHGDVYTCMGCRSFLTPDRSGNGWDNVARAGNYEPGKPKYYGRFNQGVVTINLVDVALSSGRDMTKFWEVFEDRLELCHRALRCRHERLKGTLSDAAPILWQYGALARLKKGEPIDKLLYGGYSTISLGYAGLYECVKYMTGKSHTDDEAKPFALSVMQKMNDKCLQWKTAENIDYSLYGTPLESTTYKFAKCLQKRFGLVPGITDKSYITNSYHVHVTEPIDAFTKLRFEAEFQQLSPGGAISYVEVPNMQNNIDAVLEVMQFIYDNIMYAELNTKSDYCQVCGYDGEIEIKEDDGKLIWVCPQCGNTDQNKMNVARRTCGYIGTQFWNQGRTQEIKDRVLHL

SEQ ID NO: 1063 - protein, 812 aa, unidentified
  REGION 1..812: note = Category: MG60 effectors
  REGION 1..812: note = Description: MG60-278 effector
  source 1..812: note = uncultivated organism sequence
MDDIGEKLMAENAESDKEELGLICPKCGKKIIDDGTAYRCEAGDFKCGKEILGTEISRDELQKAIAGQSDELGFRSSKTGKTFLARLVLSEAKDSLDFRFSDRNGEDSGLKCPKCGGKIVDDGKAYKCESGDFKCWKIIRGHEITREELQKIFAGQGDKLEFTSKKTGKPFTSRLVLNEDKDGIDFEFAVRKKDDTGLKCPKCHGKIIDAGPIYRCEVGDFKCDKEILGTEITRDELQKVIDEGSSDELDFTDQDTGKPYTARLKLSSDKKSVEVPKPEDTGEKCPNCRNKIMETDKAYWCESCNFTCDKEILGTRISHDDLHKIVEEGNSDELDFTDHDSGKSYKAHLNLSSDKQTVDVPKPEDTGEKCPNCRNKIMETDKAYWCESCNFTCDKEILGTRISHDQLHKIVEEGRSDELDFADHDSGKSYKARLNLSEDNKTVVVPKPKDTGIKCPKCTMKIMETDRAYWCESEACDFTCDKEILDTKITRDELKKVVLNGKSGKLDFTDKDTKKPYKGRLVLNKKKNGLHVDKLDYMKVIFAVISFVVATISFIGIFLPDLFNMNKGSITRFETTLSDKKSAQKLEEFLDANVGKIVELTIHYKQNLVYGLVPWAKYSEDSYYGVKYDPAKDGSWWWDSASAAHDVTFSHFGDNNRFYVKSFLYDKNLFEVEYRDFGGIGYCDAITRYAYQLMIPYVKNDKLAFEWQRDREKSKDYVALPSPYWVLKGTFVVNVKKGEELTDNITTLYDEFQQRKLRSDYGKDYVVPEIAKILAVDPACGERTGNGDYSFSGKSFELEPLTQQQLLQMAYN

SEQ ID NO: 1064 - protein, 728 aa, unidentified
  REGION 1..728: note = Category: MG60 effectors
  REGION 1..728: note = Description: MG60-279 effector
  source 1..728: note = uncultivated organism sequence
MDAVHTNVIKRNGEEVNFDLDKIVNAINAANKEVDRLHQLNDYQVQAIADNIAKQIEIMTHAIHVEDIQDMVETGIMEMRGYEVAQKYVRYRYKRELARKSNTTDNGILALIDHMNEEVNQENSNKNPVINSTQRDYMAGEVSKDLTKRMLLPKEIVEAHEQGIIHFHDSDYFAQREHNCDLVNLEDMLQNGTVISETMIEKPHSFFTACNVTTQIVAQVASNQYGGQSFTLSHIAPFVDVSRKKIREQVIEERKMCGEALDEEVISKITESRLRAEVKSGIQTIQYQLITLMTCNGQAPFVTMFMYLDEVPEGQTRDDLAMIIEEVLQQRIQGVKNEKGIWITPAFPKLIYVLDKDNITEDSKYWYLTELAAKCTAKRMVPDYISAKVMRELKNGDVYPCMGCRSFPTSEDSQRNPDGTRKYYGRFNQGVVTINLVDVACSAEGHIDRFWEILESRLELCHRALRCRHERLLGTVSDVAPILWQHGALARLKKGETIDKLLFNGYSTISLGYAGLCEMCVRMTGKTHTSPEGKKLALEVMQKLNDKCKEWKEAENISYSVYGTPMESTTYKFAKCLQKRFGIIKGVTDKNYITNSYHIHVTEPVNAFDKLKFESEFQKLSPGGAISYVEVPNLQDNVEAVISVMKFIYDNILYAELNTKSDYCEICGYDGEIKIVTDENGKLIWECPNCGNRDQNNLFVARRTCGYIGTQFWNQGRTQEIKDRVLHL

SEQ ID NO: 1065 - protein, 728 aa, unidentified
  REGION 1..728: note = Category: MG60 effectors
  REGION 1..728: note = Description: MG60-280 effector
  source 1..728: note = uncultivated organism sequence
MDAVHTNVIKRNGEEVCFNLDKIVNAITAANKEVDRLHQLNDYQVQAIADNIAKQIEIMTHAIHVEDIQDMVETGIMEMRGYEVAQKYVRYRYKRELARKSNTTDNGILALIDHLNEEVNQENSNKNPVINSTQRDYMAGEVSKDLTKRMLLPEEIVEAHEQGIIHFHDSDYFAQREHNCDLVNLEDMLQNGTVISETMIEKPHSFFTACNVTTQIVAQVASNQYGGQSFTLSHIAPFVDVSRKKIREQVIEERKMCGEALDEEVISKITESRLRAEVKSGIQTIQYQLITLMTCNGQAPFVTMFMYLDEVPEGQTRDDLAMIIEEVLQQRIQGVKNEKGIWITPAFPKLIYVLDKDNITEDSKYWYLTELAAKCTAKRMVPDYISAKVMRELKNGDVYPCMGCRSFPTSEDSQRNPDGTRKYYGRFNQGVVTINLVDVACSAEGHMDRFWEILESRLELCHRALRCRHERLLGTVSDVAPILWQHGALARLKKGETIDKLLFNGYSTISLGYAGLCEMCVRMTGKTHTSPEGKKLALEVMQKLNDKCKEWKEAENISYSVYGTPMESTTYKFAKCLQKRFGIIKGVTDKNYITNSYHIHVTEPVNAFDKLKFESEFQKLSPGGAISYVEVPNLQDNVEAVISVMKFIYDNILYAELNTKSDYCEICGYDGEIKIVTDENGKLVWECPNCGNRDQNNLFVARRTCGYIGTQFWNQGRTQEIKDRVLHL

SEQ ID NO: 1066 - protein, 728 aa, unidentified
  REGION 1..728: note = Category: MG60 effectors
  REGION 1..728: note = Description: MG60-281 effector
  source 1..728: note = uncultivated organism sequence
MDAVHTNVIKRNGEEVNFDLDKIVNAINAANKEVDRLHQLNDYQVQAIADNIAKQIEIMTHAIHVEDIQDMVETGIMEMRGYEVAQKYVRYRYKRELARKSNTTDNGILALIDHMNEEVNQENSNKNPVINSTQRDYMAGEVSKDLTKRMLLPKEIVEAHEQGIIHFHDSDYFAQREHNCDLVNLEDMLQNGTVISETMIEKPHSFFTACNVTTQIVAQVASNQYGGQSFTLSHIAPFVDVSRKKIREQVIEERKMCGEALDEEVISKITESRLRAEVKSGIQTIQYQLITLMTCNGQAPFVTMFMYLDEVPEGQTRDDLAMIIEEVLQQRIQGVKNEKGIWITPAFPKLIYVLDKDNITEDSKYWYLTELAAKCTAKRMVPDYISAKVMRELKNGDVYPCMGCRSFPTSEDSQRNPDGTRKYYGRFNQGVVTINLVDVACSAEGHMDRFWEILESRLELCHRALRCRHERLLGTVSDVAPILWQHGALARLKKGETIDKLLFNGYSTISLGYAGLCEMCVRMTGKTHTSPEGKKLALEVMQKLNDKCKEWKEAENISYSVYGTPMESTTYKFAKCLQKRFGIIKGVTDKNYITNSYHIHVTEPVNAFDKLKFESEFQKLSPGGAISYVEVPNLQDNVEAVISVMKFIYDNILYAELNTKSDYCEICGYDGEIKIVTDENGKLIWECPNCGNRDQNNLFVARRTCGYIGTQFWNQGRTQEIKDRVLHL

SEQ ID NO: 1067 - protein, 728 aa, unidentified
  REGION 1..728: note = Category: MG60 effectors
  REGION 1..728: note = Description: MG60-282 effector
  source 1..728: note = uncultivated organism sequence
MDAVHTNVIKRNGEEVCFNLDKIVNAITAANKEVDRLHQLNDYQVQAIADNIAKQIEIMTHAIHVEDIQDMVETGIMEMRGYEVAQKYVRYRYKRELARKSNTTDNGILALIDHLNEEVNQENSNKNPVINSTQRDYMAGEVSKDLTKRMLLPEEIVEAHEQGIIHFHDSDYFAQREHNCDLVNLEDMLQNGTVISETMIEKPHSFFTACNVTTQIVAQVASNQYGGQSFTLSHIAPFVDVSRKKIREQVIEERKMCGEALDEEVISKITESRLRAEVKSGIQTIQYQLITLMTCNGQAPFVTMFMYLDEVPEGQTRDDLAMIIEEVLQQRIQGVKNEKGIWITPAFPKLIYVLDKDNITEDSKYWYLTELAAKCTAKRMVPDYISAKVMRELKNGDVYPCMGCRSFPTSEDSQRNPDGTRKYYGRFNQGVVTINLVDVACSAEGHIDRFWEILESRLELCHRALRCRHERLLGTVSDVAPILWQHGALARLKKGETIDKLLFNGYSTISLGYAGLCEMCVRMTGKTHTSPEGKKLALEVMQKLNDKCKEWKEAENISYSVYGTPMESTTYKFAKCLQKRFGIIKGVTDKNYITNSYHIHVTEPVNAFDKLKFESEFQKLSPGGAISYVEVPNLQDNVEAVISVMKFIYDNILYAELNTKSDYCEICGYDGEIKIVTDENGKLVWECPNCGNRDQNNLFVARRTCGYIGTQFWNQGRTQEIKDRVLHL

SEQ ID NO: 1068 - protein, 725 aa, unidentified
  REGION 1..725: note = Category: MG60 effectors
  REGION 1..725: note = Description: MG60-283 effector
  source 1..725: note = uncultivated organism sequence
MKVIKRSGVETKFDVNKIILAISKANQSTEPEHRISDEEIRRISENIAAQCKKLRKSMNVEEIQDLVENELMSEGTHELAKNYITYRYSRALVRKANTTDAQIMSLIECNNEEVKQENSNKNPTVNSVQRDYMAGEVSKDITKRFLLPEDVVEAHEEGIIHFHDADYFAQHMHNCDLVNLEDMLQNGTVISGTLIEKPKSFSTACNIATQIIAQVASSQYGGQSISLSHLAPFVQVSRDRITKEVQEESRLTGLELSEEQIGIIVERRLRDEIKKGVQTIQYQVVTLMTTNGQAPFVTVFMYLNEVKDPKVREDLALIIEECLNQRYEGVKNEQGVWITPAFPKLIYVLEEDNIREDSKYWYLTKLAAKVTAKRMVPDYISEKKMLEYKIDKNGNGNCYPCMGCRSFLTPYVDENGKPKYYGRFNQGVVTINLVDIACSSNRDHDKFWKIFDDRMNLCHRALQARHNRLKGTLSDVAPILWQYGAIARLKKGEKIDKLLYGGYSTISLGYAGLWETVYYMTGKKMTEPEGTEFGLKIMEKLNEYTGKWKKAENIDYSLYGTPLESTTYKFARCLKKRFGIIEGVTDKNYITNSYHIHVTEPINAFEKLIFESRFQKLSPGGAISYVEVPNMQNNIEAVLEVIKCIYENIMYAELNTKSDYCQCCGYDGEILIVKDEDGKLVWECPRCGNRDQSKLNVARRTCGYIGTQFWNQGRTEEIKERVLHL

SEQ ID NO: 1069 - protein, 768 aa, unidentified
  REGION 1..768: note = Category: MG60 effectors
  REGION 1..768: note = Description: MG60-284 effector
  source 1..768: note = uncultivated organism sequence
MKIRSTNCIQRAKPGKVNKMNNIIKRSGKEVEFDKKKIENAIKKANAATETAAQMSEAEIVVVMDRILANLDLVPHAISVEEVQDEVEAQIAKIGAFKVAKNYITYRYTHELRREANTTDDKILSLLDLTNEEVKQENSNKNPVVNSVQRDYMAGETSKDLTRRILLPEDISKAHDDGLIHFHDTDYFAQKMFNCQLVDLEGMFNYGHRHGQEITTALSGHGISAPKSFSTAANIATQVIAQVASNQYGGQTITLTDFVGGRHADAINFVDVSRQKWIKKIAEENAAVGTEMTDEQIKKVAEIRLIDEIKSGIQLIQYQLITLQTTNGQAPFITVFMYLNEVYCDDAQKKEDLALLIKLMLEQRIKGVQDQKGNWITPAFPKLIYVLEDDNIEEGSKYYDLTVLAAKCTAKRMVPDYLSEKVMRQLKGDVYPPMGCRSFLTPDKEGMGDNGEHKYYGRFNQGVITINLVDIACSSKKNEDKFWEIFEDRMENLVHKGLRIRHERLLGTPSDVSPIHWQDGAVSRLQSGETIDKLLYNNYSTISVGYAGLAETVYYMKGLSHTSKEGREFGLKVMQFLNDKCAKWRAEENISYSVYGTPLESTTYKFAKCLQKRFGMIDNVTDKNYITNSYHVRVTEEINAFDKLTKEAAFQELSPGGAISYVEIPNLQNNIDAVLAIMKHIYNTIMYAELNSKSDLCECCGYDGEIQIVEDDNKKLIWKCPNCGNTDQTKMHVARRTCGYIGTQYWNQGRTQEIKERVMHVSNPEINL

SEQ ID NO: 1070 - protein, 720 aa, unidentified
  REGION 1..720: note = Category: MG60 effectors
  REGION 1..720: note = Description: MG60-285 effector
  source 1..720: note = uncultivated organism sequence
MKIIKRNGEEAVFDSRKIELAISKANLEAPMAEQMSAETIHNIAINIEKQCMSENHEMNVEDIQDIVEKEIMKAGAFDIAKKYITYRYQHELMRKANSTDKQIMSLLECQNEEVKQENSNKNSTVVSVQRDYMAGEVSKDITKRFLLDEDIVQAHNEGIIHFHDSDYFAQHMHNCDLVNLEDMLQNGTVISGTRIDTPHSFSTACNIATQIIAQVASSQYGGQSISLAHLAPFVDVSRKKISREMHRMEEETGVYYNEEQFNHIVKARLREEITRGVQTIQYQVVTLMTTNGQSPFVTVFMYLNEAKDEQTKADLALIIEEVLKQRYQGVKNEAGYWVTPAFPKLIYVLEEDNITEESKYFYLTELAAKCTARRMVPDYISEKKMKALKEGNCYPCMGCRSFLSVYHDENGKPKFYGRFNQGVVTLNLVDVACSSGGDYNKFWQILDERLKLCYRALMARHKRLLGTPSDVAPILWQNGALARLKKGEVIDKLLFGGYSTISLGYAGLCECVRYMTGKSHTDPEATPFALKVMKTLNDACEKWKERTNIGFSLYGTPMESTTYKFAKCLKRRFGEIEGVTDKNYITNSYHVHVTEPVDAFTKLTFESQFQELSPGGAVSYVEVPNMEGNIPAVIALLKHIYEKIMYAELNTKSDCCQKCGYTGEIRIVTDSDNKLVWQCPQCGNTDQSTMNVARRTCGYIGTQFWNQGRTQEIKERVLHL

SEQ ID NO: 1071 - protein, 723 aa, unidentified
  REGION 1..723: note = Category: MG60 effectors
  REGION 1..723: note = Description: MG60-286 effector
  source 1..723: note = uncultivated organism sequence
MRIIKRNGSEEDFNIEKIINAVKKANGSGEHKFLTDEQIEDVADYVEYKCNKIRRAVSVEEIQDMVEDQLMAKGAFELARRYVRYRYNRSLVRKANTTDNRILSLIECNNEEVKQENSNKNPTVNSVQRDYMAGEVSRDLTRRMLLPADIVEADKEGIIHFHDSDYFAQHMHNCDLVNLEDMLQNGTVISDTLIERPHSFSTACNIATQIIAQVASNQYGGQSISLAHLAPFVQVSREKIRRETLAEIEELGVHPTEEKINDIVEQRLRKEVNRGVQTIQYQVVTLLTTNGQAPFVTVFMYLNEAKNEQEKHDLAMIIEETLKQRHKGVKNEKGVWITPAFPKLIYVLEEDNITEDSKYWYLTELAAKCTAKRMVPDYISEKVMLQSKIDKNGEGHCFTCMGCRSFLTPYVDENGKPKYYGRFNQGVVTVNLIDIGLSAGKDLDKFWKIFDERMELCHRALQCRHERLTGTLSDAAPILWQYGALARLKKGEKIDKLLHGGYSTLSLGYAGLWECVYSLIGKKLTEKEGKELGLKIMQKLNDYCAKWKKEENIDYSIYGTPLESTTYKFAKCLQKRFGIIKGVTDKNYITNSYHVHVTENIDAFSKLKLESEFQALSPGGAISYVEVPNMQDNIPAVLQVIKFIYDNIMYAELNTKSDYCQVCGYDGEIKIVHDDGKLVWECPNCGNRDQDKMNVARRTCGYIGTQFWNQGRTQEIEERVLHL

SEQ ID NO: 1072 - protein, 755 aa, unidentified
  REGION 1..755: note = Category: MG60 effectors
  REGION 1..755: note = Description: MG60-287 effector
  source 1..755: note = uncultivated organism sequence
MSKYPETLIGDWLKDSGNWFLDEEMECVGRMSRALYPYKSMFSPIRVNGITLKNRLVMAPMGNISQAEETGRPNQSMIAYFEERAKGGVGLITSGLIPVSFGIDHTLTEPGGLTYFPKILGSRTFFSGWRDIAHNTHSAGAHFFIQLTAGLGRVGNPQCLVNQHKFPVSASLNPNYYLPAVPCLRISGRKLKKIVKNFGQAAADAKTATIDGVYLHGHEGYLLEQMSNTAFNRRKWGRYADWQAFGLDIVREIRKRTGPDYPIMYRINLSLALNATYGKRMQTVKTLKKFSNERTIEQTLDYMKNLVQAGVDMFDVDLGCYDNWWLPHPPTTMKPGVFLEVAKLVKDHFAENSIVSNKGLPVPIVAVGKLGYPDLAEKAIADEMCDMVMLGRPLLADPMWPRKAYAGQVQEIRPCIGCQEACINEFVEGGHPSCAVNPRTSHESTLPEKPLPAPIKKKVAVVGAGPAGFECAMAALDRGHEVHLIDKQEGVGGMVRLAAIPAFKRDVTNYLEWMERTVDQRVKDNPDFQLMLNTEATLYMLEDGKYDAIVCATGSREKTPGVEGLEKAVFARALLLDTSLLDGKEKIVVVGGGTVGCEVALMLAAEYGRKVTVLEMLPTLMSHVSTANRTHLIHELEKHSVTLINCAKLEKIEDNSVAVYVNESPTVPDPYNTWNPVLPENVPNPLAKPIKSEYKMRSIDADLVVLAVGHEQDNTLHRLIKDAYITPELHLLGDAAHTGMIMHAVRAGYRTGLSI

SEQ ID NO: 1073 - protein, 642 aa, unidentified
  REGION 1..642: note = Category: MG60 effectors
  REGION 1..642: note = Description: MG60-288 effector
  source 1..642: note = uncultivated organism sequence
MKVIKRDGRVVDFNREKIAIAIEKANQEVTEKERADKQDIKDIIKYIESLDKKRILVEDVQDIIEEQLMDKKKFKLAKKYMIYRYNRALVRKKNTTDESILGLIKNQNMEMLEDGTRKNAVLASSQRDYIAGEVSKDLTKRLLLPEKIVKAHEEGVLYFHDMDYFLQPIFNSSVISIGDMLDNGTVINGKLIESPKSFRVACTVLAQILATVASTQYGGQSVDISHLGKYVRKSYEKFKEEFEQDLGGKLSEEILDKKIKEEVTSGVQTLQYQINTLMTTNGRSPLVSLFMYLREDDEYIKENALIIEEILKQRIEGMKDSEGKYINPEFPKLIYVIDENNCLNGEKYDYLTQLALECANKTQEPSFISAKKMRENYSGNVFSPMGFRSFLTPWKDENGTYKFEGRFNQGIVSINLPQIAIVADGDEDKFFSLLDERLELCHEALLCRHYALLGTVSDTSPIHWIYGAIAHLKSGEKIDKYLKDGYSTISLGYVGVYEATMMMKEVSNTEPNGKEFAIKIVKHLKETVEKWKKASGLGFCLYGETSQKVCKTFERIDKERFGVIKNVTDKEKYTSSYHASEDEKIDYKEKLAFESVFQKLSLGGVVSQIPSEYIGELSDKEEFIKFVYDNVQYLEFTKELKK

SEQ ID NO: 1074 - protein, 728 aa, unidentified
  REGION 1..728: note = Category: MG60 effectors
  REGION 1..728: note = Description: MG60-289 effector
  source 1..728: note = uncultivated organism sequence
MDAVHTNVIKRNGEEVNFDLDKIVNAINAANKEVDRLHQLNDYQVQAIADNIAKQIEIMTHAIHVEDIQDMVETGIMEMRGYEVAQKYVRYRYKRELARKSNTTDNGILALIDHMNEEVNQENSNKNPVINSTQRDYMAGEVSKDLTKRMLLPKEIVEAHEQGIIHFHDSDYFAQREHNCDLVNLEDMLQNGTVISETMIEKPHSFFTACNVTTQIVAQVASNQYGGQSFTLSHIAPFVDVSRKKIREQVIEERKMCGEALDEEVISKITESRLHAEVKSGIQTIQYQLITLMTCNGQAPFVTMFMYLDEVPEGQTRDDLAMIIEEVLQQRIQGVKNEKGIWITPAFPKLIYVLDKDNITEDSKYWYLTELAAKCTAKRMVPDYISAKVMRELKNGDVYPCMGCRSFPTSEDSQRNPDGTRKYYGRFNQGVVTINLVDVACSAEGHMDRFWEILESRLELCHRALRCRHERLLGTVSDVAPILWQHGALARLKKGETIDKLLFNGYSTISLGYAGLCEMCVRMTGKTHTSPEGKKLALEVMQKLNDKCKEWKEAENISYSVYGTPMESTTYKFAKCLQKRFGIIKGVTDKNYITNSYHIHVTEPVNAFDKLKFESEFQKLSPGGAISYVEVPNLQDNVEAVISVMKFIYDNILYAELNTKSDYCEICGYDGEIKIVTDENGKLIWECPNCGNRDQNNLFVARRTCGYIGTQFWNQGRTQEIKDRVLHL

SEQ ID NO: 1075 - protein, 765 aa, unidentified
  REGION 1..765: note = Category: MG60 effectors
  REGION 1..765: note = Description: MG60-290 effector
  source 1..765: note = uncultivated organism sequence
MSEKHHSHCLDAMEINDLQCIVRVRSILYRNIKEGVIMDAVHTNVIKRNGEEVNFDLDKIVNAINAANKEVDRLHQLNDYQVQAIADNIAKQIEIMTHAIHVEDIQDMVETGIMEMRGYEVAQKYVRYRYKRELARKSNTTDNGILALIDHMNEEVNQENSNKNPVINSTQRDYMAGEVSKDLTKRMLLPKEIVEAHEQGIIHFHDSDYFAQREHNCDLVNLEDMLQNGTVISETMIEKPHSFFTACNVTTQIVAQVASNQYGGQSFTLSHIAPFVDVSRKKIREQVIEERKMCGEALDEEVISKITESRLRAEVKSGIQTIQYQLITLMTCNGQAPFVTMFMYLDEVPEGQTRDDLAMIIEEVLQQRIQGVKNEKGIWITPAFPKLIYVLDKDNITEDSKYWYLTELAAKCTAKRMVPDYISAKVMRELKNGDVYPCMGCRSFPTSEDSQRNPDGTRKYYGRFNQGVVTINLVDVACSAEGHMDRFWEILESRLELCHRALRCRHERLLGTVSDVAPILWQHGALARLKKGETIDKLLFNGYSTISLGYAGLCEMCVRMTGKTHTSPEGKKLALEVMQKLNDKCKEWKEAENISYSVYGTPMESTTYKFAKCLQKRFGIIKGVTDKNYITNSYHIHVTEPVNAFDKLKFESEFQKLSPGGAISYVEVPNLQDNVEAVISVMKFIYDNILYAELNTKSDYCEICGYDGEIKIVTDENGKLVWECPNCGNRDQNNLFVARRTCGYIGTQFWNQGRTQEIKDRVLHL

SEQ ID NO: 1076 - protein, 733 aa, unidentified
  REGION 1..733: note = Category: MG60 effectors
  REGION 1..733: note = Description: MG60-291 effector
  source 1..733: note = uncultivated organism sequence
MKIIKRNGKEVDFDVTKIQNAIRKESKATIDECLSEEEIKEISDYLTFKIGKLHYSPNVEEIQHMVQKQIMAAGKFNIATNYIEYRYKHDLMRKANSTDDVILSIIDRDNEEIKQENSNKNPTVNSVQRDYMAGEISKDLTSRIILPEDVLQAHKEGIIHVHDMDYFVQHMHNCDLVNLEDMLQNGTVISETMIEKPHSFSTACNITTQIIAQVASNQYGGQSISLAHLAPFVDISRKKIRKQLIEEEAATGIKLDEKQLDSVIELRLKEEIKRGIQMIQYQVVTLETTNGQTPFITESMYLNEAKNEQEKHDLAMLIEETLKQRIQGVKNENGVWITPAFPKLIYILEEDNINEDAPYYYLTELAAKCTAKRMVPDYVSEKIMLELKGDVYPPMGCRSFLTPDRFTDEGVGNISNANNYESDKHKYYGRFNQGVVTINLVDVALSSKGNINDFWKIFDERLNLCKKALICRHKRLLGTTSDAAPILWQHGALARLKKGEKIDKLLFNGYSTISLGYAGLYECTYYMTGKSHTDDNGGKPFAIAVMEYLNDKCNEWKKETNIDFSLYGTPLESTTYKFAKCLQKRFGKIENVTDHNYITNSYHVCVRENIDAFTKLKFESEFQKLSPGGCISYVEVPNMLNNIPAVLQVIKYIYDNIMYAELNTKSDYCQCCGYDGEIQIVENEDGKLIWHCPKCGNEDQEKMNVARRTCGYIGTQFWNQGRTQEIKDRVLHL

SEQ ID NO: 1077 - protein, 765 aa, unidentified
  REGION 1..765: note = Category: MG60 effectors
  REGION 1..765: note = Description: MG60-292 effector
  source 1..765: note = uncultivated organism sequence
MSEKHHSHCLDAMEINDLQCIMRVRSILYRNIKEGVIMDAVHTNVIKRNGEEVNFDLDKIVNAINAANKEVDRLHQLNDYQVQAIADNIAKQIEIMTHAIHVEDIQDMVETGIMEMRGYEVAQKYVRYRYKRELARKSNTTDNGILALIDHMNEEVNQENSNKNPVINSTQRDYMAGEVSKDLTKRMLLPKEIVEAHEQGIIHFHDSDYFAQREHNCDLVNLEDMLQNGTVISETMIEKPHSFFTACNVTTQIVAQVASNQYGGQSFTLSHIAPFVDVSRKKIREQVIEERKMCGEALDEEVISKITESRLRAEVKSGIQTIQYQLITLMTCNGQAPFVTMFMYLDEVPEGQTRDDLAMIIEEVLQQRIQGVKNEKGIWITPAFPKLIYVLDKDNITEDSKYWYLTELAAKCTAKRMVPDYISAKVMRELKNGDVYPCMGCRSFPTSEDSQRNPDGTRKYYGRFNQGVVTINLVDVACSAEGHMDRFWEILESRLELCHRALRCRHERLLGTVSDVAPILWQHGALARLKKGETIDKLLFNGYSTISLGYAGLCEMCVRMTGKTHTSPEGKKLALEVMQKLNDKCKEWKEAENISYSVYGTPMESTTYKFAKCLQKRFGIIKGVTDKNYITNSYHIHVTEPVNAFDKLKFESEFQKLSPGGAISYVEVPNLQDNVEAVISVMKFIYDNILYAELNTKSDYCEICGYDGEIKIVTDENGKLIWECPNCGNRDQNNLFVARRTCGYIGTQFWNQGRTQEIKDRVLHL

SEQ ID NO: 1078 - protein, 733 aa, unidentified
  REGION 1..733: note = Category: MG60 effectors
  REGION 1..733: note = Description: MG60-293 effector
  source 1..733: note = uncultivated organism sequence
MKILKRNKVEVEFDSSKIVNAITKANNSVLEAERLGSECINKIASEVVSDCEALDRVVSVEEVQDMVEKKIMEAGAYQVAKNYITYRYTRQLQRQKNTTDDAILSLVAHKNEEAKEENANKNPIIASTQRDYVAGEVSKDLTMRVLLNDPEIAEAHENGIIHFHDADYFLQTIHNCDIWNLDDMLQNGTVISGVMIDKPKSFATACNIATQIVAQVASSQYGGQTFSLAHLAPFVDVSRQKWAKKIRKDMEEAGVSYTDAQFDQLVENRVREEIQNGVQTIQYQLVTLMTTNGQTPFVSVFMYLDEVPEGRTRDDLAMIIEEVLVQRKKGLKNKVGHWVVTAFPKLLYVLDEDNIYPDSKYYYLTKLAAECTAKTMVPDYISAKKMREFKGDVYACMGCRSFLTPDRFTDAGVGNIAKAKNYVPGQHKYYGRFNQGVVTINLVDVACSSYKDMDKFWQILNDRLELCHRALQKRHKRLKGTLSDVAPILWQYGALARLEPGEVIDPLLYDGYSTISLGYAGVYEMTRYMTGESHTEPNGQAFALKVMNALNDACAKWKKEENIDYSLYGTPMESTTYKFAKCLQKRFGIIPEVTDHSYITNSYHICVREPIDAFEKLSKEAEFQRLSPGGAISYVEVPNMQNNIPAVLAVMTHIYNTIMYAELNTKADYCQVCGYEGEIDLVNQEGKWIWKCPQCGCTDHSKMNIARRVCGYISTNDMNNGRKHEIAERVLHL

SEQ ID NO: 1079 - protein, 722 aa, unidentified
  REGION 1..722: note = Category: MG60 effectors
  REGION 1..722: note = Description: MG60-294 effector
  source 1..722: note = uncultivated organism sequence
MQVIKRNGTEVPFDETKIVNAITAANNGAGGRLTASQISEITDFVSFKCQKLHRSVSVETIQDMVEQQLMASGEYNVAKHYITYRYKRAEIRRGNTTDAKILSLVDCNNEEAKQENSNKNPTVNSVQRDYIAGEVSRDITERTLLPEDVVQAHKSGIIHFHDTDYYAQRMHNCDLVNLEDMLQNGTVISGTLIEKPHSFSTACNIATQIIAQVASNQYGGQSISLAHLAPFVQVSREKIRRELREEMEISDTQISPEAFNTIVETRVRREVNKGIQTIQYQVVTLLTTNGQAPFLTVFMYLNEAKDEQEKKDLAIIIEETLKQRIEGVKNEKGHWITPAFPKLIYVLEEDNITKDSKYWYLTELAAKCTAKRMVPDYISEKIMKQLKEGNCFPVMGCRSNLSPWKDENGNYKFYGRFNQGVVTINLVDVALSSHGNMEEFWRIFDERLALCYKALMCRHNRLKGTLSDAAPILWQYGAIARLKKGEKIDKLLYGGYSTISLGYAGLAECVRYMTGKSHTDPTATPFALAVMKHMNAACDEWKRETNIGFGIYGTPLESTTYKFAKCLQERFGIIEGVTDKNYITNSYHIPVTEQINAFDKLKFEAQFQALSTGGAISYVEVPNLEHNIDAVMKIITFIYDNIMYAELNTKSDYCQVCGYDKEIQIVTDENTGKLVWECPNCGNRDQNKMNVARRTCGYIGSQFWNQGRTQEIKDRVMHLSLE

SEQ ID NO: 1080 - protein, 728 aa, unidentified
  REGION 1..728: note = Category: MG60 effectors
  REGION 1..728: note = Description: MG60-295 effector
  source 1..728: note = uncultivated organism sequence
MDAVHTNVIKRNGEEVNFDLDKIVNAINAANKEVDRLHQLNDYQVQAIADNIAKQIEIMTHAIHVEDIQDMVETGIMEMRGYEVAQKYVRYRYKRELARKSNTTDNGILALIDHMNEEVNQENSNKNPVINSTQRDYMAGEVSKDLTKRMLLPEEIVEAHEQGIIHFHDSDYFAQREHNCDLVNLEDMLQNGTVISETMIEKPHSFFTACNVTTQIVAQVASNQYGGQSFTLSHIAPFVDVSRKKIREQVIEERKMCGEALDEEVISKITESRLRAEVKSGIQTIQYQLITLMTCNGQAPFVTMFMYLDEVPEGQTRDDLAMIIEEVLQQRIQGVKNEKGIWITPAFPKLIYVLDKDNITEDSKYWYLTELAAKCTAKRMVPDYISAKVMRELKNGDVYPCMGCRSFPTSEDSQRNPDGTRKYYGRFNQGVVTINLVDVACSAEGHIDRFWEILESRLELCHRALRCRHERLLGTVSDVAPILWQHGALARLKKGETIDKLLFNGYSTISLGYAGLCEMCVRMTGKTHTSPEGKKLALEVMQKLNDKCKEWKEAENISYSVYGTPMESTTYKFAKCLQKRFGIIKGVTDKNYITNSYHIHVTEPVNAFDKLKFESEFQKLSPGGAISYVEVPNLQDNVEAVISVMKFIYDNILYAELNTKSDYCEICGYDGEIKIVTDENGKLIWECPNCGNRDQNNLFVARRTCGYIGTQFWNQGRTQEIKDRVLHL

SEQ ID NO: 1081 - protein, 719 aa, unidentified
  REGION 1..719: note = Category: MG60 effectors
  REGION 1..719: note = Description: MG60-296 effector
  source 1..719: note = uncultivated organism sequence
MKIIKRNGSEETFDIQKIVVAVTKADKDNGERTLTDSQIEDIAEYVEFKCNKLNRAVSVEEIQDMVENQIMATGAFELARKYVRYRYKRSLVRKANTTDNRILSLIEYNNEDVKQENSNKNPAVNSVQRDYMAGEVSRDLTTRMLLPHDIVEADREGIIHFHDSDYYAQHMHNCDLVNLEDMLQNGTVISGTMIEKPHSFSTACNIATQIIAQVASNQYGGQSISLAHLAPFVDVSREKIRKEVISEQELVGMEYPEDVLNEIVERRLKKEITKGVQTIEYQVITLMTTNGQAPFLTVFMYLNEAKNEREKKDLAMIIEETLRQRYQGVKNEAGVWVTPAFPKLIYVLEEDNIEEGSEYYYLTELAAKCTAKRLVPDYISEKKMKELKEGNCFPVMGCRSCLSPWKDENGNYKFYGRFNQGVVTINLVDVALSSGGDMDKFWKIFDDRLELCYRALMCRHNRLKGTLSDAAPILWQFGALARLKKGEPIDKLLYGGYSTISLGYAGLYECVKYMTGKSHTDPDATPFALDVMKHMNDACNQWKEETNVAFSIYGSPIESTTYKFAKCLQKRFGIVPGITDKSYITNSYHVFVREEIDAFSKLKFESQFQALSSGGAISYVEVPDMKDNIAAVLQVIRFIYDNIMYAELNTKSDYCQECGYDGEIQIITDEEGKLVWECPHCGNRNQDTLNVARRTCGYIGTQFWNQGRTQEIKERVLHL

SEQ ID NO: 1082 - protein, 708 aa, unidentified
  REGION 1..708: note = Category: MG60 effectors
  REGION 1..708: note = Description: MG60-297 effector
  source 1..708: note = uncultivated organism sequence
MKVVKRDGRVVDFDRSKIVTAIQKANAEVRPKERANKEEVKSVIEYIESLDKKRILVEDIQDIIEEQLMAIGKYELAKKYIVYRYTRALVRKSNTTDESILKLIKNENKELAEENSNKNTMLASTQRDYIAGEVSRDLTRRILLPEKISKANDEGILHFHDADYFIQPIFNCCLINIGDMLDNGTVMNGKMIESPKSFQVACTVLTQIIAAVASNQYGGQSVDLIHLGKYLRRSYNKYRKAIEEKYKNKIPEHIIEDIVQERLRAELKSGVQTIQYQINTLMTTNGQSPFVTLFLHLEKDDPYIKENAMIIEEVIRQRYEGIKNEAGVYVTPAFPKLVYVIDDFNNLTGGEYDYLTELAVKCSAKRMYPDYISAKKMRENYEGNVFSPMGCRSFLSPWKDENGNYKFEGRFNQGVVSINLPQIAIIADGDEEKFWKLLDERLELCKEALMCRHNALVGTSSDISPIHWQYGAIARLKKGEKIDKLLYGGYSTMSLGYIGIYEMTKLMTGVSHTDPKGHEFAIKVMNHLRETTDRWKKETNIGFALYGTPAESLCYKFARIDKEKFGTIKDVTDKGYYTNSYHVDVREKIDAFDKLKFESEFQKISSGGAISYIEIPNMQNNLEALRSVVKFIYDNIQYAEFNTKSDYCHVCGYDGEIKINDDNEWECPNCGNKDHNKMTVVRRTCGYLGENFWNAGKTKEIKQRVLHL

SEQ ID NO: 1083 - protein, 724 aa, unidentified
  REGION 1..724: note = Category: MG60 effectors
  REGION 1..724: note = Description: MG60-298 effector
  source 1..724: note = uncultivated organism sequence
MNVIKRSGEEVVFDASKIENAIKKANKATTHNQMSDELIRSVTQSVIDKCENLKRSPNVEEIQDMVEGELMEHRCFAVAHNYITYRYERALVRKANSTDKQIMSLLERNNEEVKQENSNKNPLVNSVQRDYMAGEVSKDITKRFLLPQDVMEAHEQGIIHFHDSDYFAQHMHNCCLVNLEDMLQNGTVISETMIEKPHSFSTACNVATQIIAQVASSQYGGQSITLSHLAPFVQVSREKARREVKEELESLNLDSSEDTVNKMAEMRVRKEIEKGVQMIQYQVITLMTTNGQAPFVTVFMYLNEVPEGQTRDDLAIIIEEMLKQRIKGVKNEKGIWITPAFPKLIYVLEENNIEEGSKYWYLTELAAKCTAKRMVPDYISEKKMLELKVDVNGEGHCYPCMGCRSFLTTYLDENGKPKYYGRFNQGVVTLNLVDVACSSKQDEEAFWRIMDERLALCKKALMCRHERLLGTPSDVAPILWQNGALARLKKGEPIDKLLFGGYSTISLGYAGLCECVYYMTGHPHTEEPGTSFGLKVMQYLNDACAKWKAEENIDFSLYGTPMESTTFKFSKHLQERFGIIPHVTDKNYITNSYHVHVTEEIDAFTKLSFESQFQKLSPGGAISYVEVPNMENNIDAVLAIMKHIYNHIMYAELNTKSDYCQVCGYTGEIKIVEDENHKLVWECPNCGNRDQEKMNVARRTCGYIGTQFWNQGRTQEIKERVLHL

SEQ ID NO: 1084 - protein, 727 aa, unidentified
  REGION 1..727: note = Category: MG60 effectors
  REGION 1..727: note = Description: MG60-299 effector
  source 1..727: note = uncultivated organism sequence
MRKKPSMIIKRDGSKVLFDPKKIELAITKALISEGVASIFTGTAQAIAKSFESENETPTIKEIEEYVFKSLCEAGLPLVAKAYEGYRSIREFQRSDQFTDESILSIVAGGTDEDLRDENSNKNVATASTQRDMIAGEASKDIAMRHMLPPHVVQAHKDGLIHFHDLDYAVQRIFNCCLVDLRGPFKDGTVINKKMIETPRSFRTACTVATQIVQQVACGQYGGQTISLAHLAPYVRVSYEKIKNQVREELFGDDVPLASPTKLCGNREVEHIAKKRLRKEIEDGLQTIQYQVNTFSTSNGQAPFLSIFMYLNEDPEYIEETAMLIEEMIKQRYIGMKNEAGVYVTPAFPKLLYVLDENNVPKDSKYRYLTDLAVKCVARRMMPDFISAKKMKENYEDVFPCMGCRSFLSQYRDKDGKLKWYNRFNQGVVTLNLADAGLSADGNIDAFWKILDERLELVHDGLMCKHKSLLGTKAEKSPIHWQHGVIARLKKDDVIDPYLKDGYSTLSLGYIGLHECVLALIGESHTTERGEELAVRIMRRLRKACDDWRAESGLGFSLYGSPSESTTYRLAQTTQKRFGVVKGITDRDYLTNSYHVDVTEKINAFDKLRFESQFQKISSGGCISYVEVPNLEQNLEVIDQLVSYMYETIQYAEINTKSDYCAKCGFRGEIKLNNNLDWECPQCHTVNRDDLTVCRRTCGYLGDNFWNKGRTEEIGARVLHVDNEDLS

SEQ ID NO: 1085 - protein, 719 aa, unidentified
  REGION 1..719: note = Category: MG60 effectors
  REGION 1..719: note = Description: MG60-300 effector
  source 1..719: note = uncultivated organism sequence
MKIIKRNGSEAAFDITKIIAAVTKANNADGQSRELTGEQIRAIAAEVEEKCGAMGRAPSVEEIQDMVENQIMGRNAFEVAKRYIRYRYTRSLARRANTTDNQILSLIECNNEEAKQENANKNPTVNSVQRDYMAGEVSKDITRRILLPQEIVEAHEQGIIHFHDSDYFAQHMHNCDLVNLEDMLQNGTVITGTLIEKPHSFSTACNIATQIVAQVASNQYGGQSISLAHLAPFVQVSREKIRGEVLAELEELGTTASEDKIAQIVERRLRAEVERGVQTIQYQVVTLMTTNGQAPFITVFMYLNEAKNEREKRDLAMIIEEVLLQRYEGVKNEKGVWVTPAFPKLIYVLQEDNVAPGAEYYYLTELAAKCTAKRMVPDYISEKKMKELKEGNCFPVMGCRSALSPWKDENGNYKFYGRFNQGVVTLNLVDVALSSGGDMDRFWKIFDERLDLCYRALMCRHNRLKGTLSDAAPILWQYGAIARLKKGEPIDKLLYGGYSTISLGYAGLCECVRYMTGKSHTDPSATPFALAVMKYMNTACERWKAETTIGFGIYGTPLESTTYKFAKCLQKRFGIVPGVTDKPYITNSYHVHVTEEIDAFAKLAFEAQFQALSTGGAISYVEVPNMQQNLEAVLQIIRYIYDNIMYAELNTKSDYCQACGFDGEIRIVEDDGKLVWECPNCGNRDQDTMNVARRTCGYIGTQYWNQGRTAEIKERVLHL

SEQ ID NO: 1086 - protein, 729 aa, unidentified
  REGION 1..729: note = Category: MG60 effectors
  REGION 1..729: note = Description: MG60-301 effector
  source 1..729: note = uncultivated organism sequence
METAVNTNVIKRNGEEVKFDLSKIENAIFAANKEVDKLHQLSDYQVYAIADNLAKHIEEMTHAVHVEDIQDMVETGIMEMRGYEVAQKYVRYRYKRELARKSNTTDNGILSLIEHMNEEVNQENSNKNPVINSTQRDYMAGEVSKDLTKRMLLPEDIVEAHEAGIIHFHDSDYFAQKEHNCDLVNLEDMLQNGTVISETMIEKPHSFFTACNVTTQIVAQVASNQYGGQSFTLSHIAPFVDVSRKKIRKQVIEERTELGEPLDDDIIDKITEKRLLLEVKSGIQTIQYQLITLMTCNGQAPFVTMFMYLDEVPEGQTRDDLALIIEEVLNQRIIGVKNEKGFYITPAFPKLIYVLDEDNITPGSKYWYLTELAAKCTAKRMVPDYISAKVMREMKNGDVYPCMGCRSFPTSEPNILNPDGTRKYYGRFNQGVVTINLVDVACSSDGDMDEFWKILEERLELCHRALRCRHERLLGTLSDVAPILWQHGALARLKKGEKIDKLLYNGYSTISLGYAGLCEMCVRMTGKTHTSPEGKDFALKVMQKLNDKCAEWKKAENISYSVYGTPMESTTYKFAKCLQKRFGIIKGVTDKNYITNSYHVHVTEHIDAFSKLKFESEFQKLSPGGAISYVEVPNLTNNIEAVISVMQFIYDNILYAELNTKSDFCEKCLYDGEMRIVTDDSGKLVWECPNCGNRDQNNLFVARRTCGYIGTQFWNQGRTQEIKDRVLHL

SEQ ID NO: 1087 - protein, 850 aa, unidentified
  REGION 1..850: note = Category: MG60 effectors
  REGION 1..850: note = Description: MG60-302 effector
  source 1..850: note = uncultivated organism sequence
MANNVTEIEEKSKSFLYHLVKYYKIFIDTCSLLSIRANKFWEHITPILKAQNASVIVPYRVYEEVEKYADNLELCKKKVPNDPNFNLTAKKAKKKILSLYEQGLVKIFGDKTDNFADNVFQTVFTKFRMKYNLLLITQDKDLASDIMKISESKSVMANNKILVRKINNYGYLSAVEKIKVDVNKNEPKKSVVNTVHNGSQKKKVQVSVAVPEDEIFAHTDTITVVTGSVNVSEYPKENCIVTAKRGGNSKTIHLLSKVSSGGEGIIYTTDIPNVVAKIYKPQKVDRAKFEKLKLMMTKNINCPGVCFPIALLYNTKGEFVGYLMNKAKGIELQKGIFIPRLLQKHFPNWKKKDTVQLCITILKKFKYLHDRNIILGDINPNNILVVSPTEVYFVDTDSYQIEGYPCPVGTINFTAPEIQGKRYDEFLRTLGNEQFAVATLLFMIMLPGKPPYALQGGESQSDNIINGDFAYASGERTNGKAPEGAWRYIWSHMPRYLKDDFYETFHKDGAQHSENSRFSDDDWIKKFEYYEKLLTEENSKFLANDSMSGELIPNRLKKVANVTYVRCKLCGREVDEERTEQGYCSDCLRKGETYNCSRCGNEMVYTNYQRLIRHSHKFDTCKACNDKLNSIYRRYPCRNPRCNNMVEITFRYKEKLEQNNKPLPTVCKDCRNEVYATRRCSICNRVFDITFSEKEYYDSKGYDFPKKCPNCRGVKIPVHRGSSYYNTPRTYNNSIPQPTQKKKSSFCFITTAVCKYFNKPDDCYELTLLRKFRDTWLVKQPGGNELVKEYYSVAPNIVTALDNYSEKDKVYIHIWNNYIKPCIKLIELGANDTCKDLYMNMVNELKEKFN

SEQ ID NO: 1088 - protein, 747 aa, unidentified
  REGION 1..747: note = Category: MG60 effectors
  REGION 1..747: note = Description: MG60-303 effector
  source 1..747: note = uncultivated organism sequence
MRIIKRSGKEVEYDGSKIIKAIQKANAEVATNERLSDTKIQAIEEDTRAILEELTHTANIEEIQDIVIHQIMKMQAYRLAQVYTEYRYKQALKRKNNSTDDGILALIERQNEELNQENSNKNPVIASTQRDYIAGEVSKDITDRLLLPTDVLEAHRKGIIHFHDRDYFLMHIYNCCLINLEDMLQNGTVITETMIEKPHSFATAANVATQIIAQVASNQYGGQTFNLAHLAPFVDISRQKHIKHYREDITDAITSVPILGKLLTPIMDKIVDPLAKFLGERALKREIRSGIQTIQYQLVTLMTTNGQTPFVSMFMYLKDAKNETERDDLAMLMEEVLRQRIAGIKNEQGVPITPAFPKILFVLDTLTMDPNSKYHYLKELAAECTAKRMVPDYISEKKMLEYKGDVYGCMGCRSFLTPDRFTDKGIGNIARAKNYQEGVHKYWGRFNQGVVTINLPYIACLSEKNMTKFWEILDQYLELCHKALRIRHERLMNTPADVAPILFRYGAIARLDKGEVINDLLFHGYSTISLGYAGLYEMCKYMTGKSHTDPDAKPFALSVMQRMNDACAKWKAEEDIDYSIYGTPIESTTYRFAQKLQEQFGIIPDVTDHNYITNSYHINVREEIDAFSKLKFESEFQALSPGGAISYVEVPDLQNNLKAVEAIQDCIYNEILYAEINTKSDYCQVCGYDGQIEIIEDDHKKLIWKCPNCGNTDQNKMNVARRTCGYIGTQFWNQGRTQEIKDRVLHI

SEQ ID NO: 1089 - protein, 634 aa, unidentified
  REGION 1..634: note = Category: MG60 effectors
  REGION 1..634: note = Description: MG60-304 effector
  source 1..634: note = uncultivated organism sequence
MKVIKRDGRVVDFNREKIAIAIEKANQEVTEKERADKQDIKDIIKYIESLDKKRILVEDVQDIIEEQLMDKKKFKLAKKYMIYRYNRALVRKKNTTDESILGLIKNQNVEMLEDGTRKNAVLASSQRDYIAGEVSKDLTKRLLLPEKIVKAHEEGVLYFHDMDYFLQPIFNSSVISIGDMLDNGTVINGKLIESPKSFRVACTVLAQILATVASTQYGGQSVDISHLGKYVRKSYEKFKEEFGGVPSKEILDKKIKEEVTSGVQTLQYQINTLMTTNGRSPLVSFFMYLREGDEYIKENALIIEEILKQRIEGMKDAEGEYINPEFPKLIYAIDENNCLNGEKHDYLTQLALECANKTQEPSFISAKKMRENYSGNVFSPMGFRSFLTPWKDENGTYKFEGRFNQGIVSINLPQIAIVADGDEDKFFSLLDERLELCHEALLCRHYALLGTVSDTSPIHWIYGAIAHLKSGEKIDKYLKDGYSTISLGYVGVYEATMMIKEVSNTEPDGKEFAIKIVKYLKETVEKWKKASGLGFCLYGETSQKVCKTFERIDKERFGVIKNVTDKEKYTSSYHASEDEKIDYKEKLAFESVFQKLSLGGVVSQIQSKYIGKLSDKEEFIKFVYDNVQYLEFTK

SEQ ID NO: 1090 - protein, 708 aa, unidentified
  REGION 1..708: note = Category: MG60 effectors
  REGION 1..708: note = Description: MG60-305 effector
  source 1..708: note = uncultivated organism sequence
MKVVKRDGRVVDFDRSKIVTAIQKANAEVRPKERANKEEVKSVIEYIESLDKKRILVEDIQDIIEEQLMAIGKYELAKKYIVYRYTRALVRKSNTTDESILKLIKNENKELAEENSNKNTMLASTQRDYIAGEVSRDLTRRILLPEKISKANDEGILHFHDADYFIQPIFNCCLINIGDMLDNGTVMNGKMIESPKSFQVACTVLTQIIAAVASNQYGGQSVDLIHLGKYLRRSYNKFKKAIEEKYKNKIPEHIIEDIVQERLRTELKSGVQTIQYQINTLMTTNGQSPFVTLFLHLEKDDPYIKENAMIIEEVIRQRYEGIKNEAGVYVTPAFPKLVYVIDDFNNLTGGEYDYLTELAVKCSAKRMYPDYISAKKMRENYEGNVFSPMGCRSFLSPWKDENGNYKFEGRFNQGVVSINLPQIAIIADGDEEKFWKLLDERLELCKEALMCRHNALVGTPSDISPIHWQYGAIARLKKGEKIDKLLYGGYSTMSLGYIGIYEMTKLMTGVSHTDPKGHEFAIKVMNHLRETTDRWKKETNIGFALYGTPAESLCYKFARIDKEKFGTIKDVTDKGYYTNSYHVDVREKIDAFDKLKFESEFQKISSGGAISYIEIPNMQNNLEALRSVVKFIYDNIQYAEFNTKSDYCHVCGYDGEIKINDDNEWECPNCGNKDHNKMTVVRRTCGYLGENFWNAGKTKEIKQRVLHL

SEQ ID NO: 1091 - protein, 716 aa, unidentified
  REGION 1..716: note = Category: MG60 effectors
  REGION 1..716: note = Description: MG60-306 effector
  source 1..716: note = uncultivated organism sequence
MLEVIKRNGERVPFNRDKITNAIEKAMNSSSGIYEEGQAAKIASEIEAYAASIQKDLTIYAIEDQVYYRLLKYNNPATARAYENYKTIQAFKRQTNTTDDDVFGLLNNTNLEVLDENSNKNGHVVSTQRDLIAGEVSKDIARRKLIPADIVQAHDSGAIHFHDMDYIIQPMFNCCLINLEDMLANGTVINGKKIDTPKSFQVACTVTTQIIAQVASGQYGGQSINGIDRILAPYVRKSFKKYMKAVVEEQREVYGIEPDMEKAEEIAWKRTKKEIKDGIQTIQYQINTLMTTNGQAPFVTLFMYFKPDYEYAKEAALIDEELLRQRIQGIKNEANVYVTPAFPKLIYVLDEHNVREGSPYFYLTKLAAECTAKRMYPDYISAKKMRESYEGNVFSPMGCRSFLSPWKDEQGNYKFDGRFNMGVVSLNLPQIGILADGDEEKFFQILDKRLELCKKALLLRVDLLKRITSDVSPIHWQYGAIARLKPGETIEKFIYGGYATLSLGYIGIYEATMLTKHCSHTTAEGRKFAMRIMDDLNAHIKKWRKETNIGFALYGTPAENLTNLFCKIDKARFGSIPDVTDKGYYTNSYHVDVREPINVFDKFSFEADFEDKSTGGCISYAEIPNMTHNIPAVLTMVQYIYDHIAYGEFNTKLDYCHECGFDGEIILNDDNEWECPRCHNKDRNKLTVIRRTCGYLGENFWNEGRTQEIKNRVLHI

SEQ ID NO: 1092 - protein, 740 aa, unidentified
  REGION 1..740: note = Category: MG60 effectors
  REGION 1..740: note = Description: MG60-307 effector
  source 1..740: note = uncultivated organism sequence
MKIIKRSGSEATFDISKIVNAIKGANGEVAPEERLTDDQIALAAHSVEWLCNRSGHTVSVEEIQDMVENQIMAQGRYTVARKYIIYRYLQTLKRQSNTTDDKILSLIECNNEEAKQENSNKNPTVNSVQRDYMAGEVSKDITMRLLLPADVVEAHNEGIIHFHDSDYFAQHMHNCDLVNLEDMLQNGTVISGTLIERPHSFSTACNIATQIIAQVASCQYGGQSISLTHLAPFVEVSRQKIRRQVLQEINALGLEANTDRIADVVETRLRDEIRRGVQTIQYQVVTLMTTNGQAPFVTVFMYLNEARNEQEKRDLAMIIEETLAQRYEGVKNEEGVWITPAFPKLIYVLEEDNITEDSPYFYLTKMAAKCTAKRMVPDYISEKKMRELKLSKGETEGNGDCYTCMGCRSFLTPDRTGNGYDNVANAGNYQPGKPKYYGRFNQGVVTISLPDVALSSHGDMAKFWEIFDERLELCYKALMCRHERLKGTLSDAAPILWQYGALARLKKGEPIDKLLYGGYSTISLGYAGLYECVKYMTGHSHTDAEGTPFAMEVMQHMNDKCNEWKAATNIDFSLYGTPLESTTYKFAKALQRRFGIIPGITDKGYITNSYHVHVTEQIDAFEKLKFESNFQRLSPGGAISYVEVPNMQDNLKAVIRVMQYIYDNIMYAELNTKSDYCQVCGYDGEIQIVEDDGKLVWECPKCGNRDQEKLNVARRTCGYIGTQFWNQGRTQEIRDRVLHL

SEQ ID NO: 1093 - protein, 719 aa, unidentified
  REGION 1..719: note = Category: MG60 effectors
  REGION 1..719: note = Description: MG60-308 effector
  source 1..719: note = uncultivated organism sequence
MKIIKRNGSEETFDIQKIVVAVTKADKDNGERTLTDSQIEDIAEYVEFKCNKLNRAVSVEEIQDMVENQIMATGAFELARKYVRYRYKRSLVRKANTTDNRILSLIEYNNEDVKQENSNKNPAVNSVQRDYMAGEVSRDLTTRMLLPHDIVEADREGIIHFHDSDYYAQHMHNCDLVNLDDMLQNGTVISGTMIEKPHSFSTACNIATQIIAQVASNQYGGQSISLAHLAPFVDVSREKIRKEVISEQELVGMEYPEDVLNEIVERRLKKEITKGVQTIEYQVITLMTTNGQAPFLTVFMYLNEAKNEREKKDLAMIIEETLRQRYQGVKNEAGVWVTPAFPKLIYVLEEDNIEEGSEYYYLTELAAKCTAKRLVPDYISEKKMKELKEGNCFPVMGCRSCLSPWKDENGNYKFYGRFNQGVVTINLVDVALSSGGDMDKFWKIFDDRLELCYRALMCRHNRLKGTLSDAAPILWQFGALARLKKGEPIDKLLYGGYSTISLGYAGLYECVKYMTGKSHTDPDATPFALDVMKHMNDACNQWKEETNVAFSIYGSPIESTTYKFAKCLQKRFGIVPGITDKSYITNSYHVFVGEEIDAFSKLKFESQFQALSSGGAISYVEVPDMKDNIAAVLQVIRFIYDNIMYAELNTKSDYCQECGYDGEIQIITDEEGKLVWECPHCGNRNQDTLNVARRTCGYIGTQFWNQGRTQEIKERVLHL

SEQ ID NO: 1094 - protein, 738 aa, unidentified
  REGION 1..738: note = Category: MG60 effectors
  REGION 1..738: note = Description: MG60-309 effector
  source 1..738: note = uncultivated organism sequence
MSPEVKTKVIKRNGKEVSFDISKITHAIEKANEEVDNLHQINIFQISAIADKIAKEVEESTHAVNVEDIQDLVETGIMEMRGYEVAQKYVRYRYKREMKRKSNTTDNGILALLDHINEEVKQENSNKNPVINSTQRDYMAGEVSKDLSRRVLLPEEIVQAHEQGIIHFHDTDYFAQREHNCDLINLEDMLQNGTVISETMIEKPHSFFTACNVTTQIVAQVASNQYGGQSFTLAHLAPFVDISRKKIRANVIAERKECGEVLDETIIDKVTERRLRDEVRSGIQTIQYQLITLMTCNGQAPFVTMFMYLDEVPEGKTRDDLATIIEEVLIQRMQGVKNEKGVWITPAFPKLIYVLDEDNITEDSKYWHLTELAAQCTAKRMVPDYISAKIMKELKKGEVYPCMGCRSFLTVEDSQLNADGSHKFYGRFNQGVVTINLVDVACSSNGDMDEFWRILDERLELCHRALRCRHERLKGTISDVAPILWQNGALARLKKGETIDKLLYDGYSTISLGYAGLYEMCMRMYGKSHTDPEAKPFALKVMQHLNDKCNEWKAAEHISYSIYGTPMESTTYKFSKCLQKRFGIIPGVTDKNYITNSYHVHVSEEIDAFSKLKFESEFQKLSPGGAISYVEVPNMQNNIPAVLAVMKFIYENIMYAELNTKSDYCECCGYDGEIKIIEEDSGKLVWECPNCGNRDQSKMSVARRTCGYIGTQFWNQGRTQEIKDRVLHLSNHTNPEYK

SEQ ID NO: 1095 - protein, 638 aa, unidentified
  REGION 1..638: note = Category: MG60 effectors
  REGION 1..638: note = Description: MG60-310 effector
  source 1..638: note = uncultivated organism sequence
MKVIKRDGRVVDFNREKIAIAIEKANQEVTEKERADKQDIKDIIKYIESLDKKRILVEDVQDIIEEQLMDKKKFKLAKKYMIYRYNRALVRKKNTTDESILGLIKNQNMEMLEDGTRKNAVLASSQRDYIAGEVSKDLTKRLLLPEKIVKAHEEGVLYFHDMDYFLQPIFNSSVISIGDMLDNGTVINGKLIESPKSFRVACTVLAQILATVASTQYGGQSVNISHLGKYVRKSYEKFKEEFGGVPSKEILDKKIKEEVTSGVQTLQYQINTLMTTNGRSPLVSLFMYLREDDEYIKENALIIEEILKQRIEGMKDAEGKYINPEFPKLIYVIDENNCLNGEKYDYLTHLALECANKTQEPSFISAKKMRENYSGNVFSPMGFRSFLTPWKDENGTYKFEGRFNQGIVSINLPQIAIVADGDEDKFFSLLDERLELCHEALLCRHYALLGTVSDTSPIHWIYGAIAHLKSGEKIDKYLKDGYSTISLGYVGVYEATMMMKEVSNTEPNGKEFAIKIVKYLKETVEKWKKASGLGFCLYGETSQKVCKTFERIDKERFGVIKNVTDKEKYTSSYHASEDEKIDYKEKLAFESVFQKLSLGGVVSQIPSEYIGELSDKEEFIKFVYDNVQYLEFTKELKK

SEQ ID NO: 1096 - protein, 746 aa, unidentified
  REGION 1..746: note = Category: MG60 effectors
  REGION 1..746: note = Description: MG60-311 effector
  source 1..746: note = uncultivated organism sequence
MIIIKKNPEAEKKAGAKYVIKRNGSEDLFDEDKIVNALFKANDSTIKNKITKKQIGEIADHIKRKVDETPHALNIEDIQDMVENELMQIRAFDVARSYITYRYKRALARQHNTTDDKILSLIEHNNEEVKQENSNKNPIVNSVQRDYMAGEVSKDLCKRVFLPGDIWEAHEDGLIHFHDADYFAQHMHNCCLVNLEDMLQNGTVISGTMIDKPKSFATACNIATQAIAQIASQQYGGQTMSIAHLAPFVEISRQKYMKKQRESMEKAGVKATETQLACIVEDMVDDEIKRGVQMIQYQLITLMTTNGQAPFVTIYMYLNECRDEKTKADMVKIIREMFRQRIQGVKNEQGVWVTPAFPKLIYVLEEDNIREGSRYWELTQLAAKCTAKRMVPDYISEKIMKKLKNGDVYSCMGCRSFLTVDRTKGNVANATNYKEGEHKYYGRFNQGVVTLNLVDVACTSAGDEDYFWEILDKRLELCHKALRIRHERLLGTPSDVAPILWQHGALARLKKGETIDKLLYGGYSTISLGYAGLCECTRYMKGVSHTDPKGTDFAMKIMQKLNDACAKWKEAENIDYSVYGTPLESTTYKFAKCLQKRFGIIPGVADKNYITNSYHVHVTEKINAFDKLKFEAPFQKLSPGGAISYVEVPNLQNNIEAVLSIMQYIYDNIMYAELNTKSDYCEACGYDGEIKIVEDEHGKLVWECPNCGNRDQSRMSVARRTCGYIGTQFWNQGRTQEIKERFVHLY

SEQ ID NO: 1097 - protein, 638 aa, unidentified
  REGION 1..638: note = Category: MG60 effectors
  REGION 1..638: note = Description: MG60-312 effector
  source 1..638: note = uncultivated organism sequence
MKVIKRDGRVVDFNREKIAIAIEKANQEVTEKERADKQDIKDIIKYIESLDKKRILVEDVQDIIEEQLMDKKKFKLAKKYMIYRYNRALVRKKNTTDESILGLIKNQNMEMLEDGTRKNAVLASSQRDYIAGEVSKDLTKRLLLPEKIVKAHGEGVLYFHDMDYFLQPIFNSSVINIGDMLDNGTVINGKLIESPKSFRVACTVLAQILATVASTQYGGQSVDISHLGKYVRKSYEKFKEEFGGVSSNEILDKKIKEEVTSGVQTLQYQINTLMTTNGRSPLVSLFMYLREGDEYIKENALIIEEILKQRIDGMKDAEGEYINPEFPKLIYVIDKDNCLNGGKYDYLTHLALDCANKTQEPSFISAKKMRENYSGNVFSPMGFRSFLTPWKDENGTYKFEGRFNQGIVSINLPQIAIVADGDEDKFFSLLDERLELCHEALLCRHYALLGTVSDTSPIHWIYGAIAHLKSGEKIDKYLKDGYSTISLGYVGVYEATMMIKEVSNTEPNGKEFAIKIVKHLKETVEKWKKASGLGFCLYGETSQKVCKTFERIDKERFGVIKNVTDKEKYTSSYHASEDEKIDYKEKLAFESVFQKLSLGGVVSQIPSEYIGELSDKEEFIKFVYDNVQYLEFTKELKK

SEQ ID NO: 1098 - protein, 745 aa, unidentified
  REGION 1..745: note = Category: MG60 effectors
  REGION 1..745: note = Description: MG60-313 effector
  source 1..745: note = uncultivated organism sequence
MIIIKKNPEAEKKAGAKYVIKRNGSEDLFDEDKIVNALFKANDSTIKNKITKKQIGEIADHIKRKVDETPHALNIEDIQDMVENELMQIRAFDVARSYITYRYKRALARQHNTTDDKILSLIEHNNEEVKQENSNKNPIVNSVQRDYMAGEVSKDLCKRVFLPGDIWEAHEDGLIHFHDADYFAQHMHNCCLVNLEDMLQNGTVISGTMIDKPKSFATACNIATQAIAQIASQQYGGQTMSIAHLAPFVEISRQKYMKKQRESMEKAGVKATEAQIASIVEDMVDEEIKRGVQMIQYQLITLMTTNGQAPFVTIYMYLNECRDEKTKADMVKIIREMFRQRIQGVKNEQGVWVTPAFPKLIYVLEEDNIREGSRYWDLTQLAAKCTAKRMVPDYISEKIMKQLKNGDVYSCMGCRSFLTVDRTNGNIANATNYKEGEHKYYGRFNQGVVTLNLVDVACTSAGDEDYFWEILDKRLELCHKALRIRHERLLGTPSDVAPILWQHGALARLKKGETIDKLLYGGYSTISLGYAGLCECTGYMKGVSHTDPDGTEFAMKVMQRLNDACAKWKEAENIDYSVYGTPLESTTYKFAKCLQKRFGIIPGVTDKNYITNSYHVHVTEKINAFDKLKFEAPFQKLSPGGAISYVEVPNLQNNIEAVLSIMQYIYDNIMYAELNTKSDYCEACGYDGEIKIVEDEHGKLVWECPNCGNRDQSRMSVARRTCGYIGTQFWNQGRTQEIKERFVHL

SEQ ID NO: 1099 - protein, 638 aa, unidentified
  REGION 1..638: note = Category: MG60 effectors
  REGION 1..638: note = Description: MG60-314 effector
  source 1..638: note = uncultivated organism sequence
MKVIKRDGRVVDFNREKIAIAIEKANQEVTEKERADKQDIKDIIKYIESLDKKRILVEDVQDIIEEQLMDKKKFKLAKKYMIYRYNRALVRKKNTTDESILGLIKNQNMEMLEDGIRKNAVLASSQRDYIAGEVSKDLTKRLLLPEKIVKAHGEGVLYFHDMDYFLQPIFNSSVINIGDMLDNGTVINGKLIESPKSFRVACTVLAQILATVASTQYGGQSVDISHLGKYVRKSYEKFKEEFGGVSSNEILDKKIKEEVTSGVQTLQYQINTLMTTNGRSPLVSLFMYLREGDEYIKENALIIEEILKQRIDGMKDAEGEYINPEFPKLIYVIDKDNCLNGGKYDYLTHLALDCANKTQEPSFISAKKMRENYSGNVFSPMGFRSFLTPWKDENGTYKFEGRFNQGIVSINLPQIAIVADGDEDKFFSLLDERLELCHEALLCRHYALLGTVSDTSPIHWIYGAIAHLKSGEKIDKYLKDGYSTISLGYVGVYEATMMIKEVSNTEPNGKEFAIKIVKHLKETVEKWKKASGLGFCLYGETSQKVCKTFERIDKERFGVIKNVTDKEKYTSSYHASEDEKIDYKEKLAFESVFQKLSLGGVVSQIPSEYIGELSDKEEFIKFVYDNVQYLEFTKELKK

SEQ ID NO: 1100 - protein, 745 aa, unidentified
  REGION 1..745: note = Category: MG60 effectors
  REGION 1..745: note = Description: MG60-315 effector
  source 1..745: note = uncultivated organism sequence
MIIIKKNPEAEKKAGAKYVIKRNGSEDLFDEDKIVNALFKANDSTIKNKITKKQIGEIADHIKRKVDETPHALNIEDIQDMVENELMQIRAFDVARSYITYRYKRALARQHNTTDDKILSLIEHNNEEVKQENSNKNPIVNSVQRDYMAGEVSKDLCKRVFLPGDIWEAHEDGLIHFHDADYFAQHMHNCCLVNLEDMLQNGTVISGTMIDKPKSFATACNIATQAIAQIASQQYGGQTMSIAHLAPFVEISRQKYMKKQRESMEKAGVKATETQLASIVEDMVDEEIKRGVQMIQYQLITLMTTNGQAPFVTIYMYLNECRDEKTKADMVKIIREMFLQRIQGVKNEQGVWVTPAFPKLIYVLEEDNIREGSRYWELTQLAAKCTAKRMVPDYISEKIMKQLKNGDVYSCMGCRSFLTVDRTNGNIANATNYKEGEHKYYGRFNQGVVTLNLVDVACTSAGDEDYFWEILDKRLELCHKALRIRHERLLGTPSDVAPILWQHGALARLKKGETIDKLLYGGYSTISLGYAGLCECTRYMKGVSHTDPDGTEFAMKVMQRLNDACAKWKEAENIDYSVYGTPLESTTYKFAKCLQKRFGIIPGVTDKNYITNSYHVHVTEKINAFDKLKFEAPFQKLSPGGAISYVEVPNLQNNIEAVLSIMQYIYDNIMYAELNTKSDYCEACGYDGEIKIVEDEHGKLVWECPNCGNRDQSRMSVARRTCGYIGTQFWNQGRTQEIKERFVHL

SEQ ID NO: 1101 - protein, 765 aa, unidentified
  REGION 1..765: note = Category: MG60 effectors
  REGION 1..765: note = Description: MG60-316 effector
  source 1..765: note = uncultivated organism sequence
MSEKHHSHCLDAMEINDLQCIMRVRSILYRNIKEGVIMDAVHTNVIKRNGEEVNFDLDKIVNAINAANKEVDRLHQLNDYQVQAIADNIAKQIEIMTHAIHVEDIQDMVETGIMEMRGYEVAQKYVRYRYKRELARKSNTTDNGILALIDHMNEEVNQENSNKNPVINSTQRDYMAGEVSKDLTKRMLLPKEIVEAHEQGIIHFHDSDYFAQREHNCDLVNLEDMLQNGTVISETMIEKPHSFFTACNVTTQIVAQVASNQYGGQSFTLSHIAPFVDVSRKKIREQVIEERKMCGEALDEEVISKITESRLRAEVKSGIQTIQYQLITLMTCNGQAPFVTMFMYLDEVPEGQTRDDLAMIIEEVLQQRIQGVKNEKGIWITPAFPKLIYVLDKDNITEDSKYWYLTELAAKCTAKRMVPDYISAKVMRELKNGDVYPCMGCRSFPTSEDSQRNPDGTRKYYGRFNQGVVTINLVDVACSAEGHMDRFWEILESRLELCHRALRCRHERLLGTVSDVAPILWQHGALARLKKGETIDKLLFNGYSTISLGYAGLCEMCVRMTGKTHTSLEGKKLALEVMQKLNDKCKEWKEAENISYSVYGTPMESTTYKFAKCLQKRFGIIKGVTDKNYITNSYHIHVTEPVNAFDKLKFESEFQKLSPGGAISYVEVPNLQDNVEAVISVMKFIYDNILYAELNTKSDYCEICGYDGEIKIVTDENGKLIWECPNCGNRDQNNLFVARRTCGYIGTQFWNQGRTQEIKDRVLHL

SEQ ID NO: 1102 - protein, 638 aa, unidentified
  REGION 1..638: note = Category: MG60 effectors
  REGION 1..638: note = Description: MG60-317 effector
  source 1..638: note = uncultivated organism sequence
MKVIKRDGRVVDFNREKIAIAIEKANQEVTEKERADKQDIKDIIKYIESLDKKRILVEDVQDIIEEQLMDKKKFKLAKKYMIYRYNRALVRKKNTTDESILGLIKNQNMEMLEDGTRKNAVLASSQRDYIAGEVSKDLTKRLLLPEKIVKAHGEGVLYFHDMDYFLQPIFNSSVINIGDMLDNGTVINGKLIESPKSFRVACTVLAQILATVASTQYGGQSVDISHLGKYVRKSYEKFKEEFGGVSSNEILDKKIKEEVTSGVQTLQYQINTLMTTNGRSPLVSLFMYLRKGDEYIKENALIIEEILKQRIEGMKDAEGKYINPEFPKLIYVIDENNCLNGEKYDYLTHLALECANKTQEPSFISAKKMRENYSGNVFSPMGFRSFLTPWKDENGTYKFEGRFNQGIVSINLPQIAIVADGDEDKFFSLLDERLELCHEALLCRHYALLGTVSDTSPIHWIYGAIAHLKSGEKIDKYLKDGYSTISLGYVGVYEATMMMKEVSNTELNGKEFAIKIVKYLKETVEKWKKASGLGFCLYGETSQKVCKTFERIDKERFGVIKNVTDKEKYTSSYHASEDEKIDYKEKLAFESVFQKLSLGGVVSQIPSEYIGELSDKEEFIKFVYDNVQYLEFTKELKK

SEQ ID NO: 1103 - protein, 720 aa, unidentified
  REGION 1..720: note = Category: MG60 effectors
  REGION 1..720: note = Description: MG60-318 effector
  source 1..720: note = uncultivated organism sequence
MKVIKRDGHMVDYSPEKIENAIIKANTEVDDDEQASSTQIKNIIKYIEKLGKKRILVEDIQDIIEMKLMSIGKYTLAKKYITYRYTRELVRRSNTTDLAIKELIDGESEYWNTENSNKNAKVVTTQRDYLAGITSTDITRRFLLPEDIVKAHDEGIIHFHDADYFAQNALHNCDLINLEDMLQNGTNINGVMIEKPHRFLTAMTIATQIITGVASSQYGGCTISLAHLAPFVRDSKKLYEAKYKRRKLSKEQIDQFVKEDLAKEVTDGVQTFQYQINSMTTTNGQAPFLSVCLYLGETEEYKEELAMLIEEVLKQRIQGMKNEKGVYITPAFPKLLYVLEEDNIKVGSKYYYLTELAAKCTAKRMVPDYISEKVMKETKIDKNGDGQCYPCMGCRSFLTPYLDSDGKPKYYGRFNQGVVTINLVDVALSSDKDMNKFWNIFEERLELAHRALQIRHKRLSKVTSDVAPILWQHGALARLKKGESIHDLLHNGYSTISLGFAGLYECVKYMTGKSHTDNAEGREFGLQVMQKMDDKCDEWKKEENIDYSVYGTPIESTTYKFAKCLKERFGVIKGITDRDYITNSYHVPVFEEIDAFTKLKLESEFQKLSPGGAISYIETPNLTNNIDVVLEIIKFIYDNIMYAELNTKSDYCQECGYDQEILLDENLEWYCPNCGNRNHDTLNVARRTCGYIGTNFWNKGRTQEIKDRVIHIDNKDLDEE

SEQ ID NO: 1104 - protein, 724 aa, unidentified
  REGION 1..724: note = Category: MG60 effectors
  REGION 1..724: note = Description: MG60-319 effector
  source 1..724: note = uncultivated organism sequence
MNVIKRSGEEVVFDASKIENAIKKANKATTHNQMSDELIRSVTQSVIDKCENLKRSPNVEEIQDMVEGELMEHRCFAVAHNYITYRYERALVRKANSTDKQIMSLLERNNEEVKQENSNKNPLVNSVQRDYMAGEVSKDITKRFLLPQDVMEAHEQGIIHFHDSDYFAQHMHNCCLVNLEDMLQNGTVISETMIEKPHSFSTACNVATQIIAQVASSQYGGQSITLSHLAPFVQVSREKARREVKEELESLNLDSSEDTVNKMAEMRVRKEIEKGVQMIQYQVITLMTTNGQAPFVTVFMYLNEVPEGQTRDDLAIIIEEMLKQRIKGVKNEKGIWITPAFPKLIYVLEENNIEEGSKYWYLTELAARCTAKRMVPDYISEKKMLELKVDANGEGHCYPCMGCRSFLTTYLDENGKPKYYGRFNQGVVTLNLVDVACSSKQNEEAFWRIMDERLALCKKALMCRHERLLGTPSDVAPILWQNGALARLKKGEPIDKLLFGGYSTISLGYAGLCECVYYMTGHPHTEEPGTSFGLKVMQYLNDACAKWKAEENIDFSLYGTPMESTTFKFSKHLQERFGIIPHVTDKNYITNSYHVHVTEEIDAFTKLSFESQFQKLSPGGAISYVEVPNMENNIDAVLAIMKHIYNHIMYAELNTKSDYCQVCGYTGEIKIVEDENHKLVWECPNCGNRDQEKMNVARRTCGYIGTQFWNQGRTQEIKERVLHL

SEQ ID NO: 1105 - protein, 634 aa, unidentified
  REGION 1..634: note = Category: MG60 effectors
  REGION 1..634: note = Description: MG60-320 effector
  source 1..634: note = uncultivated organism sequence
MKVIKRDGRVVDFNREKIAIAIEKANQEVTEKERADKQDIKDIIKYIESLDKKRILVEDVQDIIEEQLMDKKKFKLAKKYMIYRYNRALVRKKNTTDESILGLIKNQNMEMLEDGTRKNAVLASSQRDYIAGEVSKDLTKRLLLPEKIVKAHEEGVLYFHDMDYFLQPIFNSSVINIGDMLDNGTVVNGKLIESPKSFRVACTVLAQILATVASTQYGGQSVDISHLGKYVRKSYEKFKEEFGGMPSKEILDKKIKEEVTSGVQTLQYQINTLMTTNGRSPLVSLFMYLREGDEYIKENALIIEEILKQRIEGMKDAEGKYINPEFPKLIYVIDENNCLNGEKYDYLTQLALECANKTQEPSFISAKKMRENYSGNVFSPMGFRSFLTPWKDENGTYKFEGRFNQGIVSINLPQIAIVADGDEDKFFSLLDERLELCHEALLCRHYALLGTVSDTSPIHWIYGAIAHLKSGEKIDKYLKDGYSTISLGYVGVYEATMMMKEVSNTEPEGKEFAIKIVKHLKETVEKWKKASGLGFCLYGETSQKVCKTFERIDKERFGVIKNVTDKEKYTSSYHASEDEKIDYKEKLAFESVFQKLSLGGVVSQIPSEYIGKLSDKEEFIKFVYDNVQYLEFTK

SEQ ID NO: 1106 - protein, 740 aa, unidentified
  REGION 1..740: note = Category: MG60 effectors
  REGION 1..740: note = Description: MG60-321 effector
  source 1..740: note = uncultivated organism sequence
MKIIKRNGSEAVFDITKIIAAVTKANNVVPESQRLTNHQIIELADKVQASCLSRGHAMNVEEIQDIVEDAIMATGAYEVARKYITYRYVQNLKRTHNTTDDRILSLIECNNEEVKQENSNKNPTVNSVQRDYMAGEVSKDLTMRMLLPPEIVKAHEEGIIHFHDADYYAQHMHNCDLVNLDDMLQNGTVISGTLIEKPHSFSTACNIATQIIAQVASSQYGGQSISLTHLAPFVDVSRKKIRRDVEAEMKELGINPGEEKISEIVEARLREEIKRGVQTIQYQVVTLMTTNGQAPFITVFMYLGEAGDNQRLKSDLAIIIEEMLRQRYQGVKNEAGVWITPAFPKLIYVLEEDNIREGTPYFYLTKLAAKCTAKRLVPDYISEKKMKEYKLSKGETEGNGDVYTCMGCRSFLTPDRSGNGWDNIANAKNYDGKPKYYGRFNQGVVTINLVDVALSSGGDFDKFWKIFDERLELCHKALMCRHNRLKGTLSDAAPILWQYGALARLEKGEPIDKLLYGGYSTISLGYAGLYECCKYMTGKSHTDPAAKPFALHVMQHMNDACQTWKKQHNIDFSLYGTPLESTTYKFAKCLQKRFGIIPGITDRNYITNSYHVHVTEQIDAFTKLKFESEFQKLSPGGAISYVEVPNMQDNLEAVIKVMQFIYDNIMYAELNTKSDYCQVCGYDGEISIVEEDGKLIWECPKCHNRDQNKLNVARRTCGYIGTQFWNQGRTAEIKDRVLHL

SEQ ID NO: 1107 - protein, 728 aa, unidentified
  REGION 1..728: note = Category: MG60 effectors
  REGION 1..728: note = Description: MG60-322 effector
  source 1..728: note = uncultivated organism sequence
MDAVHTNVIKRNGEEVNFDLDKIVNAINAANKEVDRLHQLNDYQVQAIADNIAKQIEIMTHAIHVEDIQDMVETGIMEMRGYEVAQKYVRYRYKRELARKSNTTDNGILALIDHMNEEVNQENSNKNPVINSTQRDYMAGEVSKDLTKRMLLPEEIVEAHEQGIIHFHDSDYFAQREHNCDLVNLEDMLQNGTVISETMIEKPHSFFTACNVTTQIVAQVASNQYGGQSFTLSHIAPFVDVSRKKIREQVIEERKMCGEALDEEVISKITESRLRAEVKSGIQTIQYQLITLMTCNGQAPFVTMFMYLDEVPEGQTRDDLAMIIEEVLQQRIQGVKNEKGIWITPAFPKLIYVLDKDNITEDSKYWYLTELAAKCTAKRMVPDYISAKVMRELKNGDVYPCMGCRSFPTSEDSQRNPDGTRKYYGRFNQGVVTINLVDVACSAEGHMDRFWEILESRLELCHRALRCRHERLLGTVSDVAPILWQHGALARLKKGETIDKLLFNGYSTISLGYAGLCEMCVRMTGKTHTSPEGKKFALEVMQKLNDKCKEWKEAENISYSVYGTPMESTTYKFAKCLQKRFGIIKGVTDKNYITNSYHIHVTEPVNAFDKLKFESEFQKLSPGGAISYVEVPNLQDNVEAVISVMKFIYDNILYAELNTKSDYCEICGYDGEIKIVTDENGKLIWECPNCGNRDQNNLFVARRTCGYIGTQFWNQGRTQEIKDRVLHL

SEQ ID NO: 1108 - protein, 724 aa, unidentified
  REGION 1..724: note = Category: MG60 effectors
  REGION 1..724: note = Description: MG60-323 effector
  source 1..724: note = uncultivated organism sequence
MNVIKRSGEEVVFDASKIENAIKKANKATTHNQMSEELIRSVTQSVIDKCENLKRSPNVEEIQDMVEGELMEHRCFAVAHNYITYRYERALVRKANSTDKQIMSLLERNNEEVKQENSNKNPLVNSVQRDYMAGEVSKDITKRFLLPQDVMEAHEQGIIHFHDSDYFAQHMHNCCLVNLEDMLQNGTVISETMIEKPHSFSTACNVATQIIAQVASSQYGGQSITLSHLAPFVQVSREKARREVKEELESLNLDSSEDTVNKMAEMRVRKEIEKGVQMIQYQVITLMTTNGQAPFVTVFMYLNEVPEGQTRDDLAIIIEEMLKQRIKGVKNEKGIWITPAFPKLIYVLEENNIEEGSKYWYLTELAARCTAKRMVPDYISEKKMLELKVDVNGEGHCYPCMGCRSFLTTYLDENGKPKYYGRFNQGVVTLNLVDVACSSKQDEEAFWRIMDERLALCKKALMCRHERLLGTPSDVAPILWQNGALARLKKGEPIDKLLFGGYSTISLGYAGLCECVYYMTGHPHTEEPGTSFGLKVMQYLNDACAKWKAEENIDFSLYGTPMESTTFKFSKHLQERFGIIPHVTDKNYITNSYHVHVTEEIDAFTKLSFESQFQKLSPGGAISYVEVPNMENNIDAVLAIMKHIYNHIMYAELNTKSDYCQVCGYTGEIKIVEDENHKLVWECPNCGNRDQEKMNVARRTCGYIGTQFWNQGRTQEIKERVLHL

SEQ ID NO: 1109 - protein, 724 aa, unidentified
  REGION 1..724: note = Category: MG60 effectors
  REGION 1..724: note = Description: MG60-324 effector
  source 1..724: note = uncultivated organism sequence
MNVIKRSGEEVVFDASKIENAIKKANKATTHNQMSDELIRSVTQSVIDKCENLKRSPNVEEIQDMVEGELMEHRCFAVAHNYITYRYERALVRKANSTDKQIMSLLERNNEEVKQENSNKNPLVNSVQRDYMAGEVSKDITKRFLLPQDVMEAHEQGIIHFHDSDYFAQHMHNCCLVNLEDMLQNGTVISETMIEKPHSFSTACNVATQIIAQVASSQYGGQSITLSHLAPFVQVSREKARREVKEELESLNLDSSEDTVNKMAEMRVRKEIEKGVQMIQYQVITLMTTNGQAPFVTVFMYLNEVPEGQTRDDLAIIIEEMLKQRIKGVKNEKGIWITPAFPKLIYVLEENNIEEGSKYWYLTELAARCTAKRMVPDYISEKKMLELKVDANGEGHCYPCMGCRSFLTTYLDENGKPKYYGRFNQGVVTLNLVDVACSSKQDEEAFWKIMDERLALCKKALMCRHERLLGTPSDVAPILWQNGALARLKKGEPIDKLLFGGYSTISLGYAGLCECVYYMTGHPHTEEPGTSFGLKVMQYLNDACAKWKAEENIDFSLYGTPMESTTFKFSKHLQERFGIIPHVTDKNYITNSYHVHVTEEIDAFTKLSFESQFQKLSPGGAISYVEVPNMENNIDAVLAIMKHIYNHIMYAELNTKSDYCQVCGYTGEIKIVEDENHKLVWECPNCGNRDQEKMNVARRTCGYIGTQFWNQGRTQEIKERVLHL

SEQ ID NO: 1110 - protein, 716 aa, unidentified
  REGION 1..716: note = Category: MG60 effectors
  REGION 1..716: note = Description: MG60-325 effector
  source 1..716: note = uncultivated organism sequence
MLEVIKRNGQKVPFDRDKITIAIEKAMNSSSGVYEEGQAAKIAGEIEAYAASIHKDMTIYAIEDQVYYRLLKYNNPATARAYENYKAIQSFKRQTNTTDNDVFGLLNNTNLEVLNENSNKNGHVVSTQRDLIAGEVSKDIARRKLIPADIVQAHDSGAIHFHDMDYIIQPMFNCCLINLEDMLANGTVINGKKIDTPKSFQVACTVTTQIIAQVASGQYGGQSINGIDRILAPYVRKSFKKYMSAVVEEQREVYGIEPDMEKAEEIAWKRTKKEIKDGIQTIQYQINTLMTTNGQAPFVTLFMYFQPDYEYAKEAALIDEELLRQRIQGIKNDANVYVTPAFPKLIYVLDEHNVREGSPYFYLTKLAAECTAKRMYPDYISAKKMRESYEGNVFSPMGCRSFLSPWKDAQGNYKFDGRFNMGVVSLNLPQIGILADGDEEKFFQILDKRLELCKKALLLRVELLKKVTSDVSPIHWQYGAIARLQPGETIEKFIYGGYATLSLGYIGMYEATVLTKHCSHTTPEGRKFAMRIMDDLNAHIQQWKKETNIGFALYGTPAENLTNRFCKIDKARFGSIANVTDKDYYTNSYHVDVREPINVFDKFSFEADFEDKSTGGCISYAEIPNMSHNIPAVLTMIQYIYDHIAYGEFNTKLDYCHECGFDGEIILNDDNQWECPRCHNQDRNKLTVIRRTCGYLGENFWNEGRTQEITNRVLHI

SEQ ID NO: 1111 - protein, 1117 aa, unidentified
  REGION 1..1117: note = Category: MG60 effectors
  REGION 1..1117: note = Description: MG60-326 effector
  source 1..1117: note = uncultivated organism sequence
MKIIKRNGSEQEFNPSKIHVAMTKAFRSVEEGKTVSEETIANLTAKAMAKVQEIPHTPNVEEVQDIVENVLMDSGFHDVSRSYIKYRFTHAVRRNTTDAAILSLIEAENEEVKQENANKNPTVASVQRDYMAGEVSKDLTMRLLLPEEIAKAHNEGILHFHDADYYAQHMHNCCLINLDDMLQNGTVISGTMIEKPHRFSTACNIATQIIAQVASCQYGGQSISLTHLAKFVDVSRKAIRKEVETENKEAAINMTECQMNEVVERRLRKEIRAGIQTIQYQIITLMTTNGQAPFVTVFMYLDEAGNDETLKHDLAICIEEMLKQRYEGVKNEVGVWITPAFPKLIYVLDEDNIRPESPFFYLTKLAAKCTAKRMVPDYISAKKMREYKLSKGETEGHGDVYTCMGCVTGDEVVVYKYLGTMYTESFERMWRRLSAHFPVETQPGRTNDLYIDLHGVSIYDNKLSDFTECHRIIRNENSKILRLKFSNGRVLDCTPDHPFETENRGVVRADELASDDVIMADKKSAFVFSEDGVVPYNTDLAWALGLLLCDASYDGTIVLSLANEGEDDIAQKFSNVMKTTYGLNTNCVVQSRERKGVYKDILCVSDGKRTIQKVCDFLVGEFGGKKKMLRHIPSEVFTWDEDARFAFLAGMIDADGYINNSQRVPAVQIGSINKELAIQQALLAQSLGMPASIYMNHYKGEGRGDTIRYHVTFVPCSRLMEFIVCDKKKAHFNDEVRKNHSISETSYCKMAERMELSGEYATYDVTTASEHFMVSGLYSHNCRSFLTPDRSGNGWNNIANAKNYEPGEPKYYGRFNQGVVTINLPDVALSSGGDFEKFWQIFDERLELCHKALQYRHKRLEGTLSDTSPIHWQYGALARLQKGEPIDKLLHGGYSTISLGYAGLYECCKYMTGKSHTDPDAKPFALKVMQHMNDMCAKWKAEEDIDYSLYGTPLESTTYKFAKCLDRRFGKEWYKISGGKNYITNSYHVHVTEQIDAFTKLKFESEFQKLSPGGAISYVEVPNMQDNLAAVIKVMQFIYDNIMYAELNTKSDYCQVCGYDGEIQIVDDDGKLVWECPNCHNRDFSKMNVARRTCGYIGCQGFNAGRTAEIRDRVLHL

SEQ ID NO: 1112 - protein, 638 aa, unidentified
  REGION 1..638: note = Category: MG60 effectors
  REGION 1..638: note = Description: MG60-327 effector
  source 1..638: note = uncultivated organism sequence
MKVIKRDGRVVDFNREKIAIAIEKANQEVTEKERADKQDIKDIIKYIEALDKKRILVEDVQDIIEEQLMDKKKFKLAKKYMIYRYNRALVRKKNTTDESILGLIKNQNMEMLEDGTRKNAVLASSQRDYIAGEVSKDLTKRLLLPEKIVKAHEEGILYFHDMDYFLQPIFNSSVINIGDMLDNGTVINGKLIESPKSFRVACTVLAQILATVASTQYGGQSVDISHLGKYVRKSYEKFKEEFGDVPSKEILDKKIKEEVTSGVQTLQYQINTLMTTNGRSPLVSLFMYLREDDEYIKENALIIEEILNQRIEGMKDAEGKYINPEFPKLIYVIDENNCLNNGKYDYLTHLALDCANKTQEPSFISAKKMRENYSGNVFSPMGFRSFLTPWKDENGTYKFEGRFNQGIVSINLPQIAIVADGDEDKFFSLLDERLELCHEALLCRHYALLGTVSDTSPIHWIYGAIAHLKSGEKIDKYLKDGYSTISLGYVGVYEATIMMKEVSNTEPDGKEFAIKIVKHLKETVEKWKKTSGLGFCLYGETSQNVCKTFERIDKERFGVIKNVTDKEKYTSSYHSSENEKIDYKEKLAFESEFQKLSLGGVVSQIPRGYIGELSDKEEFIKFVYDNVQYLEFTEEFVK

SEQ ID NO: 1113 - protein, 724 aa, unidentified
  REGION 1..724: note = Category: MG60 effectors
  REGION 1..724: note = Description: MG60-328 effector
  source 1..724: note = uncultivated organism sequence
MNVIKRSGEEVVFDSIKIENAIKKANKATTHNQMSDELIHTVTQSVVDKCENLKRSPNVEEIQDMVEGELMEKRCFAVAHNYITYRYERALVRKANSTDKQIMSLLERNNEEVKQENSNKNPLVNSVQRDYMAGEVSKDITKRFLLPQDVMEAHEQGIIHFHDSDYFAQHMHNCCLVNLEDMLQNGTVISETMIEKPHSFSTACNVATQIIAQVASSQYGGQSITLSHLAPFVQVSREKARREVKEELESLNLDSSEDTVNKMAEMRVRKEIEKGVQMIQYQVITLMTTNGQAPFVTVFMYLNEVPEGQTRDDLAIIIEEMLKQRIKGVKNEKGIWITPAFPKLIYVLEENNIEEGSKYWYLTELAAKCTAKRMVPDYISEKKMLELKVDANGEGHCYPCMGCRSFLTTYLDENGKPKYYGRFNQGVVTLNLVDVACSSKQDEEAFWRIMDERLALCKKALMCRHERLLGTPSDVAPILWQNGALARLKKGEPIDKLLFGGYSTISLGYAGLCECVYYMTGHPHTEEPGTSFGLKVMQYLNDACAKWKAEENIDFSLYGTPMESTTFKFSKHLQERFGIIPHVTDKNYITNSYHVHVTEEIDAFTKLSFESQFQKLSPGGAISYVEVPNMENNIDAVLAIMKHIYNHIMYAELNTKSDYCQVCGYTGEIKIVEDENHKLVWECPNCGNRDQEKMNVARRTCGYIGTQFWNQGRTQEIKERVLHL

SEQ ID NO: 1114 - protein, 760 aa, unidentified
  REGION 1..760: note = Category: MG60 effectors
  REGION 1..760: note = Description: MG60-329 effector
  source 1..760: note = uncultivated organism sequence
MKVIKRDCSEVDFDKSKISTAILKAMKNGSGIVKQKIAEDIANEIEEDCKDKDEVSISDIESMVYDKLITKKQRLTAKAYEGYRSIREFQRENENTIDTEITELLSGESDYWNNENSNKNPRLNTTQRDYLAGIVSKDASRRYILPPEIVQAHDDGLIHVHDLDYLIQYMNNCCLINLEDMLQNGTVISETLIEKPHSFSTACTVATQIIAQVASSQYGGQSISLAHLAPFVDISRQKIRKEVIEEQEYLYRNIDEKEWVKPRKVLGKKLRKDQEKFYKNKDRLLKFIDATDIEDIVEKRLKKEIEKGIQTIQYQITTLMTTNGQAPFITLFMYLNEAHNQREKDDLAMLIEEELRQSYLGVKNEEGVYITPAFPKVIYVLQEDNIHEEDKYWYLTEMAAKCSMKRLTPDYISEKIMKEMKDGNCYPVMGCRSALTVWYDENGKPKFYGRFNSGVVTVSLPDIALSSGGDFNEFWRIFDERTELCHKALKIRHQRLRGTKSDVAPILWQHGAFARLKKGESIDKLLFGGYSTLSLGYAGLAECVKYMTGHYHCDEGIGEKFGLEVMQALNDKCSQWKIDENIDYSLYGTPLEATTEKFAKKLKERFGIIEGVTDRTYITNSYHIPVFIHIDAFGKLRIEAKFQRLSPGGSISYIECPNMENNIPAVLEVMKFIYNNNMYAELNTKSDYCQKCGWSKEIKLIDEGGKLIWECPNCGNRDVRTMDITRRTCGYKGTARNGWNQGRLGDIHDRVPHLDDIEEE

SEQ ID NO: 1115 - protein, 638 aa, unidentified
  REGION 1..638: note = Category: MG60 effectors
  REGION 1..638: note = Description: MG60-330 effector
  source 1..638: note = uncultivated organism sequence
MKVIKRDGRVVDFNREKIAIAIEKANQEVTEKERADKQDIKDIIKYIESLDKKRILVEDVQDIIEEQLMDKKKFKLAKKYMIYRYNRALVRKKNTTDESILGLIKNQNMEMLEDGTRKNAVLASSQRDYIAGEVSKDLTKRLLLPEKIVKAHGEGVLYFHDMDYFLQPIFNSSVINIGDMLDNGTVINGKLIESPKSFRVACTVLAQILATVASTQYGGQSVDISHLGKYVRKSYEKFKEEFGGVSSNEILDKKIKEEVTSGVQTLQYQINTLMTTNGRSPLVSLFMYLRKGDEYIKENALIIEEILKQRIEGMKDAEGKYINPEFPKLIYVIDENNCLNGEKYDYLTHLALECANKTQEPSFISAKKMRENYSGNVFSPMGFRSFLTPWKDENGTYKFEGRFNQGIVSINLPQIAIVADGDEDKFFSLLDERLELCHEALLCRHYALLGTVSDTSPIHWIYGAIAHLKSGEKIDKYLKDGYSTISLGYVGVYEATMMMKEVSNTELNGKEFAIKIVKSLKETVEKWKKASGLGFCLYGETSQKVCKTFERIDKERFGVIKNVTDKEKYTSSYHASEDEKIDYKEKLAFESVFQKLSLGGVVSQIPSEYIGELSDKEEFIKFVYDNVQYLEFTKELKK

SEQ ID NO: 1116 - protein, 634 aa, unidentified
  REGION 1..634: note = Category: MG60 effectors
  REGION 1..634: note = Description: MG60-331 effector
  source 1..634: note = uncultivated organism sequence
MKVIKRDGRVVDFNREKIAIAIEKANQEVTEKERADKQDIKDIIKYIESLDKKRILVEDVQDIIEEQLMDKKKFKLAKKYMIYRYNRALVRKKNTTDESILGLIKNQNMEMLEDGTRKNAVLASSQRDYIAGEVSKDLTKRLLLPEKIVKAHEEGVLYFHDMDYFLQPIFNSSVINIGDMLDNGTVINGKLIESPKSFRVACTVLAQILATVASTQYGGQSVDISHLGKYVRKSYEKFKEEFGGVPSKEILDKKIKEEVTSGVQTLQYQINTLMTTNGRSPLVSLFMYLREGDEYIKENALIIEEILKQRIEGMKDAKGKYINPEFPKLIYVIDENNCLNGEKYDYLTHLALECANKTQEPSFISAKKMRENYSGNVFSPMGFRSFLTPWKDENGTYKFEGRFNQGIVSINLPQIAIVADGDEDKFFSLLDERLELCHEALLCRHYALLGTVSDTSPIHWIYGAIAHLKSGEKIDKYLKDGYSTISLGYVGVYEATMMVKEVSNNEPEGKEFAIKIVKHLKETVEKWKKASGLGFCLYGETSQKVCKTFERIDKERFGVIKNVTDKEKYTSSYHASEDEKIDYKEKLAFESVFQKLSLGGVVSQIQSKYIGELNDKEEFIKFVYDNVQYLEFIK

SEQ ID NO: 1117 - protein, 724 aa, unidentified
  REGION 1..724: note = Category: MG60 effectors
  REGION 1..724: note = Description: MG60-332 effector
  source 1..724: note = uncultivated organism sequence
MNVIKRSGEEVVFDASKIENAIKKANKATTHNQMSDELIRSVTQSVINKCENLKRSPNVEEIQDMVEGELMEHRCFAVAHNYITYRYERALVRKANSTDKQIMSLLERNNEEVKQENSNKNPLVNSVQRDYMAGEVSKDITKRFLLPQDVMEAHEQGIIHFHDSDYFAQHMHNCCLVNLEDMLQNGTVISETMIEKPHSFSTACNVATQIIAQVASSQYGGQSITLSHLAPFVQVSREKARREVKEELESLNLDSSEDTVNKMAEMRVRKEIEKGVQMIQYQVITLMTTNGQAPFVTVFMYLNEVPEGQTRDDLAIIIEEMLKQRIKGVKNEKGIWITPAFPKLIYVLEENNIEEGSKYWYLTELAAKCTAKRMVPDYISEKKMLELKVDVNGEGHCYPCMGCRSFLTTYLDENGKPKYYGRFNQGVVTLNLVDVACSSKQDEEAFWRIMDERLALCKKALMCRHERLLGTPSDVAPILWQNGALARLKKGEPIDKLLFGGYSTISLGYAGLCECVYYMTGHPHTEEPGTSFGLKVMQYLNDACAKWKAEENIDFSLYGTPMESTTFKFSKHLQERFGIIPHVTDKNYITNSYHVHVTEEIDAFTKLSFESQFQKLSPGGAISYVEVPNMENNIDAVLAIMKHIYNHIMYAELNTKSDYCQVCGYTGEIKIVEDENHKLVWECPNCGNRDQEKMNVARRTCGYIGTQFWNQGRTQEIKERVLHL

SEQ ID NO: 1118 - protein, 780 aa, unidentified
  REGION 1..780: note = Category: MG60 effectors
  REGION 1..780: note = Description: MG60-333 effector
  source 1..780: note = uncultivated organism sequence
MENEVNNKVETEEEVLSSNVDVIKRNGKEVRFDQRKIQAAIRKANKDVDERYRISDIQIRTISYMIKLWVKELGHTPTVDEIQDKVVISLGHESPELQHAYDIYRYDRDLERNGNSTDREILSLVDRQNEIAMQENSNKNPIVESTQRDYIAGLVSRDISERILFDKDLVEAHREGKIHIHDTDYFLQTIHNCDLVNLEDMLQNGTVISGTLIRKPHSFRTACNIATQVIAQVASAQYGGQTITLSHLAPFVDVSRQAIRKAVIEEGKISGVDYTDEIIDKITHSRLKKEITDGIQTLNYQLVTLLTTNGQTPFVTIFMYIDEVPEGQTREDLVLIIEEVLRQRMDGTENEDGVKTTPAFPKLIYCLDEDNVKEGTKYWDTTVLAAQCTAKRMNPDYISAKIMREQKGDVYPCMGCRSFLTPDRTQKEFEVVKEDGTTEIVKPLGNIANAKNYDEANHKYYGRFNQGVCTISLPDVALSSGGDKEKFWKIFDERLEMCHRVLQTRHNRLMGTPSDVAPILWQYGALARLEKHETIDKLLFHGYSTISLGYAGLYECTKYMTGESHTDEKAGKPFALEVMKHMNDACAKWKKAEDIDYSLYGTPIESTTYKFAKALQTRFGIVEGITDHGYITNSYHVNVREKIDAFKKLEFEAEFQNLSPGGAVSYVEVPDMQSNIPAVLSIMQYIYEHIMYAELNTKSDYCMNCGYDGEIQIVKNENGKLIWKCPKCGNTDQSKMSVARRTCGYIGTQYWNQGRTEEIQDRVMHVSLENFKPCSCGCDS

SEQ ID NO: 1119 - protein, 873 aa, unidentified
  REGION 1..873: note = Category: MG60 effectors
  REGION 1..873: note = Description: MG60-334 effector
  source 1..873: note = uncultivated organism sequence
MPKFFATCPKGLEGLLNAELVQLGAESVKETVAGVSFSGDLNLAVRVCLWTRFATRVLLTIGSFHTDSDIELYNGAYSLHYEDYFSSDQTISVDFNGQNSFINNTLYGALRVKDALCDRFVKLTGSRPNVDRENPDVCINAHLDKKNNVTISLDLSGKALHRREYRTEAGIAPLKENLAAAIVARSGYVSGSVVDPMCGSGTLLIEAAMKAADIAPGLFRSSYGFEKLKDFDAVEFTHYKREAHARAEAGKQRLIDARVSFYGFDRDPAVLEKAVQNVERAGLSQLIKFTAGDLHELKNPVTSGSKGFVITNPPYGERLGNVAELLELYSSLGFCLKKEFAGWKATVISSSEDLLSCLRLRADKTYRLYNGALECQLRVYSIGEKLQVTDDGSENAGRITDSGKDAGFTLSTETLRVAEEFANRLKKNLKRLEKWAAREGIEAYRIYDADLPNYNAAIDLYGSYVVIQEYAAPNSVDAKIAHRRMLDLIQVVVGVTGIKGDHVILKVRERKKGESQYEKLNETKHTLLVREYMASFIVNLWDYLDTGLFLDHREVRRMITKMSAGKSFLNIFSYTGSATVAAAIGGARETTTVDMSRTYLAWAKDNMLANGFSGRNHQFIQADCLRWLDISPKTYDLIFADPPTFSNSKRMEATFDVQRDHVALIAKLTRLLNLGGTLIFSNNNRSFKLDSDAITAMGYKITDVSEKTVQEDFRRNKKIHCCFILEKVIDVPVPEDYSDASFGSVSGLKAKVEYLNGGVSGDRREGRGGRERPVRDGRDGAPGRERNGSFRKHDNDAFGKSRSYTFRNGERQEAPADGRSFRETDGSENRPVIPAVRRSRMPSRVIGGASAGGQTAPRGPRLSRNIGRKEDKE

SEQ ID NO: 1120 - protein, 719 aa, unidentified
  REGION 1..719: note = Category: MG60 effectors
  REGION 1..719: note = Description: MG60-335 effector
  source 1..719: note = uncultivated organism sequence
MKVVKRDGKKVEFDAIKIENAILKAMKCGSGIVDEKCAHDIAVEIEKWHEHSDDNISIYRIEGQVFEKLIEKGQILTAKAYEGYRKVREFQRETNTIDNEIYGIVNQTNKEAMEENSNKDATVLATQRDLIAGEFSRDYCRRLLLPPKIVQAHDDGIIHFHDMDYYIQKMHNCDLVNLKDMFAKGTVINDKLIETPKSLQTACTVATQIVQQVANGQYGGQTISLAHLSPFVRLSYEKHQHNVRHEGRLIGIEYTDEQVEKIATSRIKDEIKAGIQTIQYQINTFSTTNGQAPFLSVFMYLREEPEYIKETAMLIEETLRQRYVGMKNPVGAYVTPAFPKLLYVLDDNNVPQDSEYRYLTDLAVKCVSKRMMPDFISAKVMRENYEGQVFPCMGCRSFLSPWKDENGEYKWYGRFNQGVVTLNLADAGLSANHKLDVFWKILDERLELCKEALMLRHESLKGTLSDVSPIHWRYGALARLKSGETIDKLLENGYSTISLGYIGLYECVVSLIGDTHTSKDGNELATKIMQRLREACDSWKEETGLGFGLYGTPAESTTYTFARALKKRFGIVKGITDKDYLTNSYHVNVKEHIDAFDKLKVEAKFQKVSSGGAISYVEVTNMSENLDALSALIDYMYDTIQYAEINTKSDYCQECGFDGEILLDENREWYCPNCGNRNHKSLNVCRRTCGYLGDNFWNQGRTQEIAERFVHLDNHLLGE

SEQ ID NO: 1121 - protein, 716 aa, unidentified
  REGION 1..716: note = Category: MG60 effectors
  REGION 1..716: note = Description: MG60-336 effector
  source 1..716: note = uncultivated organism sequence
MLEVIKRNGERVPFNRDKITVAIEKAMNSSSGIYEEGQAAKIASEIEAYAASIQKDLTIYAIEDQVYYRLLKYNNPATARAYENYKTIQAFKRQTNTTDDDVFGLLNNTNLEVLDENSNKNGHVVSTQRDLIAGEVSKDIARRKLIPADIVQAHDSGAIHFHDMDYIIQPMFNCCLINLEDMLANGTVINGKKIDTPKSFQVACTVTTQIIAQVASGQYGGQSINGIDRILAPYVRKSFKKYMKAVVEEQREVYGIEPDMEKAEEIAWKRTKKEIKDGIQTIQYQINTLMTTNGQAPFVTLFMYFQPDYEYAREAALIDEELLRQRIQGIKNEANVYVTPAFPKLIYVLDEHNVREGSPYFYLTKLAAECTAKRMYPDYISAKKMRESYEGNVFSPMGCRSFLSPWKDEKGNYQFDGRFNMGVVSLNLPQIGILADGDEEKFFQILDKRLELCKKALLLRVDLLKRITSDVSPIHWQYGAIARLKPGETIEKFIYGGYATLSLGYIGIYEATVLTKHCSHTAPEGRKFAMRIMDDLNAHIKKWRKETNIGFALYGTPAENLTNLFCKIDKARFGSIPDVTDKGYYTNSYHVDVREPINVFDKFSFEADFEDKSTGGCISYAEIPNMTHNIPAVLTMVQYIYDHITYGEFNTKLDYCHECGFDGEIILNDDNEWECPRCHNKDRNKLTVIRRTCGYLGENFWNEGRTQEIKNRVLHI

SEQ ID NO: 1122 - protein, 638 aa, unidentified
  REGION 1..638: note = Category: MG60 effectors
  REGION 1..638: note = Description: MG60-337 effector
  source 1..638: note = uncultivated organism sequence
MKVIKRDGRVVDFNREKIAIAIEKANQEVTEKERADKQDIKDIIKYIESLDKKRILVEDVQDIIEEQLMDKKKFKLAKKYMIYRYNRALVRKKNTTDESILGLIKNQNMEMLEDGTRKNAVLASSQRDYIAGEVSKDLTKRLLLPEKIVKAHGEGVLYFHDMDYFLQPIFNSSVINIGDMLDNGTVINGKLIESPKSFRVACTVLAQILATVASTQYGGQSVDISHLGKYVRKSYEKFKEEFGGVSSNEILDKKIKEEVTSGVQTLQYQINTLMTTNGRSPLVSLFMYLREGDEYIKENALIIEEILKQRIDGMKDAEGEYINPEFPKLIYVIDKDNCLNGGKYDYLTHLALDCANKTQEPSFISAKKMRENYSGNVFSPMGFRSFLTPWKDENGTYKFEGRFNQGIVSINLPQIAIVADGDEDKFFSLLDERLELCHEALLCRHYALLGTVSDTSPIHWIYGAIAHLKSGEKIDKYLKDGYSTISLGYVGVYEATMMIKEVSNTEPNGKEFAIKIVKHLKETVEKWKKASGLGFCLYGETSQKVCKTFERIDKERFGVIKNVTDKEKYTSSYHASEDEKIDYKEKLAFESVFQKLSLGGVVSQIPSEYIGELSDKEEFIKFVYDNVQYLGFTKELKK

SEQ ID NO: 1123 - protein, 716 aa, unidentified
  REGION 1..716: note = Category: MG60 effectors
  REGION 1..716: note = Description: MG60-338 effector
  source 1..716: note = uncultivated organism sequence
MLEVIKRNGERVPFNRDKITNAIEKAMNSSSGIYEEGQAAKIASEIEAYAASIQKDLTIYAIEDQVYYRLLKYNNPATARAYENYKTIQAFKRQTNTTDDDVFGLLNNTNLEVLDENSNKNGHVVSTQRDLIAGEVSKDIARRKLIPADIVQAHDSGAIHFHDMDYIIQPMFNCCLINLEDMLANGTVINGKKIDTPKSFQVACTVTTQIIAQVASGQYGGQSINGIDRILAPYVRKSFKKYMKAVVEEQREVYGIEPDMEKAEEIAWKRTKKEIKDGIQTIQYQINTLMTTNGQAPFVTLFMYFKPDYEYAKEAALIDEELLRQRIQGIKNEANVYVTPAFPKLIYVLDEHNVREGNPYFYLTKLAAECTAKRMYPDYISAKKMRESYEGNVFSPMGCRSFLSPWKDEQGNYKFDGRFNMGVVSLNLPQIGILADGDEEKFFQILDKRLELCKKALLLRVDLLKRITSDVSPIHWQYGAIARLKPGETIEKFIYGGYATLSLGYIGIYEATMLTKHCSHTTAEGRKFAMRIMDDLNAHIKKWRKETNIGFALYGTPAENLTNLFCKIDKARFGSIPDVTDKGYYTNSYHVDVREPINVFDKFSFEADFEDKSTGGCISYAEIPNMTHNIPAVLTMVQYIYDHIAYGEFNTKLDYCHECGFDGEIILNDDNEWECPRCHNKDRNKLTVIRRTCGYLGENFWNEGRTQEIKNRVLHI

SEQ ID NO: 1124 - protein, 724 aa, unidentified
  REGION 1..724: note = Category: MG60 effectors
  REGION 1..724: note = Description: MG60-339 effector
  source 1..724: note = uncultivated organism sequence
MNVIKRSGEEVVFDASKIENAIKKANKATTHNQMSDELIRSVTQSVINKCENLKRSPNVEEIQDMVEGELMEHRCFAVAHNYITYRYERALVRKANSTDKQIMSLLERNNEEVKQENSNKNPLVNSVQRDYMAGEVSKDITKRFLLPQDVMEAHEQGIIHFHDSDYFAQHMHNCCLVNLEDMLQNGTVISETMIEKPHSFSTACNVATQIIAQVASSQYGGQSITLSHLAPFVQVSREKARREVKEELESLNLDSSEDTVNKMAEMRVRKEIEKGVQMIQYQVITLMTTNGQAPFVTVFMYLNEVPEGQTRDDLAIIIEEMLKQRIKGVKNEKGIWITPAFPKLIYVLEENNIEEGSKYWYLTELAAKCTAKRMVPDYISEKKMLELKVDANGEGHCYPCMGCRSFLTTYLDENGKPKYYGRFNQGVVTLNLVDVACSSKQDEEAFWRIMDERLALCKKALMCRHERLLGTPSDVAPILWQNGALARLKKGEPIDKLLFGGYSTISLGYAGLCECVYYMTGHPHTEEPGTSFGLKVMQYLNDACAKWKAEENIDFSLYGTPMESTTFKFSKHLQERFGIIPHVTDKNYITNSYHVHVTEEIDAFTKLSFESQFQKLSPGGAISYVEVPNMENNIDAVLAIMKHIYNHIMYAELNTKSDYCQVCGYTGEIKIVEDENHKLVWECPNCGNRDQEKMNVARRTCGYIGTQFWNQGRTQEIKERVLHL

SEQ ID NO: 1125 - protein, 724 aa, unidentified
  REGION 1..724: note = Category: MG60 effectors
  REGION 1..724: note = Description: MG60-340 effector
  source 1..724: note = uncultivated organism sequence
MNVIKRSGEEVVFDASKIENAIKKANKATTHNQMSDELIRSVTQSVIDKCENLKRSPNVEEIQDMVEGELMEHRCFAVAHNYITYRYERALVRKANSTDKQIMSLLERNNEEVKQENSNKNPLVNSVQRDYMAGEVSKDITKRFLLPQDVMEAHEQGIIHFHDSDYFAQHMHNCCLVNLEDMLQNGTVISETMIEKPHSFSTACNVATQIIAQVASSQYGGQSITLSHLAPFVQVSREKARREVKEELESLNLDSSEDTVNKMAEMRVRKEIEKGVQMIQYQVITLMTTNGQAPFVTVFMYLNEVPEGQTRDDLAIIIEEMLKQRIKGVKNEKGIWITPAFPKLIYVLEENNIEEGSKYWYLTELAARCTAKRMVPDYISEKKMLELKVDANGEGHCYPCMGCRSFLTTYLDENGKPKYYGRFNQGVVTLNLVDVACSSKQDEDAFWRIMDERLELCKKALMCRHERLLGTPSDVAPILWQNGALARLKKGEPIDKLLFGGYSTISLGYAGLCECVYYMTGHPHTEEPGTSFGLKVMQYLNDACAKWKAEENIDFSLYGTPMESTTFKFSKHLQERFGIIPHVTDKNYITNSYHVHVTEEIDAFTKLSFESQFQKLSPGGAISYVEVPNMENNIDAVLAIMKHIYNHIMYAELNTKSDYCQVCGYTGEIKIVEDENHKLVWECPNCGNRDQEKMNVARRTCGYIGTQFWNQGRTQEIKERVLHL

SEQ ID NO: 1126 - protein, 724 aa, unidentified
  REGION 1..724: note = Category: MG60 effectors
  REGION 1..724: note = Description: MG60-341 effector
  source 1..724: note = uncultivated organism sequence
MNVIKRSGEEVVFDSIKIENAIKKANKATTHNQMSDELIRSVTQSVIDKCENLKRSPNVEEIQDMVEGELMEHRCFAVAHNYITYRYERALVRKANSTDKQIMSLLERNNEEVKQENSNKNPLVNSVQRDYMAGEVSKDITKRFLLPQDVMEAHEQGIIHFHDSDYFAQHMHNCCLVNLEDMLQNGTVISETMIEKPHSFSTACNVATQIIAQVASSQYGGQSITLSHLAPFVQVSREKARREVKEELESLNLDSSEDTVNKMAEMRVRKEIEKGVQMIQYQVITLMTTNGQAPFVTVFMYLNEVPEGQTRDDLAIIIEEMLKQRIKGVKNEKGIWITPAFPKLIYVLEENNIEEGSKYWYLTELAAKCTAKRMVPDYISEKKMLELKVDANGEGHCYPCMGCRSFLTTYLDENGKPKYYGRFNQGVVTLNLVDVACSSKQDEEAFWRIMDERLALCKKALMCRHERLLGTPSDVAPILWQNGALARLKKGEPIDKLLFGGYSTISLGYAGLCECVYYMTGHPHTEEPGTSFGLKVMQYLNDACAKWKAEENIDFSLYGTPMESTTFKFSKHLQERFGIIPHVTDKNYITNSYHVHVTEEIDAFTKLSFESQFQKLSPGGAISYVEVPNMENNIDAVLAIMKHIYNHIMYAELNTKSDYCQVCGYTGEIKIVEDENHKLVWECPNCGNRDQEKMNVARRTCGYIGTQFWNQGRTQEIKERVLHL

SEQ ID NO: 1127 - protein, 735 aa, unidentified
  REGION 1..735: note = Category: MG60 effectors
  REGION 1..735: note = Description: MG60-342 effector
  source 1..735: note = uncultivated organism sequence
MKKPMLVLKRNGEEVTFDRQKIFNAISAANKEVAPIHQLNKYQIEAVTKNVTEKIEEMSHIVSVEEIQDMVEVAIMEMRGYEVAQKYVRYRHKRELARKSNTTDEGILALINLSNEEIKQENSNKNPTVNSTQRDYMAGEVSKDLTMRVLLPEDIVKAHKEGIIHFHDSDYFAQKMYNCCLVNLKDMFENETVISGTKIETPKSFYTGCNVATQIVAQVASNQYGGQTITLSDLAPFVDVSRKKITQKVKEELAESGLSATDKQISKIVHKRLKEEIKSGIQTIQYQLVTLMTTNGQTPFVSIFMYLDEVPEGQTRDDLALIIEEVLRQRIQGVKNEKGVWVTPAFPKLLYILDEDNIHEDSKYWYLTELAAKCTAKRMVPDYISAKIMKEIKNGEVYPCMGCRSFLTVEDGIRNPDGSHKFYGRFNQGVVTINLVDVACSSYGDMDKFWKILDERLELCHKALRYRHERLLHTKSDVAPILWQNGAIARLEKGETIDKLLFGGYSTISLGYAGLYEMCVRMTGHSHTDPEAKKFALSVMQRLNDKCKEWREAENIGYSVYGTPMESTTYKFAKCLQKRFGIIPGVTDKNYITNSYHVHVTEEIDAFSKLKFESEFQKLSPGGAISYVEVPDMQGNIPAVLSLIKYIYENIMYAELNSKSDYCEVCGYEGEIKIVETESGKLIWECPCCGNRDQNKMFVARRTCGYIGTQFWNQGRTQEIKDRVIHMSYHALNKN

SEQ ID NO: 1128 - protein, 706 aa, unidentified
  REGION 1..706: note = Category: MG60 effectors
  REGION 1..706: note = Description: MG60-343 effector
  source 1..706: note = uncultivated organism sequence
METNPQIELAFDFLQYTGTNVFLTGKAGTGKTTFLRELKRRSPKRMIVVAPTGVAAINAGGVTIHSFFQLPFGPYVPGNMEETPGGENRYTNKFSREKINIIRSLDLLVIDEISMVRADLLDAVSDVLCRYKDRSRPFGGVQLLMIGDLQQLAPVVKEEEWGVLKERYASPFFFCSRALQEVPYAGIELTQVYRQTDAFFLDLLNKVRDNRADQQTLQALNRRYIPGFRPDDTEGYITLTTHNYQAQQINREKLDELEGKAYSYEAEIVDEFPEYSFPTDQHLVLKKGAQVMFVKNDASPEKRYYNGKIGRITAISSDHILVRCGGEKEAITVAKEEWTNTKYSIDAETQEITETVEGVFRQYPLKTAWAITIHKSQGLTFERAIVDAGAAFTHGQVYVALSRCKTLEGLVLSSPLRTGALICDQVVRQFTESVERNQPGREQLADARKAYYLQLLKELFDYSGVLRRVQYMSRLMNEHLWRLYPELTERYRTVREFCHNELKDVGERFQAQLERLVSECGDPEQDGQVRERVAKGLAYFRENTERVAVLVRDTQPEVDNKEVRKSLNEALGRLQQEVEVKMATLEAAVGGFSVMGHLQAKAKAMIEKPKPKTRKVSDKVDVPDDILHPDLYQILRQWRKEEAASMNLPVYTVLHQKALLGIANTLPTNGRELLAIPGIGKKVAERYGAKLLEIVNDFRFATLGEA

SEQ ID NO: 1129 - protein, 724 aa, unidentified
  REGION 1..724: note = Category: MG60 effectors
  REGION 1..724: note = Description: MG60-344 effector
  source 1..724: note = uncultivated organism sequence
MNVIKRSGEEVVFDASKIENAIKKANKATTHNQMSDELIRSVTQSVIDKCENLKRSPNVEEIQDMVEGELMEHRCFAVAHNYITYRYERALVRKANSTDKQIMSLLERNNEEVKQENSNKNPLVNSVQRDYMAGEVSKDITKRFLLPQDVMEAHEQGIIHFHDSDYFAQHMHNCCLVNLEDMLQNGTVISETMIEKPHSFSTACNVATQIIAQVASSQYGGQSITLSHLAPFVQVSREKARREVKEELESLNLDSSEDTVNKMAEMRVRKEIEKGVQMIQYQVITLMTTNGQAPFVTVFMYLNEVPEGQTRDDLAIIIEEMLKQRIKGVKNEKGIWITPAFPKLIYVLEENNIEEGSKYWYLTELAAKCTAKRMVPDYISEKKMLELKVDVNGEGHCYPCMGCRSFLTTYLDENGKPKYYGRFNQGVVTLNLVDVACSSKQDEEAFWKIMDERLALCKKALMCRHERLLGTPSDVAPILWQNGALARLKKGEPIDKLLFGGYSTISLGYAGLCECVYYMTGHPHTEEPGTSFGLKVMQYLNDACAKWKAEENIDFSLYGTPMESTTFKFSKHLQERFGIIPHVTDKNYITNSYHVHVTEEIDAFTKLSFESQFQKLSPGGAISYVEVPNMENNIDAVLAIMKHIYNHIMYAELNTKSDYCQVCGYTGEIKIVEDENHKLVWECPNCGNRDQEKMNVARRTCGYIGTQFWNQGRTQEIKERVLHL

SEQ ID NO: 1130 - protein, 724 aa, unidentified
  REGION 1..724: note = Category: MG60 effectors
  REGION 1..724: note = Description: MG60-345 effector
  source 1..724: note = uncultivated organism sequence
MNVIKRSGEEVVFDASKIENAIKKANKATTHNQMSDELIRSVTQSVIDKCENLKRSPNVEEIQDMVEGELMEHRCFAVAHNYITYRYERALVRKANSTDKQIMSLLERNNEEVKQENSNKNPLVNSVQRDYMAGEVSKDITKRFLLPQDVMEAHEQGIIHFHDSDYFAQHMHNCCLVNLEDMLQNGTVISETMIEKPHSFSTACNVATQIIAQVASSQYGGQSITLSHLAPFVQVSREKARREVKEELESLNLDSSEDTVNKMAEMRVRKEIEKGVQMIQYQVITLMTTNGQAPFVTVFMYLNEVPEGQTRDDLAIIIEEMLKQRIKGVKNEKGIWITPAFPKLIYVLEENNIEEGSKYWYLTELAARCTAKRMVPDYISEKKMLELKVDANGEGHCYPCMGCRSFLTTYLDENGKPKYYGRFNQGVVTLNLVDVACSSKQDEEAFWRIMDERLALCKKALMCRHERLLGTPSDVAPILWQNGALARLKKGEPIDKLLFGGYSTISLGYAGLCECVYYMTGHPHTEEPGTSFGLKVMQYLNDACAKWKAEENIDFSLYGTPMESTTFKFSKHLQERFGIIPHVTDKNYITNSYHVHVTEEIDAFTKLSFESQFQKLSPGGAISYVEVPNMENNIDAVLAIMKHIYNHIMYAELNTKSDYCQVCGYTGEIKIVEDENHKLVWECPNCGNRDQEKMNVARRTCGYIGTQFWNQGRTQEIKERVLHL

SEQ ID NO: 1131 - protein, 716 aa, unidentified
  REGION 1..716: note = Category: MG60 effectors
  REGION 1..716: note = Description: MG60-346 effector
  source 1..716: note = uncultivated organism sequence
MLEVIKRNGERVPFNRDKITVAIEKAMNSSSGIYEEGQAAKIASEIEAYAASIQKDLTIYAIEDQVYYRLLKYNNPATARAYENYKTIQAFKRQTNTTDDDVFGLLNNTNLEVLDENSNKNGHVVSTQRDLIAGEVSKDIARRRLIPADIVQAHDSGAIHFHDMDYIIQPMFNCCLINLEDMLANGTVINGKKIDTPKSFQVACTVTTQIIAQVASGQYGGQSINGIDRILAPYVRKSFKKYMKAVVEEQREVYGIEPDMEKAEEIAWKRTKKEIKDGIQTIQYQINTLMTTNGQAPFVTLFMYFQPDYEYAREAALIDEELLRQRIQGIKNEANVYVTPAFPKLIYVLDEHNVREGSPYFYLTKLAAECTAKRMYPDYISAKKMRESYEGNVFSPMGCRSFLSPWKDEKGNYQFDGRFNMGVVSLNLPQIGILADGDEEKFFQILDKRLELCKKALLLRVDLLKRITSDVSPIHWQYGAIARLKPGETIEKFIYGGYATLSLGYIGIYEATVLTKHCSHTAPEGRKFAMRIMDDLNAHIKKWRKETNIGFALYGTPAENLTNLFCKIDKARFGSIPDVTDKGYYTNSYHVDVREPINVFDKFSFEADFEDKSTGGCISYAEIPNMTHNIPAVLTMVQYIYDHITYGEFNTKLDYCHECGFDGEIILNDDNEWECPRCHNKDRNKLTVIRRTCGYLGENFWNEGRTQEIKNRVLHI

SEQ ID NO: 1132 - protein, 708 aa, unidentified
  REGION 1..708: note = Category: MG60 effectors
  REGION 1..708: note = Description: MG60-347 effector
  source 1..708: note = uncultivated organism sequence
MKVIKRDGRVVDYNRDKIITAIEKANKEVKTKERVTKEEIKEITKYIEELDKKRILVEDIQDIIEEQLMDLKKFELAKKYMIYRYTRALVRKANTTDESILGLIKNQNKELLEENSNKNAVLASTQRDYIAGEVSKDLTKRILLPEKITKAHEDGVLHFHDMDYFLQPIFNCCLINIGDMLDNGTVMNGKLIESPKSFQVACTVMTQIIAAVASNQYGGQSVDISHLGKYVRKSYEKFRRTFENEFGNELSEDIIERLTQQRLKKEISAGVQTIQYQINTLMTTNGQSPFVTIFLNLKKDDPYIKENAMVIEEIIRQRYEGIKNEKGVYVTPAFPKLIYVLDEHNCLKGGEYDYLTKLAVKCSAKRLYPDYISAKKMRENYEGNVFSPMGCRSFLSPWKDENGNYKFEGRFNQGVVSINLPQIGIIADGDEEKFWKLLDERLEICKEALMCRHYSLLGTLSNTSPIHWRYGAIARMKPGEKIDELLKGGYSTLSLGYIGIYETTKLMKGVSHTTPEGHEFAIKVMKRLRDATAEWKKETGLGFALYGTPAESLCYRFARIDKEKFGEIKDVTDKGYYTNSYHVDVREKIDAFSKLKFESEFQELSLGGAISYVEIPNMRHNLKALEDLVKFIYDNIQYAEFNTKSDYCHVCGFDGEIIINDNLEWECPNCGNKDKNKMNVTRRTCGYLGENFWNEGKTKEIKARVLHL

SEQ ID NO: 1133 - protein, 716 aa, unidentified
  REGION 1..716: note = Category: MG60 effectors
  REGION 1..716: note = Description: MG60-348 effector
  source 1..716: note = uncultivated organism sequence
MLEVIKRNGERVPFNRDKITIAIEKAMNSSSGIYEEGQAAKIASEIEAYAASIQKDLTIYAIEDQVYYRLLKYNNPATARAYENYKTIQAFKRQTNTTDDDVFGLLNNTNLEVLDENSNKNGHVVSTQRDLIAGEVSKDIARRKLIPADIVQAHDSGAIHFHDMDYIIQPMFNCCLINLEDMLANGTVINGKKIDTPKSFQVACTVTTQIIAQVASGQYGGQSINGIDRILAPYVRKSFKKYMKAVVEEQREVYGIEPDMEKAEEIAWKRTKKEIKDGIQTIQYQINTLMTTNGQAPFVTLFMYFQPDYEYAREAALIDEELLRQRIQGIKNEANVYVTPAFPKLIYVLDEHNVREGSPYFYLTKLAAECTAKRMYPDYISAKKMRESYEGNVFSPMGCRSFLSPWKDEKGNYQFDGRFNMGVVSLNLPQIGILADGDEEKFFQILDKRLELCKKALLLRVDLLKRITSDVSPIHWQYGAIARLKPGETIEKFIYGGYATLSLGYIGIYEATVLTKHCSHTAPEGRKFAMRIMDDLNAHIKKWRKETNIGFALYGTPAENLTNLFCKIDKARFGSIPDVTDKGYYTNSYHVDVREPINVFDKFSFEADFEDKSTGGCISYAEIPNMTHNIPAVLTMVQYIYDHITYGEFNTKLDYCHECGFDGEIILNDDNEWECPRCHNKDRNKLTVIRRTCGYLGENFWNEGRTQEIKNRVLHI

SEQ ID NO: 1134 - protein, 724 aa, unidentified
  REGION 1..724: note = Category: MG60 effectors
  REGION 1..724: note = Description: MG60-349 effector
  source 1..724: note = uncultivated organism sequence
MNVIKRSGEEVVFDASKIENAIKKANKATTHNQMSDELIRSVTQSVINKCENLKRSPNVEEIQDMVEGELMEHRCFAVAHNYITYRYERALVRKANSTDKQIMSLLERNNEEVKQENSNKNPLVNSVQRDYMAGEVSKDITKRFLLPQDVMEAHEQGIIHFHDSDYFAQHMHNCCLVNLEDMLQNGTVISETMIEKPHSFSTACNVATQIIAQVASSQYGGQSITLSHLAPFVQVSREKARREVKEELESLNLDSSEDTVNKMAEMRVRKEIEKGVQMIQYQVITLMTTNGQAPFVTVFMYLNEVPEGQTRDDLAIIIEEMLKQRIKGVKNEKGIWITPAFPKLIYVLEENNIEEGSKYWYLTELAARCTAKRMVPDYISEKKMLELKVDANGEGHCYPCMGCRSFLTTYLDENGKPKYYGRFNQGVVTLNLVDVACSSKQDEEAFWRIMDERLALCKKALMCRHERLLGTPSDVAPILWQNGALARLKKGEPIDKLLFGGYSTISLGYAGLCECVYYMTGHPHTEEPGTSFGLKVMQYLNDACAKWKAEENIDFSLYGTPMESTTFKFSKHLQERFGIIPHVTDKNYITNSYHVHVTEEIDAFTKLSFESQFQKLSPGGAISYVEVPNMENNIDAVLAIMKHIYNHIMYAELNTKSDYCQVCGYTGEIKIVEDENHKLVWECPNCGNRDQEKMNVARRTCGYIGTQFWNQGRTQEIKERVLHL

SEQ ID NO: 1135 - protein, 724 aa, unidentified
  REGION 1..724: note = Category: MG60 effectors
  REGION 1..724: note = Description: MG60-350 effector
  source 1..724: note = uncultivated organism sequence
MNVIKRSGEEVVFDASKIENAIKKANKATTHNQMSDELIRSVTQSVINKCENLKRSPNVEEIQDMVEGELMEHRCFAVAHNYITYRYERALVRKANSTDKQIMSLLERNNEEVKQENSNKNPLVNSVQRDYMAGEVSKDITKRFLLPQDVMEAHEQGIIHFHDSDYFAQHMHNCCLVNLEDMLQNGTVISETMIEKPHSFSTACNVATQIIAQVASSQYGGQSITLSHLAPFVQVSREKARREVKEELESLNLDSSEDTVNKMAEMRVRKEIEKGVQMIQYQVITLMTTNGQAPFVTVFMYLNEVPEGQTRDDLAIIIEEMLKQRIKGVKNEKGIWITPAFPKLIYVLEENNIEEGSKYWYLTELAARCTAKRMVPDYISEKKMLELKVDANGEGHCYPCMGCRSFLTTYLDENGKPKYYGRFNQGVVTLNLVDVACSSKQDEEAFWKIMDERLALCKKALMCRHERLLGTPSDVAPILWQNGALARLKKGEPIDKLLFGGYSTISLGYAGLCECVYYMTGHPHTEEPGTSFGLKVMQYLNDACAKWKAEENIDFSLYGTPMESTTFKFSKHLQERFGIIPHVTDKNYITNSYHVHVTEEIDAFTKLSFESQFQKLSPGGAISYVEVPNMENNIDAVLAIMKHIYNHIMYAELNTKSDYCQVCGYTGEIKIVEDENHKLVWECPNCGNRDQEKMNVARRTCGYIGTQFWNQGRTQEIKERVLHL

SEQ ID NO: 1136 - protein, 745 aa, unidentified
  REGION 1..745: note = Category: MG60 effectors
  REGION 1..745: note = Description: MG60-351 effector
  source 1..745: note = uncultivated organism sequence
MAIVIKMNDKKNENAKYVIKRNGAEALFDEDKIVNALFKANDSTLKNKITKQQIVNIADHIKAYVEQTTYALNIEDIQDMVENELMQIKAFDVARSYITYRYKRALARQKNTTDDKILSLIEHNNEEVKQENSNKNPVVNSVQRDYMAGEVSKDLCKRIFLPSDIWEAHEDGIIHFHDADYFAQHMHNCCLVNLEDMLQNGTVISDTMIDRPKSFSTACNIATQAIAQIASQQYGGQTMSIAHLAPFVDVSRQKYMRKQMASMEKAGIKTTEAQLESVVEDMVDEEIKRGVQMIQYQLITLMTTNGQAPFVTIYMYLNECKDGRTKADMVKVIREMLKQRIQGVKNEKGVYVTPAFPKLIYVLEEDNIHEGDKYWELTKLAAKCTAKRMVPDYISEKIMKELKQGDVYSCMGCRSFLTVDRTKENIANAGNYKDGEHKYYGRFNQGVVTLNLVDVACTSARDEDYFWEILDKRLELCHKALRIRHERLLGTPSDVAPILWQHGALARLKKGETIDKLLYGGYSTISLGYAGLCECTRYMKGVSHTDPLGTEFATRVMQKLNDACAKWKAEENIDYSVYGTPLESTTYKFAKCLQKRFGIIPGVTDKNYITNSYHVHVTEKINAFDKLKFEAPFQKLSPGGAISYVEVPNLQDNIEAVLAIMQYIYENIMYAELNTKSDYCEVCGYDGEIRVVEDEHGKLVWECPNCGNRDQNKMSVARRTCGYIGTQFWNQGRTQEIKERYVHLQ

SEQ ID NO: 1137 - protein, 853 aa, unidentified
  REGION 1..853: note = Category: MG60 effectors
  REGION 1..853: note = Description: MG60-352 effector
  source 1..853: note = uncultivated organism sequence
MARSIEKIFEDNILLKYNLYNSIFTTLPFEKIEHVGTLLPLFSSYCSKGFEKKQSPKQIVQGFFENYLPDIKEEKQFDILFRFIQYVEREIVLFDAIEESAFPLLQSKKQNNSIKYIIEQALQEKKTEELKHFIENFRIRTVLTAHPTQFYPGKVLGIITDLSEAIKNNNFVLIKNLLLQLGKTPFIKHKKPSPLDEANHLIWYLENILYDAIPEIYNNIIEDLLEKESPNAIFEIGFWPGGDRDGNPFVTTEITLKVAEQLKLAILKKYHSDLKKLKRRLTFNGIFNKLESLEKNIQKIIINPKKKTELTQEKLLDRLHEIRTVLKEKHQSIFISDLDELIRKVRIFGFYFASLDIRQDSRIHTSAFNHITRIYPDVLTENYADFDEKQKLVYLGEINKKINISEFKDPMAISTLESMQAIKKIQKSNGKKGAHRYIISNTQSATNVMQVFCMLRMSGFNKKMPVDIVPLFETINDLQSAGKIMEILYKNPAYKKHLKSRKNEQIIMLGFSDGTKDGGYLAANWSIYRAKEDLSLMAQKYDIKVVFFDGRGGPPARGGGKTHSFYSSLGKNIENKAIEITVQGQTISSQYGSIELAKHNLEQLLSAGIKNKVFQGENNELSAENRKILEHLSDLAYRKYKNFKEHPKFIPYLEKMSTLKYYGKTKIGSRPTKRANSDKLIFSDLRAIPFVGAWSQLKQNVPGFFGVGSALLHYEQEGAFNKIENLYAESKFFKALIENVIVSLKKSFFQLTEYMKNDEEFGDFWKIIYDEYNNTQRLLLKLTKRKDLLEKSPETKASIETRHKIVLPLLTIQQYALQEIQITGKENKERIENLEKMIVRSLFGNINASRNAV

SEQ ID NO: 1138 - protein, 717 aa, unidentified
  REGION 1..717: note = Category: MG60 effectors
  REGION 1..717: note = Description: MG60-353 effector
  source 1..717: note = uncultivated organism sequence
MKVIKRDGHVVDYEPEKIEAAIQKANQEVDEADRVSDIQIRNIIKYIEGLKKKRMLVEDIQDVIEMRLMSLGKYVLAKAYITYRYTRELVRRSNTTDLTIKELIDGDSEYWNTENSNKNARVVTTQRDYLAGITSTDITRRFLLPEDVVNAHDSGIIHFHDADYFAQNALHNCDLINLDDMLQNGTSINGVMIEKPHRFLTAMTIATQLITAVSSSQYGGATITLTHLAPFVRASREYYEKRYSNRKLTKEQVKKFVEEDLHKEIVDGVQTFQYQINSMTTTNGQAPFLSVNMYLGETEEYKDELAMIIEEVLRQRIQGMKNEKGVWITPAFPKLLYVLEEDNINPKSKYYYLTKLATECTAKRMVPDYISEKVMKELKIDKNGNGQCYPCMGCRSFLTPYVDNDGKPKYYGRFNQGVVTLNLPDIALSSKKDMDEFWKIFDERLELSHKALRIRYKRLSKATSDVAPILWQHGALARLPKGASIKELLHNGYSTISLGYAGLYECVKYMTGKSHTDGAEGEEFGLKVMQHLNDACNKWKEEEKIDYSVYGTPIESTTYKFAKCLKERFGVIKGITDRNYITNSYHIPVFEEVDAFTKLAIESKFQKLSPGGAISYVEAPNLVKNLDAVLELITFIYNNIMYAEINTKSDYCHKCGYTGEILIDDNLEWYCPECGNRDHTKLNVARRTCGYIGTNFWNKGRTQEIKERVLHIDNKEA

SEQ ID NO: 1139 - protein, 706 aa, unidentified
  REGION 1..706: note = Category: MG60 effectors
  REGION 1..706: note = Description: MG60-354 effector
  source 1..706: note = uncultivated organism sequence
METNPQIELAFDFLQYTGTNVFLTGKAGTGKTTFLRELKRRSPKRMIVVAPTGVAAINAGGVTIHSFFQLPFGPYVPGNAEGGAENEKRYTNKFSREKINIIRSLDLLVIDEISMVRADLLDAVSDVLCRYKDRSRPFGGVQLLMIGDLQQLAPVVKDDEWSLLKERYASPFFFCSRALQEVPYVGIELTQVYRQTDAFFLDLLNKVRDNRADQATLQALNRRYIPGFRPDDTEGYITLTTHNYQAQQINREKLEELEEKAYSYEAEIVDEFPEYSFPTDRHLVLKKGAQVMFVKNDASPEKRYYNGKIGRVTAISSDHILVRCGEEREAITVAKEEWTNTKYTIDAETQEISETVEGVFRQYPLKTAWAITIHKSQGLTFERAIVDAGAAFTHGQVYVALSRCKTLEGLVLSSPLRTGALICDQVVRQFTEGIEQGQPGREQLADAKRAYYLQLLKELFDYNGVLRRMQYMSRILNEHLWRLYPELTERYRTEREFCHNELKDVGERFQMQLERLVNECREPEQDGQVRERVAKGLAYFRERTGRVFALVQDTQPEVDNKEVRKSLNEALGRLQQEVEVKMATLEAAAGGFSVMGYLQAKARAMIEKPKAKARKISDKVDVPEDILHPDLYQILRQWRKEEAASMNLPVYTVLHQKALLGIANILPTNGRELLSIPGIGKKVAERYGKKLLEMVNDYRFATLGDA

SEQ ID NO: 1140 - protein, 716 aa, unidentified
  REGION 1..716: note = Category: MG60 effectors
  REGION 1..716: note = Description: MG60-355 effector
  source 1..716: note = uncultivated organism sequence
MLEVIKRNGERVPFNRDKITVAIEKAMNSSSGIYEEGQAAKIAGEIEAYAASIQKDLTIYAIEDQVYYRLLKYNNPATARAYENYKTIQAFKRQTNTTDDDVFGLLNNTNLEVLDENSNKNGHVVSTQRDLIAGEVSKDIARRKLIPADIVQAHDSGAIHFHDMDYIIQPMFNCCLINLEDMLANGTVINGKKIDTPKSFQVACTVTTQIIAQVASGQYGGQSINGIDRILAPYVRKSFKKYMKAVVEEQREVYGIEPDMEKAEEIAWKRTKKEIKDGIQTIQYQINTLMTTNGQAPFVTLFMYFQPDYEYAREAALIDEELLRQRIQGIKNEANVYVTPAFPKLIYVLDEHNVREGSPYFYLTKLAAECTAKRMYPDYISAKKMRESYEGNVFSPMGCRSFLSPWKDEKGNYQFDGRFNMGVVSLNLPQIGILADGDEEKFFQILDKRLELCKKALLLRVDLLKRITSDVSPIHWQYGAIARLKPGETIEKFIYGGYATLSLGYIGIYEATVLTKHCSHTAPEGRKFAMRIMDDLNAHIKKWRKETNIGFALYGTPAENLTNLFCKIDKARFGSIPDVTDKGYYTNSYHVDVREPINVFDKFSFEADFEDKSTGGCISYAEIPNMTHNIPAVLTMVQYIYDHITYGEFNTKLDYCHECGFDGEIILNDDNEWECPRCHNKDRNKLTVIRRTCGYLGENFWNEGRTQEIKNRVLHI

SEQ ID NO: 1141 - protein, 716 aa, unidentified
  REGION 1..716: note = Category: MG60 effectors
  REGION 1..716: note = Description: MG60-356 effector
  source 1..716: note = uncultivated organism sequence
MLEVIKRNGERVPFNRDKITVAIEKAMNSSSGIYEEGQAAKIAGEIEAYAASIQKDLTIYAIEDQVYYRLLKYNNPATARAYENYKTIQAFKRQTNTTDDDVFGLLNNTNLEVLDENSNKNGHVVSTQRDLIAGEVSKDIARRKLIPADIVQAHDSGAIHFHDMDYIIQPMFNCCLINLEDMLANGTVINGKKIDTPKSFQVACTVTTQIIAQVASGQYGGQSINGIDRILAPYVRKSFKKYMKAVVEEQREIYGIEPDMEKAEEIAWKRTKKEIKDGIQTIQYQINTLMTTNGQAPFVTLFMYFQPDYEYAREAALIDEELLRQRIQGIKNEANVYVTPAFPKLIYVLDEHNVREGSPYFYLTKLAAECTAKRMYPDYISAKKMRESYEGNVFSPMGCRSFLSPWKDEKGNYQFDGRFNMGVVSLNLPQIGILADGDEEKFFQILDKRLELCKKALLLRVDLLKRITSDVSPIHWQYGAIARLKPGETIKKFIYGGYATLSLGYIGIYEATVLTKHCSHTAPEGRKFAMRIMDDLNAHIKKWRKETNIGFALYGTPAENLTNIFCKIDKARFGSIPDVTDKGYYTNSYHVDVREPINVFDKFSFEADFEDKSTGGCISYAEIPNMTHNIPAVLTMVQYIYDHITYGEFNTKLDYCHECGFDGEIILNDDNEWECPRCHNKDRNKLTVIRRTCGYLGENFWNEGRTQEIKNRVLHI

SEQ ID NO: 1142 - protein, 752 aa, unidentified
  REGION 1..752: note = Category: MG60 effectors
  REGION 1..752: note = Description: MG60-357 effector
  source 1..752: note = uncultivated organism sequence
MYIYDEILDGNMHTEEPNMCVMKRSGERVPFDRVKIAEAIERANREEGILSERLTDAQIDQITRGIEKDASNAGRDLSVEEIQDKVEDALMCSGRPKVARLYITYRYKHNEMRKMSNIDQKIAGVVERDNEEVKQENSNKNPTVLSVQRDYMAGEWSRYYTSRYLLPEEIVDAHKNGIIHFHDADYFAQHMHNCDLVNLEDMLQNGTCISGTHIDKPKSFSTACTVASQIVAQVASSQYGGQTITMSHLAPFVDISRKKITSRLAEELHETGIEVPAEKLSELVEKELLKEIESGCQTIQYQLITLQSTNGQAPFVTVFLYLGEVPEGQLRDDLAIVIEVMLKQRILGVKDKSGVYITPAFPKLIYVLQEDNIREGTPYFYLTELAAKCTAKRMVPDYISEKKALELKGDVYPCMGCRSFLTPDRFTDAGVGNIANDKSYVPGRHKYYGRFNQGVVTLNLVDIACSSGRDERKFWDIMNERLDLCHRALRIRHERLKGTPSDVAPILWQDGAIARLASGETIDRLLMNGYSTISLGYAGLAECVFYMKGTSHTSEEGKEFGLRVMQALNDACAKWKKAENIDYSVYGTPLESTTYKFAKCLQRRFGKIPGVTDKNYITNSYHIHVSEHIDAFSKLSKEAEFQQLSPGGAISYVEVPNMQNNIPAVIRVMQHIYDSILYAELNTKSDLCEVCGFDGEIQVKKDVTGKLVWECPNCGNRDQSKMHVARRTCGYIGTQYWNQGRTAEIADRVLHL

SEQ ID NO: 1143 - protein, 716 aa, unidentified
  REGION 1..716: note = Category: MG60 effectors
  REGION 1..716: note = Description: MG60-358 effector
  source 1..716: note = uncultivated organism sequence
MLEVIKRNGERVPFNRDKITIAIEKAMNSSSGIYEEGQAAKIAGEIEAYAASIQKDLTIYAIEDQVYYRLLKYNNPATARAYENYKTIQAFKRQTNTTDDDVFGLLNNTNLEVLDENSNKNGHVVSTQRDLIAGEVSKDIARRKLIPADIVQAHDSGAIHFHDMDYIIQPMFNCCLINLEDMLANGTVINGKKIDTPKSFQVACTVTTQIIAQVASGQYGGQSINGIDRILAPYVRKSFKKYMKAVVEEQREVYGIEPDMEKAEEIAWKRTKKEIKDGIQTIQYQINTLMTTNGQAPFVTLFMYFQPDYEYAREAALIDEELLRQRIQGIKNEANVYVTPAFPKLIYVLDEHNVREGSPYFYLTKLAAECTAKRMYPDYISAKKMRESYEGNVFSPMGCRSFLSPWKDKKGNYQFDGRFNMGVVSLNLPQIGILADGDEEKFFQILDKRLELCKKALLLRVDLLKRITSDVSPIHWQYGAIARLKPGETIEKFIYGGYATLSLGYIGIYEATVLTKHCSHTAPEGRKFAMRIMDDLNAHIKKWRKETNIGFALYGTPAENLTNLFCKIDKARFGSIPDVTDKGYYTNSYHVDVREPINVFDKFSFEADFEDKSTGGCISYAEIPNMTHNIPAVLTMVQYIYDHITYGEFNTKLDYCHECGFDGEIILNDDNEWECPRCHNKDRNKLTVIRRTCGYLGENFWNEGRTQEIKNRVLHI

SEQ ID NO: 1144 - protein, 656 aa, unidentified
  REGION 1..656: note = Category: MG60 effectors
  REGION 1..656: note = Description: MG60-359 effector
  source 1..656: note = uncultivated organism sequence
MKKEGLMKVIKRDGRAVDYDRSKIQIAIEKANQEVKESERVSKEDILGIISYIEELDKKRILVEDIQDIIEQKIMELKKYELAKKYIVYRYTRALVRKQNTTDETILGIIRNDNKEEGQEDNEITVSAQRDYIAGEVSKDLTKRLLLPEKVASADEEGVLYFHDSEYFVHPMINSSFVGIGDMLDNGTVMSNAKIESPKSFLVACTVATQIMAAIANNQYGGQAIDMQCFGKYLRKSYEKFKGEIENEFNGELEKESIENLVNKRLKTELKSGIQIMQYQFNTLKVIKGRMPQITLFLHLDKEDTYIKENAMIIEEILKQKQNGFKDENGQNITLEFPKLIYVIDEFNNLAGGEYDYLTKLALECSLKTKSPSYISAKIMRQYYNGNVFCPMDAGSFLLPWERENLINKETSTKSNNSIDFKEKSKFNQGIVSINLPQIAIIADGDEKKFWKLLEERLDICLDALKCRHYSLVGISSDMSPTHWQYGGIARLEKGEKIDKLLYNGYSTLTLGYVGIYEMAMKMTGQNHLEGNGREFAVKVLEYLNETTKKWKKETNIDFILCGITSKKVGKRFLKKDKEKFGTIKGITDKEYYTGSYLMDPKQNEETLTALSFEKEFQKMSPGGNASYLKVANLKMDELEEILKYSYENICYLRLI

SEQ ID NO: 1145 - protein, 706 aa, unidentified
  REGION 1..706: note = Category: MG60 effectors
  REGION 1..706: note = Description: MG60-360 effector
  source 1..706: note = uncultivated organism sequence
METNPQIELAFDFLQYTGTNVFLTGKAGTGKTTFLRELKRRSPKRMIVVAPTGVAAINAGGVTIHSFFQLPFGPYVPGNMEETPGGENRYTNKFSREKINIIRSLDLLVIDEISMVRADLLDAVSDVLCRYKDRSRPFGGVQLLMIGDLQQLAPVVKEEEWGLLKERYASPFFFCSRALQEVPYAGIELTQVYRQTDAFFLDLLNKVRDNRADQQTLQALNRRYIPGFRPDDTEGYITLTTHNYQAQQINREKLDELEGKAYSYEAEIVDEFPEYSFPTDQHLVLKKGAQVMFVKNDASPEKRYYNGKIGRITAISSDHILVRCGGEKEAITVAKEEWTNTKYSIDAETQEITETVEGVFRQYPLKTAWAITIHKSQGLTFERAIVDAGAAFTHGQVYVALSRCKTLEGLVLSSPLRTGALICDQVVRQFTESVERNQPGREQLADARKAYYLQLLKELFDYSGVLRRVQYMSRLMNEHLWRLYPELTERYRTVREFCHNELKDVGERFQAQLERLVSECGDPEQDGQVRGRVAKGLAYFRENTERVAVLVRDTQPEVDNKEVRKSLNEALGRLQQEVEVKMATLEAAVGGFSVMGHLQAKAKAMIEKPKPKTRKVSDKVDVPDDILHPDLYQILRQWRKEEAASMNLPVYTVLHQKALLGIANTLPTNGRELLAIPGIGKKVAERYGAKLLEIVNDFRFATLGEA

SEQ ID NO: 1146 - protein, 717 aa, unidentified
  REGION 1..717: note = Category: MG60 effectors
  REGION 1..717: note = Description: MG60-361 effector
  source 1..717: note = uncultivated organism sequence
MKVIKRDGHVVDYEPEKIEAAIQKANQEVDEADRVSDIQIRNIIKYIEGLKKKRMLVEDIQDVIEMRLMSLGKYVLAKAYITYRYTRELVRRSNTTDLTIKELIDGDSEYWNTENSNKNARVVTTQRDYLAGITSTDITRRFLLPEDVVNAHDSGIIHFHDADYFAQNALHNCDLINLNDMLQNGTSINGVMIEKPHRFLTAMTIATQLITAVSSSQYGGATITLTHLAPFVRASREYYEKRYSNRKLTKEQVKKFVEEDLHKEIVDGVQTFQYQINSMTTTNGQAPFLSVNMYLGETEEYKDELAMIIEEVLRQRIQGMKNEKGVWITPAFPKLLYVLEEDNINPKSKYYYLTKLAAECTAKRMVPDYISEKVMKELKIDKNGNGQCYPCMGCRSFLTPYVDNDGKPKYYGRFNQGVVTLNLPDIALSSKKDMDEFWKIFDERLELSHKALRIRYKRLSKATSDVAPILWQHGALARLPKGASIKELLHNGYSTISLGYAGLYECVKYMTGKSHTDGAEGEEFGLKVMQHLNDACNKWKEEEKIDYSVYGTPIESTTYKFAKCLKERFGVIKGITDRNYITNSYHIPVFEEVDAFTKLAIESKFQKLSPGGAISYVEAPNLVKNLDAVLEIITFIYNNIMYAEINTKSDYCHKCGYTGEILIDDNLEWYCPECGNRDHTKLNVARRTCGYIGTNFWNKGRTQEIKERVLHIDNKEA

SEQ ID NO: 1147 - protein, 724 aa, unidentified
  REGION 1..724: note = Category: MG60 effectors
  REGION 1..724: note = Description: MG60-362 effector
  source 1..724: note = uncultivated organism sequence
MNVIKRSGEEVVFDASKIENAIKKANKATTHNQMSDELIRSVTQSVIDKCENLKRSPNVEEIQDMVEGELMEHRCFAVAHNYITYRYERALVRKANSTDKQIMSLLERNNEEVKQENSNKNPLVNSVQRDYMAGEVSKDITKRFLLPQDVMEAHEQGIIHFHDSDYFAQHMHNCCLVNLEDMLQNGTVISETMIEKPHSFSTACNVATQIIAQVASSQYGGQSITLSHLAPFVQVSREKARREVKEELESLNLDSSEDTVNKMAEMRVRKEIEKGVQMIQYQVITLMTTNGQAPFVTVFMYLNEVPEGQTRDDLAIIIEEMLKQRIKGVKNEKGIWITPAFPKLIYVLEENNIEEGSKYWYLTELAARCTAKRMVPDYISEKKMLELKVDANGEGHCYPCMGCRSFLTTYLDENGKPKYYGRFNQGVVTLNLVDVACSSKQDEEAFWKIMDERLALCKKALMCRHERLLGTPSDVAPILWQNGALARLKKGEPIDKLLYGGYSTISLGYAGLCECVYYMTGHPHTEEPGTSFGLKVMQYLNDACAKWKAEENIDFSLYGTPMESTTFKFSKHLQERFGIIPHVTDKNYITNSYHVHVTEEIDAFTKLSFESQFQKLSPGGAISYVEVPNMENNIDAVLAIMKHIYNHIMYAELNTKSDYCQVCGYTGEIKIVEDENHKLVWECPNCGNRDQEKMNVARRTCGYIGTQFWNQGRTQEIKERVLHL

SEQ ID NO: 1148 - protein, 724 aa, unidentified
  REGION 1..724: note = Category: MG60 effectors
  REGION 1..724: note = Description: MG60-363 effector
  source 1..724: note = uncultivated organism sequence
MNVIKRSGEEVVFDSIKIENAIKKANKATTHNQMSDELIHTVTQSVVDKCENLKRSPNVEEIQDMVEGELMEKRCFAVAHNYITYRYERALVRKANSTDKQIMSLLERNNEEVKQENSNKNPLVNSVQRDYMAGEVSKDITKRFLLPQDVMEAHEQGIIHFHDSDYFAQHMHNCCLVNLDDMLQNGTVISETMIEKPHSFSTACNVATQIIAQVASSQYGGQSITLSHLAPFVQVSREKARREVKEELESLNLDSSEDTVNKMAEMRVRKEIEKGVQMIQYQVITLMTTNGQAPFVTVFMYLNEVPEGQTRDDLAIIIEEMLKQRIKGVKNEKGIWITPAFPKLIYVLEENNIEEGSKYWYLTELAAKCTAKRMVPDYISEKKMLELKVDANGEGHCYPCMGCRSFLTTYLDENGKPKYYGRFNQGVVTLNLVDVACSSKQDEEAFWKIMDERLALCKKALMCRHERLLGTPSDVAPILWQNGALARLKKGEPIDKLLFGGYSTISLGYAGLCECVYYMTGHPHTEEPGTSFGLKVMQYLNDACAKWKAEENIDFSLYGTPMESTTFKFSKHLQERFGIIPHVTDKNYITNSYHVHVTEEIDAFTKLSFESQFQKLSPGGAISYVEVPNMENNIDAVLAIMKHIYNHIMYAELNTKSDYCQVCGYTGEIKIVEDENHKLVWECPNCGNRDQEKMNVARRTCGYIGTQFWNQGRTQEIKERVLHL

SEQ ID NO: 1149 - protein, 752 aa, unidentified
  REGION 1..752: note = Category: MG60 effectors
  REGION 1..752: note = Description: MG60-364 effector
  source 1..752: note = uncultivated organism sequence
MYIYDEILDGNMHTEEPNMCVMKRSGERVPFDRVKIAEAIERANREEGILSERLTDAQIDQITRGIEKDASNAGRDLSVEEIQDKVEDALMCSGRPKVARLYITYRYKHNEMRKMSNIDQKIAGVVERDNEEVKQENSNKNPTVLSVQRDYMAGEWSRYYTSRYLLPEEIVDAHKSGIIHFHDADYFAQHMHNCDLVNLEDMLQNGTCISGTHIDKPKSFSTACTVASQIVAQVASSQYGGQTITMSHLAPFVDISRKKITSRLAEELHETGIEVPAEKLSELVEKELLKEIESGCQTIQYQLITLQSTNGQAPFVTVFLYLGEVPEGQLRDDLAIVIEVMLKQRILGVKDKSGVYITPAFPKLIYVLQEDNIREGTPYFYLTELAAKCTAKRMVPDYISEKKALELKGDVYPCMGCRSFLTPDRFTDAGVGNIANDKSYVPGRHKYYGRFNQGVVTLNLVDIACSSGRDERKFWDIMNERLDLCHRALRIRHERLKGTPSDVAPILWQDGAIARLASGETIDRLLMNGYSTISLGYAGLAECVFYMKGTSHTSKEGKEFGLRVMQALNDACAKWKKAENIDYSVYGTPLESTTYKFAKCLQRRFGKIPGVTDKNYITNSYHIHVSEHIDAFSKLSKEAEFQQLSPGGAISYVEVPNMQNNIPAVIRVMQHIYDSILYAELNTKSDLCEVCGFDGEIQVKKDVTGKLVWECPNCGNRDQSKMHVARRTCGYIGTQYWNQGRTAEIADRVLHL

SEQ ID NO: 1150 - protein, 760 aa, unidentified
  REGION 1..760: note = Category: MG60 effectors
  REGION 1..760: note = Description: MG60-365 effector
  source 1..760: note = uncultivated organism sequence
MKVIKRDCSEVDFDKSKISTAILKAMKNGSGIVKQKIAEDIANEIEEDCKDKDEVSISDIESMVYDKLITKKQRLTAKAYEGYRSIREFQRENENTIDTEITELLSGESDYWNNENSNKNPRLNTTQRDYLAGIVSKDASRRYILPPEIVQAHDDGLIHVHDLDYLIQYMNNCCLINLEDMLQNGTVISETLIEKPHSFSTACTVATQIIAQVASSQYGGQSISLAHLAPFVDISRQKIRKEVIEEQEYLYRNIDEKEWVKPRKVLGKKLRKDQEKFYKNKDRLLKFIDATDIEDIVEKRLKKEIEKGIQTIQYQITTLMTTNGQAPFITLFMYLNEAHNQREKDDLAMLIEEELRQSYLGVKNEEGVYITPAFPKVIYVLQEDNIHEEDKYWYLTEMAAKCSMKRLTPDYISEKIMKEMKDGNCYPVMGCRSALTVWHDENGKPKFYGRFNSGVVTVSLPDIALSSGGDFNEFWRIFDERTELCHKALKIRHQRLRGTKSDVAPILWQHGAFARLKKGESIDKLLFGGYSTLSLGYAGLAECVKYMTGHYHCDEGIGEKFGLEVMQALNDKCSQWKIDENIDYSLYGTPLEATTEKFAKKLKERFGIIEGVTDRTYITNSYHIPVFIHIDAFGKLRIEAKFQRLSPGGSISYIECPNMENNIPAVLEVMKFIYNNNMYAELNTKSDYCQKCGWSKEIKLIDEGGKLIWECPNCGNRDVRTMDITRRTCGYKGTARNGWNQGRLGDIHDRVPHLDDIEEE

SEQ ID NO: 1151 - protein, 733 aa, unidentified
  REGION 1..733: note = Category: MG60 effectors
  REGION 1..733: note = Description: MG60-366 effector
  source 1..733: note = uncultivated organism sequence
MNILKRNGSEVLFDKSKIVIAISKANEEVEPHERLPISRIEAIANDIEADCAHLGYEVSVEDVQDMVEKQILDSNAFTLAKTYMRYRQDHNIARGKQELYKRLLAIVEGDSEEATQENSNKNPVIASTQRDYMAGEVSRDITNTMLLPKDIVDAHNAGIIHFHDADYYAQHMHNCDLINLEDMLQNGTVISGTLIEKPHSFSTACNIATQIIAQVASNQYGGQSISLSHLAPFVDVSRQKIRDSVMKELELAGAAPTQETIAEIVEMRLKDEIKRGIQTIQYQVVTLMTTNGQAPFITVFMYLDEVSDPQTKADLAMIIEETLRQRYQGVKNETGAWVTPAFPKLIYVLDEDNIHEDSPYWYLTVMAAKCTARRMVPDYISAKKMRELKGDVYTCMGCRSFLTPDRFTDEGAGNIANAGNYDPTKHKYYGRFNQGVVTINLPDVGLSAHKDFDLFWKIFDERLELCHRALKLRHERLLGTPSDISPIHWQYGALARLKKGETIDKLLFNGYSTISLGYAGLYECTVAMTGKSHTDPAGKEFALAVMQHMNDKCNEWKAAENIDYSLYGTPIESTTYKFAKCLKKRFGIIPEVTDHNYITNSYHISVREKVDAFTKLAFESDFQKLSPGGAISYVEVPDMQNNIPAVLEVMKFIYDHIMYAELNTKSDYCQVCGWDGEIPIVEDENGKLIFKCPRCGNEDRSKLNIARRTCGYIGTNDWNQGRVQEIKERVLHL

SEQ ID NO: 1152 - protein, 717 aa, unidentified
  REGION 1..717: note = Category: MG60 effectors
  REGION 1..717: note = Description: MG60-367 effector
  source 1..717: note = uncultivated organism sequence
MKVIKRDGHMVDWCPEKIEDAIMKANKEVEEDEQASSVQIRNIIKYIEKLGKKRILVEDIQDIIEMKLMSQGKYELAKRYITYRYTRELVRRSNTTDQSIKELIDGESEYWNTENSNKNAKIVTTQRDYLAGITSTDITRRFLLPEDIVEAHDAGIIHFHDADYFAQNALHNCDLVNLEDMLQNGTSINGVMIEKPHRFLTAMTIATQIITAVSSSQYGGVTITLTHLAPFVRDSYKRYLDKYKKRKLSKEDCEKFAMEDTKKEIVDGVQTFQYQVNSMTTTNGQAPFLSVCMYLGETDEYKEELAWIIEEFLKQRIVGMKNEQGVYITPAFPKLLYVLEEDNIHKNSKYYYLTKLAAECTSKRMVPDYISEKIMKELKIDKNGNGNCYPCMGCRSFLTPYVDENGKPKYYGRFNQGVVTINLVDVALSSDKDMDVFWQIFEERLELCHRALQIRHKRLSKATSDVAPILWQHGALARLPKGASIHDLLHNGYSTISLGYAGLYECVKYMTGHSHTDNGKGKEFGLKVMEKMNEKCKEWKELENIDYSVYGTPIEATTYKFAKGLKERFGVVKGITDRDYITNSYHVPVFEEIDAFTKLKLESEFQKLSPGGAISYIETPNLSNNIDVVLEVMNFIYDNIMYAELNTKSDYCQECGYTGEILIDDNMEWYCPNCGNRDHSKLNVARRTCGYIGTNFWNKGRTQEIKERVIHIDNKEA

SEQ ID NO: 1153 - protein, 724 aa, unidentified
  REGION 1..724: note = Category: MG60 effectors
  REGION 1..724: note = Description: MG60-368 effector
  source 1..724: note = uncultivated organism sequence
MNVIKRSGEEVVFDASKIENAIKKANKATTHNQMSDELIHSVTQSVIDKCENLKRSPNVEEIQDMVEGELMEHRCFAVAHNYITYRYERALVRKANSTDKQIMSLLERNNEEVKQENSNKNPLVNSVQRDYMAGEVSKDITKRFLLPQDVMEAHEQGIIHFHDSDYFAQHMHNCCLVNLEDMLQNGTVISETMIEKPHSFSTACNVATQIIAQVASSQYGGQSITLSHLAPFVQVSREKARREVKEELESLNLDSSEDTVNKMAEMRVRKEIEKGVQMIQYQVITLMTTNGQAPFVTVFMYLNEVPEGQTRDDLAIIIEEMLKQRIKGVKNEKGIWITPAFPKLIYVLEENNIEEGSKYWYLTELAAKCTAKRMVPDYISEKKMLELKVDANGEGHCYPCMGCRSFLTTYLDENGKPKYYGRFNQGVVTLNLVDVACSSKQDEEAFWRIMDERLALCKKALMCRHERLLGTPSDVAPILWQNGALARLKKGEPIDKLLFGGYSTISLGYAGLCECVYYMTGHPHTEEPGTSFGLKVMQYLNDACAKWKAEENIDFSLYGTPMESTTFKFSKHLQERFGIIPHVTDKNYITNSYHVHVTEEIDAFTKLSFESQFQKLSPGGAISYVEVPNMENNIDAVLAIMKHIYNHIMYAELNTKSDYCQVCGYTGEIKIVEDENHKLVWECPNCGNRDQEKMNVARRTCGYIGTQFWNQGRTQEIKERVLHL

SEQ ID NO: 1154 - protein, 752 aa, unidentified
  REGION 1..752: note = Category: MG60 effectors
  REGION 1..752: note = Description: MG60-369 effector
  source 1..752: note = uncultivated organism sequence
MTYYDETLDGNLDMEEQKIYIMKRSGERVIFDKEKIIQAIRKANLEEGILAERLTEDQIVDIVNGIEKDARNASRDLSVEEIQDKVEDGLMGTGKHKVARLYITYRYKHNEMRKMSNIDQKISGVVERDNEEVKQENSNKNPTVLSVQRDYMAGEWSRYYTSRYLLPDDIVMAHKEGVIHFHDADYFAQHMHNCCLVNLGDMLDNGTCISGTHIDTPRSFSTACTVASQIVAQVASSQYGGQTITMSHLAKYVDISRQKITKRLRNEFEEAGINIPEDKLKDIVELEVRKEVESGCQTVQYQLITLQSTNGQAPFVTVFLYLNEVPEGQTRDDLAMIIEVMFKQRILGVKDREGHYITPAFPKLIYVLQENNITEGSKYFYLTKLAAECTAKRMVPDYISEKKSMELKGDCFPCMGCRSFLTPDRFTDTGVGNLANALNFDVTKHKYYGRFNQGVVTINLVDAACSSGGDEKKFWEIMEERLDLCHKALRIRHERLLGTPSDVAPILWQDGALARLKPGETIDKLLYDGYSTISLGYAGLAECVYYMKGVSHTSEEGEAFGLRVMQLLNDSCATWKQHENIDYSVYGTPLESTTYKFAKCLQRRFGKIPHVTDKNYITNSYHVHVTEKIDAFSKLTKEAEFQKLSPGGAVSYVEVPSMQNNIPAVITVLQHMYNTILYAELNTKLDMCDKCGFNGEIQIVKDDTGKLVWECPNCGNRDQNEMHVSRRTCGYIGTQYWNQGRTAEIADRVLHL

SEQ ID NO: 1155 - protein, 758 aa, unidentified
  REGION 1..758: note = Category: MG60 effectors
  REGION 1..758: note = Description: MG60-370 effector
  source 1..758: note = uncultivated organism sequence
MSGVLFILERGGNMIIIKKNPEAEKKAGAKYVIKRNGSEDLFDENKIVIALFKANDSTIRNKITKKQIGAIADHIKSKVDETPHALNIEDIQDMVENELMRIRAFDVARSYITYRYKRALARQHNTTDDKILSLIEHNNEEVKQENSNKNPIVNSVQRDYMAGEVSKDLCKRVFLPGDIWEAHEDGLIHFHDADYFAQHMHNCCLVNLEDMLQNGTVISGTMIDKPKSFATACNIATQAIAQIASQQYGGQTMSIAHLAPFVEISRQKYMKKQRESMEKAGVKATEAQIASIVEDMVDEEIKRGVQMIQYQLITLMTTNGQAPFVTIYMYLNECRDEKTKADMVKIIREMFRQRIQGVKNEQGVWVTPAFPKLIYVLEEDNIREGSRYWDLTQLAAKCTAKRMVPDYISEKIMKQLKNGDVYSCMGCRSFLTVDRTNGNIANATNYKEGEHKYYGRFNQGVVTLNLVDVACTSAGDEDYFWEILDKRLELCHKALRIRHERLLGTPSDVAPILWQHGALARLKKGETIDKLLYGGYSTISLGYAGLCECTGYMKGVSHTDPDGTEFAMKVMQRLNDACAKWKEAENIDYSVYGTPLESTTYKFAKCLQKRFGIIPGVTDKNYITNSYHVHVTEKINAFDKLKFEAPFQKLSPGGAISYVEVPNLQNNIEAVLSIMQYIYDNIMYAELNTKSDYCEACGYDGEIKIVEDEHGKLVWECPNCGNRDQSRMSVARRTCGYIGTQFWNQGRTQEIKERFVHL

SEQ ID NO: 1156 - protein, 758 aa, unidentified
  REGION 1..758: note = Category: MG60 effectors
  REGION 1..758: note = Description: MG60-371 effector
  source 1..758: note = uncultivated organism sequence
MSGVLFILERGGNMIIIKKNPEAEKKAGAKYVIKRNGSEDLFDENKIVIALFKANDSTIRNKITKKQIGAIADHIKSKVDETPHALNIEDIQDMVENELMRIGAFDVARSYITYRYKRALARQHNTTDDKILSLIEHNNEEVKQENSNKNPIVNSVQRDYMAGEVSKDLCKRVFLPGDIWEAHEDGLIHFHDADYFAQHMHNCCLVNLEDMLQNGTVISGTMIDKPKSFATACNIATQAIAQIASQQYGGQTMSIAHLAPFVEISRQKYMKKQRESMEKAGVKATEAQIASIVEDMVDEEIKRGVQMIQYQLITLMTTNGQAPFVTIYMYLNECRDEKTKADMVKIIREMFRQRIQGVKNEQGVWVTPAFPKLIYVLEEDNIREGSRYWDITQLAAKCTAKRMVPDYISEKIMKQLKNGDVYSCMGCRSFLTVDRTNGNIANATNYKEGEHKYYGRFNQGVVTLNLVDVACTSAGDEDYFWEILDKRLELCHKALRIRHERLLGTPSDVAPILWQHGALARLKKGETIDKLLYGGYSTISLGYAGLCECTRYMKGVSHTDPDGTEFAMKVMQRLNDACAKWKEAENIDYSVYGTPLESTTYKFAKCLQKRFGIIPGVTDKNYITNSYHVHVTEKINAFDKLKFEAPFQKLSPGGAISYVEVPNLQNNIEAVLSIMQYIYDNIMYAELNTKSDYCEACGYDGEIKIVEDEHGKLVWECPNCGNRDQSRMSVARRTCGYIGTQFWNQGRTQEIKERFVHL

SEQ ID NO: 1157 - protein, 732 aa, unidentified
  REGION 1..732: note = Category: MG60 effectors
  REGION 1..732: note = Description: MG60-372 effector
  source 1..732: note = uncultivated organism sequence
MNVIKRSGEEVSFDADKILLAIEKANQATQENRQISEDKITEITNRVIQKCNEIARSISVEEIQDLVENELMAEGAYTVAHNYITYRYERALVRKANTTDKKILSLLGRNNEEAMQENSNKNPTVNSTQRDYMAGEVSKDITRRFLLPKEIWDAHEKGIIHFHDSDYFAQPMYNCCLVNLEDMLQNGTVISGTHIDKPHSFATACNIATQIIAQVASNQYGGQTITLSHLAPFVDISRQKYRKSVKAEMEAAGVEISEDKINTIAEERVKREVTTGVQTIQYQIITLMTTNGQAPFVTVFMYLDEVAEGQTRDDLALIIEEMLKQRMQGVKNEKGVYITPAFPKLIYCLDEDNIYNDSKYYYLTKLAAECTAKRMVPDYISAKIMKELKGDVYPCMGCRSFLTPDRFTENGWENNEHAMNSSSKHKYYGRFNQGVVTINLVDVACSSKKDMNAFWKIFDERLDLCYKALMIRHDRLKGTPSDVAPILWQYGAIARLEKGETIDKLLFNGYSTISLGYGGLAECVRYMTGLSHTTPEGEKFGLAVMKHLNDACAKWKQQTNIDFSVYGTPMESTTYKFAKCLQERFGIIKGVTDKNYITNSYHIHVTEEINAFDKLTEESKFQELSPGGAISYVEVPNMQNNIQAVLQLMKHIYNTIMYAELNTKSDYCQVCGYTGEIQITEDENKKLIWKCPNCGNTDQNKMNVARRTCGYIGTQFWNQGRTQEIKERVLHL

SEQ ID NO: 1158 - protein, 822 aa, unidentified
  REGION 1..822: note = Category: MG60 effectors
  REGION 1..822: note = Description: MG60-373 effector
  source 1..822: note = uncultivated organism sequence
MKQKPVHNPELQLAYDFVQYTGQNIFLTGRAGTGKTTFLRDLKRQSPKRMIVVAPTGVAAINAGGVTIHSFFQLPFGPRVPGYTENEDNHLRFGRHKRNIIRSLDLLVIDEISMVRADLLDSIDERLRQFRRNNQPFGGVQLLLIGDMQQLPPVVKGDEWELLRKFYDTPYFFSSRALLKSNYVTITLQHVYRQRDEKFINILNKIRDKQVDEETLARLNERYQPDFNPGDDNYIILTTHNAKAKAINDKKLAALKGKKVRFTASVTGNFPEYMYPTELELELKPGAQVMFVKNDPDAEKRFFNGKIGNITEIREDGIVVRCPDDDEDIYVEPLEWQNVKYIIEEQNKEIKEKVEGTFTQIPLKLAWAITIHKSQGLTFDRAVIDSEAAFAHGQVYVALSRCRSLEGLVLSTKFSPYSLKQDKSIEGFNIQTNKRQAGPEELTVSKTAYQRQLLEDLIDFSEMQRHVNSFYFLLHDNRKSLQPEVEVPVKEMKEQVLKEITEISEKFKSQIGRLLEKKNDAEKHDELQERIRKGAVYFSDKLNDCILRKIKEFSVESDNAEVLKKVKKAEKRLLEEVWYKRACLDACRDGFIVKDYLKERAMASLEEMPKKRPSKTEKLPVSKDIANAGLYELLKEWRNVRAQELGMPYFMVLPLKTMRALSNQVPSNMDELKRVHGFGRKKIEQFGEELLELLNEYRHDHELKTEPLPEPVKKKEKKPKINTREVSLKLWLQHKDIAKVALERGLTRATVEGHLAHYVGLGELQVEEFVDEEKIRKITKVMTEHNNFTLAEIKAKLGDDVSYGELKMVRQHLLWLGKSKSI

SEQ ID NO: 1159 - protein, 732 aa, unidentified
  REGION 1..732: note = Category: MG60 effectors
  REGION 1..732: note = Description: MG60-374 effector
  source 1..732: note = uncultivated organism sequence
MNVIKRSGEEVSFDADKILLAIEKANQATQENRQISEDKITEITNRVIQKCNEIARSISVEEIQDLVENELMAEGAYTVAHNYITYRYERALVRKANTTDKKILSLLGRNNEEAMQENSNKNPTVNSTQRDYMAGEVSKDITRRFLLPKEIWDAHEKGIIHFHDSDYFAQPMYNCCLVNLEDMLQNGTVISGTHIDKPHSFATACNIATQIIAQVASNQYGGQTITLSHLAPFVDISRQKYRKSVKAEMEAAGVEISEDKINTIAEERVKREVTTGVQTIQYQIITLMTTNGQAPFVTVFMYLDEVAEGQTRDDLALIIEEMLKQRMQGVKNEKGVYITPAFPKLIYCLDEDNIYNDSKYYYLTKLAAECTAKRMVPDYISAKIMKELKGDVYPCMGCRSFLTPDRFTENGWENNEHAMNSSSKHKYYGRFNQGVVTINLVDVACSSKKDMNAFWKIFDERLDLCYKALMIRHDRLKGTPSDVAPILWQYGAIARLEKGETIDKLLFNGYSTISLGYGGLAECVRYMTGLSHTTPEGEKFGLAVMKHLNDACTKWKQQTNIDFSVYGTPMESTTYKFAKCLQERFGIIKGVTDKNYITNSYHIHVTEEINAFDKLTEESKFQELSPGGAISYVEVPNMQNNIQAVLQLMKHIYNTIMYAELNTKSDYCQVCGYTGEIQITEDENKKLIWKCPNCGNTDQNKMNVARRTCGYIGTQFWNQGRTQEIKERVLHL

SEQ ID NO: 1160 - protein, 716 aa, unidentified
  REGION 1..716: note = Category: MG60 effectors
  REGION 1..716: note = Description: MG60-375 effector
  source 1..716: note = uncultivated organism sequence
MLEVIKRNGERVPFNRDKITIAIEKAMNSSSGIYEEGQAAKIAGEIEAYAASIQKDLTIYAIEDQVYYRLLKYNNPATARAYENYKTIQAFKRQTNTTDDDVFGLLNNTNLEVLDENSNKNGHVVSTQRDLIAGEVSKDIARRKLIPADIVQAHDSGAIHFHDMDYIIQPMFNCCLINLEDMLANGTVINGKKIDTPKSFQVACTVTTQIIAQVASGQYGGQSINGIDRILAPYVRKSFKKYMKAVVEEQREVYGIEPDMEKAEEIAWKRTKKEIKDGIQTIQYQINTLMTTNGQAPFVTLFMYFQPDYEYAREAALIDEELLRQRIQGIKNEANVYVTPAFPKLIYVLDEHNVREGSPYFYLTKLAAECTAKRMYPDYISAKKMRESYQGNVFSPMGCRSFLSPWKDEKGNYQFDGRFNMGVVSINLPQIGILADGDEEKFFQILDKRLELCKKALLLRVDLLKRITSDVSPIHWQYGAIARLKPGETIEKFIYGGYATLSLGYIGIYEATVLTKHCSHTAPEGRKFAMRIMDDLNAHIQKWKKETNIGFALYGTPAENLTNLFCKIDKARFGSIPDVTDKGYYTNSYHVDVREPINVFDKFSFEADFEDKSTGGCISYAEIPNMTHNIPAVLTMVQYIYDHITYGEFNTKLDYCHECGFDGEIILNDDNEWECPRCHNKDRNKLTVIRRTCGYLGENFWNEGRTQEIKSRVLHI

SEQ ID NO: 1161 - protein, 706 aa, unidentified
  REGION 1..706: note = Category: MG60 effectors
  REGION 1..706: note = Description: MG60-376 effector
  source 1..706: note = uncultivated organism sequence
METNPQIELAFDFLQYTGTNVFLTGKAGTGKTTFLRELKRRSPKRMIVVAPTGVAAINAGGVTIHSFFQLPFGPYVPGNAEGGAENEKRYTNKFSREKINIIRSLDLLVIDEISMVRADLLDAVSDVLCRYKDRSRPFGGVQLLMIGDLQQLAPVVKDDEWVLLKERYASPFFFCSRALQEVPYVGIELTQVYRQTDAAFLDLLNKVRDNRADQATLQALNRRYIPGFRPDDTEGYITLTTHNYQAQQINREKLEELEEKAYSYEAEIVDEFPEYSFPTDRHLVLKKGAQVMFVKNDASPEKRYYNGKIGRVTAISSDHILVRCGEEREAIMVAKEEWTNTKYTIDAETQEISETVEGVFRQYPLKTAWAITIHKSQGLTFERAIVDAGAAFTHGQVYVALSRCKTLEGLVLSSPLRTGALICDQVVRQFTEGIEQGQPGREQLADAKRAYYLQLLKELFDYNGVLRRMQYMSRILNEHLWRLYPELTERYRTEREFCHNELKDVGERFQMQLERLVNECREPEQDGQVRERVAKGLAYFREHTGRVFALVQDTQPEVDNKEVRKSLNEALGRLQQEVEVKMATLEAAAGGFSVMGHLQAKARAMIEKPKVKARKISDKVDVPEDILHPDLYQILRQWRKEEAASMNLPVYTVLHQKALLGIANILPTNGRELLSIPGIGKKVAERYGKKLLEMVNDYRFATLGDA

SEQ ID NO: 1162 - protein, 1147 aa, unidentified
  REGION 1..1147: note = Category: MG60 effectors
  REGION 1..1147: note = Description: MG60-377 effector
  source 1..1147: note = uncultivated organism sequence
MKTFAYKQQKSVTFGLIGKEGNPFVKEKKNNFKIKYREQEINFNCDARDRIYGDNLWWLQRIFHYMQNILHMIFAKEPYHRFTFSYEFTLVERKKLQTRRIAEKALKDKIWRKYEKQFQKLLNNISLFDEILEEKEDNFSKISHIVRIIRYINWDTQKLEHCISNYTYFWDKIEKKSALEEFKNFIQKNWDFWELLEFYSKLDKEQFEEYKIALNPAILNTHSEVNQQNWTQELDSLKRSLEALERKNNFNKNIKRFFEEDLEAYINYILYQKNFFKQSKNVEYKNKTQRIYEKYSNLSSNARYQEELVIDFIEGNEIDLENPYKVAQEELDKYLQQQESINSLKNLKSNINFVQLKTFLYQLTWKRAEIKENNKKSEEKLDYQKLSEYIVIIKWEINSRLENANYRYGEFIKRDGIKAQTAQKLWQKYGEYMQKLNFDKELKWYTHFWFIVRKWKRFFIRTYKKEDILNKNQGFTLQDAENLLKEKRDVKWEYTAFLFQSLTLKWLLKLIFIKNAFNLDFKEEYKIYQIWKQKKYIKDRFQSTKLIDFLIKILTSNKWKELFPYVDNYFKKGNQYSKFQEFEKDLLKNSYKVKKYQCNFDESELIELDIVDRKFEHNDAVEPRLKRQNDIQILVEWFFSKQNFSFIRLLPEIKIFVRYQKLFNDMKKRVVSWIDSNWDRYEKEINEKERFYKTISKASFMLELNPCRIGGTPQKEKKEYQDYIIDLYEKREDFHIISIDIGENSFATLGVYDRDLMPKKIDVKWLPQQNENQNKDIIDITDLKIEKWEIVQTNTKNSEKYKSYKNMFENILRYQIYLKDILEQVGEIELKKENYNNIAQKIEESINRISELRFNTGNIIDEVKQDFPLLKNGLKQLLFSYIQNLHNGQDKTINITQYYHQIFEKLELQKVINFKDAFWANFVGVMKEILNRYPGIIVFESLHTGNNYDSYNDVIKKRLQNTTSEKSKEFRTFGTYIWMYIVQSLVNSFSKIIDIKNEKVNQLIYWEKNYETTIWKEKYSNNGILFFVDEKNTSSVCPICNWNFIQKIKKNWEVIEQENKNIKKLFGHWRWKEFETSMHHINDENNKNYQRWKWKSGNLEKGDLCDYGIWNKNYPEFEFIKSWDDLATYNIAKKAKEYLESLSKKED

SEQ ID NO: 1163 - protein, 463 aa, unidentified
  REGION 1..463: note = Category: MG60 effectors
  REGION 1..463: note = Description: MG60-378 effector
  source 1..463: note = uncultivated organism sequence
MVNLKNFKNLYEVRKTVRFELKPYKKTRELLKWKNNYQSLDSYIKHIKDWEFEDWFDWNDFCLWKYEDFLKESKKYYWFLFQINAEIQKWRNDTTKKNIHFDLKKSKGIFKNIPSLKKIQWFEWLKSKLLEIQDEYQNYFNFFDQLQHKQHKNEKKSDISIYLRKIAYLNRNLFTIFNFFDTYKTNQEILDKKKEIIDYDFEKLNNSIIASHENEISGACFWKFTFNKFALFRREASLLKEKLETNKQVLQKAVATMVADGEIINDNWTIVDINTNQIHSLTLQKKICYSLKFEEEIWTLQGRLEKFNFNRNLDEVISELDDINGQLLNQYIQNFVNGYKNDENILEVSFYTDHEGNEIFDKSKKYDSYENGQKKEKFYPSLLKLDLEQFVEAQKRNQIKIQPGQTLEWYQYINLLGKDELANEEKEQKKLLNKFLQILFKQEFINPDYNTIKKFRDTLAKYR

SEQ ID NO: 1164 - protein, 1232 aa, unidentified
  REGION 1..1232: note = Category: MG61 effectors
  REGION 1..1232: note = Description: MG61-1 effector
  source 1..1232: note = uncultivated organism sequence
MDYAKFTKQGKLIKGIKLELVPQGNTRDAISEYKIVEADQQLADMVKEVVMAGNEFYKDFIKQIVRHMDGADWQAYGEAVENKTADQKAYDEAVKSISASIKNAILDTAELYGGKKTLFAKDFITIVLRKYVETAENFPYNRERVLTCIDVLSDKNALFKTPYVKWEHIIFGESKGSIAERMLSNFDIFYDNRNKYAALKEATAITDFDDFFTDYASYTRYVGQGGIELYNSAIRGIYSESGAKISEGINEYINKLKMKHPELHVNMLKKLQKQILSNSEPLFKVATIQNAEELKGIMNKVKVAEESVLSSAKELLVHMETSDLHDLYISGQRLYFVCQKVAKDGEILEELIFNDECSRVEKLTEKKKEEIRGAIVKQDYNFAYIDSLLSEYAEKTVKMVINEELQKLIAAIVSSGASYDSITINPKWKAVPDKEVTVIREYLESFVELNKFIKCLQVRDSDVYPDFKTYATLNALADELGALNKAYNMVRNFVTKKVNDKDGKTRLCFGKGALLERGWNRKNQAVDWLGNIDHMLLTKDGKYYYAVPAPVKRKTKIYISDTKPSDEVYEYMEISKQSSFLKTFARLFTSLGLKNIGDADDITMDLGNGSMTVTKEFLVKYKDGECKKDVDFMHKSIDIAKEFLAKHYSYANFNFSELKKTEDYASFYEFANDVDKYTYAVKTKYIDAAIIDKAVEDKELLLFMLSSMDLYKPQESCKDITALYTRYFFSEENKKKADIWLNANPAIYYRKPLIKFEKTHPAGSILVRKTYEDKDGITHIVPDKVYMSLYNHYNKNTPLNEEAMQYVDLVEHHVAVQDYVKDARYTREMFTINLSFTLNGDAGDAAQTYTINNMVKEQIKAKMPRMLTVVRGYRNLLEYCVTDETGKVFESGNFNTIGGVNFKEKLEDLDKIRKIDAQNWKYEKTVVNIKESYLGMVTSSIVKKAVEYDAIINVEQLSDAFKDKRSCMDNQVFKKFEEKLVNKLACYYDKEKAPTEPGGYLNPLQLASPNCLSNTQNGILFYVSPAYTNEVCPKSNFINLLDFSAAKTLKAKREFLRKMSGICYDAEHEAFHFSFCYDDMPIKLPVKEKKELNDKTNQEFGKHIWTVYTNGVRTEYNKKERKLIELNGTEILGKECAKNNVMLTDHMDVDSMPNSVVNEMIHIFQKYSFGEVAQKDVYYVSPVSPQAGPICTPGELRLKSMSEKGYMILHNIVAGKEKFAVNKIEWLEEKLG

SEQ ID NO: 1165 - protein, 1253 aa, unidentified
  REGION 1..1253: note = Category: MG61 effectors
  REGION 1..1253: note = Description: MG61-2 effector
  source 1..1253: note = uncultivated organism sequence
MELNKFCRLNQSIKTCSLELVPIGRTRETIEKHNVIEEDSKRKENAVLAKEVSDSFIREFIADYKGDFDWSELVACFGKHEEYAGIKEKMEEKIAREFSDAFNGYISKFLKANGVGKADNKTKWSDASYIDVVLPLYASLHPDYDNPKYKEAIASICHCSSTIFKRYITAYEKIINGTKKGSFAERVMDNFQIICTNRLMCEIVFSKIKKADDFRLFLDAPESMNEYLSQKGIDQYNETIGDSFSEKGEILRYGLNHYINEWNQKNPDSRMPKLQKLKKQILSVAEPAFRIDVIDNEKELQETIKNIRAAEVRYSGKLKDILENLNYTNTYIHDGVLVKAAGRENLAKMITGEWNFFREQIREREERRIRDEYLQKKNRIKTKLTKKDEKQIEDTVSKGMYSLVDLNKMLGEEKANIESKLLDEYVKNRSEREKHYTVVANADFMSKESLPTSDEIKIIQNYLDKVIQMTHIIRCLDADAQNEKVDLVFLDDAAELEDDKTLIVTGYNLIRNFLTKKREKTAKEKAVQLCFGRPAHFEQKWNNKQAGKFGNVDAALLEENGKFYYIVPAAKNESKLNFPVTDEPQAGRCYNYLSTQKAIGFAKAFAKFTIKSPEAMSGYAKSEEPFEISVGNQKMTVSKKMYDSYEAKTFRDSEEEKIKLIDYAKEFLQKHGSYNTYDWSELRESKDYVNYGEFCSEVDSIAFRVVNRYISKDLVDDAVLRGDLYMFEITSQDMYKDKNRMKNIMALRFHAIMEGMKTGNKSIIINNAPQIRYRPQIIEAEDKHPAGSKLVNKKTTDGKTIPGDIYLELCDFYNGRKSSLSPEASLYNERVSVKVSDREHIKDKHYTAEKFLITLSYTMNKNVASNTSVYKLNEMIRNEIKENGCNIMSVIRGIDNLLYYAVIDENGNKIEAGDLNVVGDTDFNEMLSVVGTQRYIDQKNWKYEKKVAELKDTYLGQACRKIASIAVKNNAVIVIDKINENTKRKNAAFDNNVYRKFEDALVNTLSNYYDRSIKADEPGGISNPLQLCVNEDNNFQNGILFYTYDAFTKNICMDTGFINLLNTFNVKTVAAKLGFLKKMDGIYYDSDRQEFVFEFAWGKLGSVLKEEEAALYTGLDKSWKVRTHLTRYKRDRESGKYKEVDGTEILKKLIKEKHPDMIGEKINVDKLTSNEVQTVYEIFTLYVNGFIPRMDGESSEYMSPVSDWNSMSNIAYDEMTALQLARKGSLTIGRIKNGFEGKDINISRVDWLNEILR

SEQ ID NO: 1166 - protein, 846 aa, unidentified
  REGION 1..846: note = Category: MG61 effectors
  REGION 1..846: note = Description: MG61-3 effector
  source 1..846: note = uncultivated organism sequence
MDFTKFQKLNSIIKTCSFEMIPIGKTRETMEKHNVIEEDAERKSNAELTKEASDSFIREFIADYKEDMDWKDLYDAYGEDRARFTDIMNQKAEKLAKRFSDSFNEYINTFLKANGINDKKSKWSDSGYVDVVLPLYVSIHPDFSNDKYERAVASLLHCSNSLFKKYTTSYARIIAGTKKGSFADRSMENFQTACANSVMFDLISRNLSSVGSHDAFKEVFADAPLNMNEYLSQKGISRYNEFVGDSFDESGQVIRYGVNHYINEWNQTHPDERMPKMHKLKKQILSIVEPSFRIRTINDETELFGTFDNIRTAEQRYAGMLESILENMNTADIYDKSGILVTSAERDSLANAITGEWSYFRRQIKEEEENRIREEYLQKKNRVKTKLTQKDNKQIEDALNKSIYSVADLNKMLGSDFGTIEEKLLDEYIRNKSKKESAYAQLVKTDFYDKKTIPAGDDVQRIQQYLDKVLSLTHIVRGLCADSQDPRTDFVFSDDVSSLEDDRVQIISCYNLIRNFVTKKREKTAKEKQIQLCFGRPAHFEQVWNNKQEGKFGNVDAALLEYAGKYYYMVPAAKNEAKLNFPVTDEPQMGECYNYLATKKAIGFAKAFAKFYIKSPEAMEGFEKTEEPFEISVGNDTMIISRKVYEDYEAKTFRESEEAKNKLIDCAKEFLSKNLSYCIYDWSVLKEANDYVNYGEFCNEVDSIAFRVINRYVSKKLVDDAVERGNLYMFEISSLDMYKDSSRMKNIMALRFNQIMNGMFTGDKSIIINNAPQIRYRPVVIEKKDVHPVGSRLVNKNTTDGRTIPGDVYLELCAYYNGKKDSLSPEASLYNEKVSVKDSDRAHIKD

SEQ ID NO: 1167 - protein, 1259 aa, unidentified
  REGION 1..1259: note = Category: MG61 effectors
  REGION 1..1259: note = Description: MG61-4 effector
  source 1..1259: note = uncultivated organism sequence
MDFTKFQKLNSIIKTCSFEMIPIGKTRETMEKHNVIEEDAERKSNAELTKEVSDSFIREFIADYKEDMDWKDLYDAYGEDRARFTDIMNQKAEKLAKRFSDSFNEYINTFLKANGIKDKKSKWSDSGYVDVVLPLYVSIHPDFSNDKYERAVASLLHCSNSLFKKYTTSYARIIAGTKKGSFADRSMENFQTACANSVMFDLISINLSNVGSHDAFKEVFADAPLNMNEYLSQKGISRYNEFVGDSFDESGQVIRYGVNHYINEWNQTHPDERMPKMHKLKKQILSIVEPSFRIRTINDETELFGTFDNIRTAEQRYAGMLESILENMNTADIYDKSGILVTSAERDSLANAITGEWSYFRRQIKEEEENRIREEYLQKKNRVKTKLTQKDNKQIEDALNKSIYSVADLNKMLGSDFGTIEEKLLDEYIRNKSKKESAYAQLVKTDFYDKKTIPAGDDVQRIQQYLDKVLGLTHIVRGLCADSQDPRTDFVFSDDVSSLEDDRVQIISCYNLIRNFVTKKREKTAKEKQIQLCFGRPAHFEQVWNNKQEGKFGNVDAALLEYAGKYYYMVPAAKNEAKLNFPVTDEPQRGECYNYLATKKAIGFAKAFAKFYIKSPEAMEGFEKTEEPFEISVGNDTMIISRKVYEDYEAKTFRESEEAKNKLIDCAKEFLSKNLSYCIYDWSGLKETKDYVNYGEFCNEVDSIAFRVINRYVSKKLVDDAVERGNLYMFEISSLDMYKDSSRMKNIMALRFNQIMNGMFTGDKSIIINNAPQIRYRPVVIEKKDVHPVGSRLVNKNTTDGRTIPGDVYLELCAYYNGKKDSLSPEASLYNEKVSVKDSDRAHIKDKHYTEEKFLITFSYTANKNVASATSGYQLNEMVRKEIRENGCNIMAVIRGIDNLLYYAVVDENGNRIEAGDLNVVGDTDFYEKLTILGKQRYTDQKNWKHENKVADLKDTYLGQVCRKIASIAVKNNAVIVIDKINERTKRKNAAFDNNMYRKFENALVNSLTDYYDIGIRGDEPGSVKNPLQLTVKEDNGFQNGIIFYQFDTFTKNICMRTGFVNLLNTFEIKTVASKVAFLKKLSGIYYDNDINEFVFEFTWRNIGCILKDEELSLYDGMDKIWKVRTHFTRYMRNAEKNKYVEIDGTEVLKELIRKNHPDMIGGKIDVDRLTSEEVKKVFEIFTLYTNGYIPRMDDAESGYMSPACDWNNFGTIRYDEMTALQLAKKSSLMIGKVKSGKDWKDMNVSRVEWLNHVLKADW

SEQ ID NO: 1168 - protein, 1259 aa, unidentified
  REGION 1..1259: note = Category: MG61 effectors
  REGION 1..1259: note = Description: MG61-5 effector
  source 1..1259: note = uncultivated organism sequence
MDFTKFQKLNSIIKTCSFEMIPIGKTRETMEKHNVIEEDAERKSNAELTKEVSDSFIREFIADYKEDMDWKDLYDAYGEDRARFTDIMNQKAEKLAKRFSDSFNEYINTFLKANGIKDKKSKWSDSGYVDVVLPLYVSIHPDFSNDKYERAVASLLHCSNSLFKKYTTSYARIIAGTKKGSFADRSMENFQTACANSVMFDLISINLSNVGSHDAFKEVFADAPLNMNEYLSQKGISRYNEFVGDSFDESGQVIRYGVNHYINEWNQTHPDERMPKMHKLKKQILSIVEPSFRIRTINDETELFGTFDNIRTAEQRYAGMLESILENMNTADIYDKSGILVTSAERDSLANAITGEWSYFRRQIKEEEENRIREEYLQKKNRVKTKLTQKDNKQIEDALNKSIYSVADLNKMLGSDFGTIEEKLLDEYIRNKSKKESAYAQLVKTDFYDKKTIPAGDDVQRIQQYLDKVLGLTHIVRGLCADSQDPRTDFVFSDDVSSLEDDRVQIISCYNLIRNFVTKKREKTAKEKQIQLCFGRPAHFEQVWNNKQEGKFGNVDTALLEYAGKYYYMVPAAKNEAKLNFPVTDEPQRGECYNYLATKKAIGFAKAFAKFYIKSPEAMEGFEKTEEPFEISVGNDTMIISRKVYEDYEAKTFRESEEAKNKLIDCAKEFLSKNLSYCIYDWSGLKETKDYVNYGEFCNEVDSIAFRVINRYVSKKLVDDAVERGNLYMFEISSLDMYKDSSRMKNIMALRFNQIMNGMFTGDKSIIINNAPQIRYRPVVIEKKDVHPVGSRLVNKNTTDGRTIPGDVYLELCAYYNGKKDSLSPEASLYNEKVSVKDSDRAHIKDKHYTEEKFLITFSYTANKNVASATSGYQLNEMVRKEIRENGCNIMAVIRGIDNLLYYAVVDENGNRIEAGDLNVVGDTDFYEKLTILGKQRYTDQKNWKHENKVADLKDTYLGQVCRKIASIAVKNNAVIVIDKINERTKRKNAAFDNNMYRKFENALVNSLTDYYDIGIRGDEPGSVKNPLQLTVKEDNGFQNGIIFYQFDTFTKNICMRTGFVNLLNTFEIKTVASKVAFLKKLSGIYYDNDINEFVFEFTWRNIGCILKDEELSLYDGMDKIWKVRTHFTRYMRNAEKNKYVEIDGTEVLKELIRKNHPDMIGGKIDVDRLTSEEVKKVFEIFTLYTNGYIPRMDDAESGYMSPACDWNNFGTIRYDEMTALQLAKKSSLMIGKVKSGKDWKDMNVSRVEWLNHVLKADW

SEQ ID NO: 1169 - protein, 1259 aa, unidentified
  REGION 1..1259: note = Category: MG61 effectors
  REGION 1..1259: note = Description: MG61-6 effector
  source 1..1259: note = uncultivated organism sequence
MDFTKFQKLNSIIKTCSFEMIPIGKTRETMEKHNVIEEDAERKSNAELTKEVSDSFIREFIADYKEDMDWKDLYDAYGEDRARFTDIMNQKAEKLAKRFSDSFNEYINTFLKANGIKDKKSKWSDSGYVDVVLPLYVSIHPDFSSDKYERAVASLLHCSNSLFKKYTTSYARIIAGTKKGSFADRSMENFQTVCANSVMFDLISRNLSSVECHDTFKEVFADAPLNMNEYLSQKGISRYNEFVGDSFDESGQVIRYGVNHYINEWNQTHPDERMPKMHKLKKQILSIVEPSFRIRTINDETELFGTFDNIRTAEQRYAGMLESILENMNTADIYDKSGILVTSAERDSLANAITGEWSYFRRQIKEEEENRIREEYLQKKNRVKTKLTQKDNKQIEDALNKSIYSVADLNKMLGSDFGTIEEKLLDEYIRNKSKKESAYAQLVKTDFYDKKTIPAGDDVQRIQQYLDKVLSLTHIVRGLCADSQDPRTDFVFSDDVSSLEDDRVQIVTCYNLIRNFVTKKREKTAKEKQIQLCFGRPAHFEQVWNNKQEGKFGNVDAALLEYAGKYYYMVPAAKNEAKLNFPVTDEPQRGECYNYLATKKAIGFAKAFAKFYIKSPEAMEGFEKTEEPFEISVGNDTMIISRKVYEDYEAKTFRESEEAKNKLIDCAKEFLSKNLSYCIYDWSVLKEANDYVNYGEFCNEVDSIAFRVINRYVSKKLVDDAVERGNLYMFEISSLDMYKDSSRMKNIMALRFNQIMNGMFTGDKSIIINNAPQIRYRPVVIEKKDVHPVGSRLVNKNTTDGRTIPGDVYLELCAYYNGKKDSLSPEASLYNEKVSVKDSDRAHIKDKHYTEEKFLITFSYTANKNVASATSGYQLNEMVRKEIRENGCNIMAVIRGIDNLLYYAVVDENGNRIEAGDLNVVGDTDFYEKLTILGKQRYTDQKNWKHENKVADLKDTYLGQVCRKIASIAVKNNAVIVIDKINESTKRKNAAFDNNMYRKFENALVNSLTDYYDIGIRGDEPGSVKNPLQLTVKEDNGFQNGIIFYQFDTFTKNICMRTGFVNLLNTFEIKTVASKVAFLKKLSGIYYDNDINEFVFEFTWRNIGCILKDEELSLYDGMDKIWKVRTHFTRYMRNAEKNKYVEIDGTEVLKELIRKNHPDMIGGKIDVDRLTSEEVKKVFEIFTLYTNGYIPRMDDAESGYMSPACDWNNFGTIRYDEMTALQLAKKSSLMIGKVKSGKDWKDMNVSRVEWLNHVLKADW

SEQ ID NO: 1170 - protein, 1259 aa, unidentified
  REGION 1..1259: note = Category: MG61 effectors
  REGION 1..1259: note = Description: MG61-7 effector
  source 1..1259: note = uncultivated organism sequence
MDFTKFQKLNSIIKTCSFEMIPIGKTRETMEKHNVIEEDAERKSNAELTKEVSDSFIREFIADYKEDMDWKDLYDAYGEDRARFTDIMNQKAEKLAKRFSDSFNEYINTFLKANGIKDKKSKWSDSGYVDVVLPLYVSIHPDFSSDKYERAVASLLHCSNSLFKKYTTSYARIIAGTKKGSFADRSMENFQTVCANSVMFDLISRNLSSVECHDTFKEVFADAPLNMNEYLSQKGISRYNEFVGDSFDESGQVIRYGVNHYINEWNQTHPDERMPKMHKLKKQILSIVEPSFRIRTINDETELFGTFDNIRTAEQRYAGMLESILENMNTADIYDKSGILVTSAERDSLANAITGEWSYFRRQIKEEEENRIREEYLQKKNRVKTKLTQKDNKQIEDALNKSIYSVADLNKMLGSDFGTIEEKLLDEYIRNKSKKESAYAQLVKTDFYDKKTIPAGDDVQRIQQYLDKVLSLTHIVRGLCADSQDPRTDFVFSDDVSSLEDDRVQIVTCYNLIRNFVTKKREKTAKEKQIQLCFGRPAHFEQVWNNKQEGKFGNVDAALLEYAGKYYYMVPAAKNEAKLNFPVTDEPQRGECYNYLATKKAIGFAKAFAKFYIKSPEAMEGFEKTEEPFEISVGNDTMIISRKVYEDYEAKTFRESEEAKNKLIDCAKEFLSKNLSYCIYDWSVLKEANDYVNYGEFCNEVDSIAFRVINRYVSKKLVDDAVERGNLYMFEISSLDMYKDSSRMKNIMALRFNQIMNGMFTGDKSIIINNAPQIRYRPVVIEKKDVHPVGSRLVNKNTTDGRTIPGDVYLELCAYYNGKKDSLSPEASLYNEKVSVKDSDRAHIKDKHYTEEKFLITFSYTANKNVASATSGYQLNEMVRKEIRENGCNIMAVIRGIDNLLYYAVVDENGNRIEVGDLNVVGDTDFYEKLTILGKQRYTDQKNWKHENKVADLKDTYLGQVCRKIASIAVKNNAVIVIDKINESTKRKNAAFDNNMYRKFENALVNSLTDYYDIGIRGDEPGSVKNPLQLTVKEDNGFQNGIIFYQFDTFTKNICMRTGFVNLLNTFEIKTVASKVAFLKKLSGIYYDNDINEFVFEFTWRNIGCILKDEELSLYDGMDKIWKVRTHFTRYMRNAEKNKYVEIDGTEVLKELIRKNHPDMIGGKIDVDRLTSEEVKKVFEIFTLYTNGYIPRMDDAESGYMSPACDWNNFGTIRYDEMTALQLAKKSSLMIGKVKSGKDWKDMNVSRVEWLNHVLKADW

SEQ ID NO: 1171 - protein, 1259 aa, unidentified
  REGION 1..1259: note = Category: MG61 effectors
  REGION 1..1259: note = Description: MG61-8 effector
  source 1..1259: note = uncultivated organism sequence
MDFTKFQKLNSIIKTCSFEMIPIGKTRETMEKHNVIEEDAERKSNAELTKEVSDSFIREFIADYKEDMDWKDLYDAYGEDRARFTDIMNQKAEKLAKRFSDSFNEYINTFLKANGINDKKSKWSDSGYVDVVLPLYVSIHPDFSNDKYERAVASLLHCSNSLFKKYTTSYARIIAGTKKGSFADRSMENFQTACANSVMFDLISRNLSSVGSHDAFKEVFADAPLNMNEYLSQKGISRYNEFVGDSFDESGQVIRYGVNHYINEWNQTHPDERMPKIHKLKKQILSIVEPSFRIRTINDETELFGTFDNIRTAEQRYAGMLESILENMNTADIYDKSGILVTSAERDSLANAITGEWSYFRRQIKEEEENRIREEYLQKKNRVKTKLTQKDNKQIEDALNKSIYSVADLNKMLGSDFGTIEEKLLDEYIRNKSKKESAYAQLVKTDFYDKKTIPAGDDVQRIQQYLDKVLSLTHIVRGLCADSQDPRTDFVFSDDVSSLEDDRVQIISCYNLIRNFVTKKREKTAKEKQIQLCFGRPAHFEQVWNNKQEGKFGNVDAALLEYAGKYYYMVPAAKNEAKLNFPVTDEPQMGECYNYLATKKAIGFAKAFAKFYIKSPEAMEGFEKTEEPFEISVGNDTMIISRKVYEDYEVKTFRESEEAKNKLIDCAKEFLSKNLSYCIYDWSVLKEANDYVNYGEFCNEVDSIAFRVINRYVSKKLVDDAVERGNLYMFEISSLDMYKDSSRMKNIMALRFNQIINGMFTGDKSIIINNAPQIRYRPVVIEKKDVHPVGSRLVNKNTTDGRTIPGDVYLELCAYYNGKKDSLSPEASLYNEKVSVKDSDRAHIKDKHYTEEKFLITFSYTANKNVASATSGYQLNEMVRKEIRENGCNIMAVIRGIDNLLYYAVVDENGNRIEAGDLNVVGDTDFYEKLTILGKQRYTDQKNWKHENKVADLKDTYLGQVCRKIASIAVKNNAVIVIDKINESTKRKNAAFDNNMYRKFENALVNSLTDYYDIGIRGDEPGSVKNPLQLTVKEDNGFQNGIIFYQFDTFTKNICMRTGFVNLLNTFEIKTVASKVAFLKKLSGIYYDNDINEFVFEFTWRNIGCILKDEELPLYDGMDKIWKVRTHFTRYMRNAEKNKYVEIDGTEVLKELIRKNHPDMIGGKIDVDRLTSEEVKKVFEIFTLYTNGYIPRMDDAESGYMSPACDWNNFGTIRYDEMTALQLAKKSSLMIGKVKSGKDWKDMNVSRVEWLNHVLKADW

SEQ ID NO: 1172 - protein, 1259 aa, unidentified
  REGION 1..1259: note = Category: MG61 effectors
  REGION 1..1259: note = Description: MG61-9 effector
  source 1..1259: note = uncultivated organism sequence
MDFTKFQKLNSIIKTCSFEMIPIGKTRETMEKHNVIEEDAERKSNAELTKEVSDSFIREFIADYKEDMDWKDLYDAYGEDRARFTDIMNQKAEKLAKRFSDSFNEYINTFLKANGINDKKSKWSDSGYVDVVLPLYVSIHPDFSNDKYERAVASLLHCSNSLFKKYTTSYARIIAGTKKGSFADRSMENFQTACANSVMFDLISRNLSSVGSHDAFKEVFADAPLNMNEYLSQKGISRYNEFVGDSFDESGQVIRYGVNHYINEWNQTHPDERMPKMHKLKKQILSIVEPSFRIRTINDETELFGTFDNIRTAEQRYAGMLESILENMNTADIYDKSGILVTSAERDSLANAITGEWSYFRRQIKEEEENRIREEYLQKKNRVKTKLTQKDNKQIEDALNKSIYSVADLNKMLGSDFGTIEEKLLDEYIRNKSKKESAYAQLVKTDFYDKKTIPAGDDVQRIQQYLDKVLSLTHIVRGLCADSQDPRTDFVFSDDVSSLEDDRVQIISCYNLIRNFVTKKREKTAKEKQIQLCFGRPAHFEQVWNNKQEGKFGNVDAALLEYAGKYYYMVPAAKNEAKLNFPVTDEPQMGECYNYLATKKAIGFAKAFAKFYIKSPEAMEGFEKTEEPFEISVGNDTMIISRKVYEDYEAKTFRESEEAKNKLIDCAKEFLSKNLSYCIYDWSGLKETKDYVNYGEFCNEVDSIAFRVINRYVSKKLVDDAVERGNLYMFEISSLDMYKDSSRMKNIMALRFNQIMNGMFTGDKFIIINNAPQIRYRPVVIEKKDVHPVGSRLVNKNTTDGRTIPGDVYLELCAYYNGKKDSLSPEASLYNEKVSVKDSDRAHIKDKHYTEEKFLITFSYTANKNVASATSGYQLNEMVRKEIRENGCNIMAVIRGIDNLLYYAVVDENGNRIEAGDLNVVGDTDFYEKLTILGKQRYTDQKNWKHENKVADLKDTYLGQVCRKIASIAVKNNAVIVIDKINERTKRKNAAFDNNMYRKFENALVNSLTDYYDIGIRGDEPGSVKNPLQLTVKEDNGFQNGIIFYQFDTFTKNICMRTGFVNLLNTFEIKTVASKVAFLKKLSGIYYDNDINEFVFEFTWRNIGCILKDEELSLYNGMDKIWKVRTHFTRYMRNAEKNKYVEIDGTEVLKELIRKNHPDMIGGKIDVDRLTSEEVKKVFEIFTLYTNGYIPRMDDAESGYMSPACDWNNFGTIRYDEMTALQLAKKSSLMIGKVKSGKDWKDMNVSRVEWLNHVLKADW

SEQ ID NO: 1173 - protein, 1259 aa, unidentified
  REGION 1..1259: note = Category: MG61 effectors
  REGION 1..1259: note = Description: MG61-10 effector
  source 1..1259: note = uncultivated organism sequence
MDFTKFQKLNSIIKTCSFEMIPIGKTRETMEKHNVIEEDAERKSNAELTKEVSDSFIREFIADYKEDMDWKDLYDAYGEDRARFTDIMNQKAEKLAKRFSDSFNEYINTFLKANGINDKKSKWSDSGYVDVVLPLYVSIHPDFSNDKYERAVASLLHCSNSLFKKYTTSYARIIAGTKKGSFADRSMENFQTACANSVMFDLISRNLSSVGSHDAFKEVFADAPLNMNEYLSQKGISRYNEFVGDSFDESGQVIRYGVNHYINEWNQTHPDERMPKMHKLKKQILSIVEPSFRIRTINDETELFGTFDNIRTAEQRYAGMLESILENMNTADIYDKSGILVTSAERDSLANAITGEWSYFRRQIKEEEENRIREEYLQKKNRVKTKLTQKDNKQIEDALNKSIYSVADLNKMLGSDFGTIEEKLLDEYIRNKSKKESAYAQLVKTDFYDKKTIPAGDDVQRIQQYLDKVLSLTHIVRGLCADSQDPRTDFVFSDDVSSLEDDRVQIISCYNLIRNFVTKKREKTAKEKQIQLCFGRPAHFEQVWNNKQEGKFGNVDAALLEYAGKYYYMVPAAKNEAKLNFPVTDEPQMGECYNYLATKKAIGFAKAFAKFYIKSPEAMEGFEKTEEPFEISVGNDTMIISRKVYEDYEAKTFRESEEAKNKLIDCAKEFLSKNLSYCIYDWSVLKEANDYVNYGEFCNEVDSIAFRVINRYVSKKLVDDAVERGNLYMFEISSLDMYKDSSRMKNIMALRFNQIMNGMFTGDKSIIINNAPQIRYRPVVIEKKDVHPVGSRLVNKNTTDGRTIPGDVYLELCAYYNGKKDSLSPEASLYNEKVSVKDSDRAHIKDKHYTEEKFLITFSYTANKNVASATSGYQLNEMVRKEIRENGCNIMAVIRGIDNLLYYAVVDENGNRIEAGDLNVVGDTDFYEKLTILGKQRYTDQKNWKHENKVADLKDTYLGQVCRKIASIAVKNNAVIVIDKINESTKRKNAAFDNNMYRKFENALVNSLTDYYDIGIRGDEPGSVKNPLQLTVKEDNGFQNGIIFYQFDTFTKNICMRTGFVNLLNTFEIKTVASKVAFLKKLSGIYYDNDINEFVFEFTWRNIGCILKDEELPLYDGMDKIWKVRTHFTRYMRNAEKNKYVEIDGTEVLKELIRKNHPDMIGGKIDVDRLTSEEVKKVFEIFTLYTNGYIPRMDDAESGYMSPACDWNNFGTIRYDEMTALQLAKKSSLMIGKVKSGKDWKDMNVSRVEWLNHVLKADW

SEQ ID NO: 1174 - protein, 1259 aa, unidentified
  REGION 1..1259: note = Category: MG61 effectors
  REGION 1..1259: note = Description: MG61-11 effector
  source 1..1259: note = uncultivated organism sequence
MDFTKFQKLNSIIKTCSFEMIPIGKTRETMEKHNVIEEDAERKSNAELTKEVSDSFIREFIADYKEDMDWKDLYDAYGEDRARFTDIMNQKAEKLAKRFSDSFNEYINTFLKANGINDKKSKWSDSGYVDVVLPLYVSIHPDFSNDKYERAVASLLHCSNSLFKKYTTSYARIIAGTKKGSFADRSMENFQTACANSVMFDLISRNLSSVGSHDAFKEVFADAPLNMNEYLSQKGISRYNEFVGDSFDESGQVIRYGVNHYINEWNQTHPDERMPKMHKLKKQILSIVEPSFRIRTINDETELFGTFDNIRTAEQRYAGMLESILENMNTADIYDKSGILVTSAERDSLANAITGEWSYFRRQIKEEEENRIREEYLQKKNRVKTKLTQKDNKQIEDALNKSIYSVADLNKMLGSDFGTIEEKLLDEYIRNKSKKESAYAQLVKTDFYDKKTIPAGDDVQRIQQYLDKVLSLTHIVRGLCADSQDPRTDFVFSDDVSSLEDDRVQIISCYNLIRNFVTKKREKTAKEKQIQLCFGRPAHFEQVWNNKQEGKFGNVDAALLEYAGKYYYMVPAAKNEAKLNFPVTDEPQMGECYNYLATKKAIGFAKAFAKFYIKSPEAMEGFEKTEEPFEISVGNDTMIISRKVYEDYEAKTFRESEEAKNKLIDCAKEFLSKNLSYCIYDWSVLKEANDYVNYGEFCNEVDSIAFRVINRYVSKKLVDDAVERGNLYMFEISSLDMYKDSSRMKNIMALRFNQIMNGMFTGDKSIIINNAPQIRYRPVVIEKKDVHPVGSRLVNKNTTDGRTIPGDVYLELCAYYNGKKDSLSPEASLYNEKVSVKDSDRAHIKDKHYTEEKFLITFSYTANKNVASATSGYQLNEMVRKEIRENGCNIMAVIRGIDNLLYYAVVDENGNRIEAGDLNVVGDTDFYEKLTILGKQRYTDQKNWKHENKVADLKDTYLGQVCRKIASIAVKNNAVIVIDKINESTKRKNAAFDNNMYRKFENALVNSLTDYYDIGIRGDEPGSVKNPLQLTVKEDNGFQNGIIFYQFDTFTKNICMRTGFVNLLNTFEIKTVASKVAFLKKLSDIYYDNDINEFVFEFTWRNIGCILKDEELPLYDGMDKIWKVRTHFTRYMRNAEKNKYVEIDGTEVLKELIRKNHPDMIGGKIDVDRLTSEEVKKVFEIFTLYTNGYIPRMDDAESGYMSPACDWNNFGTIRYDEMTALQLAKKSSLMIGKVKSGKDWKDMNVSRVEWLNHVLKADW

SEQ ID NO: 1175 - protein, 1259 aa, unidentified; identical to SEQ ID NO: 1172
  REGION 1..1259: note = Category: MG61 effectors
  REGION 1..1259: note = Description: MG61-12 effector
  source 1..1259: note = uncultivated organism sequence

SEQ ID NO: 1176 - protein, 1259 aa, unidentified
  REGION 1..1259: note = Category: MG61 effectors
  REGION 1..1259: note = Description: MG61-13 effector
  source 1..1259: note = uncultivated organism sequence
MDFTKFQKLNSIIKTCSFEMIPIGKTRETMEKHNVIEEDAERKSNAELTKEVSDSFIREFIADYKEDMDWKDLYDAYGEDRARFTDIMNQKAEKLAKRFSDSFNEYINTFLKANGINDKKSKWSDSGYVDVVLPLYVSIHPDFSNDKYERAVASLLHCSNSLFKKYTTSYARIIAGTKKGSFADRSMENFQTACANSVMFDLISRNLSSVGSHDAFKEVFADAPLNMNEYLSQKGISRYNEFVGDSFDESGQVIRYGVNHYINEWNQTHPDERMPKMHKLKKQILSIVEPSFRIRTINDETELFGTFDNIRTAEQRYAGMLESILENMNTADIYDKSGILVTSAERDSLANAITGEWSYFRRQIKEEEENRIREEYLQKKNRVKTKLTQKDNKQIEDALNKSIYSVADLNKMLGSDFGTIEEKLLDEYIRNKSKKESAYAQLVKTDFYDKKTIPAGDDVQRIQQYLDKVLSLTHIVRGLCADSQNPRTDFVFSDDVSSLEDDRVQIISCYNLIRNFVTKKREKTAKEKQIQLCFGRPAHFEQVWNNKQEGKFGNVDAALLEYAGKYYYMVPAAKNEAKLNFPVTDEPQMGECYNYLATKKAIGFAKAFAKFYIKSPEAMEGFEKTEEPFEISVGNDTMIISRKVYEDYEAKTFRESEEAKNKLIDCAKEFLSKNLSYCIYDWSVLKEANDYVNYGEFCNEVDSIAFRVINRYVSKKLVDDAVERGNLYMFEISSLDMYKDSSRMKNIMALRFNQIMNGMFTGDKSIIINNAPQIRYRPVVIEKKDVHPVGSRLVNKNTTDGRTIPGDVYLELCAYYNGKKDSLSPETSLYNEKVSVKDSDRAHIKDKHYTEEKFLITFSYTANKNVASATSGYQLNEMVRKEIRENGCNIMAVIRGIDNLLYYAVVDENGNRIEAGDLNVVGDTDFYEKLTILGKQRYTDQKNWKHENKVADLKDTYLGQVCRKIASIAVKNNAVIVIDKINESTKRKNAAFDNNMYRKFENALVNSLTDYYDIGIRGDEPGSVKNPLQLTVKEDNGFQNGIIFYQFDTFTKNICMRTGFVNLLNTFEIKTVASKVAFLKKLSGIYYDNDINEFVFEFTWRNIGCILKDEELPLYDGMDKIWKVRTHFTRYMRNAEKNKYVEIDGTEVLKELIRKNHPDMIGGKIDVDRLTSEEVKKVFEIFTLYTNGYIPRMDDAESGYMSPACDWNNFGTIRYDEMTALQLAKKSSLMIGKVKSGKDWKDMNVSRVEWLNHVLKADW

SEQ ID NO: 1177 - protein, 1259 aa, unidentified
  REGION 1..1259: note = Category: MG61 effectors
  REGION 1..1259: note = Description: MG61-14 effector
  source 1..1259: note = uncultivated organism sequence
MDFTKFQKLNSSIKTCSFEMIPIGKTRETMEKHNVIEEDAERKSNAELTKEVSDSFIREFIADYKEDMDWKDLYDAYGEDRARFTDIMNQKAEKLAKRFSDSFNEYINTFLKANGINDKKSKWSDSGYVDVVLPLYVSIHPDFSNDKYERAVASLLHCSNSLFKKYTTSYARIIAGTKKGSFADRSMENFQTACANSVMFDLISRNLSSVGSHDAFKEVFADAPLNMNEYLSQKGISRYNEFVGDSFDESGQVIRYGVNHYINEWNQTHPDERMPKMHKLKKQILSIVEPSFRIRTINDETELFGTFDNIRTAEQRYAGMLESILENMNTADIYDKSGILVTSAERDSLANAITGEWSYFRRQIKEEEENRIREEYLQKKNRVKTKLTQKDNKQIEDALNKSIYSVADLNKMLGSDFGTIEEKLLDEYIRNKSKKESAYAQLVKTDFYDKKTIPAGDDVQRIQQYLDKVLSLTHIVRGLCADSQDPRTDFVFSDDVSSLEDDRVQIISCYNLIRNFVTKKREKTAKEKQIQLCFGRPAHFEQVWNNKQEGKFGNVDAALLEYAGKYYYMVPAAKNEAKLNFPVTDEPQMGECYNYLATKKAIGFAKAFAKFYIKSPEAMEGFEKTEEPFEISVGNDTMIISRKVYEDYEAKTFRESEEAKNKLIDCAKEFLSKNLSYCIYDWSVLKEANDYVNYGEFCNEVDSIAFRVINRYVSKKLVDDAVERGNLYMFEISSLDMYKDSSRMKNIMALRFNQIMNGMFTGDKSIIINNAPQIRYRPVVIEKKDVHPVGSRLVNKNTTDGRTIPGDVYLELCAYYNGKKDSLSPEASLYNEKVSVKDSDRAHIKDKHYTEEKFLITFSYTANKNVASATSGYQLNEMVRKEIRENGCNIMAVIRGIDNLLYYAVVDENGNRIEAGDLNVVGDTDFYEKLTILGKQRYTDQKNWKHENKVADLKDTYLGQVCRKIASIAVKNNAVIVIDKINESTKRKNAAFDNNMYRKFENALVNSLTDYYDIGIRGDEPGSVKNPLQLTVKEDNGFQNGIIFYQFDTFTKNICMRTGFVNLLNTFEIKTVASKVAFLKKLSDIYYDNDINEFVFEFTWRNIGCILKDEELPLYDGMDKIWKVRTHFTRYMRNAEKNKYVEIDGTEVLKELIRKNHPDMIGGKIDVDRLTSEEVKKVFEIFTLYTNGYIPRMDDAESGYMSPACDWNNFGTIWYDEMTALQLAKKSSLMIGKVKSGKDWKDMNVSRVEWLNHVLKADW

SEQ ID NO: 1178 - protein, 848 aa, unidentified
  REGION 1..848: note = Category: MG61 effectors
  REGION 1..848: note = Description: MG61-15 effector
  source 1..848: note = uncultivated organism sequence
MLGSDFGTIEEKLLDEYIRNKSKKESAYAQLVKTDFYDKKTIPAGDDVQRIQQYLDKVLSLTHIVRGLCADSQDPRTDFVFSDDVSSLEDDRVQIISCYNLIRNFVTKKREKTAKEKQIQLCFGRPAHFEQVWNNKQEGKFGNVDAALLEYAGKYYYMVPAAKNEAKLNFPVTDEPQMGECYNYLATKKAIGFAKAFAKFYIKSPEAMEGFEKTEEPFEISVGNDTMIISRKVYEDYEAKTFRESEEAKNKLIDCAKEFLSKNLSYCIYDWSVLKEANDYVNYGEFCNEVDSIAFRVINRYVSKKLVDDAVERGNLYMFEISSLDMYKDSSRMKNIMALRFNQIMNGMFTGDKSIIINNAPQIRYRPVVIEKKDVHPVGSRLVNKNTTDGRTIPGDVYLELCAYYNGKKDSLSPEASLYNEKVSVKDSDRAHIKDKHYTEEKFLITFSYTANKNVASATSGYQLNEMVRKEIRENGCNIMAVIRGIDNLLYYAVVDENGNRIEAGDLNVVGDTDFYEKLTILGKQRYTDQKNWKHENKVADLKDTYLGQVCRKIASIAVKNNAVIVIDKINESTKRKNAAFDNNMYRKFENALVNSLTDYYDIGIRGDEPGSVKNPLQLTVKEDNGFQNGIIFYQFDTFTKNICMRTGFVNLLNTFEIKTVASKVAFLKKLSDIYYDNDINEFVFEFTWRNIGCILKDEELPLYDGMDKIWKVRTHFTRYMRNAEKNKYVEIDGTEVLKELIRKNHPDMIGGKIDVDRLTSEEVKKVFEIFTLYTNGYIPRMDDAESGYMSPACDWNNFGTIRYDEMTALQLAKKSSLMIGKVKSGKDWKDMNVSRVEWLNHVLKADW

SEQ ID NO: 1179 - protein, 1259 aa, unidentified; identical to SEQ ID NO: 1167
  REGION 1..1259: note = Category: MG61 effectors
  REGION 1..1259: note = Description: MG61-16 effector
  source 1..1259: note = uncultivated organism sequence

SEQ ID NO: 1180 - protein, 1259 aa, unidentified; identical to SEQ ID NO: 1172
  REGION 1..1259: note = Category: MG61 effectors
  REGION 1..1259: note = Description: MG61-17 effector
  source 1..1259: note = uncultivated organism sequence

SEQ ID NO: 1181 - protein, 519 aa, unidentified
  REGION 1..519: note = Category: MG61 effectors
  REGION 1..519: note = Description: MG61-16 effector
  source 1..519: note = uncultivated organism sequence
MYRTACFKLRVHPHDRRRLATALARWSAGMGEALDRARADQRALLRTLRPRGAGRSAPPGDGMGSDRPARFEVDSRALHARVLGYCRGLPRDLHSALAMALIVAVEGLLGSWLALYAEWLTSGKPAGRKPGFPTVAAGTARGARERWEAALDASRTVLTRAEEDRWRAAVTREARERRMPLYFGAAQSGVRPGHLAHCGLIRRADRKWFAALTLWPKGDPLGETPRRAGNRANRGPLANVRSREEYLPGRATSTMLVPIEMGTGPGRRRKRWERLFPGRGTPKSALLVERDGEYYLHVEFEYPRREPRPTSGAVLALLRGVHTLVAGVLLDARGRRLATTAIDGRDLMRTISALTRLRAIRQRKGRSLAGDRRAARVAEHVLYSAGHQIIDLACRHGAEIVLLEDPGRRRPTPLLRYKHFSRLAEILVQLTEEAGLPPARVRRIYGPSLTCTACGWAPGEPVRVEEAPAPACPGCGRDRELPFHAAELLALDTLRLRTGRKETRPTLPNYVKSVRRNVP

SEQ ID NO: 1182 - protein, 1259 aa, unidentified; identical to SEQ ID NO: 1167
  REGION 1..1259: note = Category: MG61 effectors
  REGION 1..1259: note = Description: MG61-17 effector
  source 1..1259: note = uncultivated organism sequence

SEQ ID NO: 1183 - protein, 369 aa, unidentified
  REGION 1..369: note = Category: MG61 effectors
  REGION 1..369: note = Description: MG61-18 effector
  source 1..369: note = uncultivated organism sequence
MAVIRGIDNLLYYAVVDENGNRIEAGDLNVVGDTDFYEKLTILGKQRYTDQKNWKHENKVADLKDTYLGQVCRKIASIAVKNNAVIVIDKINESTKRKNAAFDNNMYRKFENALVNSLTDYYDIGIRGDEPGSVKKPLQLTVKEDNGFQNGIIFYQFDTFTKNICMRTGFVNLLNTFEIKTVASKVAFLKKLSGIYYDNDINEFVFEFTWRNIGCILKDEELSLYDGMDKIWKVRTHFTRYMRNAEKNKYVEIDGTEVLKELIRKNHPDMIGGKIDVDRLTSEEVKKVFEIFTLYTNGYIPRMDDAESGYMSPACDWNNFGTIRYDEMTALQLAKKSSLMIGKVKSGKDWKDMNVSRVEWLNHVLKADW

SEQ ID NO: 1184 - protein, 350 aa, unidentified
  REGION 1..350: note = Category: MG61 effectors
  REGION 1..350: note = Description: MG61-19 effector
  source 1..350: note = uncultivated organism sequence
MSDSIVRCTTLSVASPVEGSWEALWRDLHACWAQTTAASNWLMTELAKADHQRLPGDAKLPPMPATYFYPKLTQLFPDLDTRTCASLERAVKRKYKAVLYQVLWQHAASLPTYRYPTPYPVHNQAWRPSWDQGNRPLVSLPLGRGAEKRWQLRLKGGPNFARQVALFRQFVEGAALKSEAKIYRRGNALLVGLVGRFPPPLLSERTRLMRVLTSSTCLWVVEIEGQEPRYWNHDDLRRLCISHRAYLQRIAEDSKYELRLPPGKLRHIREKRQERCQKHQRRIHTSLHQLTAQLVGLAERQKVARVIYTDHDKSWLPLFPWSELRRLLAYKLQGLGITFGGGDEDPNAHN

SEQ ID NO: 1185 - protein, 410 aa, unidentified
  REGION 1..410: note = Category: MG61 effectors
  REGION 1..410: note = Description: MG61-20 effector
  source 1..410: note = uncultivated organism sequence
MDFTKFQKLNSIIKTCSFEMIPIGKTRETMEKHNVIEEDAERKSNAELTKEVSDSFIREFIADYKEDMDWKDLYDAYGEDRARFTDIMNQKAEKLAKRFSDSFNEYINTFLKANGINDKKSKWSDSGYVDVVLPLYVSIHPDFSNDKYERAVASLLHCSNSLFKKYTTSYARIIAGTKKGSFADRSMENFQTACANSVMFDLISRNLSSVGSHDAFKEVFADAPLNMNEYLSQKGISRYNEFVGDSFDESGQVIRYGVNHYINEWNQTHPDERMPKMHKLKKQILSIVEPSFRIRTINDETELFGTFDNIRTAEQRYAGMLESILENMNTADIYDKSGILVTSAERDSLANAITGEWSYFRRQIKEEENRIREEYLQKKNRVKTKLTQKDNKQIEDALNKSIYETVSSFV

SEQ ID NO: 1186 - protein, 379 aa, unidentified
  REGION 1..379: note = Category: MG61 effectors
  REGION 1..379: note = Description: MG61-21 effector
  source 1..379: note = uncultivated organism sequence
MPEYLAISIPFSVHGESARLIWFTAWLSKLCAHRLLNDVKSNEVLINFSQTGFLGYARRRCYDLLPNRRYIDGITTLVHSTLKSTKRLRVDVKSLELKHWLLFQSEAEKEKKGNLNIRLLTLERAEVLVLNSNSESKRIIVELRTPKSYVKLLKTIMEKAWRNEIGYPARIVIKESNFYPGDVHLYCNLQVMVPYSVYVEVMKKHSKPLSNLVGGVDINVDRLNLTIVDRYGRLRDVKTFWFREVTARGYEKKPAWTKIHQAIHDMLSYAYHHGVSLLALESPEIIGYLRYYWVRNGDRGSRNYNYKVSIFRNRVIEAVSYKASLYAVDVAYVDPKGTTSSKEHDEVMKRYGLDRHSASAYLIALRGIEKHILTQKDTI

SEQ ID NO: 1187 - protein, 363 aa, unidentified
  REGION 1..363: note = Category: MG61 effectors
  REGION 1..363: note = Description: MG61-22 effector
  source 1..363: note = uncultivated organism sequence
MSYITIALPFNVGGEVAGRILSTAWLFKAATHRVLHLAKSSPALPGSDIGWKATFRKDAYAVIPNRRYADGAVVLVRGIYESCRELGVDFRGVELGDWLMFQQAEKEYPARNITLRPGGEVYVTTISYSGAVERVVLKPTVPKSYATLLEKILEERQEHAARVVIKGYGVRKGVVWISGEGQLTIPLTFYYRHMARYRANKGSLYGGVDVNVDRVNLAIIDNSGELRDTYTFWFREVVARGYPRRSARSVIGMRVHEMLEYAYHHGVKVLFLENPAVLGRLRLLWARSTERRSENYNWKVSAFRSSIIEMIALKAPLYGIEVAYVDPKGTSNSREHSEAMKKLRLDRHATSAYLIALRGVAKK

SEQ ID NO: 1188 - protein, 1262 aa, unidentified
  REGION 1..1262: note = Category: MG61 effectors
  REGION 1..1262: note = Description: MG61-23 effector
  source 1..1262: note = uncultivated organism sequence
MKYHKYTKLNSTIKSATFELVPVGKTRDFLELHDVIKEDSERKAKVVLVKEVSDTFIVEFLRNYNNAGICDWENLHKIYNSATCTEIRGCIEKEKEKIAKDLNSALNAYIESFLKYNDINCSDVGWNKKSYVEVALPLYAKSVPDFNTDEYEDALASMKESSSAMFKKCRATYERIINGTNHGSIADRVIENFETFLANKLLYEKILETATGFENDETFTNVSQFGKYLSQNGIDKYNSTIGDFYNSSGELIKRGVNSRITEWNQSNPDNKLPKLQKLKKQILVDREKMFTIETIENKSDFNKTLNTVLILDEKITIETTKLLTSILAKDMYNTEGVYVTRAGGSYIANGLTGSWDYFEAIKTDAITKTVKDKLLTDYFNAKGKVKTNLTKADEKEIEKATKDFSYTIAELDRMLAGTDYITVEEMLIKKLEELKSRKKESYHLMTTCAFWNNDNKPTQDENGVIQKYLDDVLAVVRFTKIFSIDVKLTNADTIFMEDVAGMDKDKHGINKTYNMIRNYLTKKTELDAKQRRVQLCFGRPTHFEQKWNLMHGDKGIFGNCDAGLLEKDGCYYYIVPASKNGEKLNIHVSDCEDEADSYNMLSTKKGMGFLKMLIKCTLKSKSAIAKYKETDEPFELPIGDETITISKKMAEDYANKKHSKSKEELIKVIDFAKEFIAKHPSFKRYDLSSLKESSAYDNLKQFSDEVDSLCFAVTRLYVSKEQIDDAVEKGNLYMFMITSQDMYKSADKKHNIYSIRFNAIMKSMFEAGNHIIVNNSPSIYYRPALIEAEDKHPAGSILVNKLTTEGKTIPGEIYLELCAFYNGKCDKLSPLASVYNEKVSVKESTFPHIKDKHYTEEKFSITLSYKMNTNVVGNTSVFTLNNLVQEDIRENGCNIMSVIRGMDNLLYYCIVDSGNKRIASGNLNTIGNADYYEKLCVLGTQRYIDAKNWKYEKKVAELKETYLRQICRKIIKIAIENNAVICIDKVSDLRKNKLSAFDNQVYKKFENTLITALANYYDTSIPNTEAGGSLNPLQLAVEGADTMQNGILFHVAETNTRNICMKTGFINLMSTFGISTVKAKMEYLKKVSRIYYDSKADDFVFEFTWRNLGCCLKKDELPLYNGLDKVWQLHTHLTRLKWNKEKSQYEEIDGTELIKAIRRSHSDMIGKDIEVDMLSSKEIQTLYDVFILYANGFMPKEFMEDTSSYDSPIVPWSSVGRIEYDEMTAYQLCRKASLTMEKIKKGLSSKELVVYRTEWLNYLLEN

SEQ ID NO: 1189 - protein, 1262 aa, unidentified
  REGION 1..1262: note = Category: MG61 effectors
  REGION 1..1262: note = Description: MG61-24 effector
  source 1..1262: note = uncultivated organism sequence
MKYRKYTKLNSTIKSATFELVPVGKTRDFLELHDVIKEDSERKAKVALVKEVSDAFIVEFLRNYNNAGICDWENLHKIYNSATRTEIRGCIEKEKEKIAKDLNSALNAYIESFLKYNDINCSDVGWNKKAYVEVALPLYAKSVPDFNTDEYEDALASMKASSSAMFKKCRATYERIINGTNRGSVADRVIENFETFLANKLLYEKILETATGFENDETFTNVSQFGKYLSQNGVDKYNSTIGDFYNSSGELIKRGINSRITEWNQSNPDNKLPKLQKLKKQILVDREKMFTIETIENKADFNKTLNTILILDEKITIETTKLLTSILAKDMYNTEGVYVTRAGGSYIANGLTGSWDYFEAIKTDAITKTVKDKLLTDYFNAKGKVKTNLTKADEKEIEKATKDFSYTIAELDRMLAGTDYTTVEEMLIKKLEKLKSRKNESYRLMTTCSFWNNDNKPTQDENGVIQKYLNDVLAVVRLTKIFSIDVKLANADTIFMEDVAGMDEDKHGVNKAYNMIRNYLTKKTELDAKQRRVQLCFGRPTHFEQKWNLMQEDKGIFGNCDAGLLEKDGCYYYIVPASKNGGKLNIHVSDFEDEVDSYNMLSTKKGMGFLKMLIKCTLKSKSAIAKYKETDEPFELPIGVETITISKKMAEDYANKKYSKSKEELIKVIDFAKEFIAKHPSFKRYDLSSLKESSAYDNLKQFSDEVDSLCFAITRLYVPKEQIDDAVEKGNLYMFMITSQDMYKSADKKRNVYSIRFNAIMKSMFEAGNHIIVNNSPSIYYRPALIEAEDKHPVGSILVNKLTTEGKTIPGEIYLELCAFYNGKCDKLSPLASVYNEKVSVKESTFPHIKDKHYTEEKFSITLSYKMNTNVVGNTSVFTLNNLVQEDIRENGCNIMSVIRGMDNLLYYCIVDSDNNRIASGNLNTIGNADYYEKLYVLSTQRYIDAKNWKYEKKVAELKETYLRQVCRKIIKIAIENNAVICIDKVSDLRKNKLSAFDNQVYKKFENTLINALANYYDTSLPNTEAGGSLNPLQLAVEGADTMQNGILFHVAETNTRNICMKTGFINLMSTFGISTVKAKMEYLKKVSRIYYDSKADDFVFEFTWRNLGCCLKKDELPLYNGVDKVWQLHTHLTRLKWNKEKSQYEEIDGTKLIKTIRRSHPDMIGKDIEVDMLSSKEIQTLYDIFILYANGFMPKEFAEDTSSYDSPIVPWSSVGRIEYDAMTAYQLCRKASLTMEKIKKGLSSKELVVYRTEWLNYLLEN

SEQ ID NO: 1190 - protein, 358 aa, unidentified
  REGION 1..358: note = Category: MG61 effectors
  REGION 1..358: note = Description: MG61-25 effector
  source 1..358: note = uncultivated organism sequence
MSQCQINSSVVDASALVEYATITGKLIPVSSEDYMKLARLAWSFRRAVQVAVRMIARGVEDSAVLKELRKTLNKAYADSAFKLAKAIVKGCIATGGNPRKAEIRKLFIVSDGESSRLGNRNIRLEDTGLVKVKYPYEGSWLVFRAQFEEEHTPLLRELVELAKQKRASYRAKIVFRDGKAYLHVSVPIELYLKHFKKGEAKGSLIAGFDLNSDRINLAIIDEYGRLVDTRTEWFPEVTSPGFPRGKAKALRLRALAKLLRYCYVHGVGAVVFENLFTVKRRRFTRSRSANRKMSKFAKRKLLQHAIVMSLKYGFKVLLVDPKGTTSSPEHAEIMKTHGLDRHTASAYLIAVRALGQNK

SEQ ID NO: 1191 - protein, 375 aa, unidentified
  REGION 1..375: note = Category: MG61 effectors
  REGION 1..375: note = Description: MG61-26 effector
  source 1..375: note = uncultivated organism sequence
MELPKYITLTIDFHVSGDYARNILSTAWLSKLVAHRVLRLIKENEVLADLSEYKFLKILRSKCYDILPNRRYVDGILKLVHSTLKSAKALEVNMKDIGLKQWLLFQSDGERGYARGNMNIRFIGTHRVRVLTLGYDKKTRYIELKVPTPKGWKKLIEVLVNRAFDGQIGYPARVVVKDYGIGKHGLHVHGEVQVMVPYSLYLDVMRRYDKPRGDKIAGVDVNVERLDAVVIDRHGNLLSYGTFWLKNATFMGVRRKRSWSLVGEKIHALLKWLYSQGVSVVGLENPEVIGYLRYYWIRNGERRESRWNWKVSMFRNSIIERITWKAPLYSIKPTYVNPKNTSKEGERIGRRLGLDRHLGSAYIMAKRTLKSLQRP

SEQ ID NO: 1192 - protein, 1258 aa, unidentified
  REGION 1..1258: note = Category: MG61 effectors
  REGION 1..1258: note = Description: MG61-27 effector
  source 1..1258: note = uncultivated organism sequence
MEFTKYTRSNKIVRSVIFEMSPIGNTRAAIKEHGVIEEDAVRKSNAVLIKEVSDNFIREFLNDDKLEKYDWVEWEDLCLLIDDKPAFDAKAEKMKESIATSISKSFDSYINRFMAANGKANGKYSWKSAGYIDEVIPMYILCHPDYQDEKYTLAAESLKHASSAMFKKYFVSYERILNGTKTGSIAYRVMENVLIFCTNSKMYKKFAAKISGADLFAKIADITVLEDLISQNGIDFYNEMIGDLYDKDGQLIRKGFNSRINEYNSTHPDDKIPYLKKMKKQILSYVEPFFTIDKIESKEDLDNILTSVRATEESLTENLKTLFSNLLSNDKFPLDRILLTSAARSTIANSLAGRWDYFENIIREKETDKLKADYFEKKNRILTKLTKKDQKKINDAVTSNISSIADLNQMLHNVSEETVEDFLIKSLNKQISLKESSYSVLNNSGFMKSDSKPAWDDNQKIQDYLDHVIAISRMLKYFYTDLMNEKVDPIFVEELQMFDDSKDKIVKSYNMIRNYCTTKTELTAKEKRIQLCFGRPVHFEQTWNNKQEGKFGNLDAALLEFDGLYYYIVPAAKNKRKLNFPVTDIPQEGVNYHYLSTKKSIKLSMALPKMTFKSPAAVKKYAETEEPFTINIGNSTMTVSKKMYDDYNLKTFSSSPDARIALIDYAKEFISKEFSFKCYDYSSLKPSEEYRSYGEFCNEVDSITFSTTSKYVNKDLVDNAVMDGDLYMFLITSADMYKDREKNKDITAIRFNTIMQSMFTGDTSIIINNSPTIYYRPQIIEAVDKHPVGSILVNKMTTDGRTIPGEIYLELCDFYNGKKDYLSAEAKAYNENVSVKESSFPHIKDAHYTREMFTISLSYTLNKGVSNEKLGYALNDEIRRDIVKEGCNVMSIIRGINNLLYYCIVDQNGNQLKAGSLNIVGGVDYYEKLTLLSTQRYIDSKNWKYEKKSAELKDTYLGQVCREIAKIAIANNAIIVIDKLIDSIKNKAASFDNQVYKKFENRLISTLGNYYDVTLPDNEPGGSSNPLQLTVPDNTSIQNGIIFFIIDSGTKNICQETGYVNLLNTYNVNTVTAKAKFLSKISKIYFDADLNEFVFEFSWKDIGSINLKEDEEIPLYLGMNKVWKVRTHITRYKKNKEKRSYEEIDGTEIMKAVMKNYPDMIGKDIDITKLSSKDIQAVYEVFTYYANGFIPRIGNEDSEFISPVSTWTSIGNVPYDEMSAYQLAKKSLLGINKIQFAEDSGRYQYTPVSKVEWYNSLL

SEQ ID NO: 1193 - protein, 1262 aa, unidentified
  REGION 1..1262: note = Category: MG61 effectors
  REGION 1..1262: note = Description: MG61-28 effector
  source 1..1262: note = uncultivated organism sequence
MKYHKYTKLNSTIKSATFELVPVGKTRDFLELHDVIKEDSERKAKVVLVKEVSDTFIVEFLRNYNNAGICDWENLHKIYNSATCTEIRGCIEKEKEKIAKDLNSALNAYIESFLKYNDINCSDVGWNKKSYVEVALPLYAKSVPDFNTDEYEDALASMKASSSAMFKKCRATYERIINGTNHGSIADRVIENFETFLANKLLYEKILETATGFENDETFTNVSQFGKYLSQNGIDKYNSTIGDFYNSSGELIKRGVNSRITEWNQSNPDNKLPKLQKLKKQILVDREKMFTIETIENKSDFNKTLNTVLILDEKITIETTKLLTSILAKDMYNTEGVYVTRAGGSYIANGLTGSWDYFEAIKTDAITKTVKDKLLTDYFNAKGKVKTNLTKADEKEIEKATKDFSYTIAELDRMLAGTDYITVEEMLIKKLEELKSRKKESYHLMTTYAFWNNDNKPTQDENGVIQKYLDDVLAVVRFTKIFSIDVKLTNADTIFMEDVAGMDKDKHGINKTYNMIRNYLTKKTELDAKQRRVQLCFGRPTHFEQKWNLMHGDKGIFGNCDAGLLEKDGCYYYIVPASKNGEKLNIHVSDCEDEADSYNMLSTKKGMGFLKMLIKCTLKSKSAIAKYKETDEPFELPIGDETITISKKMAEDYANKKYSKSKEELIKVIDFAKEFIAKHPSFKRYDLSSLKESSAYDNLKQFSDEVDSLCFAVTRLYVSKEQIDDAVEKGNLYMFMITSQDMYKSADKKHNIYSIRFNAIMKSMFEAGNHIIVNNSPSIYYRPALIEAEDKHPADSILVNKLTTEGKTIPGEIYLELCAFYNGKCDKLSPLASVYNEKVSVKESTFPHIKDKHYTEEKFSITLSYKMNTNVVGNTSVFTLNNLVQEDIRENGCNIMSVIRGMDNLLYYCIVDSGNKRIASGNLNTIGNADYYEKLCVLGTQRYIDAKNWKYEKKVAELKETYLRQICRKIIKIAIENNAVICIDKVSDLRKNKLSAFDNQVYKKFENTLITALANYYDTSIPNTEAGGSLNPLQLAVEGADTMQNGILFHVAETNTRNICMKTGFINLMSTFGISTVKAKMEYLKKVSRIYYDSKADDFVFEFTWRNLGCCLKKDELPLYNGLDKVWQLHTHLTRLKWNKEKSQYEEIDGTELIKAIRRSHSDMIGKDIEVDMLSSKEIQTLYDVFILYANGFMPKEFMEDTSSYDSPIVPWSSVGRIEYDEMTAYQLCRKASLTMEKIKKGLSSKELVVYRTEWLNYLLEN

SEQ ID NO: 1194 - protein, 1258 aa, unidentified
  REGION 1..1258: note = Category: MG61 effectors
  REGION 1..1258: note = Description: MG61-29 effector
  source 1..1258: note = uncultivated organism sequence
MEFTKYTRSNKIVRSVTFEMSPIGNTRAAIKEHGVIEEDAVRKSNAVLIKEVSDNFIREFLNDDKLEKYDWVEWENLCLLIDDKPAFDAKAEKMKESIAAALSKSFDSYINRFMAANGKANGKYSWKSAGYIDEVIPMYILCHPDYQDEKYTLAAESLKHASSAMFKKYFVSYERILNGTNAGSIAYRVMENVLIFCTNSKMYKKFAAKISGADLFAKIADITVLEDLISQNGIDFYNEMIGDLYDKDGQLIRKGFNSRINEYNSTHPDDKIPYLKKMKKQILSYVEPFFTIDKIESKEDLDNILTSVRATEESLTESLKTLFSNLLSNDKFSLDRILLTSAARSTIANSLAGRWDYFENVIREKETDKLKADYFEKKNRILTKLTKKDQKKINDAVTSNISSIADLNHMLHNISEETVEDFLIKSLNKQISLKESSYSVLNNCGFMKSDSKPAWDDNQKIQDYLDHVIAISRMLKYFYTDLMNEKVDPIFVEELQMLDGSKDKIVKSYNMIRNYCTTKTELTAKEKRIQLCFGRPVHFEQTWNNKQDGKFGNLDAALLEFDGLYYYIVPAAKNKRKLNFPVTDIPQEGVNYHYLSTKKNIKLSMALPKMTFKSPAAVKKYAETEEPFTINIGNSTMTVSKKMYDDYNLKTFSSSPDARIALIDYAKEFISKEFSFKCYDYSSLKPSEEYRSYGEFCNEVDSITFSTTSKYVNKDLVDNAVMDGDLYMFLITSANMYKDREKNKDITAIRFNTIMQSMFTGDTSIIINNSPIIYHRPQIIEAEDKHPVGSILVNKMTTDGRTIPGEIYLELCDFYNGKKDHLSAEAKVYNENVSVKESSFPHIKDAHYTREMFTISLSYTLNKGVSNEKLGYALNDEIRRDIVKEGCNVMSIIRGINNLLYYCIVDQNGNQLKAGSLNIVGGVDYYEKLTLLSTQRYIDSKNWKYEKKSAELKDTYLGQVCREIAKIAIANNAIIVIDKLIDSIKNKAASFDNQVYKKFENRLISTLGNYYDVTLPDNEPGGSSNPLQLTVPDNTSIQNGIIFFIIDSGTKNICQETGYVNLLNTYNVNTVTAKAKFLSKISKIYFDADLNEFVFEFSWKDIGSINLKEDEEIPLYLGMNKVWKVRTHITRYKKNKEKRSYEEIDGTEIMKAVMKNYPDMIGKDIDITKLSSKDIQAVYEVFTYYANGFIPRIGNEDSEFISPVSTWTSIGNVPYDEMSAYQLAKKSLLGINKIQFTEDSGRYQYTPVSKVEWYNSLL

SEQ ID NO: 1195 - protein, 363 aa, unidentified
  REGION 1..363: note = Category: MG61 effectors
  REGION 1..363: note = Description: MG61-30 effector
  source 1..363: note = uncultivated organism sequence
MSYITVSLSFNTNSDAAKRLLSTAWLFKIATHRVLDLARQTPVLPATDIGWKNMFRGVAYEAVPNRRYADGAITLIRSIYESCRVLGIDFRSVELGNWLMFQQSEMEYPVRNVTLREGYEFHITVIDYGGSTSRVIIKPTIPKGYRLLLDKILEERQEHTGRVVINGYGVRDNNVWVHGEVQLTIPIEFYYRHMVRYEQNNGRLFGGVDVNVDRINLTIVDEGGELRDVKTFWFEEASRKGVTRHRAWSVIGMAVHAMLDYAYHHGVKTLFLENPDILGRLKLMWIRNGDRRHENYNYRVATFRNSVIEMIVMKAPLYGINVEYVNPKGTTSSEDHDEVMKAYGLDKHTASAYLIVLKGLKQS

SEQ ID NO: 1196 - protein, 1262 aa, unidentified
  REGION 1..1262: note = Category: MG61 effectors
  REGION 1..1262: note = Description: MG61-31 effector
  source 1..1262: note = uncultivated organism sequence
MQYHKYTKLNSTIKSATFELVPVGKTRDFLELHDVIKEDSERKAKVVLVKEVSDTFIVEFLRNYNNAGICDWENLHKIYNSATCTEIRGCIEKEKEKIAKDLNSALNAYIESFLKYNDINCSDVGWNKKSYVEVALPLYAKSVPDFNTDEYEDALASMKASSSAMFKKCRATYERIINGTNHGSIADRVIENFETFLANKLLYEKILETATGFENDETFTNVSQFGKYLSQNGIDKYNSTIGDFYNSSGELIKRGVNSRITEWNQSNPDNKLPKLQKLKKQILVDREKMFTIETIENKSDFNKTLNTVLILDEKITIETTKLLTSILAKDMYNTEGVYVTRAGGSYIANGLTGSWDYFEAIKTDAITKTVKDKLLTDYFNAKGKVKTNLTKADEKEIEKATKDFSYTIAELDRMLAGTDYITVEEMLIKKLEELKSRKKESYHLMTTCAFWNNDNKPTQDENGVIQKYLDDVLAVVRFTKIFSIDVKLTNADTIFMEDVAGMDKDKHGINKTYNMIRNYLTKKTELDAKQRRVQLCFGRPTHFEQKWNLMHGDKGIFGNCDAGLLEKDGCYYYIVPASKNGEKLNIHVSDCEDEADSYNMLSTKKGMGFLKMLIKCTLKSKSAIAKYKETDEPFELPIGDETITISKKMAEDYANKKHSKSKEELIKVIDFAKEFIAKHPSFKRYDLSSLKESSAYDNLKQFSDEVDSLCFAVTRLYVSKEQIDDAVEKGNLYMFMITSQDMYKSADKKHNIYSIRFNAIMKSMFEAGNHIIVNNSPSIYYRPALIEAEDKHPAGSILVNKLTTEGKTIPGEIYLELCAFYNGKCDKLSPLASVYNEKVSVKESTFPHIKDKHYTEEKFSITLSYKMNTNVVGNTSVFTLNNLVQEDIRENGCNIMSVIRGMDNLLYYCIVDSGNKRIASGNLNTIGNADYYEKLCVLGTQRYIDAKNWKYEKKVAELKETYLRQICRKIIKIAIENNAVICIDKVSDLRKNKLSAFDNQVYKKFENTLITALANYYDTSIPNTEAGGSLNPLQLAVEGADTMQNGILFHVAETNTRNICMKTGFINLMSTFGISTVKAKMEYLKKVSRIYYDSKADDFVFEFTWRNLGCCLKKDELPLYNGLDKVWQLHTHLTRLKWNKEKSQYEEIDGTELIKAIRRSHSDMIGKDIEVDMLSSKEIQTLYDVFILYANGFMPKEFMEDTSSYDSPIVPWSSVGRIEYDEMTAYQLCRKASLTMEKIKKGLSSKELVVYRTEWLNYLLEN

SEQ ID NO: 1197 - protein, 1232 aa, unidentified
  REGION 1..1232: note = Category: MG61 effectors
  REGION 1..1232: note = Description: MG61-32 effector
  source 1..1232: note = uncultivated organism sequence
MDYAKFTKQGKLIKGIKLELVPQGNTRDAISEYKIVEADQQLADMVKEVVMAGNEFYKDFIKQIVGHMDGADWQAYGEAVENKATEQKTYDEAVKSISASIKNAILGTAELYGGKKTLFAKDFITIVLRKYVETAENFPYNRERILTCIDVLSDKNVLFKTPYVKWEHIIFGESKGSIAERMLSNFDIFYDNKNKYAALKEATAITDFDDFFTDYASYTRYVGQDGIELYNSAIRGIYSESGAKISEGINEYINKLKMKHPELHVNMLKKLQKQILSNSEPLFKVATIQNAEELKGIMNKVKVTEESVLSSAKELLVHMETSDLHDLYISGQRLYFVCQKIAKDGGILEELIFNNECSRVEKLTEKKKEEIRGAIVKHDYSFAYIDSLLSEYAEKTVKMVINEELQKLIATVVSSGASYDSITINPKWKAIPDKEITVIREYLESFVELNKFLKCLQVRDSDVYPDFKTYATLNVLVDELGALNKAYNMVRNFVTKKVNDKDGKTRLCFGRGALLERGWNRKNQAVDWLGNIDHMLLTKDGKYYYAVPAPVKRKTKIYISDTKPSDEVYEYMEISKQSSFLKTFARLFTSLGLKNIGDANDITMDLGNGSMTVTKEFLVKYKDGECKKNTDFMHKSIDIAKEFLTKHYSYATFNFSELKKTEDYTSFYEFANDVDKYTYAVKTKYIDAAIIDKAVEDKELLLFMLSSMDLYKSQEKCKDITALYTRYFFSEENRKKADIWLNANPAIYYRKPLIKFEKTHPAGSILVRKTYEDKDGITHIVPDNVYMSLYNYYNKNTPLNEEAMQYVDLVEHHVAVQDYVKDARYTREMFTINLSFTLNGNAGDAAQAYTINNMVKEEIKAKMPRMLTVVRGYRNLLEYCITDETGKVFESGNFNTIGEINFKEKLEDLDRARKADAQNWKYEKTVVNIKESYLGMVTSSIVKKAVAYNAIINVEQLSDAFKDKRSCMDNQVFKKFEEKLVSKLACYYDKAKAPTEPGGYLNPLQLASPNCLSNTQNGILFYVSPAYTNEVCPKSNFINLLDFSAAKTLKAKREFLRKMNEICYDAEHEAFHFSFCYDDMPIKLPVKEKKELNDKTNQEFGKHIWTVYINGVRTEYNKKERKLVELNGTEILGKECAKNNVMLTDHMDVDSMPNSVVNEMIHIFQKYSFGEVAQKDVYYVSPVSPQAEPICTPGELRLKNMSEKGYMILHNIVAGKEKFAVNKMEWLEEKLG

SEQ ID NO: 1198 - protein, 1262 aa, unidentified
  REGION 1..1262: note = Category: MG61 effectors
  REGION 1..1262: note = Description: MG61-33 effector
  source 1..1262: note = uncultivated organism sequence
MKYHKYTKLNSTIKSATFELVPVGKTRDFLELHDVIKEDSERKAKVVLVKEVSDTFIVEFLRNYNNAGICDWENLHKIYNSATCTEIRGCIEKEKEKIAKDLNSALNAYIESFLKYNDINCSDVGWNKKSYVEVALPLYAKSVPDFNTDEYEDALASMKASSSAMFKKCRATYERIINGTNHGSIADRVIENFETFLANKLLYEKILETATGFENDETFTNVSQFGKYLSQNGIDKYNSTIGDFYNSSGELIKRGVNSRITEWNQSNPDNKLPKLQKLKKQILVDREKMFTIETIENKSDFNKTLNTVLILDEKITIETTKLLTSILAKDMYNTEGVYVTRAGGSYIANGLTGSWDYFEAIKTDAITKTVKDKLLTDYFNAKGKVKTNLTKADEKEIEKATKDFSYTIAELDRMLAGTDYITVEEMLIKKLEELKSRKKESYHLMTTCAFWNNDNKPTQDENGVIQKYLDDVLAVVRFTKIFSIDVKLTNADTIFMEDVAGMDKDKHGINKTYNMIRNYLTKKTELDAKQRRVQLCFGRPTHFEQKWNLMHGDKGIFGNCDAGLLEKDGCYYYIVPASKNGEKLNIHVSDCEDEADSYNMLSTKKGMGFLKMLIKCTLKSKSAIAKYKETDEPFELPIGDETITISKKMAEDYANKKHSKSKEELIKVIDFAKEFIAKHPSFKRYDLSSLKESSAYDNLKQFSDEVDSLCFAVTRLYVSKEQIDDAVEKGNLYMFMITSQDMYKSADKKHNIYSIRFNAIMKSMFEAGNHIIVNNSPSIYYRPALIEAEDKHPAGSILVNKLTTEGKTIPGEIYLELCAFYNGKCDKLSPLASVYNEKVSVKESTFPHIKDKHYTEEKFSITLSYKMNTNVVGNTSVFTLNNLVQEDIRENGCNIMSVIRGMDNLLYYCIVDSGNKRIASGNLNTIGNADYYEKLCVLGTQRYIDAKNWKYEKKVAELKETYLRQICRKIIKIAIENNAVICIDKVSDLRKNKLSAFDNQVYKKFENTLITALANYYDTSIPNTEAGGSLNPLQLAVEGADTMQNGILFHVAETNTRNICMKTGFINLMSTFGISTVKAKMEYLKKVSRIYYDSKADDFVFEFTWRNLGCCLKKDELPLYNGLDKVWQLHTHLTRLKWNKEKSQYEEIDGTELIKAIRRSHSDMIGKDIEVDMLSSKEIQTLYDVFILYANGFMPKEFMEDTSSYDSPIVPWSSVGRIEYDEMTAYQLCRKASLTMEKIKKGLSSKELVVYRTEWLNYLLEN

SEQ ID NO: 1199 - protein, 1535 aa, unidentified
  REGION 1..1535: note = Category: MG61 effectors
  REGION 1..1535: note = Description: MG61-35 effector
  source 1..1535: note = uncultivated organism sequence
MEKKILGLDLGTNSIGWAVVNASFNMEDNRLKLENYMGIDDCGVRIFPEGVEPNTIGKGDREQSRNATRRDKRQMRRQFYRKRLRRIKLLELLVEQGMCPLDMELLKQWKNWDRKKKSEGRVFPETSEFLSWLHLNPYELRARALNEPLTFLELGRVFYHLIHRRGFLTSRKGKGNEDGTIFTKGKPDENILPVEETRKMMGNSTLGKTLYDIMVKPNEPFSINRNSDGKEIRVRGRYTVRDMYILEFERIWLAQAKFSPELNHRKVWVVRTRLLKGNIANKRNQKRLMLLEQKYGRDALTIDEGKHGIHKVTTRQQLDLKYYLAGDITILSEGDAISVQFKSNESVLFWQRPLRSQKSLLANCRFENELPVISANNQYLVKNCKIQTRSKKPCPLSHPEFERFRALQFVNNIKYGKDNRLTSEQREKVMAFINKNDASFTFDKIVKELKLNYEKFNYENDFKVTGNYTHKKVMTLFKPEIWAANSETIWHYFYFYDDNNMLTQRLSEKGFGQFADTDVKNIRLKDGYSNVSLKAIRNIMPFLEKGYTYDRAVILGGVRNAFGRRWEYFNAVQDQLEREIRSLLNGKHKEGAVIELIKDYLIDNNYGFVKNDPHFAHLYHHSQDVEQAEELSDFVPNVENLRNPIVQQGVNETRRLVNSLLKRYRKSDPNFQFARIHIEMGRELRNSRSQRQQMSDSIRENAQKNDEARERLAGFGLKPSRENVQKYLLAKEIELRAGRLVCPYTGRALGMNDVLGGRNLIQIEHIIPYSISLDDNFGNKTLCDAKFNQMKGEKTPYQFFCENQDPHLWGIRKYHNPMDGWEEISERAFRVLPFPKAKRFTSKSDFEAAGFIERQLNDTRYIARKTMEIMGHVCSDVRVMPGQLTAELRRLWGLNNVLQETQKVDFSGLSIQAEKAVPCYLFTDSDGKTISIVPKQSDYPETADYELVIGGKVVKGVFELRQAGFLMSAPEMPDGRYWVRLKVNSDISLLPVAADQPLPDVNHISFRGRVENRQFNNDNTGKVKTSEPDGTYFARFGIIRASFIAPERKNEPKAGKGQVLLYGTVNNGTFKCYIYTCPCDMPDGKYWILLDLDMTNVEFIRAFNERPTAGGNQLVIMASVTDGGLLSLDDDPRYVVPINADAGRYYATLDIEPISAELFPMDRAIPQFEKGQQLTEGTVWVDEHTGEIRFDPKKNRDDHRHHAIDAITIALTEQRFLQYMSTRNAQLKDKMRGKLNSTEKLPVPWMGFEDDVAKAANGILVSHKQNNKTLTKNRRGFSVRGQLHKESVFGKRKAPFAHEDGYHIRAKITELENNKHVAKVVDVTIRKLIEDHLKHQCGVDVANAKGYKIPKDAFFKNGEWQLFLPNKNGAPVPIKKVRICENIGNAMPLKDNVNQYVNPRNNHHVLIYKDANGELKEEVVMFWTVAERRLQGLPIYQLPEDGQSIVTTMEINDMFLVGLSPEDIMANWRNKALLSRCLYRVQKLSQMDFTFRHHLASTINDDDQGCRIASMKLWKEKNPIKVKLDETGQLTLVTQ

SEQ ID NO: 1200 - protein, 1264 aa, unidentified
  REGION 1..1264: note = Category: MG61 effectors
  REGION 1..1264: note = Description: MG61-36 effector
  source 1..1264: note = uncultivated organism sequence
MEDRYMDFTKFQKLNSIIKTCSFEMVPIGKTRETMEKHNVIEEDAERKSNAELTKEVSDSFIREFIADYKEDMDWKDLYDAYGEDRARFTDIMNQKAEKLAKRFSDSFNEYINTFLKANGINDKKSKWSDSGYVDVVLPLYVSIHPDFSNDKYERAVASLLHCSNSLFKKYTTSYARIIAGTKKGSFADRSMENFQTVCANSVMFDLISRNLSSVECHDAFKEVFADAPLNMNEYLSQKGISRYNEFVGDSFDENGQVIRYGVNHYINEWNQTHPDERMPKMHKLKKQILSIVEPSFRIRTINDETELFGTFDNIRTAEQRYAGMLESILENMNTADIYDKSGILVTSTERDSLANAITGEWSYFRRQIKEEEENRIREEYLQKKNRVKTKLTQKDNKQIEDALNKSIYSVADLNKMLGSDLGTIEEKLLDEYIRNKSKKESAYAQLVKTDFYDKKTIPAGDDVQRIQQYLDKVLGLTHIVRGLCADSQDPRTDFVFSDDVSSLEDDRVQIVSCYNLIRNFVTKKREKAAKEKQIQLCFGRPAHFEQVWNNKQEGKFGNVDAALLEYAGKYYYMVPAAKNEEKLNFPVTDEPQTGECYNYLATKKAIGFAKAFAKFYIKSPEAMEGYKKTDEPFEISVGNDTMLISKKVYEDYEAKIFRESEEAKNKLIDCAKEFLSKNLSYCIYDWSELKEAKNYVNYGEFCNEVDSIAFRVINRYVSKKLVDDAVESGNLYMFEISSLDMYKDSSRMKNIMALRFNQIMNGMFTGDKSIIINNAPQIRYRPVVIEKKDVHPVGSRLVNKNTTDGRTIPGDVYLELCAYYNGKKDSLSPEASLYNEKVSVKDSDRAHIKDKHYTEEKFLITFSYTANKNVASATSGYQLNEMVRKEIRENGCNIMAVIRGIDNLLYYAVVDENGNRIEAGDLNVVGDTDFYEKLTILGKQRYADQKNWKHENKVADLKDTYLGQVCRKIASIAVKNNAVIVIDKINERTKRKNAAFDNNMYRKFENALVNSLTDYYDIGIRGDEPGSVKNPLQLTVKEDNGFQNGIIFYQFDTFTKNICMETGFVNLLNTFEIKTVASKVAFLKKLSGIYYDNDINEFVFEFTWRNIGCILKDEELSLYDGMDKIWKVRTHFTRYMRNAEKNKYVEIDGTEVLKELIRKNHPDMIGGKIDVDRLTSEEVKKVFEIFTLYTNGYIPRMDDAESGYMSPACDWNNFGTIRYDEMTALQLAKKSSLMIGKVKSGKDWKDMNVSRVEWLNHVLKADW

SEQ ID NO: 1201 - protein, 1264 aa, unidentified
  REGION 1..1264: note = Category: MG61 effectors
  REGION 1..1264: note = Description: MG61-37 effector
  source 1..1264: note = uncultivated organism sequence
MEDRYMDFTKFQKLNSIIKTCSFEMIPIGKTRETMEKHNVIEEDAERKSNAELTKEVSDSFIREFIADYKEDMDWKDLYDAYGEDRARFTDIMNQKAEKLAKRFSDSFNEYINTFLKANGINDKKSKWSDSGYVDVVLPLYVSIHPDFSNDKYERAVASLLHCSNSLFKKYTTSYARIIAGTKKGSFADRSMENFQTACANSVMFDLISRNLSSVGSHDAFKEVFADAPLNMNEYLSQKGISRYNEFVGDSFDESGQVIRYGVNHYINEWNQTHPDERMPKMHKLKKQILSIVEPSFRIRTINDETELFGTFDNIRTAEQRYAGMLESILENMNTADIYDKSGILVTSAERDSLANAITGEWSYFRRQIKEEEENRIREEYLQKKNRVKTKLTQKDNKQIEDALNKSIYSVADLNKMLGSDFGTIEEKLLDEYIRNKSKKESAYAQLVKTDFYDKKTIPAGDDVQRIQQYLDKVLSLTHIVRGLCADSQDPRTDFVFSDDVSSLEDDRVQIISCYNLIRNFVTKKREKTAKEKQIQLCFGRPAHFEQVWNNKQEGKFGNVDAALLEYAGKYYYMVPAAKNEAKLNFPVTDEPQMGECYNYLATKKAIGFAKAFAKFYIKSPEAMEGFEKTEEPFEISVGNDTMIISRKVYEDYEAKTFRESEEAKNKLIDCAKEFLSKNLSYCIYDWSVLKEANDYVNYGEFCNEVDSIAFRVINRYVSKKLVDDAVERGNLYMFEISSLDMYKDSSRMKNIMALRFNQIMNGMFTGDKSIIINNAPQIRYRPVVIEKKDVHPVGSRLVNKNTTDGRTIPGDVYLELCAYYNGKKDSLSPEASLYNEKVSVKDSDRAHIKDKHYTEEKFLITFSYTANKNVASATSGYQLNEMVRKEIRENGCNIMAVIRGIDNLLYYAVVDENGNRIEAGDLNVVGDTDFYEKLTILGKQRYTDQKNWKHENKVADLKDTYLGQVCRKIASIAVKNNAVIVIDKINESTKRKNAAFDNNMYRKFENALVNSLTDYYDIGIRGDEPGSVKNPLQLTVKEDNGFQNGIIFYQFDTFTKNICMRTGFVNLLNTFEIKTVASKVAFLKKLSDIYYDNDINEFVFEFTWRNIGCILKDEELPLYDGMDKIWKVRTHFTRYMRNAEKNKYVEIDGTEVLKELIRKNHPDMIGGKIDVDRLTSEEVKKVFEIFTLYTNGYIPRMDDAESGYMSPACDWNNFGTIRYDEMTALQLAKKTSLMIGKVKSGKDWKDMNVSRVEWLNHVLKADW

SEQ ID NO: 1202 - protein, 1264 aa, unidentified
  REGION 1..1264: note = Category: MG61 effectors
  REGION 1..1264: note = Description: MG61-38 effector
  source 1..1264: note = uncultivated organism sequence
MEDRYMDFTKFQKLNSIIKTCSFEMIPIGKTRETMEKHNVIEEDAERKSNAELTKEVSDSFIREFIADYKEDMDWKDLYDAYGEDRARFTDIMNQKAEKLAKRFSDSFNEYINTFLKANGIKDKKSKWSDSGYVDVVLPLYVSIHPDFSNDKYERAVASLLHCSNSLFKKYTTSYARIIAGTKKGSFADRSMENFQTACANSVMFDLISINLSNVGSHDAFKEVFADAPLNMNEYLSQKGISRYNEFVGDSFDESGQVIRYGVNHYINEWNQTHPDERMPKMHKLKKQILSIVEPSFRIRTINDETELFGTFDNIRTAEQRYAGMLESILENMNTADIYDKSGILVTSAERDSLANAITGEWSYFRRQIKEEEENRIREEYLQKKNRVKTKLTQKDNKQIEDALNKSIYSVADLNKMLGSDFGTIEEKLLDEYIRNKSKKESAYAQLVKTDFYDKKTIPAGDDVQRIQQYLDKVLGLTHIVRGLCADSQDPRTDFVFSDDVSSLEDDRVQIISCYNLIRNFVTKKREKTAKEKQIQLCFGRPAHFEQVWNNKQEGKFGNVDAALLEYAGKYYYMVPAAKNEAKLNFPVTDEPQRGECYNYLATKKAIGFAKAFAKFYIKSPEAMEGFEKTEEPFEISVGNDTMIISRKVYEDYEAKTFRESEEAKNKLIDCAKEFLSKNLSYCIYDWSGLKETKDYVNYGEFCNEVDSIAFRVINRYVSKKLVDDAVERGNLYMFEISSLDMYKDSSRMKNIMALRFNQIMNGMFTGDKSIIINNAPQIRYRPVVIEKKDVHPVGSRLVNKNTTDGRTIPGDVYLELCAYYNGKKDSLSPEASLYNEKVSVKDSDRAHIKDKHYTEEKFLITFSYTANKNVASATSGYQLNEMVRKEIRENGCNIMAVIRGIDNLLYYAVVDENGNRIEAGDLNVVGDTDFYEKLTILGKQRYTDQKNWKHENKVADLKDTYLGQVCRKIASIAVKNNAVIVIDKINERTKRKNAAFDNNMYRKFENALVNSLTDYYDIGIRGDEPGSVKNPLQLTVKEDNGFQNGIIFYQFDTFTKNICMRTGFVNLLNTFEIKTVASKVAFLKKLSGIYYDNDINEFVFEFTWRNIGCILKDEELSLYDGMDKIWKVRTHFTRYMRNAEKNKYVEIDGTEVLKELIRKNHPDMIGGKIDVDRLTSEEVKKVFEIFTLYTNGYIPRMDDAESGYMSPACDWNNFGTIRYDEMTALQLAKKSSLMIGKVKSGKDWKDMNVSRVEWLNHVLKADW

SEQ ID NO: 1203 - protein, 1264 aa, unidentified
  REGION 1..1264: note = Category: MG61 effectors
  REGION 1..1264: note = Description: MG61-39 effector
  source 1..1264: note = uncultivated organism sequence
MEDRYMDFTKFQKLNSIIKTCSFEMIPIGKTRETMEKHNVIEEDAERKSNAELTKEVSDSFIREFIADYKEDMDWKDLYDAYGEDRARFTDIMNQKAEKLAKRFSDSFNEYINTFLKANGINDKKSKWSDSGYVDVVLPLYVSIHPDFSNDKYERAVASLLHCSNSLFKKYTTSYARIIAGTKKGSFADRSMENFQTACANSVMFDLISRNLSSVGSHDAFKEVFADAPLNMNEYLSQKGISRYNELVGDSFDESGQVIRYGVNHYINEWNQTHPDERMPKMHKLKKQILSIVEPSFRIRTINDETELFGTFDNIRTAEQRYAGMLESILENMNTADIYDKSGILVTSAERDSLANAITGEWSYFRRQIKEEEENRIREEYLQKKNRVKTKLTQKDNKQIEDALNKSIYSVADLNKMLGSDFGTIEEKLLDEYIRNKSKKESAYAQLVKTDFYDKKTIPAGDDVQRIQQYLDKVLSLTHIVRGLCADSQDPRTDFVFSDDVSSLEDDRVQIISCYNLIRNFVTKKREKTAKEKQIQLCFGRPAHFEQVWNNKQEGKFGNVDAALLEYAGKYYYMVPAAKNEAKLNFPVTDEPQMGECYNYLATKKAIGFAKAFAKFYIKSPEAMEGFEKTEEPFEISVGNDTMIISRKVYEDYEAKTFRESEEAKNKLIDCAKEFLSKNLSYCIYDLSVLKEANDYVNYGEFCNEVDSIAFRVINRYVSKKLVDDAVERGNLYMFEISSLDMYKDSSRMKNIMALRFNQIMNAMFTGDKSIIINNAPQIRYRPVVIEKKDVHPVGSRLVNKNTTDGRTIPGDVYLELCAYYNGKKDSLSPEASLYNEKVSVKDSDRAHIKDKHYTEEKFLITFSYTANKNVASATSGYQLNEMVRKEIRENGCNIMAVIRGIDNLLYYAVVDENGNRIEAGDLNVVGDTDFYEKLTILGKQRYTDQKNWKHENKVADLKDTYLGQVCRKIASIAVKNNAVIVIDKINESTKRKNAAFDNNMYRKFENALVNSLTDYYDIGIRGDEPGSVKNPLQLTVKEDNGFQNGIIFYQFDTFTKNICMRTGFVNLLNTFEIKTVASKVAFLKKLSGIYYDNDINEFVFEFTWRNIGCILKDEELPLYDGMDKIWKVRTHFTRYMRNAEKNKYVEIDGTEVLKELIRKNHPDMIGGKIDVDRLTSEEVKKVFEIFTLYTNGYIPRMDDAESGYMSPACDWNNFGTIRYDEMTALQLAKKSSLMIGKVKSGKDWKDMNVSRVEWLNHVLKADW

SEQ ID NO: 1204 - protein, 1253 aa, unidentified
  REGION 1..1253: note = Category: MG61 effectors
  REGION 1..1253: note = Description: MG61-40 effector
  source 1..1253: note = uncultivated organism sequence
MELNKFCRLNQSIKTCSLELVPIGRTRETIEKHNVIEEDSKRKENAVLAKEVSDSFIREFIADYKGDFDWSELVACFGKHEEYAGIKEKMEEKIAREFSDAFNGYISKFLKANGVGKADNKTKWSDASYIDVVLPLYASLHPDYDNPKYKEAIASICHCSSTIFKRYITAYEKIINGTKKGSFAERVMDNFQIICTNRLMCEIVFSKIKKADDFRLFLDAPESMNEYLSQKGIDQYNETIGDSFSEKGEILRYGLNHYINEWNQKNPDSRMPKLQKLKKQILSVAEPAFRIDVIDNEKELQETIKNIRAAEVRYSGKLKDILENLNYTNTYIHDGVLVKAAGRENLAKMITGEWNFFREQIREREERRIRDEYLQKKNRIKTKLTKKDEKQIEDTVSKGMYSLVDLNKMLGEEKANIESKLLDEYVKNRSEREKHYTVVANADFMSKESLPTSDEIKIIQNYLDKVIQMTHIIRCLDADAQNEKVDLVFLDDAAELEDDKTLIVTGYNLIRSFLTKKREKTAKEKAVQLCFGRPAHFEQKWNNKQAGKFGNVDAALLEENGKFYYIVPAAKNESKLNFPVTDEPQAGRCYNYLSTQKAIGFAKAFAKFTIKSPEAMSGYAKSEEPFEISVGNQKMTVSKKMYDSYEAKTFRDSEEEKIKLIDYAKEFLQKHGSYNTYDWSELRESKDYVNYGEFCSEVDSIAFRVVNRYISKDLVDDAVLRGDLYMFEITSQDMYKDKNRMKNIMALRFHAIMEGMKTGNKSIIINNAPQIRYRPQIIEAEDKHPAGSKLVNKKTTDGKTIPGDIYLELCDFYNGRKSSLSPEASLYNERVSVKVSDREHIKDKHYTAEKFLITLSYTMNKNVASNTSVYKLNEMIRNEIKENGCNIMSVIRGIDNLLYYAVIDENGNKIEAGDLNVVGDTDFNEMLSVVGTQRYIDQKNWKYEKKVAELKDTYLGQACRKIASIAVKNNAVIVIDKINENTKRKNAAFDNNVYRKFEDALVNTLSNYYDRSIKADEPGGISNPLQLCVNEDNNFQNGILFYTYDAFTKNICMDTGFINLLNTFNVKTVAAKLGFLKKMDGIYYDSDRQEFVFEFAWGKLGSVLKEEEAALYTGLDKSWKVRTHLTRYKRDRESGKYKEVDGTEILKKLIKEKHPDMIGEKINVDKLTSNEVQTVYEIFTLYVNGFIPRMDGESSEYMSPVSDWNSMSNIAYDEMTALQLARKGSLTIGRIKNGFEGKDINISRVDWLNEILR

SEQ ID NO: 1205 - protein, 1264 aa, unidentified
  REGION 1..1264: note = Category: MG61 effectors
  REGION 1..1264: note = Description: MG61-41 effector
  source 1..1264: note = uncultivated organism sequence
MEDIYMDFTKFQKLNSIIKTCSFEMIPIGKTRETMEKHNVIEEDAERKSNAELTKEVSDSFIREFIADYKEDMDWKDLYDAYGEDRARFTDIMNQKAEKLAKRFSDSFNEYINTFLKANGIKDKKSKWSDSGYVDVVLPLYVSIHPDFSSDKYERAVASLLHCSNSLFKKYTTSYARIIAGTKKGSFADRSMENFQTVCANSVMFDLISRNLSSVECHDTFKEVFADAPLNMNEYLSQKGISRYNEFVGDSFDESGQVIRYGVNHYINEWNQTHPDERMPKMHKLKKQILSIVEPSFRIRTINDETELFGTFDNIRTAEQRYAGMLESILENMNTADIYDKSGILVTSAERDSLANAITGEWSYFRRQIKEEEENRIREEYLQKKNRVKTKLTQKDNKQIEDALNKSIYSVADLNKMLGSDFGTIEEKLLDEYIRNKSKKESAYAQLVKTDFYDKKTIPAGDDVQRIQQYLDKVLSLTHIVRGLCADSQDPRTDFVFSDDVSSLEDDRVQIVTCYNLIRNFVTKKREKTAKEKQIQLCFGRPAHFEQVWNNKQEGKFGNVDAALLEYAGKYYYMVPAAKNEAKLNFPVTDEPQRGECYNYLATKKAIGFAKAFAKFYIKSPEAMEGFEKTEEPFEISVGNDTMIISRKVYEDYEAKTFRESEEAKNKLIDCAKEFLSKNLSYCIYDWSVLKEANDYVNYGEFCNEVDSIAFRVINRYVSKKLVDDAVERGNLYMFEISSLDMYKDSSRMKNIMALRFNQIMNGMFTGDKSIIINNAPQIRYRPVVIEKKDVHPVGSRLVNKNTTDGRTIPGDVYLELCAYYNGKKDSLSPEASLYNEKVSVKDSDRAHIKDKHYTEEKFLITFSYTANKNVASATSGYQLNEMVRKEIRENGCNIMAVIRGIDNLLYYAVVDENGNRIEAGDLNVVGDTDFYEKLTILGKQRYTDQKNWKHENKVADLKDTYLGQVCRKIASIAVKNNAVIVIDKINESTKRKNAAFDNNMYRKFENALVNSLTDYYDIGIRGDEPGSVKNPLQLTVKEDNGFQNGIIFYQFDTFTKNICMRTGFVNLLNTFEIKTVASKVAFLKKLSGIYYDNDINEFVFEFTWRNIGCILKDEELSLYDGMDKIWKVRTHFTRYMRNAEKNKYVEIDGTEVLKELIRKNHPDMIGGKIDVDRLTSEEVKKVFEIFTLYTNGYIPRMDDAESGYMSPACDWNNFGTIRYDEMTALQLAKKSSLMIGKVKSGKDWKDMNVSRVEWLNHVLKADW

SEQ ID NO: 1206 - protein, 371 aa, unidentified
  REGION 1..371: note = Category: MG61 effectors
  REGION 1..371: note = Description: MG61-42 effector
  source 1..371: note = uncultivated organism sequence
MSYITLCLPFNTNDSKAEKLFSTAWLFKTASHRMLTLAKQFPVLPATDIGWKNTFRKVIYEVISNRRYADGVIVLIRGVYESCRQLGIDFKDAELGDWLMFQQAEKEYPVRNITLRQGYEFHITTINYNGKPERITIKPTIPKNYKLLLEKIIEDKQKHTARIVVKDHGVRKDKLWVQGEVQLTIPLKFYYKYMVRFKRNYGRLYGGVDVNTDRINLAIVDKHGRLRDVKTFWFEDVSRKGYPRRRARVLIGMAVHEMLKYAYHHGVKTLFLENPDVLGKLKLLWIRNGRRLYKNYNWKVMTFRSSIVEIITIKAPLYAIKVDYVSPRGTTTSKQHDKLMRKYGLDRHTTSAYIIALKGMKRCTSIQNTTI

SEQ ID NO: 1207 - protein, 362 aa, unidentified
  REGION 1..362: note = Category: MG61 effectors
  REGION 1..362: note = Description: MG61-43 effector
  source 1..362: note = uncultivated organism sequence
MSPLYTIKLSFNEFGEKAKLLLSTAWLFKIACHKVLNKSKVLYENLVPSKIAWIKMFKDDAYSVIPNKRYSYGVVYLVYGVWESARKLGVDYRMVELSDWLMFQHYEREVSGNVIRVHGDGSALVTVYGYNGLKDRILIKAKPNKGQAQLLKAAVEENEKYMPKVVIRDYGVRDNTIYVRGEIHISLDYGFYAKHAQRFSEPKGNLIGGVDVNVDRINLAIVDEMGRLRDVKTFWFRETTARGYPRKRAWSIIGMRIHEMLKYAYHHGVKTIALENPDALGTLRLLWIRSGERRHENYNYKVALFRTSIIERIAMKALLYGMEVKYVDPKGTTSSREHNWIARAHGLDKHASSATLIALRSI

SEQ ID NO: 1208 - protein, 365 aa, unidentified
  REGION 1..365: note = Category: MG61 effectors
  REGION 1..365: note = Description: MG61-44 effector
  source 1..365: note = uncultivated organism sequence
MTYITLAFPFNVCCDVAKRFLSTAWLFKIAIHRLLSVAKQSPILPGTDIGWKNTFRRVAYEIIPNRRYADGVVTLVRSIYESCRQLGIDFKSVELSNWLMFQQSELEYPAKNITLKPSYEFHVTTVDYSKNTYRDVVKPIVPKSYKPLLEEILEERQKYTGRVVVKNYGIRKGNLWIRGEVQITVPIDFYYKHMVRCREPKGSLIGGIDVNVDRLNLAVIDERGNLRDSKTFWFSEATTRGFSRRSARSIIGAKIREMLSYAYHHSVKTLFLENPGVLGKLRLLWVKNGDRKHESYNYKVSVFRSSVTEMIAVKAPLYGIEAKYVDPKGTTSSKEHGEVAERCGLDRHVASAYLIALRGLRHQRI

SEQ ID NO: 1209 - protein, 374 aa, unidentified
  REGION 1..374: note = Category: MG61 effectors
  REGION 1..374: note = Description: MG61-45 effector
  source 1..374: note = uncultivated organism sequence
MKQINYITLRLPFHVTGEEARLIYWIAWLCKLCAHRLLNYVKENLLLADLSQYDFIKLGRKLCYDIIPNRRYVDGISTIVQASLQSAKALGADISKLELKPWLLFQSEAEPWARGNLNIQFKNYDVTKVLVFDNDKSSRKITIKPVIPKGYIKLVKTLVDKALKREVGYPARVYIRDYGDKLEYLYGELQVMVKYDFYIEVMKKYDKPLGNNIAGVDVNVDRLNLVVINRSGDIVWKYTTRFPHVTSRGFPRKRAWSIIGEKIHEILRNTYSHGASVIAVENPEIIGYLRYYWIRNGKRKTKNYNYKVSIFRNSMIERIIWKAPLYGLKVIPINPKGTTRSKDHEYVMRKYGLDRHVASAYLIALKARRNLQRP

SEQ ID NO: 1210 - protein, 372 aa, unidentified
  REGION 1..372: note = Category: MG61 effectors
  REGION 1..372: note = Description: MG61-46 effector
  source 1..372: note = uncultivated organism sequence
MYSQKLGKDIVITPNNSPITHVTIVGKLIISQPEDRMKLTRLAWSFKRVVEFMVREIISNRGVQEAVKRHHNVLPNYVYLESAYKHAKLIVEGCKRNNGNPRHVHVRKLFVISRGNRFDKGNRNIKLVPKGKFFEVHIKYPWGNSWLVCKAVFGEKYVPLLKELVILTERRVESYEAKIVFRRKRIELHVSIPLQLYLKYFSKTKPKGYGLLAGFDLNSDRINMVVIDENGRIITLRTEWFPEVTLHGYSRHKAKNTRLKALKKLLLHARRIGVDYVVFENLLTVKKNRRKRKLRSPHANRKKGKFAKKQLIIHGILMSLKLGLTPILINPKGTTHSKDHGEAMKRRGLDKHMASAYIIAYRDLKIIRNNEK

SEQ ID NO: 1211 - protein, 365 aa, unidentified
  REGION 1..365: note = Category: MG61 effectors
  REGION 1..365: note = Description: MG61-47 effector
  source 1..365: note = uncultivated organism sequence
MSYITLTLPFNISDSEAWRLLSTAWLFKIASHRMLSLAKQFPILPATDIGWKNTFRKIIYEVIPNRRYTDGVIVLVRGIYESCRQLGVNFKDVELGDWLMSQQAEKEYPVRNITLKQGYEFWITTVDYNGNSERIVIKPSIPKNYKLLLDRILEEKQKHTARVVIKDYGVRKNKLWIHGEIQLTIPLDFYHKYMTRYRRNYGKLYGGVDVNTDRINLAIVDEQGSLRDTYTFWFREVTARGYSRRKARSVIGMRVHEMLKYAYHHGVKTLFLENPEVLGKLKLLWIRNGKRLHKNYNWKVATFRSRILEMIAMKAPLYSIKVGYVDPKGTTNSKEHDEVMRKHRLDRHTASAYIIALRGLNHKFI

SEQ ID NO: 1212 - protein, 363 aa, unidentified
  REGION 1..363: note = Category: MG61 effectors
  REGION 1..363: note = Description: MG61-48 effector
  source 1..363: note = uncultivated organism sequence
MSVPRLSSVEELISHVTVIGKVIPETINDYMKLVRLAWSFKRVVDLMIREVINNAFMKDATKKLYQILPNYIYLESAYKHAKLIVEGCKFNNGNPKHVHVKKLFIVSRGNKYDKGNRNVKLIPDKGFFKALIKYPWDGSWIECRVLFGEKYIPLLKELLELTSKKKEGYGTRIVFRKSRIELHVSVPLHLYLKHFSAPRREGYGLVAGLDLNSDRANMVIIDSTARIVTMRTAWFPEVTLHGFPRDKARDVRLKKLRELLVFARRIGVDYIVFEDLFAVKKRSKVSSPSGNRKIVRFAKRQLLQHGLLMSLKLGLTPILVDPKGTTHSREHEEVMKKRGLDKHMASAYIIAYKGLKVIRNHEK

SEQ ID NO: 1213 - protein, 336 aa, unidentified
  REGION 1..336: note = Category: MG61 effectors
  REGION 1..336: note = Description: MG61-49 effector
  source 1..336: note = uncultivated organism sequence
MSYVTLVLPFNACCDEARKLLSTAWLFKVATHRMLSIAKQISALPATDIGWKSAFRKAVYEVIPNRRYTDGVITLVRSIYESCRQLGVDFKSVELGNWLMFQQSESEYPVRNITLKHGHEFHVTTISYNGSANRVIVKPTIPKNYRALLDKIIEEKQEHTARVVVKGFGVRKSVLWVHGEVHLTIPIEFYYGHVARYRKNGGRLYGGVDVNVDRINLTIVDEDGRLRDRKTFWFREVTARGCPRRRAWSAIGTRVHEMLSYAYHHGVKTIALENPNTLGALKLMWAKSGEKRHENYNYKVSIFRCKVVEMIAMKAPLYDIEVRCIDPRGDDPFKRT

SEQ ID NO: 1214 - protein, 376 aa, unidentified
  REGION 1..376: note = Category: MG61 effectors
  REGION 1..376: note = Description: MG61-50 effector
  source 1..376: note = uncultivated organism sequence
MSKSVAEYITLRLPFHVTGVDAKLIYWTAWLCKLCAHRLLEAIKLNPSLAYLSQYDFIKVGRRLCYDIIPNRRYVDGISTLIHASLQSAKALKVDITKLEPKHWLLFQSEAEPWAKGNLNIQFVDYDKVKVLVFDRDKSSRRIIIEPVIPKGYIRLVKALVDKALKKEIGYPARIYITDYGERLEHLYGEIQVMVKYNFYLEVMKRYDKPLGDNIAGVDVNVDRLNLVVINRDGDIVWKHTVRFPQITSRGCPRKRAWSIIGEAIHSILRNAYSHGASVVAVENPEVLGYLRYYWIKNGDRGTKNYNYRISIFRNSIIERIVWKAPLYGLHVVTVNPKGTTHSKDHEYVMRRYGLDRHTASAYLIALKTRRNLQRP

SEQ ID NO: 1215 - protein, 361 aa, unidentified
  REGION 1..361: note = Category: MG61 effectors
  REGION 1..361: note = Description: MG61-51 effector
  source 1..361: note = uncultivated organism sequence
MSTLRLSNVEELVPHVTVIGKLLPETPGDYMKLVRLAWSFRRAVELMIREVVNGTSMKDATKKVYYLLPNYVYLESAYKHAKLIIEGCRFNNGNPRHIHVRKLFIISRGNKYDKGNRNVEIIPSTKFFQVLIKYPWDGSWIECRAFFGEKYIPLLRELLELANQKREGYGARIVFREGRIELHISAPLFLYLKHFSLPERRGYGLLAGLDLNSDRINMVVIDSNGRIVAMKTAWFPELTLHGFPREKARDTRLKKLKELLSYARRIGVDYVAFENLFVMKKRGKVSSPSGNRKITRFAKKQLLQHGLLMTLKLGLSPILVDPKGTSHSREHKEVMKEKGLDRHMASAYIIAYRGLKAIRNH

SEQ ID NO: 1216 - protein, 355 aa, unidentified
  REGION 1..355: note = Category: MG61 effectors
  REGION 1..355: note = Description: MG61-52 effector
  source 1..355: note = uncultivated organism sequence
MSQFQISSTDASKLVTHVTIVGRLIPETDEDFVKLARLAHDFRKAVLYATRMIVKGIDANSILRELRSMLNKAYGDSAYKVAKAIVEGCKYSGGNPKHIKIRKLFIVSEGEASRLGNRNIRLESVDVVKIKYPYDSSWLTFKALFGEEYLQLVAELVELAKQKGVSYGARVVFRDGRIYLHLSVPLELYLKHFKKGEAREELIAGFDLNSDRVNMVIVDRFGRIRDVKTQWFTEVTSHGFPRNKAKTKRLEALAKLLRYAYHHNIGTVVFENLLAIKKRRYTSNSTANRKITRFAKRELLQHALVMAMKYGFKVKLVDPSGTTHSREHDEVMKRYGLDKHVASACLIALKELKQP

SEQ ID NO: 1217 - protein, 363 aa, unidentified
  REGION 1..363: note = Category: MG61 effectors
  REGION 1..363: note = Description: MG61-53 effector
  source 1..363: note = uncultivated organism sequence
MTYITLVFPFNVCCDVAERLLSTAWLFKIATHRLLNVVKHFPVLPATDIGWKNTFREIAYEIIPNRRYADGVVTLVRSIYESCRQFRIDLKSVELSNWLMFQQSELEHPARNITLKPGYEFHITTVDYNKNTYRDVVEPIIPKSYKPLLDKMLEERQKYTGRVAVKSYGIRKYNLWVRGEIQITIPTDFYYNHMTRYRKSKGSLIGGIDVNVDRLNLAIIDEKGNLRDCKTFWFSEAVARGFSRRSARSIIGAKIREMLSYAYHHNVKILFLENPEVLSKLKLLWVRNGDRKHENYNYKVSVFRSSVIEMIALKAPLYGIEAKYVNPKGTTNSEEHDEAMKRYGIDRHTASAYLIALRGLRNQ

SEQ ID NO: 1218 - protein, 374 aa, unidentified
  REGION 1..374: note = Category: MG61 effectors
  REGION 1..374: note = Description: MG61-54 effector
  source 1..374: note = uncultivated organism sequence
MNIVEYVTLRLPFHVAGEEARLVYWTAWLCKLCAHRLLSTVRQNPLLADLSQYDFIKIGRKLCYSIIPNRRYIDGISTLIHASLQSAKALGVEVTKLELKPWLIFQSEAEPWAKGNLNIQFTDYDKVRVLVFDRDKTSRKITIKPVIPEGYAKLVKALVDKALRKEIGYPARIYVRDYGDGLNHLYGELQIMVRYGFYLEVMKRYDKPLGSNIAGVDVNVDRINLVVINRAGDIVWKYTARFPEVMSRGCLRKKAWSIIGEAIHSVLKNAYSHGTSVIAVENPEIMGHLRYYWIRNGDRRTKNYNYKVSVFRNTVIERISWKAPLYGLHVIHINPRGTTHSEDHDYIMKRYGLDRHTASAYLIALKARRVLRRP

SEQ ID NO: 1219 - protein, 365 aa, unidentified
  REGION 1..365: note = Category: MG61 effectors
  REGION 1..365: note = Description: MG61-55 effector
  source 1..365: note = uncultivated organism sequence
MTYITLTFPFNVCCDVAKRFLSTAWLFKIATHRLLSIAKQSPVLPGTDIGWKSAFRGIAYEVIPNRRCADGVVTLVRSIYESCRQLRIDFKSVELSDWLMFQQSELEYPARNITLKPGYEFHITTVDYTKNTHRDVVKPTIPKSYKLLLDKMLEERQEYTGRVAIKSYGVEGGDLLVQGEVQITIPIDFYYKHVTRARANKGRLYSGVDVNVDRLNLAIVDGSGSLKDTHTLWFREVTARGFSKKSAGSIIGVKIREMLSYAYNHGVKTLFLENPDVLGKLKLLWVRSGDRMHENYNYRISVFRSSVIEMIALKAPLYGIEVKYVDPKGTTSSREHDEIVKRYGLDRHTASAYLIALRGLRHQRI

SEQ ID NO: 1220 - protein, 373 aa, unidentified
  REGION 1..373: note = Category: MG61 effectors
  REGION 1..373: note = Description: MG61-56 effector
  source 1..373: note = uncultivated organism sequence
MKVPRYITIRLPFHVDGNVASGIISTAWLSKVVAHRVLRIVKDNPLYLQLSETRFLKNLRNACYDVLPNRRYVDGVLKLVYSTLRSVQALGIDIRQIELKQWLLFQSDGEPQARGNLNIRLVEPYRVRILTFDYNKASEYVEFDVVLPKGWRKLVEELVERANRKEVGYPARIYVSDYGVGKNGLHVAGEVQIMAPCRLYQEVMKRYDTPRGDLVAGIDVNVERLDVAVVSPSGKLKLVKTFWLDGAVHMGVRRERAWSIIGEVIHKMLKWLYHSGVSTIVLENPEIIGYLRYYWIRNGERRGRKWNWKVSMFRSSIIERISWKAPLYAMEVRYVDPKGTTHSQDHDALMRRYGLDRHTASAYLIALKGLDRT

SEQ ID NO: 1221 - protein, 364 aa, unidentified
  REGION 1..364: note = Category: MG61 effectors
  REGION 1..364: note = Description: MG61-57 effector
  source 1..364: note = uncultivated organism sequence
MLHYQTNEVINAKTLISHVTIIGKLIPQTPNDFMKLVRLSYDFRKAVLYATRMISKGIKANEFLKELRGMLNKGYGDSAYKVAKSIVEGCRFNGGNPQHIKVEKLFIASEGETSRIGNRNVRLEATDRVKIKYPYDRTWLFFKVQFGKNYLPLVQEIVKLAKEKKTSYGAIIVFRDSRIYLHLSIPIDLYLKYFSKGSANGSLTAGFDLNADRINMVVVDGFGRIRDAKTEWFPEVTSHGFPRSKAKIKRLEALARLLDYAYHHNVGVVVFENLFIIKRRKFTKNSSANRKISRFTKKELLQYGIIMAMKYGFKVLLVNPKGTTHSKEHDEVMRKYGLDRHTASAYIIALRGMESHNLIRKAII

SEQ ID NO: 1222 - protein, 371 aa, unidentified
  REGION 1..371: note = Category: MG61 effectors
  REGION 1..371: note = Description: MG61-58 effector
  source 1..371: note = uncultivated organism sequence
MSYITLCLPFNVDGIEARKLLSIAWLFKIASHKMLSIAKQSPILPATDIGWKNTFRKTVYEVIPNRRYTDGVIVLIRGIYESCRQLGVNFKGVELGDWLMFQQAEKEYPVRNITLKQGHKFHITTIDYNGNPERITIKPTIPKNYKLLLEEIIEEKQKHTARVVVKDYGIRDSKLWVRGEIQLTIPLDFYYKHMTRYRRNYGRLYGGVDVNTDRINLAIVDKYGRLRDVKTLWYEDAPRKGYPRRKARVLISMAVHEMLKYAYYHGVKILSLENPNALGKLKLLWIKNGKRLHRNYNWKVMTFRSNIIEMVAMKAPLYSIKIEYVNPKGTTTSKEHDEVMWKYSLDRHTASAYLIALKGIERHTMIQKAII

SEQ ID NO: 1223 - protein, 349 aa, unidentified
  REGION 1..349: note = Category: MG61 effectors
  REGION 1..349: note = Description: MG61-59 effector
  source 1..349: note = uncultivated organism sequence
MRLVRLARDFRRAVLYATRMISKGIKVNDILKELRGMLNKAYGDSAYKVAKAIVEGCRFNGGEPQHVKIRRLFIVSEGEASRLGNRNVRIESTDLARIKYPYDKSWILLKVRFGKKYLPLIRELIELIKQRKVSFGARILFRDGKIYLHLSVPINLYLKYFSKGRAGGCLIAGFDLNSDRVNMVIIDRYGKIRDIKTGWFPEVTSHGYPRSKARAKRLEALAKLLRYAYHHNVGTVVFENLLTIKQRRCTGNPTANRKITKFAKRELLQYGIVMSMKYGFKTLLINPKGTTHSSEHNYIMRKHGLDKHTASAYLIALKGIESHMMIQKAVIYRFCPYTTTYTHSLVRSL

SEQ ID NO: 1224 - protein, 365 aa, unidentified
  REGION 1..365: note = Category: MG61 effectors
  REGION 1..365: note = Description: MG61-60 effector
  source 1..365: note = uncultivated organism sequence
MKYITLVMPFNVDGTKAKRLLSTAWLFKIASHRMLSLAKQFPILPTTDIGWKNAFRKIIYEIIPNRRYTDGVIVLVRSIYESCRQLGIDFKEVELGDWLMFQQVEKEYPVRNITLKQNYGFRIITIDYKYNTEKITVKPTISNNYRLILDKILEEKQKHTARIVVKDYGARREKVWIHGEIQLIVPLNFYYKYMTRYRKNYGKFYGGVDVNTDRINLVIVDKKGSLRDAYTFWFREITSRGFPRKKARTIIGMKIHEMLKYAYHHGVKILFLENPVILGKLKLLWIKNGMRLSKNYNWKVMTFRSSVTKIITMKAPLYNIRTKYVNPKGTTHSKEHDNIMKKYRLDKHMASAYLIALKGLDYGSV

SEQ ID NO: 1225 - protein, 373 aa, unidentified
  REGION 1..373: note = Category: MG61 effectors
  REGION 1..373: note = Description: MG61-61 effector
  source 1..373: note = uncultivated organism sequence
MNETYLTLRLPFNLCCDEARLLLSTARLFRHTALHLHSLILKENPRITSLIALKRMYRRRLQEILPNRRYVDGAITLVYSIYESAQALGVSFSDIEFKSWLLFQQSEKEHPCRNITLQKDYSFRITTINYQGVGKRISLKPTIPKNYKQTLGKIIGEKQPYVARIVLKGFGERKNMLWVHGEIHLSIPYRFYLEHFKRYKRNYGKLLGGVDVNVDRINLAIIDRYGRLRDVKTFWFEEASWKGCPRQRAWSIIGIAVHNMLRYAYHHGVKVLFLENPETLGYLKTLWIKKGERRSNNYNYRVQFFRNRIVERITMKTPLYSINIEYVNPKGTTHSREHDEVMRRYGLDRHTASAYLIALRGIEKHTIIQKAII

SEQ ID NO: 1226 - protein, 371 aa, unidentified
  REGION 1..371: note = Category: MG61 effectors
  REGION 1..371: note = Description: MG61-62 effector
  source 1..371: note = uncultivated organism sequence
MSYVTVTASFNASGDCAKLLLSTAWLFKIATHRVLAYAKSTPTLPGSKIGWKNTFRSVAYEVIPNRRYADSACTLVMGIYESVRRLGIDFREVELGDWLMFQQSEKEFPPRNITLKSEDEAWVTAFGYDGESRRLRLRISASGSFRRLLEAILREKQPYNPRITLKSWNVRGGELYVRGELQVSVPIDFYYRHLARCKTNSGRLYGGVDVNSDRINLAVVDGSGILRDARTIWFREVTARGYPRHRARTVIGMGVHEMLRYAYHHGVKTLFLEDPKVLGRLRLLWIRDGKRLHKNYNWRVSTFRVSIIEAIAVKAPLYSIRVEYIDPKGTTRSEEHDELMRRYGLDRHMASAYLIALRGMERYTTIQKATV

SEQ ID NO: 1227 - protein, 367 aa, unidentified
  REGION 1..367: note = Category: MG61 effectors
  REGION 1..367: note = Description: MG61-63 effector
  source 1..367: note = uncultivated organism sequence
MVYGLSYVTITAGFNARGEDAKLLLSTAWLFKIATHRVLGLAKSMPLLPASKISWKNTFREVAYEVIPNRRYADGVVVLVMGIYESCRQQGVDFREVELSNWLMFQQSEKEYPPRSITLKSVDEVWVTVLSYNGESSRIKLRVTTSGVFRKLIEMLLKEKQEYNPRVYIKTWNTRSGELYLRGELQIAVPLDFYYKHMVRRRENRGRLYAGVDVNVDRLNLAIVDERGELRDTKTFWFEEASRKGVSRRRARSILGMVVHEMLRYAYHHGVRTLFLENPEILGKLKLLWVRSGDRRGGNYNWRVNIFRSEVVEMIAVKAPLYAIDVKYVAPRGTTNSREHSEIMKKYRLDRHTSSAYLIALKGLKQT

SEQ ID NO: 1228 - protein, 361 aa, unidentified
  REGION 1..361: note = Category: MG61 effectors
  REGION 1..361: note = Description: MG61-64 effector
  source 1..361: note = uncultivated organism sequence
MNYITIQLPFNMNGKVAGELLSTAWLFRIAVHRVLTIAKQQEALPRSRIGWERAFHRIAYGATLQSDYADGAVVLVMGVYKSCRRLGIDFRRVELSDWLMFQPSKLSRKVGSIALKPNYEFHVTTVGYDGSYDRVVVRPGVSGAFRLVLDSVLDYGVEYMGRIVVRDYGVRGGQLWVRGGAHLTIPLLAYYKVMTRYLKNNGSLQGGVDVNVDRINLAIIDENGELRDTRTFWYREVASRGFPRGRAWSIIGMRIHELLNYARNNGVSVLYLENPGVIGRLRLMWVRNGDRGHENYNYKVSAFRSTIIEEIAMKAPLYSISVGYVNPRGTTSSKAHDELMRRYGLDRHTASAYLIALMGTR

SEQ ID NO: 1229 - protein, 373 aa, unidentified
  REGION 1..373: note = Category: MG61 effectors
  REGION 1..373: note = Description: MG61-65 effector
  source 1..373: note = uncultivated organism sequence
MPRYVTIGLDFHVDGEDAKAILSTAWLSKLVAHRVLNLVKENELLAGLSEYMFLKVMRRKCYSILPNRRYVDGMLKLIHSIIKSAKALGVDIESIELKQWLLFQSDGERGYARGNMNIKLIDTHHARVLTLDYTGKTRYEELKLTTPKGWNKLVESLIERASRGEIGYPVRLVIRDYGIGKHGLHVHGEVQVMAPYTLYLEVMRRYEEPRGKNIAGIDVNVGRLDAVVVDEHGNLLSYRTFWIKNATFMGVRRRRSRSLIGEQIHALLKWLYSQGVSIIGLENPEVIGYLRYYWVRSGERRGNMWNWKISMFRNSIIERLTWKAPLYSMKTIYVNPRNTSKEGKRIGKKLGLDRHLGSAYIIARRTLKNLQRP

SEQ ID NO: 1230 - protein, 376 aa, unidentified
  REGION 1..376: note = Category: MG61 effectors
  REGION 1..376: note = Description: MG61-66 effector
  source 1..376: note = uncultivated organism sequence
MNKSEVEYITLRLPFHAIGEYARLVYWTAWLCKLCAHRLLDMVKQNPLLANLSQYNFIKIGRKLCYDIIPNRRYIDGISTLIHASLQSAKALKVDIAKLELKPWLLFQSEAEPWAKGNLNIQFTSYNTVRVLVFEKDKSTRKITIKPVIPKGYTRLVQTLVDKALRKQIGYPARVYITDYGDKVEHLYGEIQVMVKHDFYLEVMKRYEKPLGNNIAGVDVNADRLNLVVINRNGDIVWRYTARFPQATSRGYPRKSAWSVIGEAIHSILNNAYSHGASVIAVENPEIIGYLRYYWVRNGERRTKNYNYKVTIFRNSIIEKIIWKSPLYGLQVVTVNPKGTTHSEDHEYVMRRYGLDKHTASAYLIALRARRNLHRP

SEQ ID NO: 1231 - protein, 375 aa, unidentified
  REGION 1..375: note = Category: MG61 effectors
  REGION 1..375: note = Description: MG61-67 effector
  source 1..375: note = uncultivated organism sequence
MGLPRYVTVALDFHVDGKEAEAVLSTAWLSKLVAHRVLNLVKKNELLVDLSEYRFLESLRSKCYNILPNRRYVDGVLKLVHSTLKSAKALGVDIKNIELKQWLLFQSDGERGYARGNMNIRLLDPNTVRVLTIGYSKEAKYVELKVSTPKGWRRLIETLVGRALNGQVGYPARVVVKDYGVGKNGLHVHGEVQAMVPYKLYLEVMRRYSRPRGSNIAGIDVNVERLDAVTIDVCGNILSYKTFWIKNATYMGIKRKRAWSLIGEQIHALLKWLYSQGTSIIGLENPEVIGYLRYYWIRNGERKGGKWNWKVSMFRSSIIERITWKTLLYSMKTTYINPRNTSKEGEKIGKKLGLDRHLGSAYIIAKRTLKRLQRP

SEQ ID NO: 1232 - protein, 360 aa, unidentified
  REGION 1..360: note = Category: MG61 effectors
  REGION 1..360: note = Description: MG61-68 effector
  source 1..360: note = uncultivated organism sequence
MSQYQTSSSVTGASTLIEYVTIAGKLIPISNEDYVKLARLAWSFRRAVQVATRMVVKGMDSNDVLKELRRMLNKAYADSAFKLAKAIVKGCITNGGNTLHVEIRKLFIISEGESDRCGNRNVRLEDTALVKVRYPYDGSWIILRAEFGEEYLSLLRELVELARQKRASYNAGIAFRDGGIYIRISVPIQLYLKHFKKGDALGELVAGFDVNSDRVNLAIIDKYGRLVDVRAEWFPEATSPGFPREKARELRVRALAKLLRYCYTHGVGTVVFENLYDVRKRRFTKSKTANRKISRFAKRELLHYAIVMSLKYGFKVLLADPKGTTSSAEHGRFMMKHGLDRHTASAYLIALRGLAHQIIK

SEQ ID NO: 1233 - protein, 373 aa, unidentified
  REGION 1..373: note = Category: MG61 effectors
  REGION 1..373: note = Description: MG61-69 effector
  source 1..373: note = uncultivated organism sequence
MNETYLTLRLPFNACDVEAGMLLSTAHLFRQVVLHLHNLILKENPRITSLIALKRMYRKRLQEILPNRRYVDGAITLVYSIYESAQALGVPFTDIEFKDWLLFQQSEKEYPCRNVTLQRDYSFRITTINYQGESKKILLKPTISRSYRQVLDKIIEEEQPYVARIVLRGFGERKGILWVHGEIHLSIPYKFYLENYRRYERNYGKLFGGVDVNVDRVNLAIVDRYGRLRDIKTFWFEEASWKGCPRQRAWSIIGMAIHDMLRYAYHHRVKVLFLENPETLGYLKTLWIKKGERRSNNYNYRVQIFRNRIIERITMKAPLYAINIEYVDPKGTTLSKEHDEVMRKYGLDRHTASAYIIALRGIERNTMIQKATV

SEQ ID NO: 1234 - protein, 363 aa, unidentified
  REGION 1..363: note = Category: MG61 effectors
  REGION 1..363: note = Description: MG61-70 effector
  source 1..363: note = uncultivated organism sequence
MSFITLRFPFNANGGVARELLSTAWWFKVATHRVLSLAKRQQVLPGTKIGWINTFRGIAYGIVPNRRYADGVVTLVMGVYESCRALGVDFRSVELSGRLMFQQSELEYPNRSITLKPNHEFHITAIRFNGLIGRVVIKPTIPKIYKALLDATITEHVGYMGRVVIDGVGVRNNQLWVHGEIHMTVPLDIYYEHMARHKKNSGKLFGGVDVNTDRVNLAIVDENGELIDHKTFWFSEVIARGFPKHSAWSLIGMRIHELLNYAYHHGVKTLFLENPEVLGRLKLVWIKRGDRGRENYNHKVATFRSSIIERIAIKAPLYSIRLGYVNPRGTTNSIEHDELMRKYGLDRHTTSAHLIALRGLKHQ

SEQ ID NO: 1235 - protein, 363 aa, unidentified
  REGION 1..363: note = Category: MG61 effectors
  REGION 1..363: note = Description: MG61-71 effector
  source 1..363: note = uncultivated organism sequence
MTYITLVFPFNVCCDVAERLLSTAWLFKIATHRLLNVVKHFPVLPATDIGWKNTFREIAYEIIPNRRYADGVVTLVRSIYESCRQFRIDLKSVELSNWLMFQQSELEYPARNITLKSGLEFHITTVDYNKNTYRDVVEPIIPKSYEPLLDKMLEERQKYTGRVAVKSYGIRKYNLWVRGEIQITIPTDFYYNHMTRYRESKGSLIGGIDVNVDRLNLAIIDEKGNLRDCKTFWFSEAVARGFSRRNTRSIIGAKIREMLSYAYHHNVKILFLENPEVLSKLKLLWVRNSDRKHENYNYKVSVFRSSVIEMIALKAPLYGIEAKYVNPKGTTNSEEHDEAMKRYGIDRHTASAYLIALRGLRNQ

SEQ ID NO: 1236 - protein, 379 aa, unidentified
  REGION 1..379: note = Category: MG61 effectors
  REGION 1..379: note = Description: MG61-72 effector
  source 1..379: note = uncultivated organism sequence
MVKQVSSPRYITVSLDFHSDVGQAKVLLSTAWLSKVVAHRVLALVKENPVLSDLSEYSFLKVLRSKCYDLLPNRRYVDGVLKLIYSTLKSGKALGVDIGNIELKQWLLFQSDAERGYAKGNMNIRLSDLHHVRVLTVDYSGNTRYVELEVSTPKGWGKLVENLIDKASRGVVGYPARVVVEDYGIGKSGLHVHGKVQVMVPYDLYLDVMKKYNKPRGNNIAGVDVNVERLDAVVIDEHGNLISYKTFWLKNATFMGVKRKRAWSLIGEQVHALLKWLYSQGVSVIGLENPEIIGYLKYYWIRSGERKGNKWNWKVSMFRNSIIERISWKSALYSLKVVYVNPRNTSREGEKVGEKLGLDKHLGSAYTIAKRALKNLQKP

SEQ ID NO: 1237 - protein, 393 aa, unidentified
  REGION 1..393: note = Category: MG61 effectors
  REGION 1..393: note = Description: MG61-73 effector
  source 1..393: note = uncultivated organism sequence
MQDQPLYTVKLTFNVNGEKAKKILSTARLFKMACHRVLRKSKELRNTLIPSKVAWIKMFKNHAYELIPNKRYSYGAVYLIYGIWESARKLNVDYNNIELSDWLLFQHYEREVNGNVIRVYEDDSALITVYYYGGSKDRILVKAKPNKCQVELLRKIIESGEKYMPKLIIRDYGVRNAKLYVRGEIHVAVSYDFYLKYMKRCNEPKGGLIGGVDVNSDRINLAIIDEDGKLRDKKTFWFTEVTARGYPRSRAWSIIGMKVHKLLKYAYHHGVLSIALENPEVIGRLRLAWIRNGKRLHENYNWKVSTFRNRIIEMIAMKAPLYSIKTIYVDPKGTTHSKEHNKVMKKYGLDRHTASAYMMAQKYLEVIRNHLKHQHLGNSLHPLLKLLQQLILS

SEQ ID NO: 1238 - protein, 374 aa, unidentified
  REGION 1..374: note = Category: MG61 effectors
  REGION 1..374: note = Description: MG61-74 effector
  source 1..374: note = uncultivated organism sequence
MKQIEYITLRLPFHVTGGNAKLIYWTAWLCKICAHRLLNIIKENPLLADLSQYDFIKFSRRLCYDIIPNRRYIDGISTLLHASLQSAKALKVDITKLELKPWLLFQSEAEPWAKGNLNIQFIDYNKVRVLVFDKDKSSRKITMKPVIPKGYAKLTRSLVEKALRKEIGYPARIYITDYGGGLEHLYGEIQVMVKYDFYLEAMKRYDKPPGNNIAGIDVNVDRLNLVVINRSGDIVWRYTARFPQVTSRGYKRKRAWSIIGERIHEILRNAYSHGASVIAVENPEIIGYLRYYWIRNGERKTKNYNYKVSIFRNSIIERIMWKAALYGLQVITVNPKGTTHSNNHEYVMRKCGLDEHTASAYLIALRARRNLQRP

SEQ ID NO: 1239 - protein, 381 aa, unidentified
  REGION 1..381: note = Category: MG61 effectors
  REGION 1..381: note = Description: MG61-75 effector
  source 1..381: note = uncultivated organism sequence
MSLPEYLTVSVPFTAKDEDAKFIWITAWLSKLCAHRLLDDVKSNDVLIDLSQANFLKYARKRCYDILPNRRYVDGVATLIHSTLKSARKLGVNIKSIELKQWLMFQSEAEKEKKGNLNIRLVSIDKAEVLVFDHRKEPRKIVVELKTPKGYEKTLKTLIEKALSKEIGYPARVVIKEYNFYPNNLHLYCSLQVMIPYNLYLKTMRKYDKPLGSHVAGVDVNVDRLNLAIVDRYGRLRDVRTFWFREITSRGYKKKPAWTKIHQAIHDMLDYAYHHGVSVIALENPEVIGYLRYYWIRNGDRKSKNYNYKKSIFRNKIIETVTCKAPLYSLKTIYVNPRGTTHSKEHDEIMKRYGLDRHTASAYLIALRGIERHTMIQKATV

SEQ ID NO: 1240 - protein, 342 aa, unidentified
  REGION 1..342: note = Category: MG61 effectors
  REGION 1..342: note = Description: MG61-76 effector
  source 1..342: note = uncultivated organism sequence
MVAHRVLRIVRENPLYLQLSEARFLKNLRSACYDILPNKRYVDGVLKLVYSTLRSVQALKIDVKQIELKQWLLFQSDGEPYARGNLNIRLLEPWRVRVLTFGYDHSSEYVELEVVVPKGWRKLIEVLIEKASRKEVGYPARIYISDYGMGKNGLHIAGELQVMVPYRLYCEVMKRFDSPLSDLVAGIDVNVERLDVAVVSPNGKLKLVKTFWLDGAIHMGVRKKRAWSIIGEIIHKMLRWLYHSGVSTIYLENPEIIGYLRYYWVRNGERKGRKWNWKVSMFRNSIIERITWKAPLYALNVKYVDPRGTTRSREHDEIMKKFGLDRHLASAYLIALKGLELP

SEQ ID NO: 1241 - protein, 363 aa, unidentified
  REGION 1..363: note = Category: MG61 effectors
  REGION 1..363: note = Description: MG61-77 effector
  source 1..363: note = uncultivated organism sequence
MSYVTVTAGFNASSGEAELLLSTAWLFKLATHRVLSYAKPMPALPASKIAWKNTFRRIAYEVISNRRYADSATVLVMGIYESCRQLGVDFREVELGDWLMFQQSEKEYPPRNITLKYIDEAWVTVLGYDGRRERIKLKISVSGAFRRLLEAILGEKQPYNPRIVLKSWNTRGGKLYVKGELHLAIPLDFYYRHMKRFEGNYGKLYGGVDVNADRVNLAIVDERGRLRDSYTFWFREATARGYPKRRARSVIGMRVHEMLRYAYHHGVKTLFIENSDVLGKLKLLWIRNGRRLHKNYNWKVSIFRSSIIEMIALKSPLYSIRVGYVNPGGTTHSKEHDEIMRKYRLDRHTASAYLIALKGLKQP

SEQ ID NO: 1242 - protein, 365 aa, unidentified
  REGION 1..365: note = Category: MG61 effectors
  REGION 1..365: note = Description: MG61-78 effector
  source 1..365: note = uncultivated organism sequence
MDYITIKLPFNANDGVAGELLSTAWLFKTVAHRVLAVAKQMQVLPGTKVGWVNMFRQIAYGIIPNRRYADSAVTLVMGVYESCRSLGVDFRSVELSNWLMFQQSELEYPNRNITLKPNYEFHVTTIRYNGTTSRVVVKPTIPRNHKELLDAILTEHIKYMGRVVVRDYGVRGSQLWVHGEIQVTVPMDVYYEHMARHRRNAGKLIGGADVNTDRINLAIIDEDGELIDHKTFWFSETSRKGFSRHSAWSIIGMRIHELLDYAYRHGVKTLFLENPEILGRLKLMWAKSGDRGHENYNHKVMTFRSSIIEKIAMKAPLYGIEVKYVNPRGTTNSTEHDETMKKHGLDRHTASAYLTALRGLKHQQK

SEQ ID NO: 1243 - protein, 371 aa, unidentified
  REGION 1..371: note = Category: MG61 effectors
  REGION 1..371: note = Description: MG61-79 effector
  source 1..371: note = uncultivated organism sequence
MSYITLCLPFNIESSEAERLFSTAWLFKIASHRMLSLTKQFPILPATDIGWKNTFRKIIYEVIPNRRYTDGVIVLVRGVYESCRQLGVDFKEVELGDWLMFQQAEKEYPVRNITLKQGYEFYVTTIDYNGSSERIVIKPTIPKNYKLLLDRILEYRQKHTARVVIKDFGIRKDKLWIHGEAQLTIPLDFYYKYTVRFKRNYGKLYGGVDVNTDRINLTIVDKYGRLRDTKTFWFEDVSRKGYSKRKARVLIGMAVHEMLKYAYHHGVKTLFLENPEVLGKLKLLWIRNGRRLYKNYNWKVTTFRSSIVEMIAIKAPLYAIKVDYVSPRGTTNSKEHDKLMRKYSLDKHTVSAYLIALKGIKRYTMIQKATD

SEQ ID NO: 1244 - protein, 363 aa, unidentified
  REGION 1..363: note = Category: MG61 effectors
  REGION 1..363: note = Description: MG61-80 effector
  source 1..363: note = uncultivated organism sequence
MSSLKLSNVDKLMPHVTIIGKLVPGTSDDYMKLVRLAWSFRRAVELMIREVMNGASMKDVTKKLYQILPNYIYLESAYKHAKLIVEGCKFNNGVPGHIHIRKLFIVSRGNKYDKGNRNVKIIPNTKFFRVLIKYPWDSSWIECRALFDEKYIPLLRELLELAYQRKEGYSARIVFREGRIELHISEPLYLYLKHFSLPKRRGYGLVAGLDLNSDRINMVVIDSDGRIAAMKTAWFPELTLHGFPREKARDTRLKKLKELLSYARRIGVDYVAFENLFVVKKRSKVSSPSGNRKITRFAKKQILQHGLLMTLKLCLTPVLVDPKGTTHSREHKEVMKKRGLDRHMASAYLIAIKGLKVIRNHEK

SEQ ID NO: 1245 - protein, 381 aa, unidentified
  REGION 1..381: note = Category: MG61 effectors
  REGION 1..381: note = Description: MG61-81 effector
  source 1..381: note = uncultivated organism sequence
MSLPEYITIDIPFTATGEEAKLIWCTAWFSKLCAHRLLSDVKRNEVVIDLSQISFLKYARKRCYDILPNRRYIDGVATLIHSTLRSARKLGVNIKSIELRQWLLFQSEAEKEKKGNLNIRLTTINKAELLVINHKKEPKKIVIDLRIPKGYRKTLETLIKKALNREIGYPARVVIKEYNFYPNNLHLYCSLQVMIPYNLYLETMRRYDKPLGDHIAGIDVNVDRLNLAIVDKYGRLKDVKTFWFREITNRGYRRKPAWTKVHQAIHDMLDYAYNHGVSLVALENPKVIGYLRYYWIKNGDRKSRNYNYRKSIFRNKIIEAVTYKAPLYSLKTIYVNPRGTTKSREHDKVMRRYGLDRHTASAYLIALRGIKRHTMIQKAIT

SEQ ID NO: 1246 - protein, 312 aa, unidentified
  REGION 1..312: note = Category: MG61 effectors
  REGION 1..312: note = Description: MG61-82 effector
  source 1..312: note = uncultivated organism sequence
MVENPLYTIKLSFNASGDRAKKILSTAWLFKLACHRVLSRSKELLNALIPSKIAWVKMFYSNARDLIPNKRYAYGAVYLVYGIWESSRRLKVDYRCVELSDWLMFQHYDREVDGNVIKVLEDGSALVTTYSYDSSKDRVLVKTKPNKGYGELLKLVVESKEKYMPRVVVRGYNIRNGKPYVSGEIQVTIGYDFYLKHMTRYREPKGGLIGGVDVNTDRINLAVIDEKGNLRDCKTFWFSEAVTRGYPRRKAWSVIGMKIHEMLKYAYNRGVSIIALENPEVLSYLKLAWIRNGDRIHENYNYKKTIFRNSIT

SEQ ID NO: 1247 - protein, 371 aa, unidentified
  REGION 1..371: note = Category: MG61 effectors
  REGION 1..371: note = Description: MG61-83 effector
  source 1..371: note = uncultivated organism sequence
MSYITITAGFNASDNEAKMLLSTAWLFKLATHRVFSYAKATPILPASKVGWKNMFRKVAYKIIPNRRYADSIVILVMGIYESCRRLGIDFQVVELGYWLIFQQSEKEYPPRSITLKSVNEAWVTVFDYHGDTNRLRFRVSTSKKYKELLKALLAERQPYNPRIVLKQQNVRGGKLYVKGELHVSIPLDFYYRHMVRFKGSGGSLCGGVDVNADRINLAIVDRYGRLRDVRTFWFEEVSRKGCPGRRARAITGMRVHEMLKYAYHHGVKTLFLENPNDLGKLRLLWIRSGKRLHRNYNWKVSVFRSSVIEAIAVKAPLYSIRVIYVNPRGTTCSREHDKIMRIHGLDRHSASAYLIALKGIKRHTMIQKDII

SEQ ID NO: 1248 - protein, 363 aa, unidentified
  REGION 1..363: note = Category: MG61 effectors
  REGION 1..363: note = Description: MG61-84 effector
  source 1..363: note = uncultivated organism sequence
MSYVTLSLPFNIGGAEARRLLSTAWLFKIAAHRMLDMAKQTAALPATDIGWKNTFRKTVYGVIPNRRYTDGVIALVRGIYESCRRLGVDFRTVDLGDWLMFQQVEKEFPARNITLKRGYESWVTTIGYGGDSERVAIRPSVPKSYRLLLDRILEERQRYTARVAIRDYGVRKNMLWIRGEVQLTIPIDFYYRHMARFRKNYGRLYGGVDVNADRINLAIVDESGRLRDSYTFWFREVTARGYPRRRARSVIGMRIHEMLRYAYHHGVKTLFLENPDVLGKLKMMWIRNGRRLHRNYNWKVATFRSSVIEMIAMKAPLYAIRVRYVDPRGTTHSEKHDKIMKKHGLDRHTASAYLIALKGLELP

SEQ ID NO: 1249 - protein, 365 aa, unidentified
  REGION 1..365: note = Category: MG61 effectors
  REGION 1..365: note = Description: MG61-85 effector
  source 1..365: note = uncultivated organism sequence
MNYVTLVLPFNAGGDTTKRLLSTAWLFKTAVHRVLDVAKQSPVLPGTDIGWKSAFRSLAYSVIPNRRYADGAVTLVRSIYESCRQLGVDFKSVELSDRLMFQQSELEYPARNITLKPGYEVHVTTISYDRESYRDVIKLVAPKNYSTLLSKIIEERQEYSGRVVVKGYGVRDNTLWVRGEVQITIPVDFYYKHAARYREPKGDLVGGVDVNADRINLVVVDEKGNLRDYKTFWFEKTTARGYSRRRTWSVIGMRIHEMLEYAYRHGVSTIVLENPEVLSKLKLLWIRRGDRRHENYNYKVSIFRSSIIEMVALKAPLYGLEVEYVNPRGTTNSVEHDMLMKEHGLDKHTASAYLIALRALAHQST

SEQ ID NO: 1250 - protein, 358 aa, unidentified
  REGION 1..358: note = Category: MG61 effectors
  REGION 1..358: note = Description: MG61-86 effector
  source 1..358: note = uncultivated organism sequence
MYVSQYQTSDIVDASGLVTHVTIIGKLVPLTSVDYMKLVRLAHDFRRAVQVATRMIARGVSVNDILREVRSMLNKAYGDSAYRVAKAIVEGCRFHNCDPRRIEVMKLFIVSVGDASRLGNRNVRLESTDTVRIKYPYDGSWLTFRACFGEEYLPLVRELVELARQRKISYGARVVFRGGRVYLHLSIPTWLYLRHFSRGVARGSLIAGFDLNSDRVNMVIIDGFGRIRDMRTEWFPEVTSHGYPRSKARARRLEALARLLRYAYHHGVGTVVFENLLVIKRRRYTRSGTANRKITRFAKRELLQHGVIIAMKYGFKVLLVDPKGTTNSREHDEVMRKYGLDRHMASAYLIATKALKQQ

SEQ ID NO: 1251 - protein, 376 aa, unidentified
  REGION 1..376: note = Category: MG61 effectors
  REGION 1..376: note = Description: MG61-87 effector
  source 1..376: note = uncultivated organism sequence
MSKSVAEYITLRLPFHVTGVDAKLIYWTAWLCKLCAHGLLEAIKLNPSLAYLSQYDFIKVGRRLCYDIIPNRRYVDGISTLIHASLQSAKALKVDITKLEPKHWLLFQSEAEPWAKGNLNIQFVDYDKVKVLVFDRDKSSRRIIIEPVIPKGYIRLVKALVDKALKKEIGYPARIYITDYGERLEHLYGEIQVMVKYNFYLEVMKRYDKPLGDNIAGVDVNVDRLNLVVINRDGDIVWKHTVRFPQITSRGCPRKRAWSIIGEAIHSILRNAYSHGASVVAVENPEVLGYLRYYWIKNGDRGTKNYNYRISIFRNSIIERIVWKAPLYGLHVVTVNPKGTTHSKDHEYVMRRYGLDRHTASAYLIALKTRRNLQRP

SEQ ID NO: 1252 - protein, 364 aa, unidentified
  REGION 1..364: note = Category: MG61 effectors
  REGION 1..364: note = Description: MG61-88 effector
  source 1..364: note = uncultivated organism sequence
MNEQPLYTVKLTFNTSGKKARMLLSTAWLFRIACHRVLSRSKQLKNMLVSSKIAWIKIFKNYAYEVIPNKRYSYGAVYLVYGIWESARELGVDYSSVELSDWLMFQHYEREVDGNVIRALEGGSTLITVYGYDGSKDRILVRAKPNKGQIELLGKVVKLKEKYMPKVVILDYGVRNNKLYVRGEIHITISYDFYLKHARRYDESKGNLIGGVDVNTDRINLAIVDRDGRLKDVKTFWFPEVTARGYPRRRAWSVIGEKVHELLKYAYHHGVSTIVLENPEVIGRLRLAWIKNGERLHRNYNWKVSVFRNKIIKMIAMKAPIYGLCVSYVNPKNTTHSKEHDDIMTKYGLDRHTASAYIIALKSI

SEQ ID NO: 1253 - protein, 363 aa, unidentified
  REGION 1..363: note = Category: MG61 effectors
  REGION 1..363: note = Description: MG61-89 effector
  source 1..363: note = uncultivated organism sequence
MSYITIRLPFNVNGGVAGELLSTAWLFRIAAHRVLGITKQMQVLPGNKIGWVSMFRKVAYGVIPNERYADGVITLVMSIYESCRALDVDFRGVELSDWLMFQQSSLEYPSRNITLKPNHEFHITTIRYDGSIGRIVVRPTIPRNYKGLLDVVLAGRVRYMGRVVVRDYGVRNSRLWVHGEIHMTVPLDIYYEHMVRHKKNSGKLIGGIDVNTDRLNLAIIDERGDLRDYKTFWFSETSRKGFSRRRAWSIIGMRIHEMLDYAYHHGVKTLFLENPEVLGRLKLMWIRNGNRGHENYNHKVAIFRSSIIERIALKAPLYGIETKYVNPRGTTNSVEHDELMRKHGLDRHTTSAHLIALRGLKHQ

SEQ ID NO: 1254 - protein, 356 aa, unidentified
  REGION 1..356: note = Category: MG61 effectors
  REGION 1..356: note = Description: MG61-90 effector
  source 1..356: note = uncultivated organism sequence
MELPESVTIVGRIEFPDKKSYLELGKLCYLFKKNLQKAVKMYARGIRRDIIIKVVTKELNLGYADTIYKLARFIVEGCMFNNGEPFKIRIRKVFLASRGFSSNKGNRNIRLISTSEVLVRTPDRKWIKLYVKFGKKYLPLVKELVDLALKKKISYFARIVFRDGKAYLHISIPIQLYLKHFRLGLARGKLIAGFDINSDRINMVVIDENGCIRDVKNKHFPEVVSHGFPSNKARYLRLNAIAELLDYAHHHGVKYICFENLDVIKKKKFTKNKKANRKISKFAKREILTHAVIRALRYGFRILFVNPKGSSKEARKIHKKLGLDIHTASAYIIAIRGLKILKENESVENNEKIKLW

SEQ ID NO: 1255 - protein, 370 aa, unidentified
  REGION 1..370: note = Category: MG61 effectors
  REGION 1..370: note = Description: MG61-91 effector
  source 1..370: note = uncultivated organism sequence
MSYVTLVLPFNAGGDVAKRLLSTAWFFKIAVHRVFGAAKQSPALPGTDIGWKSTFRSLAYNVIPNRRYADGAVVLVRGIYESCRQLGVDFKSVELSDWLMFQQSELEYPARNITLKPGYEVHVTTISYDRESYRDAIKPSIPKRLAALLSKILEERQEYTSRVVVKGYGVRGNTLWVHGEVQITIPVDFCYKYMARYKEHKGSLIGGVDVNVDRINLAIVDEEGNLRDHKTLWFAEAVARGYPRRRARSIIGMRVHEMLEYAYHHGVSTIALENPEVLGRLKLLWVWVKRGDRKHENYNYKKSVFKSSVIEMITLKAPLYGIKVKYVNPRGTTNSTEHDKFMKEHGLDRHTASAYLIALRGLAHQIKQMK

SEQ ID NO: 1256 - protein, 371 aa, unidentified
  REGION 1..371: note = Category: MG61 effectors
  REGION 1..371: note = Description: MG61-92 effector
  source 1..371: note = uncultivated organism sequence
MSYMTLTLPFNVGGVEARKLLSTAWLFKTATHRMLYLARQSPILPATDIGWKNTFRKTIYEAIPNRRYVDGVITIVRGIYESCRQLGVGFKEVELGDWLMFQQSEKEYPVRNITLKDDYSFHITTIGYRGEKDRIIIKPSIPKNYRLLLDRILEEKEKHTARVVVKDYGVRKNKIWVHGEIQLTIPIDFYYMHMSRYKRNYGRLYGGVDVNVDRINLAIVDRYGRLRDVKTFWFEEASRKGYPRRRARSIIGMRIHEMLRYAYHHGVKTVFLENPNVLGRLKLFWINNGKRLHRNYNWKVSIFRSRIIEIIGMKTPLYATKTEYIGPRGTTKSKEHDEITRRYGLDRHSASAYIIALRGIKRPDLIQKATI

SEQ ID NO: 1257 - protein, 377 aa, unidentified
  REGION 1..377: note = Category: MG61 effectors
  REGION 1..377: note = Description: MG61-93 effector
  source 1..377: note = uncultivated organism sequence
MAGEVREPEVTHVTVTGRITPLNSEDHVKLCYLAYRFRKNLVRAVKMYARGVDKQVIVKEITRELNLGYADTIYKMAKLIVEGARGNGSKPLKIKVRKLFIASRGFSANKGNRNIRLESTNTLYVNIPREGWVKFKVSFGEKYIPLVKELIELAKSRKYSYGARIVFRNGRIYLHLSVPVELYLKYFGKGEARGSLIAGFDLNSDRVNMVIVDKSGVIRDARTEWFPEVTSHGFPRNRAKVARLQALSKLIEYAYHHGVGVAVFEDLDRIKRRRFTCSPVANRKMSWFPKRKLLGHGVVMALKHGFNVYLVDPSYTSVVGGYLSRELGLDKHTASAYMLTAKYLGLDLKSLKVTQITRKPKTKQHTDSPRLLYLAVI

SEQ ID NO: 1258 - protein, 373 aa, unidentified
  REGION 1..373: note = Category: MG61 effectors
  REGION 1..373: note = Description: MG61-94 effector
  source 1..373: note = uncultivated organism sequence
MNETYLTLRLPFNACDVEAGMLLSTARLFRQVVLHLHNLFLKENLRITSLIALKRMYRKRLQEILPNRRYVDGAITLVYSIYESAQALGVPFSDIEFKNWLLFQQSEKEYPCRNVTLQRDYSFRVTTISYQGESKRTSLKPTVPKNYKQILDKIIEKKQPYVARIVLRGFGERKNMLWIHGEIHLSIPYKFYLEHFSKFKRNYGKHFGGVDVNVDRINLAIVDKYGRLRNVKTFWFEEASWKGCPRQRAWSIIGMAIHNMLRYAYYHGVNTLFLENPKVLGYLKILWIRKGKRKNRNYNYRVQIFRSSVAEKIAMKAPLYTINIEYIDPKGTTHSKEHDEIMRRYGLDKHTVSAYLIALRGIERRIMIQKAIV

SEQ ID NO: 1259 - protein, 365 aa, unidentified
  REGION 1..365: note = Category: MG61 effectors
  REGION 1..365: note = Description: MG61-95 effector
  source 1..365: note = uncultivated organism sequence
MAGEIREPKLTHVTVVGRVIPLDSESYMHLVLLAYKFRKVLIKATKMYAKGINRITIVKEVTKELNLRYADTIYKLAKLIVEGAKCNNSNPLKVKIRKLFIASRGFTVNKGNRNIRLLSSNELEINILWKGWIRFKVLFGRKYIPLVNELVKKALAKKLSYTAKIAFKNGNVYLHVSVPIELYLKYFSKGKAEGKLIAGFDLNSDRINMVIVDKYGIIRDVKTEWFPEVTSHGFPRNKAHTLRLQALAKLLDYAYHCSVEVVVFEDLERIKKRRFTMSRTANRKITRFPKRKLLKHAVVMAMKYGFKVHLVNPANTSKLGEKIGEKLGLDKHTASAYILTLKYLGVANLISCNPSSQRNQTTINY

SEQ ID NO: 1260 - protein, 387 aa, unidentified
  REGION 1..387: note = Category: MG61 effectors
  REGION 1..387: note = Description: MG61-96 effector
  source 1..387: note = uncultivated organism sequence
MLSRYISLLGYTPMKLIEYITLRLPFHVINEEARLIYLTAWLCKLCAHRLLNYVKENPLLANLSQYDFIKLGRKLCYDIIPNRRYVDGITTIVQASLQSAKALGADITKLELKPWLLFQSEAEPWAKGNLNIQFTSYNTVRVLVFEKDKSTRKITIKPVISKVYAKLIHALIDRALRKEIGYPARIYITNYGHKLEHLYGEIQIMVKYDFYLEVMRRYEKSLGNNIAGIDVNVDRLNLTVINRDGDIVWKYTVKFPQITSRGYRRKRAWSIIGEAIHSILKNAYSHGASILAVENPKIIGYLRYYWIRNGERGTKNYNYKVAIFRNSIIERIIWKAPLYGLQVATVNPKGTTHSEDHEYVMRRYGLDRHTASAYLIALKARRNLQRP

SEQ ID NO: 1261 - protein, 355 aa, unidentified
  REGION 1..355: note = Category: MG61 effectors
  REGION 1..355: note = Description: MG61-97 effector
  source 1..355: note = uncultivated organism sequence
MSRCQTSSIIDASSIVNYVTIIGRIYSASSEDYMHLVRLARDFRRAVQVATRMIARGLEENSVLRELRRMLNKAYADSAYKAAKTMVEGCIFNGGNPLHIEVKKPFIVSEGESSRLGNRNVRLEDTCLVKVKYPHDGSWITLRAEFGEKHLPLLRELVDLAKQKKLSYTARIVFKEGDIYLHISIPIQLYLKYFKEGEARGQLIAGFDLNSDRVNLVIIDEHGEIVDARTAWFPETTSHGFPREKAKALRLNALARLLKYCYRHGVSIVVFEDLLSVKRKRFTRSRTANRKITRFAKKQLIQHGVVMALKYGFKVLLVDPKGSTNSREHDELMRKYRLDRHTASAYLIALRGLKH

SEQ ID NO: 1262 - protein, 376 aa, unidentified
  REGION 1..376: note = Category: MG61 effectors
  REGION 1..376: note = Description: MG61-98 effector
  source 1..376: note = uncultivated organism sequence
MSYVTVVLPFNATGDVAGRLLSTTWLFRIATHRVLSLAKSTPALPGSDIGWKSVFRREAYSVIPNRRYADGVVALVRGIYESCRALGVSFRDAELGDWLMFQQSEREYPARNITLKAGYEFHVTVVGYDGSTGRVTVEPTVPKSYRVLLDGVLREKPKYCARVMVKGFGERKSDLWLNGEIHLTLPLELYHRCMAKDTPATGSNVAGVDVNVDRLNVAIVDTSGRLRDTTTFWFREVTSRGYPRRRARCVIGMSVHRMLKYLASHGVGMVVLENPEVIGYLRYCWVRSGERGSRNYNYKVAVFRSSIIEMIALKATLYGLKSVYVDPRGTSSSQEHRFVMEKHGLDRHTASAYLIALKHLQDEKIMNNRKAHEQHK

SEQ ID NO: 1263 - protein, 372 aa, unidentified
  REGION 1..372: note = Category: MG61 effectors
  REGION 1..372: note = Description: MG61-99 effector
  source 1..372: note = uncultivated organism sequence
MNYITITTGFNASDEEARLLLSTAWLFKIATHRVLSYAKSMPLLPTSKIAWKNTFRGVTYEVIPNRRYADSATILVMVVYESCRQLGVSFRDVELGDWLMFQQSEKEYPARNITIKNIDEAWVTVLGYGDRSRRIKLGIKSSKKACRKLIEAMLREKQEYNPRVYIRSWNVRGGKLFVRGELQVAIPIDFYYKHMVRFRENRGRLYGGVDVNIDRINLAIVDEGGRLRDVKTFWFEEASRKRCSRHRARSAIGMAIHSMLGYAYHHGVKTLFLENPDVLGKLKLLWIRGGKRKHENYNWKVMIFRSSVIEMIAMKVPLYTINVAYVDPKGTTHSEEHSEFMRRYGLDKHLASAYLIALRGIKRFNLIQKATE

SEQ ID NO: 1264 - protein, 363 aa, unidentified
  REGION 1..363: note = Category: MG61 effectors
  REGION 1..363: note = Description: MG61-100 effector
  source 1..363: note = uncultivated organism sequence
MSTLRLSSVEELIPHVTVIGKLLPETPEDYMKLVRLAWSFRKAVELMIREVVNGASMKDATKKLYQMLPNYIYLESAYKHAKFIVEGCKFNNGNPRHIHVKKLFIISRGNKYDKGNRNIKMIPSTKFFQVFIKYPWDSSWIKCRAFFGERYISLLRELLELANQKKEGYGTRIVLREGRIELHVSVPLFLYLKHFSLPERRGYGLVAGLDLNSDRINMVIIDPSGRIVAMKTAWFPEVTLHGFPRDKARDIRLKKLKELLSYARRIGVDYIVFENLFEVKKRSRVRSPSGNRKITRFAKKQLLQHGLLMSLKLGLTPILVDPKGTTHSQEHEEVMKKRGLDRHMASAYIIACKGLKVIKNHEK

SEQ ID NO: 1265 - protein, 379 aa, unidentified
  REGION 1..379: note = Category: MG61 effectors
  REGION 1..379: note = Description: MG61-101 effector
  source 1..379: note = uncultivated organism sequence
MSAVEYATVRLPFHATGDNARLIYWTAWLCKLCAHKLLDKVKENPQLADLSQYYFIKIGKELCYDIIPNRRYVYGISILIHASLQSAKALRVDITKLELKPWLLFQSEAEPLAKGNLNIQFTDHDRVKVLVFDKDGASKKITIKPVIPKSYAKLIKTLVDRAHRKEIGYPARVYIMNYGDGLEHLYGEVQVMVKYNFYLEVMKKYDKPLGNNIAGVDVNVDRLNLVVINRDGDIVWKYTARFPQVTARGYPRKKAWSVIGEAIHAVLRNAYSHGASVIAVENPEIMGYLKYYWIRSGDRRSRNYNYKVSIFRNSVIERIIWKASLYGLKAVPVSPKGTTHSEDHDYLMRKYGLDCHTTSAYLIALKARRNLRTSFSARL

SEQ ID NO: 1266 - protein, 363 aa, unidentified
  REGION 1..363: note = Category: MG61 effectors
  REGION 1..363: note = Description: MG61-102 effector
  source 1..363: note = uncultivated organism sequence
MTYITIALPFNVCCNVAKRFLSTAWLFKIATHRLLSIAKQSPVLPGTDIGWKSTFRRIAYEVIPNRRYADGVVVLVRSIYESCRQLKVDFKSVELSDWLMFQQSELEYPARNITLKPGYEFHVTTIDYHKNTYRDVVKLTVPKSYRLLLDKVLKERQVYAGRTVIKSYGTEGGNLWVQGEVQTTIPIDFYYKHMPRVRANNGKLYAGVDVNVDRVNLAIVDGEGRLRDTYTFWFEEASRKGCKRRRARSIIGMGVHEMLKYAYSHGVKVLFLENPEVLGKLKLLWVRSNDRRHENYNYKVSVFRSSIIEMIALKAPLYSIEVKYIDPRGTTSSREHDEIMKKHRLDRHVASAYLITLKGLKHQ

SEQ ID NO: 1267 - protein, 361 aa, unidentified
  REGION 1..361: note = Category: MG61 effectors
  REGION 1..361: note = Description: MG61-103 effector
  source 1..361: note = uncultivated organism sequence
MLQSQTSNVVDAFTVVNYVTITGKLHPVSGEDYMRLVRLAWDFKNAVRITTRMIAKGVRRNNILKELRGMLNKAYADSAYKLAKAMVEGCLFNGCNPLHIEVRKPFIISEGESSRLGNRNVRLEDTNIVKVKYPYDGSWITLRAEFGERYLPLLRELVELARQRKVSYGARIVFREGNIYLHLSIPIELYLKYFKRGEAKGGLVAGFDLNSDRVNLVIIDRYGRIVDTRTAWFTEVNSHGFSRNRTRALRLRALAKLLKYCYTHNVGVVVFENLLLIKRRRYTRSKTGNRKITLFAKRQLIQYGVVMALKYGFKTLFTNPRGTTNSKEHGEIMKKLGLDRHTASAYLIALRGLETLNENYK

SEQ ID NO: 1268 - protein, 388 aa, unidentified
  REGION 1..388: note = Category: MG61 effectors
  REGION 1..388: note = Description: MG61-104 effector
  source 1..388: note = uncultivated organism sequence
MNPTPKIIADKETIEQFMYITINGRLTPKSNEDYMKLCLLAYRFRQAVKHGINLVLRGVQQKEAYKELAKLLPSSIYGETAYKYAKLLVESAKEQVDDEIVVNKITIMRKWIASRGGVSWRGNLNVRLTSPDTAEILVFNHRKESRKITVNLRTPKRYKKLLERLIEKASNREVGYPARVVIKEYNFYQGNLHLYCGLQVVVPYYLYLETMRRYDKPLGNHVGGVDVNVDRINLAIVDKYGRLRDTRTFWFRETISRGYKKRRAWTKIYQAIHELLQYAYHHGTSTIALENPKIIGYLRYYWIRDGDRKTKNYNYKKSIFRNKIIDTITCKAPLYSLKTIYVNPKGTTHSKAHGEVMKRYGLDRHTASAYLIALKAIKRHATTQKAII

SEQ ID NO: 1269 - protein, 364 aa, unidentified
  REGION 1..364: note = Category: MG61 effectors
  REGION 1..364: note = Description: MG61-105 effector
  source 1..364: note = uncultivated organism sequence
MNGQPLYTVKLSFNISSEKAKKILSTVWLFKIACHRILSKSKEIKDMLVSSKVAWIKMFKNHAYEIIPNKRYSYGVVYLVYGIWESARRLRINYDDVELSDWLFIQHYEREVNGNVIRVYEDGSVLVTTYGYDGSKDRILVKAKPNKGQAELLNSIVESKEKYMPKLIIRDYGVRDDKLYVRGEVHISISYDFYLKHVKRYNEPKGSLIGGVDVNTDRINLAIIDEDGKLRDVKTFWFREVTARGYPRRRAWSIIGMRVHELLKYAYHHGVSTIVLENPEVIGRMRLAWIRNGKRLHRNYNWRVTIFRNRIIEMITMKAPIYGLRVNYVNPKGTTHSREHDDIMMRYGLDRHTASAYLIALKSI

SEQ ID NO: 1270 - protein, 373 aa, unidentified
  REGION 1..373: note = Category: MG61 effectors
  REGION 1..373: note = Description: MG61-106 effector
  source 1..373: note = uncultivated organism sequence
MNETYLTLRLPFNACDAEARMLLSTARLFRHVVLHLHSLILGENPRITSLIALKKMYRRRLQEILPNRRYVDGAITLVYSIYESAQALGVPFNDIEFKNWLLFQQAEKEYPCRNVTLQRDYSFRITTISYQGESRRIPLKPTISRSYRRVLGKIIEERQPYVARVVLRGYGERGNVLWVHGEIHLSIPYKFYLEHFKRYRGNHGALYGGVDVNVDRANLAVVDRYGRLRDVRTFWFEEASWKGCPRQRAWSIIGMAIHDMLRYAYHHGVKVLFLENPETLGYLKTLWVRKGERRSNNYNYRVQVFRNRVVERIALKASLYSIGVKYVDPRGTTRSEEHDELMRRHGLDRHTASAYLIALRGMERYTTIQKATV

SEQ ID NO: 1271 - protein, 356 aa, unidentified
  REGION 1..356: note = Category: MG61 effectors
  REGION 1..356: note = Description: MG61-107 effector
  source 1..356: note = uncultivated organism sequence
MAREVREPEITHVTITGRILPLDNDSYMELILLAYRFRKALIRAIKMYAKGLDRNTIVKEITKELNLGYADTIYKLAKLIAEGAKHNGSNPLRVRIGKLFIVSRGFSSNKGNRNIRLLSTNELQVNIPWKGLLRFKVAFGERYISLVSELVKKALSRKLSYTAKIVFRNGMVYLHVSVPIKLYLKHFSKGRAKGSLVAGFDLNSDRINMVIVDKLGIIRDVKTEWFPEVTSHGFPRNKAHTLRLQSLAKLLNYAYHHGVGVVLFEDLDRIKKRRYTRSRTANRKITRFPKRKLLEHSIVTALKNGFKVYLVNPAYTSKLGEKLGTELGLDKHIASAYVLVLKYLGVSEIPLSISSS

SEQ ID NO: 1272 - protein, 286 aa, unidentified
  REGION 1..286: note = Category: MG61 effectors
  REGION 1..286: note = Description: MG61-108 effector
  source 1..286: note = uncultivated organism sequence
MAREVRKPEITHVTITGRVIPLNNDSYMELVLLAYRFRRTLIKAIKMTTKGLGKNTIVKEVTKELNLGYADTIYKLAKLIVEGAKSNGSNPLRVKLRRLFIASGGFTANKGNRNIRLLSSSELQVNIPWKGWVKFKVVSGKRCIPLVNELVEKALSKKLSYTAKIVFRNGKVYLHISIPIELYLKYFSKGRAKGKLIAGFDLNSDRVNMVVVNRQGIIRGTKTEWFPEVTSHGFPRNKANTIRLQALAKLLDYAYHHGVGVALFEDLDRIKKRRYTRSKTANRKIT

SEQ ID NO: 1273 - protein, 374 aa, unidentified
  REGION 1..374: note = Category: MG61 effectors
  REGION 1..374: note = Description: MG61-109 effector
  source 1..374: note = uncultivated organism sequence
MKKVKYITLRLPFHITGVYARLVYWTAWLCKLCAHRLLYHVKQNPLLADLSQYDFIKLGRKLCYDIIPNRRYVDGISTIIHASLQSAKVLGVDVAKLELKPWLLFQSEAEPWAKGNLNIQFTSYNTVRVLVFEKDKSTRKITIKPVIPKGYARLIRTLVDKALRKQIGYPTRIYITDYGDKLEHLYGEIQVMVKYDFYLEVMKRYEKPLGNNIAGVDVNVDRLNLVVINRNGDIVWRYTARFPQASSRGYPRKSAWSVIGEAIHSNLNNAYSHGASVIAVENPKIIGYLRYYWIKNGNRKSENYNYKVTIFRSSIIERIIWKAPLYGLQVVTINPRGTTHSEDHEYVMRRYGLDKHTASAYLIALRARRNLQRP

SEQ ID NO: 1274 - protein, 363 aa, unidentified
  REGION 1..363: note = Category: MG61 effectors
  REGION 1..363: note = Description: MG61-110 effector
  source 1..363: note = uncultivated organism sequence
MSYITMCLSFNVSDNVARRLISTAWLFKTASHRMLSIAKQTSALPTTDIGWKDAFRKVIYEVMPNRSYVDGVIVLVRGIYESCRQLGVNFKEVELGNWLMFQQTEKEYPVRNITLKRGYEFYITTLDYDGNSERIVIKPTTLKNYKLLLDKILEESQKHTARVVVKDYGIRKGKLWVHGEIQLTIPLNFYYKYMTRYKRNYGKLYGGVDVNSDRINLAIVDKEGNLRDTYTFWFREVTARSYPRRKARTIIGMRIHEMLKYAYHHGVKTLFLENSEVLGRLKLMWMRNGKRLNRNYNWRVTTFRSSIIEMIAMKASLYAIRVMYVNPKGTTSSEKHDGIMRKYRLDKHTASAYLITLKGLDLL

SEQ ID NO: 1275 - protein, 366 aa, unidentified
  REGION 1..366: note = Category: MG61 effectors
  REGION 1..366: note = Description: MG61-111 effector
  source 1..366: note = uncultivated organism sequence
MSYVTITAGFNAFGENAKLLLSTAWLFKLASHRVLSYAKSMPILPASKIGWKNMFRKVAYDVIPNRRYADSTIVLVMGVYESCRQLGVNFKDVELGDWLMFQQSEKEYPPRNITLRDVSEAWVTVFGYDGESRRISLKVSTSGIFRKLLEAVLREKQPYNPRIVLRTWNVRGGKLYVRGELHVSIPIDFYYRHMTRFKRNNGRLYGGVDVNTDRINLAIVDRYGRLRDAKTFWFEDTARKGYPRRKARALIGMAVHEMLRYAYHHGVKTLFLENPEVLGKLRLLWIRNGKRLHRNHNWKVAVFRSSIIEMVAMKAPLYSINTEYIDPKGTTHSKEHDEVMRKHGLDRHTTSAYLIALKGIKRYRMI

SEQ ID NO: 1276 - protein, 355 aa, unidentified
  REGION 1..355: note = Category: MG61 effectors
  REGION 1..355: note = Description: MG61-112 effector
  source 1..355: note = uncultivated organism sequence
MSRYQTSSIVDASSIVNYVTIIGRVYPVSSEDYMRLVRLAWDFRRAVQVTTRMIARGLEENSVLRELRRVLNKAYADSAYKAAKAMVEGCVFNDGNSLNIEVKKPFIVSEGESSRLGNRNVRLEDTCLVKVKYPYNGSWITLQAEFGEKYLSLLRELVDLAKQKKLSYTARIVFREGDIYLHLSILIQLYLKYFKEREARGRLIAGFDLNSDRVNLVIIDEHGEIVDVRTAWFPEATSHGFPREKAKVLRLDALARLLKYCHRHGVSVVVFENLLSVKRKRFTRSKKANRKINRFAKKQLIQHGVVMALKYGLRALLVDPKGTTNSREHGELMKKYGLDRHTASAYLIALRGLRH

SEQ ID NO: 1277 - protein, 356 aa, unidentified
  REGION 1..356: note = Category: MG61 effectors
  REGION 1..356: note = Description: MG61-113 effector
  source 1..356: note = uncultivated organism sequence
MSQSRTSSVVDATTLIEYATIVGRLIPASGEDHMKLARLAWEFRRAVQVATKMIAKGEEANIILKELRKILNKAYADSAFKQAKAIVKGCLATGGDPRRIEVTKLFIISEGETSRNGNRNVRLEDTSLVKVKYPYDGSWIQLEAKFGEKYLPLLRELVELAKQRKVSYNARIVFRRGRIYIHVSVPIYLYLKHFEKGEARGELIAGFDLNSDRINLAIIDRYGGLVDAKTAWFTEVVSHGFPRNKAKALRLRALAKLLKYCYTHGVGIVVFENLYVVKKHRYTKSRNGNRRISKFAKRELLEHAIVMSLKYGFKVLLVDPKGTTNSKEHDEAMKRHGLDRHTASAYLIALRGLNPS

SEQ ID NO: 1278 - protein, 374 aa, unidentified
  REGION 1..374: note = Category: MG61 effectors
  REGION 1..374: note = Description: MG61-114 effector
  source 1..374: note = uncultivated organism sequence
MDRVEYITLRLPFHATGEDARLVYWTAWLCKQCAHRLLERVRQNPLLADLSQYDFIKIGRKLCYDIVPNRRYIDGISTLIHASLQSAKALKIDITKLELKPWLLFQSEAEPWAKGNLNIQFTKDKTARILVFDRDKSSRKIIVKPLISKCYTKLVHALIGKAFRKEIGYPARVYVKDYGDRLEHLYGEVQVMVKYDFYLEVMRRYDNPLGNNIGGIDVNVDRINLVVINRDGDIVWKYTARFPQVTSRGYPRKRVWSIIGEAIHRVLENAYSHGASVIAVENPRVIGYLRYYWIRNGERKNKNYNYKVAIFRNNIIERIMWKTPLYGLQAIPVSPRGTTHSETHEYVMRRYGLDKHTASAYLIALKARRNLQRP

SEQ ID NO: 1279 - protein, 376 aa, unidentified
  REGION 1..376: note = Category: MG61 effectors
  REGION 1..376: note = Description: MG61-115 effector
  source 1..376: note = uncultivated organism sequence
MDLDYVTISLPFHATGDVAKSIYWTAWLSKACAHRVLEHVKANLVLAKLSEYDFIKFTRELCYSLLPNRRYVDGVATLVYSSLQSVRKLKVDVSRVELKPWLLFQSEGEPWAKGNLNIQFTDYETVKVLVFKASGGSERVVVKPVVSKRYNRLLKELVDRAMRKEIGYPARVYIRSYSGDLEHLYGELQINVKHSLYLEIMKRFDKPLGSNVAGIDVNTDRLNLVVVNKDGEVVWMHTVRFPQILARGFPRKRAWSIIGEKIHEVLKHAYHHGASAVALENPGVIGYLRYYWVRNGERGGRNYNYKVAVFRSSIIERILWKAPLYGLKIVYVDPKGTTSSREHAETMKKHRLNKHTASAYLIASRALNILERPTKT

SEQ ID NO: 1280 - protein, 373 aa, unidentified
  REGION 1..373: note = Category: MG61 effectors
  REGION 1..373: note = Description: MG61-116 effector
  source 1..373: note = uncultivated organism sequence
MTKAYLSMRLPFNACHDGARLLLSTARLFRHCVLYLHQLILSERPHVVSSIALKRMYRHRLQRILPNRRYVDGAIILMYSIYESAQALGVSLNDIEFKSWLMLQQSEKEYPCRSITLQHDHSFEVTTISYQGESRRIVLRPTVPKHYGRVLDKILEEGQPYVARVVLKGYGERRGVLWTHGEIHLLIPYGFYLEHFTRYRENHGKLYGGVDVNVDRINLAIIDGYGRLRDAKTLWFEEAARRACSRRRAWSIISMAIHDMLKYAYHHGVKRLFLESPEVLGRLKTLWMKKGERGNENYNHRVQIFRSRIVERVALKAPLYAIDAEYVNPRGTTHFEEHDEAMRRYGLDRHAASAYLIALRGIERYATTQKAIV

SEQ ID NO: 1281 - protein, 379 aa, unidentified
  REGION 1..379: note = Category: MG61 effectors
  REGION 1..379: note = Description: MG61-117 effector
  source 1..379: note = uncultivated organism sequence
MGYTPMKLVEYITLRLPFHVINEEARLIYWTAWLCKLCAHRLLNYVKENPLLANLSQYDFIKLGRKLCYDIIPNRRYVDGISTIVQASLQSAKALGADISKLELKPWLLFQSEAEPWAKGNLNIQFTSYNTVRVLIFEKDKSTRKITIKLVIPKVYAKLIHALMDRALKKEIGYPARIYITNYGHKLEHLYGEIQIMVKYDFYLEVMRRYEKSLGNNIAGIDVNVDRLNLVVINRSGDIIWKHTVRFPQITSRGCRRKRAWSIIGEAIHKTLKNAYSHGASVIAVENPEVIGYLRYYWIKNGDRRSRNYNYKVSIFRNNIIERIIWKAPLYGLQATTVNPKGTTHSEDREYVMRRYGLDRHTASAYLIALKARRNLQRP

SEQ ID NO: 1282 - protein, 375 aa, unidentified
  REGION 1..375: note = Category: MG61 effectors
  REGION 1..375: note = Description: MG61-118 effector
  source 1..375: note = uncultivated organism sequence
MSYMTLCLSFNVDSIKAKQLLSTAWLFKTASHRMLSLAKQFPVLPASDIGWKNTFRKIIYEIIPNRRCTDGVIVLVRGIYESCRQLGIDFKEVELGDWLMFQQAEKEYPVRNITLRQDNEFHVTTIDYNGSVERIVIKPTIPKNYKLLLDKILEDKQKHTARIVVKDYGVRKNTLWVRGEIQLTIPLNFYCKYMVRFKKNYGRLYGGVDVNADRINLAIVDSEGKLRDTYTFRFPEVTARGYLRHRARTVIGMKIHEMLKYAYYHGVKKLFLENPEELDKLRLLWIRNGRRLHRNYNWKVSVFRSRVIEMIAMKSSLYSIGVKYVNPKGTSNSKEHSEIMKRFRLDKHTASAYLTALRGLNQQFISFNYQNIFRP

SEQ ID NO: 1283 - protein, 323 aa, unidentified
  REGION 1..323: note = Category: MG61 effectors
  REGION 1..323: note = Description: MG61-119 effector
  source 1..323: note = uncultivated organism sequence
MRLVRLAWDFRRAVQVVTRMIARGLEENSVLRELRRKLNKAYVDSAYKVAKTMVEGCIFNGGNPLNIEVKKLFIISEGESSRLGNRNVRLEDTCLVKVKYPHDGSWITLRAEFGERYLPLLRELVDLARQKKVSYTARVVFKGSNIYLHLSIPIQLYLKYFKKGEARGKLVAGFDLNSDRVNLVIIDEHGEIVDVRTAWFPEATSHGFPREKAKVLRLNALARLLEYCYRHGVSVVVFENLLLIKRRRFTRGKTANRKITQFAKKQLIQYGVVMALKYGFRVLLVDPKGATNSREHGEVTKRYRLDRHTASAYLIALRGLRHQ

SEQ ID NO: 1284 - protein, 371 aa, unidentified
  REGION 1..371: note = Category: MG61 effectors
  REGION 1..371: note = Description: MG61-120 effector
  source 1..371: note = uncultivated organism sequence
MTYITLCLPFNISDNEAGRMLSTAWLFKIASHKMLSLAKQFPILPATDIGWKNVFRKIIYEIIPNRRYTDGIIVLVRGIYEFCRQLGIDFKEVELGDWLMFQQTEKEYPVRNITLKQGYKFHVTTIDYNGNSERITVKPTIPKNYKLLLDKILEEKQKHTARVVIKDYGVRKNKLWVHGEIQLTIPLNFYYKYMVRYRRNYGRLYGGADVNVDRINLAIIDKYGRLRDVKTFWFEDVARRGYPRRKARILIGMAVHEMLRYAYHHGVKIMFLENPEVLGKLKLLWIRNGRRLHRNYNWKITVFRSSVIETISIKAPLYSINTEYIDPRGTTHSKEHDIVMKRYGLDRHTASAYLIALRGIEKYTKIQKAII

SEQ ID NO: 1285 - protein, 364 aa, unidentified
  REGION 1..364: note = Category: MG61 effectors
  REGION 1..364: note = Description: MG61-121 effector
  source 1..364: note = uncultivated organism sequence
MDGTPLYTLKLSFNVSGGKARRILSTTWLFKLACHRVLGRSKELQKSLIPSKIAWVRMFYGDARSFIPNKRYAFGAVYLVYGVWESSRKLGLDYGDVELSNWLMFQHYEREVDGNVIRIYDDGSTLITTYDYDGSKERILVKAKPNRGHVDILKLIVESREKYMPRVVVRGYNVRNGEFYVRGEIHVSVSYDFYLKHATRYREPRGSLVGGVDVNVDRINLAIVDKRGELRDYKTFWFPEVTARGYPERRAWSVIGMRVHEMLEYAYHHGVSTIALENPSVLGYLKLAWIRGNDRGHENYDYKKSIFRNSIIERIAIKTPLYGFNVKLVEPQGTTSSREHDEVMRRYGLDKHTASAYIIALRSI

SEQ ID NO: 1286 - protein, 357 aa, unidentified
  REGION 1..357: note = Category: MG61 effectors
  REGION 1..357: note = Description: MG61-122 effector
  source 1..357: note = uncultivated organism sequence
MDVPKYVTVCGRVIFDNNETYLELGKLCYLFRKNLQKAVKMYAKGLSKNIIVKTITKEMNLGYADTIYKLAKFIVKGCRANGGNPLRIRIKRMFLVSRGFSSNKGNRNIRLVSTREVLVRTLDKRWLKLGVKFGKKYLTLIEELVKLALQKRASYSARIIFRNGKAYLSVSVPIQLYLKYFKLGKAKGKLIAGLDINSDRINMVIIDDDGNIRDVKNEHFHEVTSQGFPRNKAKYIRLNAIARLLDYAYHHGVRYVCFENLDVIKKKKFTKSKKANRKITKFAKRQILSHAVIRAMRYGFKILFVNPKNSTKEAKKIHRKLGFDVHTASAYIIALRGLKILKNNGNFQNILTTQTSE

SEQ ID NO: 1287 - protein, 358 aa, unidentified
  REGION 1..358: note = Category: MG61 effectors
  REGION 1..358: note = Description: MG61-123 effector
  source 1..358: note = uncultivated organism sequence
MLRYQTSSAVDASSIVNYVAIVGRVYPASNEDYMRLVVLAWDFRRAVQVATRMIARGLEENSVLRELRRVLNKAYADSAFKVAKAMVEGCLFNGGNPLRIEVRRLFIASEGESSRLGNRNVRLEDTHLVKVRYPHDGSWITLRAEFGERYLPLLRELVDLARQKKLSYKAIVVFREGGIYLHLSVPIQLYLKYLKKGEARGQFIAGFDLNSDRVDLVIIDEHGRIVDTRTAWFPEATSHGFPREKAKVLRLNALARLLECCYRHGVGTVVFENLLLVKRRRFTGDRTGNRKIARFAKRQLIQHGVVMALKYGFRVLLVDPRGTSGSKEHDEIMKRFGLDKHVASAYLIALRGLRYQQI

SEQ ID NO: 1288 - protein, 373 aa, unidentified
  REGION 1..373: note = Category: MG61 effectors
  REGION 1..373: note = Description: MG61-124 effector
  source 1..373: note = uncultivated organism sequence
MSETYLTMRLPFNTCGYEAGLLLSTARLFRFTVLKLHSIILDENPRITSLIALKRMYRRRLQEILPNRRYVDGAITLLYSVYESAQALGVPFNNIEFRDWLMFQQGEKEYPCRNITLQHDHTFRVTTISYQGESNRITLKPTIPRSYEEVLNSILEKKHPYVARIVLRGFGERKNMLWVHGEIHLSIPYKFYLENFRKHKRNYGKLLGGVDVNVDRINLAIVDRYGKLRDTKTFWFEEASWKGCPRQRAWSVIGMAIHDMFKYAYHHGVKTFYLENPETLGYLKTLWIKKGERRNNNYNYRVQIFRNRIVERIAMKAPLYAINIEYVDPRGTTHSKELDEMMRKYGLDKHTASAYMIALRGIERHKMIQKAIN

SEQ ID NO: 1289 - protein, 375 aa, unidentified
  REGION 1..375: note = Category: MG61 effectors
  REGION 1..375: note = Description: MG61-125 effector
  source 1..375: note = uncultivated organism sequence
MELPKYITVSLDFHADGGYARSILSTAWLSKLVAHRVLKLVKESKTLANFSEYMFLKMLRSECYDTLPNRRYVDGILKLVYSTLKSAKALKINIRDIEMKQWLLFQSDGERGYARGNMNIRLIDTHHVRVLTVGYDKKTSYIELKLTVPKRWKKFIEVLINRAFTGQVGYPARVVVKDYGVGKYGLHVHGEVQVMVPYSLYLEVMKRYDKPRGSNTAGVDVNVERLDAVVIDRYGNLLSHRTFWLKNATFMGVRRKRSWSLIGEQIHTLLKWLYSQGVSVIGLENPEIIGYLRYYWIRNGERRGNKWNWKVSMFRNSIIEGIMWKAPLYSMKTVYVNPKNTSREGERIGKKQGLDRHLGSAYIIAKRALKNLQRP

SEQ ID NO: 1290 - protein, 382 aa, unidentified
  REGION 1..382: note = Category: MG61 effectors
  REGION 1..382: note = Description: MG61-126 effector
  source 1..382: note = uncultivated organism sequence
MSYITIVLPFNVVGDPSKRLLSTTWLFKIASHRLLNLVKQSPVLPVTDIGWKRTFRGVVYDVIPYRRYVDGVITLIMGIYESCRQLGVDFRDVELSDWLMFQQAEMEYPVRGITFKDGYEFHITTIGYDGESERVIVKPTIPRVYKLLLDKILEEKQRHTARVVIKDYGVREGKLWVHGEVQLTLPMDFYYKHMVRYVRNYGDLYGGVDVNSDRINLVIVDVEGRLRDTYTFWFREITTRGYPKRRARSVIGMRVHEMLRYAYHNGVKTLFLENPDILGKLRLLWVRNGRRLHENYNWKVATFRSSVIEMIAMKTPLYDIGVKFVNPRGTTHSKEHEEAMRRYRLDRHAASAYTIALKGLKNLDQNSYPHSFKDETFKCKRL

SEQ ID NO: 1291 - protein, 359 aa, unidentified
  REGION 1..359: note = Category: MG61 effectors
  REGION 1..359: note = Description: MG61-127 effector
  source 1..359: note = uncultivated organism sequence
MSQYQTSSTVVDASTLVEYATITGRLIPASSEDYMKLTRLAWSFKRAVQVATRMIAKGVDSNDVLKELRKMLNKAYADSAFKIAKAIVRGCITNGGDPLHVEVRKLFIVSEGESSRLGNRNVRFEDTNLVKVKYPYDGSWTQFRAKFGEKYLPLLRELVKLAKQKKASYNAKIVFRNTKIYLHLSVPIQLYLKYFKRGDALGEFIAGFDLNSDRVNLVIIDKYERIVDVKTEWFPEVTSPGFSREKARALRLRALAKLLKYCYTHGVGAVVFENLLDVKKRRFAKSKTANRKISRFAKRELLHYVIVMSLKYGFKVLLADPKGTTSSAEHGRFMMKHGLDRHTASAYLVALRGLTHQIT

SEQ ID NO: 1292 - protein, 364 aa, unidentified
  REGION 1..364: note = Category: MG61 effectors
  REGION 1..364: note = Description: MG61-128 effector
  source 1..364: note = uncultivated organism sequence
MFENPLYTIKLSFNASGDSAGKVLSTAWLFKLACHRVLSRSKELLNALIPSKIAWVKMFYNDARDLIPNKRYAYGAIYLVYGIWEGARELGIDYRSVELSGWLMFQHYDREVDGNVIRILEDGSALVTTYSYDGSKDRVLIKSKPNRGHGELLKLVVESKEKYMPRVVVRGYNVRSGKLYVSGEIHVTIDYSFYLKHAARYGEPKGSLIGGVDVNSDRINLAIVDEKGNLRDCKTFWFPEAVARGYPRRRAWSVIGMKIHEMLRYAYSHGVATIALENPEALGYLKLAWVRNGDRKHENYNYKKSVFRNSIIERVAMKAPLYGLNTKFVDPKGTTSSREHDEIMKRFGLDRHIASAYMIASRSI

SEQ ID NO: 1293 - protein, 360 aa, unidentified
  REGION 1..360: note = Category: MG61 effectors
  REGION 1..360: note = Description: MG61-129 effector
  source 1..360: note = uncultivated organism sequence
MSYITIQLPFNVSGKMAGELLSTAWLFRMAVHRVLDTARQQALPRSRIGWERAFHKVAYDVIPQSDYADGAVVLVMGAYKSCRVLGLDFKSVELSDWLLFQPSKLTRKVGSIALKPNYEFHVTTIGYDGSYDRVVLRPVVSGALGLILDSVLDYGVEYMGRIVVRDYGVRDGKLWVRGGVHLTVPLLAYYKIMARYLENNGGLQGGVDVNVDRINLAIIGEDGELIDHKTFWYREVTSRGFPRGRAWSIIGMRIHELLNYARNNGVRVLYLENPGIIGKLRLMWVRNGNRGHENYNYRVAVFRSTIVEKIAMKAPLYSISVGYVNPRGTSSSKAHDELMRKHGLDRHTASAYLIALMGTR

SEQ ID NO: 1294 - protein, 380 aa, unidentified
  REGION 1..380: note = Category: MG61 effectors
  REGION 1..380: note = Description: MG61-130 effector
  source 1..380: note = uncultivated organism sequence
MSYITICLPFNVSGDVARRLFSTAWLFKAASHRMLDLAKHFPILPATDIGWKNTFRKIIYEIIPNRRYTDGVIVLVRGIYESCRQLGVAFKDVELGDWLMFQQVEKEYPVRNITLKQGYEFHITTVDYNGNSDRVVIKPSIPKNYKLLLDGVLEEKQKHIARVVIKDYGVRKNRLWIHGEIQLTIPLDFYYKHMTRYRVINGKLYGGVDVNVDRINLAIVDSEGKLRDTYTFWFREITARSYPRRRARTVIGMKVHEMLNYAYHHGVKTLFLERPDVLGRLRLLWIRNGRRLHRNYNWKVATFRSSIIEMITMKASLYSIKVDYVDPRGTTSSKEHDEIMKKYRLDRHTASAYLIALKGLNPKDPHIGFCPTATARSRSP

SEQ ID NO: 1295 - protein, 363 aa, unidentified
  REGION 1..363: note = Category: MG61 effectors
  REGION 1..363: note = Description: MG61-131 effector
  source 1..363: note = uncultivated organism sequence
MLQYRISDVIATRLVTYTTIIGKLIPTSPENHMKLVRLAYDFRRAVLYATRMIGKDMKTNDILKELRNMLNKAYGDSAYKVAKAIVEGCRFNGGEPRHIKIKRLFIVSEGEASRFGNRNVRLETTDIVKVRYPYDKSWIILRTCFGRKYLSLVREVSELAKQRRISYGARIVFKDGRIYLHLSIPINLYLKYFSKGKAHGELVVGFDINSDRMNMVIIDRYGKIRDIKTKWFSEVTSHGYPKSKAKARRLEALAKLLKYTYHHNVGIVVFENLFTIKKREYSRNPTANRKITRFAKKELLRYGILMAMKYGFKVLLVNPRGTTRSKEHDEVMKKLGLDRHVASAYLIALRGIRRYTMIQKAMI

SEQ ID NO: 1296 - protein, 368 aa, unidentified
  REGION 1..368: note = Category: MG61 effectors
  REGION 1..368: note = Description: MG61-132 effector
  source 1..368: note = uncultivated organism sequence
MGYVTVSLSFNVGGDAAKGLLSTAWLFKVATHRVLDLVRQSPVLPATDIGWKNTFRSVAYEVVPNRRYADGVVVLVRGIYESCRQLGVDFRSVELGNWLMFQQSEIEYPVRNITLREGYEFYVTTINYLGKSDRVVIKPTIPRDYKPLLDKVIEERVEHTGRVVIKDYGVRRGMLWIHGEVQVTLPLDFYYRHMIRYRQNDGRLYGGVDVNTDRINLAIVSENGELRDVRTYWFREVTARGYPRRRAWSVIGMRVHEMLRYAYHHGVKTLFLEKPDILGRLKLMWIRNGRRLHENYNYKIAVFRSSVIEVIAMKAPLYSIEAKYVNPKGTTNSREHDEAMRKYGLDKHTASAYLIALKALKQPKKSQP

SEQ ID NO: 1297 - protein, 365 aa, unidentified
  REGION 1..365: note = Category: MG61 effectors
  REGION 1..365: note = Description: MG61-133 effector
  source 1..365: note = uncultivated organism sequence
MSYVTLRLPFNVNGDMAKELLSTAWWFKTAAHRVLSLAKQMQFLPGTKIGWVSMFRSITYEIIPNRRYADGAVTLVMGIYESCRALGVDFRSVELGDWLMFQQSGLEYPAKSITLRPGYEFHVTTIKYDGLISRVVVKPTVSEDYRELIDAIYRERIKYMGRVVIRDYGARNNQLWVHGEIHITVPLDIYYEHMAKHRRNSGRLFGGVDVNTDRINLAIVDESGDLRDYKTFWFSETTARGFPKHKAWSIIGMRIHELLNYAYNHGVKTLFLENPEVLGRLRLMWVWNGGRNHENYNYKVMIFRSTIIEKIALKAPLYSIRVNYVNPRGTTNSKEHEEAMRRYRLDRHTTSAYLIALKGLTHQQK

SEQ ID NO: 1298 - protein, 363 aa, unidentified
  REGION 1..363: note = Category: MG61 effectors
  REGION 1..363: note = Description: MG61-134 effector
  source 1..363: note = uncultivated organism sequence
MSYVTITVSFNVSDEPAELILSTAWLFKIATHRVLEYAKNTPTLPASKIGWKNMFRSIAYDIISNRRYADSAVILVMGIYESCRQLGVNFKSVELSDWLMFQQSEKEYPPRNITIKSPEEAWVTIYSYDGRSERITLRISTSGAYKELLEAILEEKQPYNPRIVVKSWNVREGRLYVRGELQVSIPIDFYYKHMARYREPKSNLTGGVDVNVDRVNLAIIDEKGNLRDTYTFWFREVTARGYPRKRAWSVIGMRIHEMLRYAYHHGVSILALEDPDVLGRLRLMWIRNSRRLHEDYNWKVATFRSRVIEMIALKAPLYSIRVVYVDPKGTTSSKKHDEAMKEHRLDKHTASAYLIALKGLKQP

SEQ ID NO: 1299 - protein, 366 aa, unidentified
  REGION 1..366: note = Category: MG61 effectors
  REGION 1..366: note = Description: MG61-135 effector
  source 1..366: note = uncultivated organism sequence
MSYITLTLPFNICDGEARRLLSTAWLFKIASHKMLSIAKQFPALPATDIGWRNTFRKIIYEVIPNRRYTDGVIVLVRGIYESCRQLGVDFKDVELGDWLMFQQAEKEYPVRNITLKQDYEFWITTVDYNGNPERIVIKPSIPKNYKLLLDKILEEKQKHTARVVIKDYGVRKNKLWIHGEIQLTIPSDFYYKYMTRYKRNNGKLYAGVDVNADRLNLAIVDRYGRLRDVKTLWFENACRKGYPRRKARVLIGMAVHHMFHYAYHHGVKTLFLENPEVLGKLRLLWIRNGKKLHKNYNWKVSIFRTSIIEMITMKAPLYSIRISHVDPKGTTSSKEHDDVMGEYGLDRHAASAYLIALKGIERHKMI

SEQ ID NO: 1300 - protein, 363 aa, unidentified
  REGION 1..363: note = Category: MG61 effectors
  REGION 1..363: note = Description: MG61-136 effector
  source 1..363: note = uncultivated organism sequence
MTYVTLAFPFNVCCDVAKRLLSTAWLFKTATHRLLSIAKQLPALPGTDIGWKSAFREVVYEVIPNRRYADGVVVLIRGIYESCRQLKVDFKSVELSDWLMFQQSELEHPARNITLKPGYEFHITTVDYNRNTYRDVVKPTMPESYKLLLNKVLEERQKYAGRVVVKDYGVRKNALRVRGEVQITIPIDFYYRHMTRVKANKGKLCGGVDVNVDRINLAIVDDSGELRDVYTFWFREVTARGFPKRSARSIIGMRIHEMLSYAYHQGVKTLFLENPEVLGKLKLLWVRSGDRGHENYNYRVSVFRSSVIEMVALKAPLYGIEVRYVDPKGTTSSRKHDEITEKHRLDRHTASAYLIALKGLKQP

SEQ ID NO: 1301 - protein, 363 aa, unidentified
  REGION 1..363: note = Category: MG61 effectors
  REGION 1..363: note = Description: MG61-137 effector
  source 1..363: note = uncultivated organism sequence
MTYITLVFPFNVCCDVAKRFLSTAWLFKIATHRLLNVVKHFPVLPATDIGWKNTFRGIAYEIIPNRRYADGVVTLIRSIYESCRQLRIDFKSVELSNWLMFQQSELEYPARNITLRSGYEFHITTVDYNKNTYRDVVKPIIPKNYKPLLDKMLEERHKYTGRVVVKSYGIRKGNLWVRGEIQITIPTDFYYKHMTRCGESKGSLIGGIDVNVDRLNLAIIDEKGNLRDCKTFWFSEATTREFSRRSARSIIGAKIREMLSYAYHHNVKTLFLESPEVLGKLKLLWVRNGDRKHENYNYKKAVFRSSVIEMIELKTPLYGIEAKYVDPKGTTNSEEHDEAMKRYGLDRHTASAYLIALRGLRNQ

SEQ ID NO: 1302 - protein, 363 aa, unidentified
  REGION 1..363: note = Category: MG61 effectors
  REGION 1..363: note = Description: MG61-138 effector
  source 1..363: note = uncultivated organism sequence
MSYVTVTAGFNASGKPAELILSTAWLFKIATRRVLEYAKSTPTPPASKISWKNAFRSVAYDVIPNRRYADSTVVLVMGIYESCRQLGVDFREVELGDWLMFQQSEKEYPPRNITIKSPEEAWVTVYSYDGWSERIALKISTSGAYKELLETILGERQPYNPRIVVKSWNAREGRLYVRGELQVSIPIDFYYKHMARYRENRGRLYGGVDVNTDRVNLAIVDEHGDLRDTYTFWFRGVVARGYPGKRAWTVISMRIHEMLKYAYHHGVKTLYLEDPGVLGGLRLMWIRSGRRLHEGYNWKVATFRSRVIEIIALKAPLYSIRVVYVDPKGTTNSKAHGEAMKKHRLDKHTASAYLIALKGLKQP

SEQ ID NO: 1303 - protein, 373 aa, unidentified
  REGION 1..373: note = Category: MG61 effectors
  REGION 1..373: note = Description: MG61-139 effector
  source 1..373: note = uncultivated organism sequence
MSIRRLARNIILENDYPLITHVTVIGKLIPNNSQDYMKLVRLAWSFRKAVEQMAREIVNGASMKDATKKLYNALPNYVYLESAYKHAKLIVEGSRFNNGNPRHIHVRKFFIVSRGNKYDYGNRNIRLVPSEKYFEVQVKYPWDGSWIKARTFFGRRYIPLLNELMELCRRRLEGYGARIVFKDGRMELHLSIPLYLYLKYFSYPKCKGYELVAGLDLNSDRINMVVIDGDKRIVAMRAAWFPEVTLPGFPRNKARDIRLKKLKELLVFARRIGVDYVVFENLFAVKKSSRVSSPSGNRKITRFAKRQLLQHGLLMAMKQGLTPILVDPRGTTHSHEHEEVMNRRGLDRHMASAYIIACKGLKIIKTHEKYHKT

SEQ ID NO: 1304 - protein, 376 aa, unidentified
  REGION 1..376: note = Category: MG61 effectors
  REGION 1..376: note = Description: MG61-140 effector
  source 1..376: note = uncultivated organism sequence
MKLPKYITSSLDFHVDDDYAKNILATAWLSKLVAHRVLGLVKENPLLADLLEYRFLKMLRGKCYNILPNRRYVDGVLKLIHSTLKSAKALKVSIEDIELKQWLLFQSDGERGYARGNMNIRFIDTCHVRVLTLNYDRRTRYVELEVTTPKGWRKLIEVLVDRASRGVIGYPARVIIKDYGMGKNGLHVHGEVQVMIPYSLYLEVMRRNTTPKGGNIGGIDINVERLDAVVIDEYGNILSYRTFWIKNATFMGVRKKRAWSLIGEQIHALLKWLYSQGVHVIGLENPEIIGYLRYYWIRNGERRETKWNWKLSMFRNSIVERITWKAPLYSMKAIYIDPRNTSKEGEKIGEKLGLGRHLGSAYIIARRVLKTVLQRP

SEQ ID NO: 1305 - protein, 292 aa, unidentified
  REGION 1..292: note = Category: MG61 effectors
  REGION 1..292: note = Description: MG61-141 effector
  source 1..292: note = uncultivated organism sequence
MNLSDGWGIDFREVELGDWLMFQQSEKEFPPRNITLKSEDEAWVTAFGYDGESRRLRLRISASGSFRRLLEAILREKQPYNPRITLKSWNVRGGKLYGRGELQVSVPTDFYYRHLARYKTNSGRLYGGVDVNSDRINLAVVDGSGILRDAHTIWFREVTARGYLRHRARTVIGMGVHEMLSYAYHHGVKTLFLENPKVLGRLRLLWIRNGKRLHKNYNWRVSTFRASIIEAIAVKAPLYSIRVEYIDPKGTTRSKEHDELMRRYGLDRHMASAYLIALRGMERYTTIQKATV

SEQ ID NO: 1306 - protein, 363 aa, unidentified
  REGION 1..363: note = Category: MG61 effectors
  REGION 1..363: note = Description: MG61-142 effector
  source 1..363: note = uncultivated organism sequence
MTYVTLTFSFNVCCVVAERVLSTAWLFKIATHRLLSIAKQAPILPGTDIGWKNTFRGIVYEVIPNRRYADGVVAFVRGVYESCRQLGADFRVVELSDWLMFQQSELEYPAKNITLKPGYEFHITTIDYNENSYRDVVKPVVPKSYRLLLDKVLEGRQRYMGRVVLKSYGIRKDDLWVRGEVQITIPIDFYYKHMARARASNGMFYGGVDVNTDRINLAIIDKEENLRDCKTFWFSEVIARGFLRRSARSIMGAKIHEMLRYAYSHGVSTIALENPDVLGKLKLLWVRSGDRKHENYNYRVSIFRSSVIEMIALKAPLYGIEVKYVDPKGTTNSREHDDAMMKYRLDRHTASAYLIALRGLRHQ

SEQ ID NO: 1307 - protein, 365 aa, unidentified
  REGION 1..365: note = Category: MG61 effectors
  REGION 1..365: note = Description: MG61-143 effector
  source 1..365: note = uncultivated organism sequence
MSYVTLRFPFNVNGGVAGELLSTAWWFKVATHRVLSLAKQQQVLPGTPVGWRGMFRGVAYRVVPNARYADGVVTLVMSIYESCRELGIDFRSVELSDWLVFQQSWLEYPAKSITLKPGYEFHVTTIRYNGSTSRVVIRPTVPENYKGLLDVVLAGRVEYMGRVVVRDYGVRNNQLWVRGEVQITVPLDLYYRHMARHKRNAGRLFGGVDVNADRINLAIIDDGGVLKDYKTFWFSEVAVRGFPRYKAWRIIGMRVHELLNYAYHHGVKTLFLENPEVLGRLRLMWIRAGDRKHENYNHKVSIFRSSIIERITMKAPLYSIEVKYVSPSGTTNSVEHDELMRRYGLDRHTASAYLIALRGLTHQQK

SEQ ID NO: 1308 - protein, 356 aa, unidentified
  REGION 1..356: note = Category: MG61 effectors
  REGION 1..356: note = Description: MG61-144 effector
  source 1..356: note = uncultivated organism sequence
MSRCQTSSIIDASSIVNYVTIIGRIYSASSEDYMHLVRLARDFRRAVQVATRMIARGLEENSVLRELRRMLNKAYADSAYKAAKTMVEGCIFNGGNPLHIEVKKPFIVSEGESSRLGNRNVRLEDTCLVKVKYPHDGSWITLRAEFGEKHLPLLRELVDLAKQKKLSYTARIVFKEGDIYLHISIPIQLYLKYFKEGEARGQLIAGFDLNSDRVNLVIIDEHGEIVDARTAWFPETTSHGFPREKAKALRLNALARLLKYCYRHGVSVVVFEDLLSVKRKRFTRSRTANRKITRFAKKQLIQHGVVTALKYGFKALLVDPKGSTNSREHDELMKKFGLDRHTASAYLIALRGLRNQ

SEQ ID NO: 1309 - protein, 323 aa, unidentified
  REGION 1..323: note = Category: MG61 effectors
  REGION 1..323: note = Description: MG61-145 effector
  source 1..323: note = uncultivated organism sequence
MFRREAYSVIPSRRYADGVVALVRGIYESCRALGVSFRDAELGDWLMFQQSEREYPARNITLKAGYEFHVTVVGYDGSTGRVTVEPTVPKSYRVLLDGVLREKPKYCARVMVKGFGERKSDLWLNGEIHLTLPLELYHRCMAKDTPATGSNVAGVDVNVDRLNVAIVDTSGRLRDTTTFWFREVTSRGYPRRRARCVIGMSVHRMLKYLASHGVGMVVLENPEVIGYLRYCWVRSGERGSRNYNYKVAVFRSSIIEMIALKATLYGLKSVYVDPRGTSSSQEHRFVMEKHGLDRHTASAYLIALKHLQDEKIMNNRKAHEQHK

SEQ ID NO: 1310 - protein, 374 aa, unidentified
  REGION 1..374: note = Category: MG61 effectors
  REGION 1..374: note = Description: MG61-146 effector
  source 1..374: note = uncultivated organism sequence
MSGVEYVTLRLPFHATGEDARLIYWTAWVCKLCAHRLLETVKHNLLLADLSQYDFIKLGRKLCYDILPNRRYVDGISTLIHASLQSAKALKVDISKLELRPWLLFQSEAEPWAKGNLNIQFTSYDTVKVLVFDKDKSSTKITLEPVIPKGYSRLVRVLVDKALRKEVGYPARLYVTDYGDSLEHLYGEIQVMVKYDLYLEVMKRHEKPPGENIAGIDVNIDRINLVVIDRNGDIVWKYTARFPQVTARGFKRKSAWSIIGEAIHGVLKNAYSHGASVVAVENPGVIGYLRYYWIRNGDRKTRNYNYRVSIFRNSIIERIMWKAPLYSLHVVTVKPRGTTSSKEHEYVVKQHGLDRHTASAYLIALRARRNLQRH

SEQ ID NO: 1311 - protein, 327 aa, unidentified
  REGION 1..327: note = Category: MG61 effectors
  REGION 1..327: note = Description: MG61-147 effector
  source 1..327: note = uncultivated organism sequence
MGSSRPPSGKLREQGSPHPPDRRYVDGAITLTYSIYESAQALGVSFNDIEFKSWLLFQQSEKEHPCRNITLRNDYSFRITTINYRGEGKRISLKPTIPKNYKRILGKIIEGKRPYVARVVLKGFGERKNALWIHGEVHLSVSYRFYLGHFKEFKRNYGKHFGGVDVNVDRINLAIVDKYGRLRDVKAFWFEEASWKGCPRQRAWSVIGVAIHEMLKYAYRHGVKTLFLENPEVLGYLKTLWVRKGERRSNNYNYRVQIFRNGIVERITVKAPLYSIGVEYVNPKGTTNSGEHEEIMREYGLDRHSASAYLIALRGIKSHNLIRKATI

SEQ ID NO: 1312 - protein, 305 aa, unidentified
  REGION 1..305: note = Category: MG61 effectors
  REGION 1..305: note = Description: MG61-148 effector
  source 1..305: note = uncultivated organism sequence
MESRHLSTPLQSAKALKVDVSRLELRQWLLFQSEAEPWAKGNLNIRFVDYSRVGVLVFDRDKSSKKIIVEPVISKGYAKLVKALVDKALRKEIGYPARIYITDYGERLKHLYGELQVMVKYKLYLEVMRRCDEPLGNNIAGVDVNADRLNLVVINRDGEIVWKYTARFPQVIARGCPGKRAWSIIGEAIHSVLRNAYSHGAFVVAVENPKIVGYLRCYWIKSGDRGHESYNYKKSIFRSSLIERIALKAPLYGLSVKFVNPKGTTSSKEYDKAMKRYGLDRHAASAYLIALKARKTYKNLERPTS

SEQ ID NO: 1313 - protein, 365 aa, unidentified
  REGION 1..365: note = Category: MG61 effectors
  REGION 1..365: note = Description: MG61-149 effector
  source 1..365: note = uncultivated organism sequence
MNYITITAGFNASGEKAKLLLSTAWLFKIASHRVLSNAKSMPILPIFKIGWKNTFRRTAYEFIPNRRYADSVVVLVMGIYESCRQLGIDFKKVELSNWLMFQQSEKEYPPRNITLKDINEVWITVFKYNRESKRISLKISTSRDFRKLLEAILREKQPYNPRIILKSWNTRDGKLYVRGELQISIPIDFHYKHMTRYRKNYGRLYGGVDVNCDRINLAIVDGEGNLRDTYTFWFREVTARGYPRRRARTIIGMKVHEMLKYAYHHGVKTLFLENPNVLGKLRIIWIRNGRRLHRNYNWRVSVFRNSIIEMIALKAPLYSIKTKYVDPRGTTHSREHDMVMKKYRLDKHTASAYLIALKGLNHKFI

SEQ ID NO: 1314 - protein, 361 aa, unidentified
  REGION 1..361: note = Category: MG61 effectors
  REGION 1..361: note = Description: MG61-150 effector
  source 1..361: note = uncultivated organism sequence
MSLFRMSDVVDASTVVDYVTIIGKLHPVSSEDYMRLVRLAWDFKNAVRITTRMIAKGVDKNSILRELRGMLNKAYADSAYKVARAIVEGCLFNGCNPLHIEVRRPFIVSEGESSRLGNRNVRLENTGLVKVKYPYDGSWITLRTEFGQKYLPLLRELVDLARQREVSYGARIVFRGGSIYLHLSIPIKLYLKHFRKGEAEGGFVGGFDLNSDRVNLVIIDEHGRIVDTRTAWFTETTSHGFPRNRARALRLRALAKLLKYCYTHNVGVVVFENLPLIKRRRFTRSRVGNRKITRFAKRQLIQYGIVMALKYGFKTLLTNPRGTTNSKEHEELMRRYGLDRHTASAYLTALRGLKALNENHK

SEQ ID NO: 1315 - protein, 365 aa, unidentified
  REGION 1..365: note = Category: MG61 effectors
  REGION 1..365: note = Description: MG61-151 effector
  source 1..365: note = uncultivated organism sequence
MSYTTICLPFNVDGEEARGLLGTAWLFKIASHRMLSFAKQFPVLPATDIGWKNTFRKTIYEIIPNRRYTDGVIVLVRGIYESCRQLRVNFREVELGDWLMFQQVEKEYPVRNITLKQRCEFRISTVDFNGNSERIVIKPSIPKSYKFLLDRILEEKQKHTARVVIKDYGIRKSKLWIHGEIQLTIPLNFYHKYMIKYRRNYGKLYGGVDVNTDRINLAIVDKYGRLRDTYTFWFREVTARGYSRRKARSVIGMRVHEMLKYAYHHGVKTLFLENPEVLGKLKLLWIRNGKRLHKNYNWKLSTFRSRIIEMIAMKAPLYSIKVGYVDPKGTTNSKEHDEVMRKHRLDRHTASAYIIALRGLNHKFI

SEQ ID NO: 1316 - protein, 289 aa, unidentified
  REGION 1..289: note = Category: MG61 effectors
  REGION 1..289: note = Description: MG61-152 effector
  source 1..289: note = uncultivated organism sequence
MVRSIYESCRQLGVDFRGVELSDWLMFQQGELEYPARNITLKPGYEFHITTIDYSKNSYRDVVKPIIPKSYRLLLDKVLDDRQRYTGRVVLKSYGIKECNLWVQGEVQITIPIDFYYKHMARAKAGNGKLYGGVDVNVDRINLAIVNGGGELRDVYTFWFEEASRKGCSRQRARSIVGMRVREMLEYAHRHGVKVLFLENLEVLGKLKLLWIRSNDRRHENYNYKVSVFRSSVIEMIALKAPLYSIEVKYVDPKGTTNSEEHDEIMKRFGLDRHIASAYLIALRGLRHR

SEQ ID NO: 1317 - protein, 368 aa, unidentified
  REGION 1..368: note = Category: MG61 effectors
  REGION 1..368: note = Description: MG61-153 effector
  source 1..368: note = uncultivated organism sequence
MSYITIALSFNVGGEVAGRILSTAWLFKAATHRVLHLAKSSPALPGSDIGWKAAFRKDAYAVIPNRRYADGAVVLVRGIYESCRELGVDFRGVELGDWLMFQQAEKEYPARNITLRPGGEVYVTTISYSGAVERVVLKPTVPKSYATLLEKILEERQEHAARVVIKGYGVRKGVVWISGEVQLTIPLTFYYRHMARYRANKGSLYGGVDVNVDRVNLAIIDNSGELRDTYTFWFREVVARGYPRRSARSVIGMRVHEMLEYAYHHGVKVLFLENPAVLGRLRLLWARSTERRSENYNWKVSAFRSSIIEMIALKAPLYGIEVAYVNPKGTSNSREHSEAMKKLRLDRHATSAYLIALRGVAKQSKRAQ

SEQ ID NO: 1318 - protein, 363 aa, unidentified
  REGION 1..363: note = Category: MG61 effectors
  REGION 1..363: note = Description: MG61-154 effector
  source 1..363: note = uncultivated organism sequence
MSTLKLSNVDKLMPHVTIIGKLVPGTSDDYMKLVRLAWSFRRAVELMIREVMNGTSMKDVTKKLYQILPNYIYLESAYKHAKLIVEGCKFNNGVPGHIHIRKLFIVSRGNKYDKGNRNVKIIPNTKFFRVLIKYPWDSSWIECRALFDEKYIPLLRELLELAYQRKEGYSARIVFREGRIELHISEPLYLYLKHFSLPKRRGYGLVAGLDLNSDRINMVVIDSDSRIVAMKTAWFPELTLHGFPREKARDTRLKKLKELLSYARRIGVDYVAFENLFVVKKRSKVSSPSGNRKITRFAKKQFLQHGLLMTLKLCLTPVLVDPKGTTHSREHKEVMKKRGLDRHMASAYLIAIKGLKVIRNHEK

SEQ ID NO: 1319 - protein, 363 aa, unidentified
  REGION 1..363: note = Category: MG61 effectors
  REGION 1..363: note = Description: MG61-155 effector
  source 1..363: note = uncultivated organism sequence
MSFITIRFPFDANGSVAGELLSTAWWFKVATHRVLSLAKRQQVLPGTKIGWINTFRESAYGIVPNRRYADGAVILMMGIYESCRALGVDFRSIELSSWLMFQQVELEYPARNITLKPGYEFHVTTVDYGGNTHRVVVKPTVPGNYGLLLDKVLRERQRYTGRVVLRSYGIGGSNLWVQGEVQVTIPMGFYYRHMARYRRNDGKLYGGVDVNTDRINLAIIDEDGELIDHKTFWFSEASRKGCSGRRAWSIIGMRIHELLDYAYNNGVNTLFLENPEVLGRLKLMWAKSGDRGHGNYNHKVMTFRSTIIERVALKAPLYSIEVKYVNPKGTTNSVEHDEAMRKHGLDRHNASAYLIALRGLKHQ

SEQ ID NO: 1320 - protein, 364 aa, unidentified
  REGION 1..364: note = Category: MG61 effectors
  REGION 1..364: note = Description: MG61-156 effector
  source 1..364: note = uncultivated organism sequence
MSQYQISDVVNASNIVNYVTIVGRLVPISTEDYMKLVRLAHEFRKAVLYTTRMIVAGMNVNAILKELRRMLNKAYGDSAYKVAKAIVEGCKFNGGNPRHVKVRKLFIVSEGEASRFGNRNIRLESTSMVKVKYPYDGSWLTFKARFGEKYLPLIEELVKLTKHKEISYSARIVFRDGKIHLHLSIPITLYLRYFSKGRTKGSLVAGFDLNSDRINMVIIDRYSRIRDVKTEWFSEVTSHGYPRGKARAKRLEALARLLRYAYHHNVGTVIFENLLVIKKKRHTKSKRANRKIARFAKRELLQHGIVMAMKYGFKVLLVNPKGTTNSEEHSKIMRRYGLDRHTASAYLIALRGIEKYTKMQKAII

SEQ ID NO: 1321 - protein, 358 aa, unidentified
  REGION 1..358: note = Category: MG61 effectors
  REGION 1..358: note = Description: MG61-157 effector
  source 1..358: note = uncultivated organism sequence
MVGEVREPEITHVTVTGRVIQLDSDSYMELVLLAYRFRKALAKAVKMYAEGVGKDTIVKEVTKELNLGYADTIYKLAKLIVEGVRHNNSNPLRIRLRKLFIASRGFSSNKGNRNIRLLSSSELEVNIPWKGWVKFKVLFGKQYIPLIHELVEKSLCKEMSYTAKILFKNGKIYLHVSVPVELYLKHFKKGEVHGKLIATFDLNSDRINMVILDELSIIRDVKTEWFPEITSHGFPRNKANTLRLQALARLLSYAHHHGVGVVMFEDLERIKKQRCTKSRSANRKIAKFPKRILLKHAIVMAMKYGFKVYLVNPSYTSRVGEELGKLLGLDKHTASAYVLTLKTGKNFASLTNLLKFSK

SEQ ID NO: 1322 - protein, 380 aa, unidentified
  REGION 1..380: note = Category: MG61 effectors
  REGION 1..380: note = Description: MG61-158 effector
  source 1..380: note = uncultivated organism sequence
MDYINLRLPFNVDGDVARELLSTAWWFKVATHRVLAIAKQQVLPGNRIGWKNAFRQFAYEIIPNRRYADGVVTLVMGIYESCRALGVDFRGVELGDWLVFQQSELEYPAKSITLRQGYEFHITTIKYDGSIGRVVVKPTMSEDYRELIDAIYRERVRYMGRVVIRDYGVRNNQLWLHGEVHVTVPLDVYYEHMTRHKRNGGKLFGGIDVNADRINLAIIDEEGGLRDYKTFWFSEASRKGFGRHSAWSIIGMRIHEMLDYAYHHGVKTLFLENPEVLGRLKLMWVRGGDRKHENYNYKVSVFRSSIIERIALKAPLYSIKVGYISPRGTTNSEEHDELMKKYGLDRHTASAYLIALRGLRHQQKMSATNNHENRNSPLTD

SEQ ID NO: 1323 - protein, 363 aa, unidentified
  REGION 1..363: note = Category: MG61 effectors
  REGION 1..363: note = Description: MG61-159 effector
  source 1..363: note = uncultivated organism sequence
MGYITVSLSFNVGGDVAKGLLSTAWLFKVATHRVLDLARQAPVLPATDIGWRNTFRSVAYEVIPNRRYADGAITLVRSIYESCRVLGVDFRGVELDDWLMFQQSEMEYPVRNVTLREDYEFHITVIDYGGSASRVIIKPTIPKNYRLLLDKILEERQEHTGRVVINGYGVRGNTMWVHGEIQLTIPIEFYYKHMTRYRQNNGKLFGGVDVNADRINLVIVDKDGRLRDIKTFWFEEASRKGVTRHRARSIIGMAVHEMLGYAYHHGVKTLFLENPDILGRLKLMWIRSGDRRHENYNWKKAIFRNSVIEMIAMKAPLYGINVEYVNPKGTTSSEEHDEVMRRYGLDRHAASAYLIALKGLKQP

SEQ ID NO: 1324 - protein, 364 aa, unidentified
  REGION 1..364: note = Category: MG61 effectors
  REGION 1..364: note = Description: MG61-160 effector
  source 1..364: note = uncultivated organism sequence
MDYFTIRFPFNVNNSVAKELLSTAWLFKIATHRVLAVAKQQEVLPGTKIGWVNAFRSIAYGVVRNRRYADGAVTLVMGIYESCRSLGVDFRGVELGDWLMFQQSELEYPNRNVTLKPNYEFHVTTVRYNGATGRVVLKPTIPKTYKALLDAILTERVGYMGRVVIRDYGIRNNQLWVHGEVQVTVPLDLYYEHMARHKRNSGRFIGGIDVNSDRINLTIIDSIGRLIDHKTFWFSEATARGFPKHSAWGIIGMRIHEMLNYAYNNGVKTLFLENPEVLGRLKLVWIKNGDRGRENYNHKVATFRSTIIERITMKAPLYSIEVKHVNPRGTTNSKEHDELMKRYELDRHTASAYLIALRGLGMMN

SEQ ID NO: 1325 - protein, 351 aa, unidentified
  REGION 1..351: note = Category: MG61 effectors
  REGION 1..351: note = Description: MG61-161 effector
  source 1..351: note = uncultivated organism sequence
MAGEVREPEVAHITITGRIIPLDNDNYMELVLLAHRFRKSLAKAIKMYAKGINRNTIVKEVTKELNLGYADTIYKLAKLIVAGARHNNSNPLKIRIRKLFIASRGFAANKGNRNIRLLSTSGLQVNIPWKGWVPFKVLFGEQYVPLVKELVEKALAKKLSYSAKIVFRNGEVYLHVSIPVELYLKYFSKGRANGSLVASFDLNSDRINMVIVDRQGIIRDTRTEWFPEVTSHGFPRNKAETIRLQALAKLLDYAYDHGVGIVLFEDLEMIKKRKHTRSRTANRKISRFSKRKLLEHGIIMAMKYGFKVYLVNPAYTSKLGEKLGKEVGLDKHTASAYLTALKGLKKLQQLL

SEQ ID NO: 1326 - protein, 363 aa, unidentified
  REGION 1..363: note = Category: MG61 effectors
  REGION 1..363: note = Description: MG61-162 effector
  source 1..363: note = uncultivated organism sequence
MLQYQTSDVIATRLITYTTIIGKLIPTSPENHMKLVRLAYDFRRAVLYATRMIGKDMKTNDILKELRNMLNKAYGDSAYKVAKAIVEGCRFNGGEPRHIKIKRLFIVSEGEASRFGNRNVRLETTDIVKVRYPYDKSWIILRTCFGRKYLSLVREVSELAKQRRISYGARIVFKDGRIYLHLSIPINLYLKYFSKGKAHGELVVGFDINSDRMNMVIIDRYGKIRDIKTKWFSEVTSHGYPKSKAKARRLEALAKLLKYTYHHNVGIVVFENLFTIKKREYSRNPTANRKITRFAKKELLRYGILMAMKYGFKVLLVNPRGTTRSKEHDEVMKKLGLDRHVASAYLIALRGIRRYTMIQKAMI

SEQ ID NO: 1327 - protein, 356 aa, unidentified
  REGION 1..356: note = Category: MG61 effectors
  REGION 1..356: note = Description: MG61-163 effector
  source 1..356: note = uncultivated organism sequence
MSQSRTSSVVDATTLIEYATIVGRLIPASGEDHMKLARLAWEFRRAVQVATKMIAKGEEANIILKELRRMLNKAYADSAFKQAKAIVKGCLATGGDPRRIEVTKLFIISEGETSRNGNRNVRLEDTSLVKVKYPYDGSWIQLEAKFGEKYLPLLRELVELAKQRKVSYNARIVFRRGRIYIHVSVPIYLYLKHFEKGEARGELIAGFDLNSDRINLAIIDRYGGLVDAKTAWFTEVVSHGFPRNKAKALRLRALAKLLKYCYTHGVGIVVFENLYVVKKHRYTKSRNGNRRISKFAKRELLEHAIVMSLKYGFKVLLVDPKGTTNSKEHDEAMKRHGLDRHTASAYLIALRGLNPS

SEQ ID NO: 1328 - protein, 369 aa, unidentified
  REGION 1..369: note = Category: MG61 effectors
  REGION 1..369: note = Description: MG61-164 effector
  source 1..369: note = uncultivated organism sequence
MVESPLYTIKLAFNVDGDRAKKILSNAWLFKLACHRVLSRSKELLNALISSKIAWIKMFYSDARDLIPNKRYAYGAIYLIYGIWESSRSLKIDYTNVELSDWLMFQHYDREVDGNVVRVYSDGSALVTTYSYDGSKDRVLVKAKPNRGHEKLLKLVVESREKYMPRVLVRGYNVRDRELYISGEIHVTISYDFYLKHVKRYGNPKGDLIGGVDVNADRINLAIIDEKGNLRDYKAFWFSETTARGYPRRGVWSVVGMKIHEMLRYAYNHGVATITLENPEVLSYLKLAWVRNGDRKHENYNYKVSVFRNSIIERIATKAPFYGLNTKFVDPKGTTNSREHDEIMKRFGLDRHTTSAYLIALRGLRNQRT

SEQ ID NO: 1329 - protein, 351 aa, unidentified
  REGION 1..351: note = Category: MG61 effectors
  REGION 1..351: note = Description: MG61-165 effector
  source 1..351: note = uncultivated organism sequence
MCKLCAHRLLEHIKQTPLLADLSQYDFIEIGRKLCYDIVPNRRYIDGISTLIHASLQSAKALKVDVSRLELRQWLLFQSEAEPWAKGNLNIRFVDYSRVGVLVFDRDKSSKKIIVEPVISKGYAKLVKALVDKALRKEIGYPARIYITDYGERLKHLYGELQVMVKYKLYLEVMRRCDEPLGNNIAGVDVNADRLNLVVINRDGEIVWKYTARFPQVIARGCPGKRAWSIIGEAIHSVLRNAYSHGAFVVAVENPKIVGYLRCYWIKSGDRGHESYNYKKSIFRSSLIERIALKAPLYGLSVKFVNPKGTTSSKEYDKAMKRYGLDRHTASAYLIALKARKTYKNLERPTS

SEQ ID NO: 1330 - protein, 356 aa, unidentified
  REGION 1..356: note = Category: MG61 effectors
  REGION 1..356: note = Description: MG61-166 effector
  source 1..356: note = uncultivated organism sequence
MSRCQTSSAVRAEKLIPYATVVGRLTANTCDDYMKLVRLVYEFRKAVTYAARMVVRGVNVNEALKELRGMLNKAYGDSAYKVARAIVKGCRLNGGDPRHIKVRGLFIVSEGEASRSGNRNVRVEATDVVRIKYPFDGSWLTFKARFGERYLPLVQELVELAKDCKVSYGARITFRGGRVYLHLSVPVELYLKHFRKGDAKGGLVAGLDLNSDRINMAIVDRCGRIRDIKAEWFPEVVCHGYPRGKARARRLEALARLLNYAYHHGVGRVVFEDLLAIKHRTRTGSPSANRRITRFAKKQLLRHGILMAMKYGFEVLLVNPRGTTRSKQHDEVARKYGLDRHTASAYMVALKGLNLP

SEQ ID NO: 1331 - protein, 374 aa, unidentified
  REGION 1..374: note = Category: MG61 effectors
  REGION 1..374: note = Description: MG61-167 effector
  source 1..374: note = uncultivated organism sequence
MNEVKYVTLRLPFHAVGEGAKPIYWTAWLSKLCAHRLLDQVKQNPLLASLSQYEFVKMGRSLCYGVLPNRRYVDGVSTIIHASLQSAKALKIDVTKLELKPWLLFQSEAEPRAKGNLNIQFADYSTVKVLVFDKDGTSRKIAIRPVVPKGYAKLVKVLVDKALRREIGYPARIYVRDYGDGLAHLYGELQVMVKYDLYLEVMKRHGKPLGENIAGVDVNVDRLNLVVVNRDGDIVWTHTVRFPQVTARGFPRKKAWSIIGEAVHSVLKNAYSHGASVLAVESPEVIGYLKYYWIRNGNRGSRSYNYRVSIFRNAIIERLVWKAPLYGLKVVPISPRGTTRSKDHDYVMRRYGLDRHTASAYLIALKTRNIVRTY

SEQ ID NO: 1332 - protein, 364 aa, unidentified
  REGION 1..364: note = Category: MG61 effectors
  REGION 1..364: note = Description: MG61-168 effector
  source 1..364: note = uncultivated organism sequence
MNDTPLYTLKLSFNVSGEVARKILSTAWLFKLACHRVLSKSKELEKHLIPSKVAWIKMFYDDARSFIPNKRYAYGAIYLVYSVWESARGLKVDYKSVELSDWLLFQHYEREVDGNVIRVSEDGSALITTCSYNGSKDRVLVRAKPNRGYAKLLRFAVESREKYMPRVVVRGYNVRGGALYVHGEIHIVISYDFYLKHTTRFREPRGGLVGGVDVNADRINLAIVDEKGNLRDYKTFWFRETTARGYPRRSAWSTVGEKIHEMLRYAYYHGVSTIAMENPETLGYLKLAWIRGNDRRHENYNYKKSIFRSSVIERIAMKAPLYGLSVKFINPKGTTSSRDHAEAMKRYGLDKHTASAYLIALRCI

SEQ ID NO: 1333 - protein, 373 aa, unidentified
  REGION 1..373: note = Category: MG61 effectors
  REGION 1..373: note = Description: MG61-169 effector
  source 1..373: note = uncultivated organism sequence
MNGPYLTLRLPFNVYRDEARLLLSTARLFRFIVLHLHSLLLEENPHITSLIALKRVYRRRLQEMLPNRRYVDGAITLVYSIYESAQALGVSFSDIEFRNWLLFQQSEKEYPCRNITLQKDYSFRITTINYQGESIRIALKPTIPKNYKQVLDKIIEKKQPYVARVVLKGFGERKKILRVHGEIHLSILYKFYLEHFRRYKRNYGKLYGSVDVNVDRINLAIVDRYGRLRDTKTFWFEEASWKGCPRHRAWSIIGLAIHSMLKYAYHHGVKTLFLENPEALGYLKTLWIKKGERRNSNYNYRVQIFRNRVIERIAMKALLYSINIEYVGPKGTSHSKEHDEIMRKYGLDKHTASAYLIAFKGIERHTTIQKAII

SEQ ID NO: 1334 - protein, 379 aa, unidentified
  REGION 1..379: note = Category: MG61 effectors
  REGION 1..379: note = Description: MG61-170 effector
  source 1..379: note = uncultivated organism sequence
MSKSVVEYVTLRLPFHVTGENARLIYWTAWLCKICAHRLLELIKQNPILAGLSQYDFIKISRKMCYDIVPNRRYIDGVSTLIHASLQSAKALKVDVSKLELKSWLLFQSEAEPWAKGNLNIQFTDYDTVRVLVFDKDKSTRKITIKPIIPKGYAGLIKTLVDKALKKEIGYPARVYITDYGKRLEHLYGELQVMVRYSLYLEVMKRYDEPRGDNIAGVDVNVDRINLVVINRDGDIVWKYTARFPQVTARGYPRKRAWSIVGEAIHGILKNAYSHGASVIAVENPEVIGYLKYYWVRNGDRKSENYNYKVSIFRNSIIERIVWKAPLYGLHVVTVDPKGTTHSKDHEYVMRRYGLDRHTASAYLIALKARRNLQKPIET

SEQ ID NO: 1335 - protein, 378 aa, unidentified
  REGION 1..378: note = Category: MG61 effectors
  REGION 1..378: note = Description: MG61-171 effector
  source 1..378: note = uncultivated organism sequence
MKDTGLPDYIAINIPFTVNGEEAKLVWYTAWFSKLCAHRLLNDVKGNDALLGFSQASFLKYARERCYELLPNRRYIDGVATLVHSTLRSARKLGVNIRDIELGQWLLFQSEAESEKRGNLNIRLLSVNRAEVLVLNYDGASKRIDIGLKTPKGYVELLKVLIERAGKYEVGYPARVMVRGYNFRPGNMHLYCGLQVMVPYSLYLNVMRRYSEPRGNLIGGVDVNVNRLNLAIVDRYGRLRDVKTFWFREVTARGFKGVVAWTKIHQAIHELLNYAYHHGVSAISLENPRTIGYLRYYWVRNGDRGSRNYNYRVSIFRSRTIEVISYKAPLYAMRTIYVNPKGTTNSQQHDEVMRRLGLDRHAASAYLIALRGLNKQGR

SEQ ID NO: 1336 - protein, 365 aa, unidentified
  REGION 1..365: note = Category: MG61 effectors
  REGION 1..365: note = Description: MG61-172 effector
  source 1..365: note = uncultivated organism sequence
MTYITLTFPFNACCDVARRLLSTAWLFRVATHRLLSIARKFPVLPGTDIGWKSTFRGMVHEVIPNRRYADGVVVLVRSIYESCRQLRVDFRSVELSSWLMFQQVELEHPARNITLKPGYEFHVTTVDYGENTHRVVVKPTVPGNYGLLLDKVLRERQRYTGRVVLRSYGIGGGNLWVQGEVQMTIPMDFYYRHMARYRRNDGKLYGGVDVNTDRINLAIIDEDGELIDHKTFWFSEASRKGCSGRRAWSIIGMRIHELLDYAYNNGVKTLFLENPEVLGRLKLMWAKSGDRGHGNYNHKVMTFRSTIIERIALKAPLYGIEVSYVNPKGTTNSKEHDETMKKHGLDRHTASAYLTALKGLTHQRK

SEQ ID NO: 1337 - protein, 376 aa, unidentified
  REGION 1..376: note = Category: MG61 effectors
  REGION 1..376: note = Description: MG61-173 effector
  source 1..376: note = uncultivated organism sequence
MSKSVAEYITLRLPFHVTGVDAKLIYWTAWLCKLCAHRLLEAIKLNPSLAYLSQYDFIKVGRRLCYDIVPNRRYVDGISTLIHASLQSAKALKVDITKLEPKHWLLFQSEAEPWAKGNLNIQFVDYDKVKVLVFDRDKSSRRIIIEPVIPKGYIRLVKALVDKALKKEIGYPARIYITDYGERLEHLYGEIQVMVKYNFYLEVMKRYDKPLGDNIAGVDVNVDRLNLVVINRDGDMVWKHTVRFPQITSRGCPRKRAWSIIGEAIHSILRNAYSHGASVVAVENPEVLGYLRYYWIKNGDRGTKNYNYRISIFRNSIIERIVWKAPLYGLHVVTVNPKGTTHSKDHEYVMRRYGLDRHTASAYLIALKTRRNLQRP

SEQ ID NO: 1338 - protein, 371 aa, unidentified
  REGION 1..371: note = Category: MG61 effectors
  REGION 1..371: note = Description: MG61-174 effector
  source 1..371: note = uncultivated organism sequence
MSYITICLPFNVDGVEARRLLSTAWLFRVASHRMLSLAKQFPVLPATDIGWKNTFRKVIYEIIPNRRYTDGVIVLVRGIYESCRQLGIDFKEVKLGGWLMFQQSEKEYPVRNITLKQGYEFHITTISYGGEAERVVIKPTIPKNYKLLLDKILEEKQKHTARVVIKDYGVRRNKVWIHGEIQLTILINFYYKYMTRFKRNYGRLYGGVDVNIDRINLAIVDRYSRLRDAKTFWFEDTARKGYPRRKARALIGMVVHEMLRYAYHHGVKTLFLENPEVLGKLKLLWIRNGRRLHRNYNWRVSVFRSSVIEMVAMKTPLYSIKVDYVDPKGTTHSKEHNEIMRKYGLDSHTTSAYLIALKGIKRHTMIQRAII

SEQ ID NO: 1339 - protein, 364 aa, unidentified
  REGION 1..364: note = Category: MG61 effectors
  REGION 1..364: note = Description: MG61-175 effector
  source 1..364: note = uncultivated organism sequence
MDETLLYTLKLSFNASGGVARRILSTAWLFRLACYRVLSRSRELKERLVPSKVAWVKMFYEDARSYIPNKRYAYGAIYLVYGIWESARKLKLNYADVELSNWLLFQHYEREVDGNVIRVAEDGSALVTTYNYDGSKDRVLVRAKPNRGYAKLLESVVESKEKYMPRVVIKGYNIRNGTLYIHGEIHVIVSYDFYLKHSARYREPTGDLIGGVDVNVNRINLAIVDKKGNLRDYKTFWFAEATARGYPRQCAWSFIGARIREMLEYAYHHGVSTIALESPEVLGYLKLAWIRGNDRKHEDYNYKKSIFRGSIIERIAVKAPLYGLSVKFVDPKGTTSSIEHDNAMRKYGLDRHTASAYLIALKCI

SEQ ID NO: 1340 - protein, 363 aa, unidentified
  REGION 1..363: note = Category: MG61 effectors
  REGION 1..363: note = Description: MG61-176 effector
  source 1..363: note = uncultivated organism sequence
MSYVTVALPFNVCGREASLVLSTAWRFKIAAHRVLGVAKEMRMLPGSDIGWRNTFRSLVYEVMPNRRYADGVITLVRGIYESCRQLGVDFREVELGDWLMFQQTEKEYPPRNITLKPGYEVHVTVIDWHGERHRISLKPTVSGRWSKLLDTILEKRIKYTGQIVVEDYGVRDGVLWLHGKVHLIVPYDVYLECMARYKMNMGRLYGGVDVNTDRINLAIVDGSGRLRDIKTFWFEEASRKNCPRQRARSVVGMAVHEMLRYAYHHGVKTLFLEDPGVLGRLRLAWIRNGRRGSRNYNWKVSIFRSSVIEMIARKAPLYAIKTVYVDPRGTTHSQEHDEIMKRYGLDRHAASAYLIALKGLERP

SEQ ID NO: 1341 - protein, 1509 aa, unidentified
  REGION 1..1509: note = Category: MG61 effectors
  REGION 1..1509: note = Description: MG61-177 effector
  source 1..1509: note = uncultivated organism sequence
MSKRILGLDLGTNSIGWAVVDEAKEEIVNAGVRIFPEGVVSKTIGSGDKEETKNAARRRARQTRRQFYRKRLRKAKLLEVLIEQNMCPLSLDELNKWRHWDKKEKSQAKVFPNSDEFMNWIRMNPYELRARAIIGTVTAMELGRIFYHLIQRRGFLSSRKGDVKESKTLFEKGKPELNILPINRTEKEIAESGCQTMGEYLNRVVPKEGESYKPILDSDGNEIRARGRYATRKMYVEEFEAIWNAQADHLGLDKRSVLFKKVRMLKGNENSERNKKRISTLKKFYGAENVFVENRGNNLHITTTRTLPFKIFLAGDDVELKRNESVLFWQRPLRSQKGTLGNCSFEDTLPVINMDGTQRKNEKGKPVTYSKKPCPISHPLFELFRTHQFINTIEFGEKQRLSKDQKKQVLELINRKDNAFSFKEIVKKLELFSETFNYENDFKVSGNYTISKLSKLLGKKVWDEHPLAYWEAFYFYDDSTKLQKKLNKAYGLNLKVEEVDKIRLKEGYSRVSIKAIQNILPFLEKGYFYSTAVILGGVKNAFGSRWDSYLQDETKEKIEDDILKMLKDKNKEGELIEKIKAYLSDSSNRYGFSENSPAFKKLYHHSQSVEKKELKNKLPPVENIRNPIVQQSLYEMRKVVNALLEKYKEEDPTFSFSSIRVEMGRDLKNGKKQRQKINQVIRKNRENNDEARERLAEFGLQPSRNNIQKYLLFKEMERRAGHVQSPYTGRTISLTDLLGKDNLIQIEHIMPFSKSLNDSFANKTLCESSVNGLKGDKTPYAFYHQNPDPKIWGVSSWDEVKHRAFKLLPYAKAKRFVSDKSVDAEDFISRQLNDTRYIAKKATEILSEICSDVQVMPGQLTAELRHLWGLNNVLESSFGVTKQFSDIPLKPGEYYLVLNEQRESIQLIPKHNPKPKTNPNELLVAGEINNAIFESKKLVLELGAPDQANGKYWAKLTLKPIQKFSPKYISKPITDENRIVFKGLVKNQRFSSDSIPKNPIAEHKDGIYWGSFAVKNKRIERSTVAPITNRKEIKLFGEVKDGIFKSYIYECSTTAENGKYWLVLEPDFETPEFIQASNPEPQHSENEHIITGTIDDNGVFVSDLDPSYSVKTDHSAGKYYAVIELASKENDFYLMENPAPKVEKEHRLIEGTVWVDKYSSELKFDPKKNREDQRHHAIDAITIALTKRGYLNALSHYRAKELPEDYKPSFPEPWDGFEHDVKNAAEKILISYRKNDRIISKGKKGFSVRGQLHKENVFGKHKGKEDEKKSFYHRRKYLNDLKTNKHVSKIVDERIKQLVLDHLKNSCGVNISSEKGFKIPPNAFFTKDGKPRLFLPPNPRKKKNSQPVPIKKVRIKEEIGNARQLKNGINQYVNPRNNHHVMVYKTHSGDVKESIISFWDAVNRMKKNQSVYQLPEDGVEILAVLEQNDMYLIGITDEELEKRKNDQKFLSNHLYRVQKLSSMYYTFRHHLASTVTNPDEEERIVSFDRFQLRNPKKVKISELGEISLC

SEQ ID NO: 1342 - protein, 365 aa, unidentified
  REGION 1..365: note = Category: MG61 effectors
  REGION 1..365: note = Description: MG61-178 effector
  source 1..365: note = uncultivated organism sequence
MTYVTLVLPFNAGGDTTKRLLSTAWLFKTAVHRVLDVAKRSPVLPGTDIGWKSAFRSLAYSVIPNRRYADGAVTLVRSIYESCRQLGVDFKSVELSDRLMFQQSELEYPARNITLKPGYEVHVTTISYDRESYRDVIKLVAPKNYSTLLSKIIEERQEYSGRVVVKGCGVRDNTLWVRGEVQITIPVDFYYKHADRYREPKGDLVGGVDVNADRINLVVVDEKGNLRDYKTFWFEKTTARGYSRRRTWSVIGMRIHEMLEYAYRHGASTIVLENPEVLSKLKLLWIRRGDRRHENYNYKVSIFRSSIIEMVALKAPLYGLEVEYVNPRGTTNSVEHDMLMKEHGLDKHTASAYLIALRALAHQST

SEQ ID NO: 1343 - protein, 363 aa, unidentified
  REGION 1..363: note = Category: MG61 effectors
  REGION 1..363: note = Description: MG61-179 effector
  source 1..363: note = uncultivated organism sequence
MNYITITLPFNAHGKTARLLLSTARLFRITVLKVYEKLLEDKVKYISPIMLKKYYRSLAYEIIPNRRYADGALTLIWSIYESCEALGVPFNEIEWKNWLMFQQTEKEFPCRSITLRRNYTVGVSVIGFNGEKEKIELSPTVSRNYMKLIDYVIEERIPYTGRVVLKGYGERRGVLWVNGRIDVTVPYSAYFEVMRKFKRNYGKLYGGVDVNSDRLNLAIVDGNGRLRDTYTFWFREVTARGYSRHSAWSIIGMRIHEMLKYAYHNGVKTLFLEDPEVLGRLRLYWVRNGERLHENYNWKVSTFRCSIIERITMKAPLYSIKVKYVNPRGTTNSRKHREIMKKHRLDQHNTSAYLIALRGLNLF

SEQ ID NO: 1344 - protein, 364 aa, unidentified
  REGION 1..364: note = Category: MG61 effectors
  REGION 1..364: note = Description: MG61-180 effector
  source 1..364: note = uncultivated organism sequence
MTYITLVLPFNASGDVAKRLLSTVWLFKIASHRLLDIAKQTLVLPRTDTGWKITFRRVTYDVIPNRRYADGVVTLIRGIYESCRHLGVGFKSVELSDWLMFQQSEKEYPPRNITLKPGYEVHVTTISYSGESYRDVVKPSIPKSFSTLVDKIIEESQEYTGRVVVKDSSVRDCTTWVRGEVQVTVPVDFYYKHMARHREPKGNLIGGVDVNVDRVNLAIIDENGNLRGYKTFWFREATARGYPRRSARRVIGARIHEMLDYAHHQGVSILTLENPEVLGKLRLLWVKHGERGHENYNYRVSAFRCRVIEMIALKAPLYALEIKYVNPAGTTNSKDHDEAMRRYGLDKHASSAYLIATRSLNQKR

SEQ ID NO: 1345 - protein, 365 aa, unidentified
  REGION 1..365: note = Category: MG61 effectors
  REGION 1..365: note = Description: MG61-181 effector
  source 1..365: note = uncultivated organism sequence
MSYVTLCLPFNVGDDVAGKLLSTSWLFKAASHRMLDLAKQMPILPATDIGWKNTFRKIIYEITPNRRYTDGVIVLVRGIYESCRQLGVGFKDVELRDWLMFQQVEKEYPVRNITLKQGYEFHITTIDYNDGVERIVVEPTIPKNYKLLLDKILEEKQKHTARVVIKDYGVRKNKLWIHGEIQLTIPLDFYRKHMTRYRRNYGKLYGGVDVNSDRINLAIIDSEGNLRDTYTFWFREVTARGYPRRKARSVIGMRVHEMLKYAYHHGVKTLFLENPEVLGKLRLLWVRNGKRLHKNYNWKVATFRSSIIEIIAMKAPLYSIKIGYIDPKGTSNSGEHDKYMRKYRLDKHTASAHLIALKGLNHEFK

SEQ ID NO: 1346 - protein, 364 aa, unidentified
  REGION 1..364: note = Category: MG61 effectors
  REGION 1..364: note = Description: MG61-182 effector
  source 1..364: note = uncultivated organism sequence
MVENAFYTIKLAFNVGGDRARKVLSTAWLFKLACHRVLSRSKELLNALIPSKIAWVKMFYSDARDLIPNKRYAYGAVYLVYGIWESSRSLKIDYRNVELSNWLMFQHYDREVDGNVVKVLEDGSALVTTYSYDSSKDRVLIKAKPNRGHGELLKLVVESKEKYMPRVVVRGYNVRNGKPYVNGEIHVTIGYDFYLKHMTRHREPKGSLIGGVDVNADRINLAIIDEKGNLRDSKTFWFTEAVTRGYPRRKAWSVIGMKIHEMLRYAYNHGVSTIALEAPEVLGYLRLAWVRDGGRKHENYNYKKAIFRSSVIERIAMKTPLYGLNTKFVDPKRTTSSREHNEIMKRFGLDRHTASAYIIALRSI

SEQ ID NO: 1347 - protein, 353 aa, unidentified
  REGION 1..353: note = Category: MG61 effectors
  REGION 1..353: note = Description: MG61-183 effector
  source 1..353: note = uncultivated organism sequence
MLLSTARLFRQVVLHLHNLFLKENLRITSLIALKRMYRKRLQEILPNRRYVDGAITLVYSIYESAQALGVPFSDIEFKNWLLFQQSEKEYPCRNVTLQRDYSFRVTTISYQGESKRTSLKPTVPKNYKQILDKIIEKKQPYVARIVLRGFGERKNMLWIHGEIHLSIPYKFYLEHFSKFKRNYGKHFGGVDVNVDRINLAIVDKYGRLRDVKTFWFEEASWKGCPRQRAWSIIGMAIHNMLRYAYYHEVNTLFLENPKVLGYLKILWIRKGKRKNRNYNYRVQIFRSSVAEKIAMKAPLYTINIEYIDPKGTTHSKEHDEIMRRYGLDKHTVSAYLIALRGIERRIMIQKAIV

SEQ ID NO: 1348 - protein, 369 aa, unidentified
  REGION 1..369: note = Category: MG61 effectors
  REGION 1..369: note = Description: MG61-184 effector
  source 1..369: note = uncultivated organism sequence
MSQYQMHRVRDASKLVEYVTIVGRLEPLTEEDYVKLVRLAHEFRKAATYATRMIAKGIDPNTVLRELRSMLNKAYGDSAFKLAKAIVESARSNNGNPLKIEIRRLFIVSEGEAGRLGNRNVRLDDSSTVRIRYPYERSWLSFRARFGENHVPLVKELSELAKSRKCSYGAKIVFRKGRVYLHLSVPVELYLKYFGRGEAIGSLIAGFDLNSDRVNMVIVDKYGRVVDVRTAWFPEVTSPGYPGSKAMVVRLRALAELLNYAYHHGVGVVVFEDLDKIKQRRFTSSPTANRKITRFAKKQLLTHAVVMALKYGLKPVLVDPRGTTSSPVHSTVMKKHGLDRHTASAYLIALRYLQDEKTVNGHKAHKQYK

SEQ ID NO: 1349 - protein, 381 aa, unidentified
  REGION 1..381: note = Category: MG61 effectors
  REGION 1..381: note = Description: MG61-185 effector
  source 1..381: note = uncultivated organism sequence
MSLPEYITIDIPFTATGEEAKLIWCTAWFSKLCAHRLLSDVKRNEVVIDLSQISFLKYARKRCYDILPNRRYIDGVATLIHSTLRSARKLGVNIKSIELRQWLLFQSEAEKEKKGNLNIRLTTINKAELLVINHKKEPKKIVIDLRIPKGYRKTLETLIKKALNREIGYPARVVIKEYNFYPNNLHLYCSLQVMIPYDLYLETMRRYDKPLGDHIAGIDVNVDRLNLAIVDKYGRLKDVKTFWFREITNRGYRRKPAWTKVHQAIHDMLDYAYNHGVSLVALENPKVIGYLRYYWIKNGDRKSRNYNYRKSIFRNKIIEAVTYKAPLYSLKTIYVNPRGTTKSREHDKVMRRYGLDRHTASAYLIALRGIKRHTMIQKAIT

SEQ ID NO: 1350 - protein, 363 aa, unidentified
  REGION 1..363: note = Category: MG61 effectors
  REGION 1..363: note = Description: MG61-186 effector
  source 1..363: note = uncultivated organism sequence
MTYITLTFPFNACCDVARRLLSTAWLFRVATHRLLSIARKFPVLPGTDIGWKSTFRGMVHEVIPNRRYADGVVVLVRSIYESCRQLRVDFRSVELSSWLMFQQVELEYPARNITLKPGYEFHVTTVDYGGNTHRVVVKPTVPGNYGLLLDKVLRERQRYTGRVVLRSYGIGGGNLWVQGEVQMTIPMDFYYRHMARYRRNDGKLYGGVDVNTDRINLAIIDEDSELIDHKTFWFSEASRKGCSGRRAWSIIGMRIHELLDYAYNNGVKTLFLENPEVLGRLKLMWAKSGDRGHGNYNHKVMTFRSTIIERVALKAPLYGIEVKYVNPKGTTNSVEHDEAMRKHGLDRHNASAYLIALRGLKHQ

SEQ ID NO: 1351 - protein, 368 aa, unidentified
  REGION 1..368: note = Category: MG61 effectors
  REGION 1..368: note = Description: MG61-187 effector
  source 1..368: note = uncultivated organism sequence
MNYVTLVLPFNIGGDTAKRLLSTAWLFKAAVHRVLGVAKQSPALPGTDIGWKSAFRSIAYSVIPNRRYADGAVTLVRSIYESCRQLGVDFRSVELSSWLMFQQSEKEYPARNITLKHGYEVHVTTISYSKESHRDVIKPSIPKSYSALLSRIIEERQEYSGRVVVKGYGVRGNTLWVRGEVQITIPADFYCKHMAKYREPKGSLIGGVDVNVDRVNLAIIDEKGSLRDYKTFWFTEATVRRYPRKRARSVIGMRVHELLKYAYHHGVSTIALESPEVLGRLKLLWARRGDRKHEDYNYRKSVFRSSVIEMIALKAPLYGMKVEYVDPRGTTNSTEHDRLMKVCGLDRHTASAYMIALRGLAHQVKQMK

SEQ ID NO: 1352 - protein, 369 aa, unidentified
  REGION 1..369: note = Category: MG61 effectors
  REGION 1..369: note = Description: MG61-188 effector
  source 1..369: note = uncultivated organism sequence
MDYITIKLPFNVDGDVAKGLLSTAWLFRVAAHRVLALARQQESLPGSRIGWKNMFRQFAYGIIPNRRYADGAVILVMSIYESCRELGVDFKGVELSDWLMFQQSELEYPAKSITLKPNYEFHVTTVRYDGSTGRVVVKPTIPRSYGELLNAVLAERVKYMGRVVVKDYGVRGNQLWVRGEVHMTVPLDVYYERMARHKRNGGKLFGGVDVNTDRVNLAIVDEGGDLRDYKTFWFSEVTARGFPRHSALSIIGMRIHEMLNYAYHHGVKTLFLENPEVLGRLKLVWIRNGDRGRENYNHKVATFRSTIIERTALKAPLYSIEVGYVSPRGTTNSEEHDELMRKYRLDRHTASAYLIALKGLITNGNKHYD

SEQ ID NO: 1353 - protein, 363 aa, unidentified
  REGION 1..363: note = Category: MG61 effectors
  REGION 1..363: note = Description: MG61-189 effector
  source 1..363: note = uncultivated organism sequence
MTYVTLTFPFNICCDVAKRFLSTAWLFKIATHKLLGVAKQSPVLPGTDIGWKNTFRGIVYEVIPNRRYADGVITLVRSVYESCRQLGVDFRSVELSDWLMFQQGELEYPARNITLKPGYEFHITTIDYSKNSYRDVVKPIIPKSYRLLLDKVLDERERYTGKVVLKSYGIKECNLWVQGEVQITIPIDFYYKHMARAKAGNGKLYGGVDVNVDRINLAIVNGGGELRDVYTFWFEEASRKGCSRQRVRSIVGMRVHEMLEYAHRHGVKVLFLENLEVLGKLKLLWIRSNDRRHENYNYKVSVFRSSVIEMIALKAPLYSIEVKYINPKGTTNSEEHDEIMKRFGLDRHIASAYLIALRGLRHR

SEQ ID NO: 1354 - protein, 365 aa, unidentified
  REGION 1..365: note = Category: MG61 effectors
  REGION 1..365: note = Description: MG61-190 effector
  source 1..365: note = uncultivated organism sequence
MSYVILRLPFNINGGVAKELLSTAWWFKTAAHRVLSLAKRMQFLPGAKIGWVNMFRGIAYEIVPNRRYADGAVTLVMGVYESCRALGIDFRGVELGDWLMFQQSELEYPAKSITLRPGYEFHVTTIKYDGLIGRVVVKPTVSEDYRELIDAIYRERIKYMGRVVIRDYGARNNQLWVHGEIHITVPLDIYYEHMAKHRRNSGRLFGGVDVNTDRINLAIVDEGGDLRDYKTFWFSETMARGFLKHRAWSIIGMRIHELLDYAYNHGVKTLFLENSEVLGRLRLMWVWNGGRNHENYNYKVMIFRSTIIEKIALKAPLYSIRAGYVNPRGTTNSKEHEEAMRRYRLDRHTTSAYLIALKGLTHQQK

SEQ ID NO: 1355 - protein, 364 aa, unidentified
  REGION 1..364: note = Category: MG61 effectors
  REGION 1..364: note = Description: MG61-191 effector
  source 1..364: note = uncultivated organism sequence
MSQYQTHRVINASKLVEYVTIVGRLEPLTEEGYVKLVRLAHEFRKAVTYATRMITKGIDSKAVLRELRSILNKAYGDSAFKLAKAIVESAGVNDGNPLKVEIRKLFIVSEGETSRQGNRNVRLDDSGIVRIKYPYDRSWLIFKARFREEYVPLVKELSELARSKKLSYGARVVFRSGRVYLHLSVPVELYLKYFRRGEARGSLIAGFDLNSDRVNMVIVDEYGRIVDMRTAWFPEVTSHGFPRNRAKVARLQALSKLIEYAYHHGVGVTVFEDLGRIKRREFTGSPTANRKISRFAKRQLLAHVVVMSLKYGLKPALVDPRGTSSSHEHYFIMEKYGLDRHTASAYLIALKYLRDENHEPSQST

SEQ ID NO: 1356 - protein, 302 aa, unidentified
  REGION 1..302: note = Category: MG61 effectors
  REGION 1..302: note = Description: MG61-192 effector
  source 1..302: note = uncultivated organism sequence
MRLCLIADMLVIVLVRGIYESCRQLGVNFKEVELGNWLMFQQTEKEYPVRNITLKQGYELHITTLDYDGNSERIVIKPTTPKNYKLLLDKILEERQKHTARVVVKDYGIRKGKLWVHGEIQLTIPLNFYYKYTTRYKRNYGKLYGGADVNSDRINLAIVDKEGNLRNTYTFWFREVTARSYPRRKARTIIGMRIHEMLKYAYHHGVKTLFLENPEVLGRLKLMWMRNGKRLNRNYNWRVTTFRSSIIEMIAMKASLYAIRVMYVNPKGTTSSEKHDGIMRKYRLDKHTASAYLITLKGLDLL

SEQ ID NO: 1357 - protein, 356 aa, unidentified
  REGION 1..356: note = Category: MG61 effectors
  REGION 1..356: note = Description: MG61-193 effector
  source 1..356: note = uncultivated organism sequence
MAGEIREPGVTHVTVTGRVVPLDSNSYMELVLLAHRFRKALTKAVKMRARGVDKNAIVKEITRELNLGYADTIYKLAKLVVEGARRNNSNLLKVEIRKLFVASRGFSSNKGNRNIRLLSTSELEVNIPWRGWVKFRVLFGGQYIPLVSELIEKALRRELSYTAKIVFRNGRPYLQVSTPIELYLKHFKKEVARGDLIAGFDLNSDRINMVIVDKLGVIRDVKTEWFPEVTSPGFPREKANTLRLQALAKLLGYAYHHGVGVVVFEDLERIRGRRYTKSRSANRKIGRFPKRKLLQYAIVMALKYGFKVYLANPAYTSKIGEKLGKELGFDKHTASAYVLALKALQPENYKLLTELR

SEQ ID NO: 1358 - protein, 369 aa, unidentified
  REGION 1..369: note = Category: MG61 effectors
  REGION 1..369: note = Description: MG61-194 effector
  source 1..369: note = uncultivated organism sequence
MDYLTIKFPFNANGDVAKELLSTAWLFKIATHRVLSLVKQQQVLPGTRVGWKGMFRGIAYGVVPNERYADGAITLVMGIYESCRALGIDFRSAELGDWLMFQQSSLEYPSRNITLKPNYEFHITTIRFNGSIDRVVVKPTIPRSYEKLLGAVITKRVGYMGRVVVRDYGVRGNQLWVRGEVQVTIPLDIYYEHMSKHKRNAGKLVGGVDVNTDRINLAIIDEDGELIDHKTFWFSEVTARGFPKHSAWSIIGMRIHELLNYAYHHGVRILFLENPEVLGRLRLMWIRSGDRGHENYNHKVTTFRSTIIEKIALKAPLYSIEVKYVNPKGTTNSTKHDELMKKHGLDRHTTSAYLIALRGLGINKYVHYK

SEQ ID NO: 1359 - protein, 286 aa, unidentified
  REGION 1..286: note = Category: MG61 effectors
  REGION 1..286: note = Description: MG61-195 effector
  source 1..286: note = uncultivated organism sequence
MAREVRKPEITHVTITGRVIPLNNDSYMELVLLAYRLRITLIKAIKMTTKGLGKNTIVKEVTKELNLGYADTIYKLAKLIVEGAKSNGSNPLRVKLRRLFIASRGFTANKGNRNIRLLSSSELQVNIPWKGWVKFKVVSGKRCIPLVYELVEKALSKKLSYTAKIVFRNGKVYLHISIPIELYLKYFSKGRAKGKLIAGFDLNSDRVNMVVVNRQGIIRGTKTEWFPEVTSHGFPRNKANTIRLQALAKLLDYAYHHGVGVALFEDLDRIKKRRYTRSKTANRKIT

SEQ ID NO: 1360 - protein, 363 aa, unidentified
  REGION 1..363: note = Category: MG61 effectors
  REGION 1..363: note = Description: MG61-196 effector
  source 1..363: note = uncultivated organism sequence
MGYVTLCLPFNVDGVEARELLSTAWLFKAATHRVLYLARRAQALPATDIGWKDAFREAVYEVVPNRRYADGVVVLVRGIYEACRQLGVDFKDVELGDWLMFQQVEKEYPVRNITLRRGFELHITAIGYDGEVERIAVKPTVSKAYRALLDKVIEEKQKHTARVVIKGYGVRRDKLWVHGEVQLTLPLDFYYKHMTRYRGNYGKLYGGVDVNADRINLAIVDENGGLRDTYTFWFREVTARGYPRRRARSVIGMKVHDMLRYAYHHGVKAIFLESPEALGRLRLLWIRNGKRLHENYNWKVAAFRSSIIEMIAMKAPLYSIKVGYVGPRGTTHSKEHDEVMKKHRLDKHTASAYLIALKGLKQP

SEQ ID NO: 1361 - protein, 373 aa, unidentified
  REGION 1..373: note = Category: MG61 effectors
  REGION 1..373: note = Description: MG61-197 effector
  source 1..373: note = uncultivated organism sequence
MNETYLTLRLPFNACDVEAGMLLSTARLFRQVVLHLHNLFLKENLRITSLIALKRMYRKRLQEILPNRRYVDGAITLVYSIYESAQALGVPFSDIEFKNWLLFQQSEKEYPCRNVTLQRDYSFRVTTISYQGESKRTSLKPTVPKNYKQILDKIIEKKQPYVARIVLRGFGERKNMLWIHGEIHLSIPYKFYLEHFSKFKRNYGKHFGGVDVNVDRINLAIVDKYGRLRNVKTFWFEEASWKGCPRQRAWSIIGMAIHNMLRYAYYHGVNTLFLENPKVLGYLKILWIRKGKRKNRNYNYRVQIFRSSVAEKIAMKAPLYTINIEYIDPKGTTHSKEHDEIMRRYGLDKHTVSAYLIALRGIERCIMIQKAIV

SEQ ID NO: 1362 - protein, 371 aa, unidentified
  REGION 1..371: note = Category: MG61 effectors
  REGION 1..371: note = Description: MG61-198 effector
  source 1..371: note = uncultivated organism sequence
MSYITLTLPFNIDGGEARKLLSTAWLFKIASHRMLSLVKQFPILPATDIGWKNTFRKIIYEIIPNRRYTDGVIVLVRGIYESCRQLGIDFKEVGLGDWLMFQQTEKEYPVRNITLKQGYEFHITTINYNGNSERITIKPTIPKNYKLLLDKILEEKQKHTARIVIKDYGVRKNKLWIHGEIQLTIPLNFYYKCMVRYRRNYSRLYGGVDVNVDRINLAIIDRYGRLRDVKTFWFEDATRRGYPRRKARILIGMAVHGMLQYAYHHGVKMLFLENPSILSRLRLIWIRNGRRLHRNYNWKISVFRSSVIETISMKAPVYSINTEYIDPKGTTHSKKHDEVMKKYGLDRHTASAYLIALKGIKGYRMIQKATD

SEQ ID NO: 1363 - protein, 363 aa, unidentified
  REGION 1..363: note = Category: MG61 effectors
  REGION 1..363: note = Description: MG61-199 effector
  source 1..363: note = uncultivated organism sequence
MSFITLRFPFNVDGDAAKGLLSTAWLFKIAAHRVLDVAKQQEVLPGTKIGWVNVFRGIAYGVVPNRRYADGAVTLVMGVYESCRALGVDFRSVELGDWLMFQQSELEYPSRSITLKPNYEFHVTTVGFDGTVGRVILKPTIPRNYKELLDTVITEHVKHMGRVVITDYGVRNNRLWVHGEVQVTIPLDVYYEHMSKHKRNSGRFIGGVDVNTDRINLAIIDSVGRLIDHKTFWFSEASRKGFSRHSAWSIIGMRIHETLNYAYHHGVRALFLENPEVLSRLRLMWVRGGDRKHENYNHKVSIFRSTIIEKIAMKAPLYSIRAGYVSPRGTTNSKEHDEAMKRYELDKHTASAYLIALKGLTHQ

SEQ ID NO: 1364 - protein, 293 aa, unidentified
  REGION 1..293: note = Category: MG61 effectors
  REGION 1..293: note = Description: MG61-200 effector
  source 1..293: note = uncultivated organism sequence
MTYIMLVFPFNVCGDVAKRFLSTAWLFKIATHRLLNVVKHFPVLPATDIGWKNTFRGITYEIIPNRRYADGVVTLVRSIYESCRQFRIDLKSVELSNWLMFQQSELEYPARNITLRSGYEFHITTVDYNKNTYRDVVKPIIPKNYKPLLDKMLEERHKYTGRVAVKSYGIRKYNLWVRGEIQITIPTDFYYNHMTRYRESKGSLIGGIDVNVDRLNLAIIDEKGNLRDCKTFWFSEAVARGFSRRGARSIIGAKIREMLSYAYHHNVKILFLENPEVLSKLKLLWVRNGDRKT

SEQ ID NO: 1365 - protein, 305 aa, unidentified
  REGION 1..305: note = Category: MG61 effectors
  REGION 1..305: note = Description: MG61-201 effector
  source 1..305: note = uncultivated organism sequence
MGLLSERYADGAVTLVMSIYESCRELGVDFKGVELSNWFMFQQSELEYPAKSITLKQNHGFHVTTVRFDGVIGRVVVKPTIPRSYKELLDAILTERIKYVGKVLIDGVGARGSQLWVHGEVQVTIPMDVYYEHMARHRRNAGKLIGGVNVNSDRINLAIIDEDSEPIDHKTFWFSEASRKGFSRHKAWSIIGMRIHETLNYAYRHGVKTLFLENPEVLGRLKLVWIRSGDRKHENYNYKVMTFRSSIIERITMKAPLYGIETKYVNPRGTTNSEEHDEAMRKHRLDKHTASAYLTALRGLKHQQK

SEQ ID NO: 1366 - protein, 364 aa, unidentified
  REGION 1..364: note = Category: MG61 effectors
  REGION 1..364: note = Description: MG61-202 effector
  source 1..364: note = uncultivated organism sequence
MVENPLYTIKLSFNASGDRAKKILSTAWLFKLACHRVLSRSKELLNALIPSKIAWVKMFYSDARDLIPNKRYAYGGIYLVYGIWEGTRELGIDYRSIELSDWLMFQHYDREVDGNVIRILEDGSALVTTYSYDGSKDRVLIKSKPNRGHGELLKLVVESKEKYMPRVVVRGYNVRSGKLYVSGEIHVTIGYDFYLKHATRYGEPRGSLIGGVDVNSDRINLAIVDEKGNLRDCKTFWFSETTARGCPRRKAWSIIGMKIHEMLRYAYEHGVSTIALENPEALGYLKFAWVREGDRKHENYNYKIAVFRNSIIERIAMKAPLYWLDVKFVDPRGTTSSREHDEIMKRLGLDRHTASAYIIALRNI

SEQ ID NO: 1367 - protein, 363 aa, unidentified
  REGION 1..363: note = Category: MG61 effectors
  REGION 1..363: note = Description: MG61-203 effector
  source 1..363: note = uncultivated organism sequence
MSYVTVVAGFNASGEEAKLLFSTAWLFKLATYRVLSVAQNMPILPVSRIAWKNVFRRVAYEVIPNRRYADSTVILVMGIYESCRQLGIDFRRVELGDWLMFQQTEKEYPPRNITLKSVDEAWVTVFGYDLEARRVKLRVSTSGSFKELLGKVLEEKQPYNPRIVIRSWNARDGILYVRGELHISIPLGFYYKHMTRYGRNCGKLYGGVDVNVDRVNLAIVDEYGRLRDTKTFWFEEASWKGCPRQRAWSIIGMAIHNMLRYAYHHGVKTLYLENPETLGHLKTLWIRKSDRGNSNYNFRVQVFRTRIVEKISLKAPLYSIDTRYVDPRGTTSSRKHGEIMRKYGLDRHTASAYLIALKGLKQP

SEQ ID NO: 1368 - protein, 373 aa, unidentified
  REGION 1..373: note = Category: MG61 effectors
  REGION 1..373: note = Description: MG61-204 effector
  source 1..373: note = uncultivated organism sequence
MGIYPSSGLKVSYVTIVTGFNASDEKARLLLTTAWLFKVATHRLFNIVKQMPVLPASDIGWKSAFYKAVYDVIPNRRYSYGVITLVRSVYESCRQLGIDFRSVKLSDWLMFQQSEKEYPPRSITLKSPSEVEVTVFSYSKESKRVALRVSTSGVYRKLLDVILREKQLYMPRIYVKSWNVRDGKLFVRGELQIAIPVDFYYKHMPRASANNGKLYAGVDVNVDRVNLAIVDGDGRLRDVYTFWFEEASRKGCSRHRARSIIGMRVHEMLEYAYSHGVKVLLLENPEVLGKLKLLWVRSSDRRHENYNYRKAIFRSSVIEMIALKAPLYSIEAKYIDPKGTTNSREHDDVMRKYRLDRHTASAYLIALKGLKQP

SEQ ID NO: 1369 - protein, 356 aa, unidentified
  REGION 1..356: note = Category: MG61 effectors
  REGION 1..356: note = Description: MG61-205 effector
  source 1..356: note = uncultivated organism sequence
MSRYQTSSVVDTSSIVNYVTIIGRAYPASSEDYMRLVRLAWNFRRAVQVATRMTVKGLEEDSILRELRRMLNKAYADSAYNAAKAMVEGCIFNGGNPLHIEVRKLFIISEGESSRLGNRNVRLEDTCLVKVKYPYDSSWITLRAEFGEKYLPLLRELVDLAKQKKLSYTARIVFREGSIYLHLSIPIQLYLKYFKKGEARGELIAGFDLNSDRVNLVIIDEHGRILDTRTAWFPEATSHGFPRGKAKALRLNALARLLEYCYRHSVSIVVFENLLSVKRKRFTRSKIANRKITRFAKKQLIQYSVVMALKYGFRVFLVDPKGTTNSREHYDVMRKYRLDRHAASAYLIALRGLRHQ

SEQ ID NO: 1370 - protein, 321 aa, unidentified
  REGION 1..321: note = Category: MG61 effectors
  REGION 1..321: note = Description: MG61-206 effector
  source 1..321: note = uncultivated organism sequence
MLPATDIGWKSAFREALYEVIPNRRYADGAIVLIRGIYEACRQLGVDFKEVELGDWLMFQQAEKEYPVRNITLRRGFEFHITTIGYDGEVERAVVKPTIPKTYRTLLDKVIEEKQKHTAKVVIKGYGVRRSELWVHGGIQLTIPLDFYYKHMTRYRGNYGKLYGGVDANTDRINLAIVDENGGLRDTYTFWFREVTARGYPRRRARSIIGMKIHEMLKYAYHHGVKTISLENPEMLGRLRLLWIRNGRKLHKNFNWKVSTFRSSIIEMIAVKAPLYSITVKYVDPKGTTHSKEHDEIMKKRRLDKHTASAYIIALKGLKLP

SEQ ID NO: 1371 - protein, 340 aa, unidentified
  REGION 1..340: note = Category: MG61 effectors
  REGION 1..340: note = Description: MG61-207 effector
  source 1..340: note = uncultivated organism sequence
MCVSRYQMLKPGGASRLIEYVTVTGRLEPLTEEDYMKLVRLAHEFRKAVVYATRMIAKGLDSNAVLGELRLMLNKAYGNSAFKLARTLIEGARAKGEDPLRIEVERLFIVSEGEASRQGNGNVRLGDPGTVRIRYPYDGSWLSFRSRFGEEYVPLVKELSELAKSKRCSYGARVVFRSGRIYLHLSVPVELYLKYFRKGKAGGDLIAGFDLNSDRINMVVMDEHGRIVDTRTAWFLKVTSPGFPRNKARVARLQAFSKLIEYAYYHGVGVAVFEGLDKVKRREFTSSPTTNRKMSRFAKRQLLTHAVIMSLRYGLKPVLVDPRGTTSSPIHLVIMKIWFR

SEQ ID NO: 1372 - protein, 370 aa, unidentified
  REGION 1..370: note = Category: MG61 effectors
  REGION 1..370: note = Description: MG61-208 effector
  source 1..370: note = uncultivated organism sequence
MSQCQTSSAGGVEADVVDASKLVKYVTVTGRLAPISSEDHMKLARLAHDFKRAVLMATRMVAKGVREAEVLRELRKRLNKAYADSAFKTAKAIVEGCLFNGGNPLHIEVRKLFIVSEGEASRLGNRNVKFEGTDIIKVKYPYDGSWLSLRAEFGGEQLPLVKELVDLAERRRISYRTEIVFRSGKVYLHLSIPIELYLKHLGRGRGRRGRGGLVAGIDLNSDRVCMVVVDSLGRVRDLKTKWFSELTSHGFSRGRARARRLEALSKIFEYARDHNVGVVVFEDLFKVKRRRFVKSRKANRKISKFAKRKLLQHGVVMALRRGFEVLLVEPRGTTSSEEHAKVMRELGLDKHVASAYLIALRGLHEAGARK

SEQ ID NO: 1373 - protein, 362 aa, unidentified
  REGION 1..362: note = Category: MG61 effectors
  REGION 1..362: note = Description: MG61-209 effector
  source 1..362: note = uncultivated organism sequence
MLYLQKPSSVEELVTHVTVIGKLVPETSEDYMKVARLAWSFRRAVELMVREIANGTSMKEATKRLYHVLPNYVYLESAYKHAKLIAEGCKFNNSNPKHIHIKKLFIISRGNKYDVGNRNVKLVSEGSFFRALIKYPWDGSWITCRAFFGEKYIPLLLELVELTKQRKDGYGSHIVFREGKVELHVSVPLNLYLKHFSLQRRRGYGLVAGLDLNSDRINMLVMDSSGRIVTLKTTWFPEVTLHGYPRNKTQDIRLKKLKELLSYARRIGVDYVILENLFMVKRRNRVRSPSGNRKITRFAKKQLLQHGLLTALKLGLTPVLISPKGTTNSREHEEVMKSRGLDRHVASAYVIAQRGLEVIKSH

SEQ ID NO: 1374 - protein, 362 aa, unidentified
  REGION 1..362: note = Category: MG61 effectors
  REGION 1..362: note = Description: MG61-210 effector
  source 1..362: note = uncultivated organism sequence
MTYITLTLPFNISGGVAGRLLSTAWLFKVASHRLLDVAKQTPVLLGTDVGWKNAFRRIVYDVIPNRRYADGVATLVRGIYESCRQLNVDFKSVELSDWLMFQQSELEYPARSVTLKPEYEVHVTTISYSGESYRDVIRPSIPKGLSALVGKIIEERQEYAGRVVIKDFGVRDGTIWVRGEAQVTVPVDFYYKHMARYKEPRGSLIGGVDVNVDRVNLAIVDKNGDLRDYKTFWFGEATARGYPRRSARSVIGMRIHEMLDYAYHHGVSTIALENPEVLGKLRLLWVKHGKRGHENYNYRVSVFRCRVIEMITIKTSLYAVKVKYVNPASTTNSKEHAETMERYGIDRHTSSAYLIALKAQNQ

SEQ ID NO: 1375 - protein, 366 aa, unidentified
  REGION 1..366: note = Category: MG61 effectors
  REGION 1..366: note = Description: MG61-211 effector
  source 1..366: note = uncultivated organism sequence
MSRCLTSSVVNGADVVRYVTVTGRLVPHTPEDFMKLIRLARDFRRAVVYATRMIVKKLDRNEVLRELRSMLNKAYGDSAYKVAKALVKGAKFNGGDPRRIEVKRLFIVNGGEASRLGNRNVRLESTDTVKVKYPHDGSWLTFRACFGEEYLPLVSELVELARARKASYGARMIFRSGRVYLHLSIPVELCLKHFRRGEARGNLAAGFDLNSDRINMVIVDRYGRIRDVKTAWFPEVTSHGFPRNKAKARRLEALAKLFEYAYYHGVGTVVFENLLAIKHRRYVRSPTANRKIAKFAKRELLQHAIVSAMKYGFKVLLIDPRGTTRSREHDETMRKHGLDSHAASAYLIALRGIEGYRKYNLRFQPT

SEQ ID NO: 1376 - protein, 362 aa, unidentified
  REGION 1..362: note = Category: MG61 effectors
  REGION 1..362: note = Description: MG61-212 effector
  source 1..362: note = uncultivated organism sequence
MSYITLRFPFNAGGDVAKELLSTAWLFKIATHRVLRITKQQQTLPITKIGWKTTLRKVAYDVIPNERYADGSITLVMGIYESCRELGIDFGSVELSDWLMFQQSWLEYPSRSISLKPNYEFHTTTIRYNGTTSRVVVKPTIPRSYKQLLDTIITEHVKYIGRVVIRDYGVRDNQLWVRGEVHMTVPLDVYYERMARHKRNGGKLFGGVDVNVDRINLAIINDDGELIDHRTFWFSEVTARGFPKHRAWSIIGMRIHEMLDYAYRHGVKTLFLENPEVLGRLKLMWIRNGNRKHENYNYKVSVFRSTIIEKIVLKAPLYSIKVGYVNPRGTTNSTEHDELMRKYRLDRHSTSTYLIALRGLRH

SEQ ID NO: 1377 - protein, 363 aa, unidentified
  REGION 1..363: note = Category: MG61 effectors
  REGION 1..363: note = Description: MG61-213 effector
  source 1..363: note = uncultivated organism sequence
MSYITITLPFNVNGREAGSLLSTAWLFKIASHRMLSLARQTPVLPATDIGWKSVFRKAVYEIIPNRRYADGVIVLVRSIYESCRQLGVDFKNVEFSDWLMFQQAEMEYPVRNITLREGYVFHITTIDYVGNIDRVVVKPTIPRGYRLLLDKVLEERVGHTARVVIKDYGIRENRLWVHGEVQLTVPMDFYYRHMIRYGQNNGRLFGGVDVNVDRINLVIVDEGGELRDVKTFWFREVTTRGYPRHRAWSVIGMRVHEMLDYAYHHGVKTLFLEDPGVLGRLKLMWIRNGRRLHENYNYRVATFRSSVIGMITMKAPLYSIEVKYVNPKGTTSSEEHDEVMRKHGLDRHTASAYIIALKGLKQP

SEQ ID NO: 1378 - protein, 364 aa, unidentified
  REGION 1..364: note = Category: MG61 effectors
  REGION 1..364: note = Description: MG61-214 effector
  source 1..364: note = uncultivated organism sequence
MQVQPLYTVKLLFNASGENAKKVLSTAWLFKIACHEVLNKSKQVRDVLIPSKIAWIKMFKNYAYELIPNKRYSYGVVYLIYGIWESARSLGIDYDNVELSDWMLLQHYEREVNGNVIRVYEDGSALVTTYDYDGSKDRILVRAKPNKGQAGFLRKIVELREKYMPKLIIRDYGVRKGKLYVRGEIHISISYDFYLKYVKRYNEPKGNLVGGIDVNSDRINLAVIDEEGKLRDVKTFWFQEVTTRGYPRRKAWSVIGMKVHELLKYAYHHGVSTIVLENPEVIGRLRLVWVRNGKRLHRNYNWRVTIFRNRIIEMITMKALIYGLHVNYVNPKGTTHSREHDDIMMRYGLDRHTASAYLIALKSI

SEQ ID NO: 1379 - protein, 369 aa, unidentified
  REGION 1..369: note = Category: MG61 effectors
  REGION 1..369: note = Description: MG61-215 effector
  source 1..369: note = uncultivated organism sequence
MSQYQTHRVRDASKLVEYVTIVGRLEPLTEEDYVKLVKLAHEFRKAVTYATRMIAKGIDSKVVLRELRSMLNKAYGDSAFKLAKAVVESARANNGNPLKIEIRRLFIVSEGEAGKQGNRNVRLDDSSKVRIRYPYDKSWLSFRARFGENYIPLVRELSELAKSRKCSYGARIVFRSGRIYLHLSVPVELYLKYFRKGEARGSLIAGFDLNSDRINMVIVDKSGVIRDVRTEWFPEATSPGYPRNKARVVRLRALTKLLSYAYHHGAGVAVFEELDKIKWRRFTSSPKANRKIAKFAKKQLLTHAVVMGLKYGLKPVLVDPRGTTSSSVHSAVMKKHGLDKHTASAYLIVLRYLQNRKTVNSYKAYKQHK

SEQ ID NO: 1380 - protein, 367 aa, unidentified
  REGION 1..367: note = Category: MG61 effectors
  REGION 1..367: note = Description: MG61-216 effector
  source 1..367: note = uncultivated organism sequence
MDREVREPEITHVTVAGRVVPSNSKDYMKLALLAHRFRKCLVKVVRMLAKGIDKNTIVKEITRELNLGYADTIYKMAKLIVEGAKHNKSNPLRIEIRKLFIASRGFSSNKGNRNIRLVSTEQVEVNIPKEEEDWVKFKVVFGERYIPLVRELVDKSLSKQLSYTAKIVFRDGRIYLHLSVPLELYLKHFRKGEARGDLVAGFDLNSDRVNMVIVDKLGIIRDVKTVWFPEVTSHGYPENKAHTTRLQALAKLLDYAYHHGVGVVVFEDLERIKKRRFTNNEKANRKIARFPKRRLLQHAVVMAMKYGFRVYLVNPAHTSKLGAEVGKELGLDRHTASAYIIALKYLGIAEHLRNIVYNYNYNQSIAK

SEQ ID NO: 1381 - protein, 361 aa, unidentified
  REGION 1..361: note = Category: MG61 effectors
  REGION 1..361: note = Description: MG61-217 effector
  source 1..361: note = uncultivated organism sequence
MDYITIKLPFNVDGDVAKELLSTAWLFRITTHRVLTIAKQQVLPATRIGWKNAFRGIAYRVIPNRRYADGAIILVMGVYESCRALGIDFRSVELSDWLMFQQSELEYPAKSITLKQNHEFHVTTVRYNGSTGRVIVKPTVPRNYRELLDAILTGRVEYMGRVVITDYGVRNNRLWVHGEVHITIPLDVYYEHMARHKKNSGKLIGGVDVNTDRINLAIIDEDGELIDHETFWFSEVTARGFPKHKAWSIIGMRVHEMLNYAYHHGVRILFLENPEVLGRLRLMWVRNGDRKHENYNHKVATFRSTIIEKITMKAPLYGIEVKYVNPRGTTNSKEHDKLMRKYGLDKHTTSAYLTALKGLKH

SEQ ID NO: 1382 - protein, 368 aa, unidentified
  REGION 1..368: note = Category: MG61 effectors
  REGION 1..368: note = Description: MG61-218 effector
  source 1..368: note = uncultivated organism sequence
MGDGWLSVLQSQTGNVVDAFTVVNYVTIIGKLHPASGEDYMRLVRLAWDFKNTVRITIRMIAKGVGRSNILKELRGVLNKAYADSAYKLAKAMVEGCLFNGCNPLHIEVRRPFIVSEGESSRLGNRNVRLEDTNIVKVKYPYDGSWITLRAEFGERYLPLLRELAELARRKKVSYGARIVFREGNIYLHLSIPIKLYLKYFKRGEAKGGLVGGFDLNSDRVNLVIIDVHGRIVDTRTAWFTEAVSHGFSRNRARALRLGALAKLLKYCYTHNVGVVVFENLPLIKRRRYTRSRVGNRKITLFAKRQLIQYGIVMALKYGFKTLLTNPKGTTNSKEHSEVMKKYGLDRHTASAYLTALRGLETLNENYK

SEQ ID NO: 1383 - protein, 363 aa, unidentified
  REGION 1..363: note = Category: MG61 effectors
  REGION 1..363: note = Description: MG61-219 effector
  source 1..363: note = uncultivated organism sequence
MTYVTLVLPFNASGDVAKRLLSTAWLFKVASHRLLSIAKQMPVPPGSDIGWKSAFRSVAYEVIPNRRYADGVVTLIRSIYESCRQLGVDFRSVELGDWLMFQQSELEYPARNITLKPGHEVHVTTVSYSGESYRDVVKPLIPRSCGMLVDKVVEERQEYTGRVVVNDFGVRGNTIRVCGEVQIIIPLSFYYKYMAKHREPKGNLIGGVDVNVDRVNLAIIDERGILRDYKTFWFKEVAARGYPRASTRSAIGARVHEMLEYAHHHGVSTIVLENPEVLGKLRLLWIKNGKRGGENYNYKVSIFRCRVIEKIALKAPLYALKVKYASPAGTTNSKEHDEAMKRHGLDRHTASAYLIALRELNPS

SEQ ID NO: 1384 - protein, 372 aa, unidentified
  REGION 1..372: note = Category: MG61 effectors
  REGION 1..372: note = Description: MG61-220 effector
  source 1..372: note = uncultivated organism sequence
MEPPRYVTIALDFHADSGEAKAVLSTAWLSKLVAHRVLNLVKRNELLVDLLEYRFLKTLRGKCYDILPNRRYVDGILKLIHSTLKSAKALEVNIKEIELKRWLLFQSDRERGYAKGNMNIRLIDLHHIRVLTIGYDGKTTYIELEVSVPKGWRKLIESLVDRANKGLMGYPARVIVKDYGLGKNGLHVHGEVQVMVPYELYLEVMRRYSEPRGINVAGVDVNVERIDAVVIDEYGNLVSNKTFWIKRATHMGIRRKRAWSLIGEQIHALLKWLYSQGVSIIGLENPEIIGYLRYYWIRNGERKGGKWNCKVSMFRNSIIERITWKAPLYSMKTIYVNPRNTSKEGEKIGKKLGLDRHLGSAYIIAKRALKYL

SEQ ID NO: 1385 - protein, 346 aa, unidentified
  REGION 1..346: note = Category: MG61 effectors
  REGION 1..346: note = Description: MG61-221 effector
  source 1..346: note = uncultivated organism sequence
MCKLCAHRLLNIVKENPLLADLSQYDFIKFGRKLCYGIIPNRRYVDGISTLLHASLQSAKALKVNITKLELKPWLLFQSEAEPWAKGNLNIQFINNDKVRVLVFDKDKSSRKITIEPVIPKGYAKLIRSLVGKALRKEVGYPARVYITDYGGRLEHLYGEIHVMVKYDLYLEVMRRYKKPLGDNIGGVDVNVDRLNLVVINRDGDIVWKHTVRFPQIASRGYRGEKAWSIIGEAIHSILKNAYSHGASVIAVENPEVIGYLRYYWIRNGERRTKNYNYKVAIFRNSIIERIMWKAPLYGLHVVAVNPKGTTHSEDHEHVMRRYGLDRHTASAYLIALKARRNIQRP

SEQ ID NO: 1386 - protein, 363 aa, unidentified
  REGION 1..363: note = Category: MG61 effectors
  REGION 1..363: note = Description: MG61-222 effector
  source 1..363: note = uncultivated organism sequence
MSYITLTLPFNANGLEAKRLLSTAWLFKIASHRMLSIAKQSPVLPVTDIGWKNTFRRVIYEIVPNRRYTDGVIVLVRGIYESCRQLEVAFRDVELGDWLMFQQVEREYPVRNITLKQGYEFHITTIDYNGEAERVIVKPTVPKSYKLLLNRILDEKQKHIARVVIKDYGVRRDMLWVHGEIQLTIPIDFYYKYMTRYRRNYGRLYGGVDVNVDRVNLAIVDDEGKLRDKKTFWFREVVARGFPKKKARTIIGMKVHKMLRYAYHHGVKVLFLENPSTLGKLKLLWIRNGKRLHGNYNWKVSIFRSSVIEMIVMKAPLYSMKVGYVDPRGTTNSREHDEIMRRCRLDKHTTSAYLIALKGLKQP

SEQ ID NO: 1387 - protein, 371 aa, unidentified
  REGION 1..371: note = Category: MG61 effectors
  REGION 1..371: note = Description: MG61-223 effector
  source 1..371: note = uncultivated organism sequence
MSYTTLVLPFNVDDVAARWLLSTSWLFKVATHRMLSLAKQFPVLPATDIGWKNTFRKTVYGVVPNRRYTDGVIVLVRDIYESCRQLGVDFREVELGDWLMFQQSEKEFPVRNITLRQNYEFWITTINYNGESKRMTIKPTIPKNCRPLLDRILEEKQKYTARVVIKDYGIRKNKLWIHGEIQVTIPIDFYYKHTARYRGNNGRLYGGVDVNTDRINLAIVDRYCRLRDVKTFWFEDATRRGYPRRKARILVGMAVHKMLRYAYHHGVRMLFLEDPSVVSRLRLLWIRNGRRLHRNYNWRVSVFRSSVMEMITMKAPLYAVKVDYVDPKGTTNSEGHNEIMKRYGVDRHTASAYLIAMKGIKRHAMIQKATT

SEQ ID NO: 1388 - protein, 1513 aa, unidentified
  REGION 1..1513: note = Category: MG61 effectors
  REGION 1..1513: note = Description: MG61-224 effector
  source 1..1513: note = uncultivated organism sequence
MSKRILGLDLGTNSIGWAVVDEAKEEIVNAGVRIFPEGVVSKTIGSGDKEETKNAARRRARQTRRQFYRKRLRKAKLLEVLIEQNMCPLSLDELNKWRHWDKKEKSQAKVFPNSDEFMNWIRMNPYELRARAIIGTVTAMELGRIFYHLIQRRGFLSSRKGDVKESKTLFEKGKPELNILPINRTEKEIAESGCQTMGEYLNRVVPKEGESYKPILDSDGNEIRARGRYATRKMYVEEFEAIWNAQADHLGLDKRSVLFKKVRMLKGNENSERNKKRISTLKKFYGAENVFVENRGNNLHITTTRTLPFKIFLAGDDVELKRNESVLFWQRPLRSQKGTLGNCSFEDTLPVINMDGTQRKNEKGKPVTYSKKPCPISHPLFELFRTHQFINTIEFGEKQRLSKDQKKQVLELINRKDNAFSFKEIVKKLELFSETFNYENDFKVSGNYTISKLSKLLGKKVWDEHPLACWEAFYFYDDSTKLQKKLNKAYGLNLKVEEVDKIRLKEGYSRVSIKAIQNILPFLEKGYFYSTAVILGGVKNAFGSRWDSYLQDETKDKIEDDILKMLKDKNKEGELIEKIKAYLSDSSNRYGFSENSPAFKKLYHHSQSVEKKELKNKLPPVENIRNPIVQQSLYEMRKVVNALLEKYKEEDPTFSFSSIRVEMGRDLKNGKKQRQKINQVIRKNRENNDEARERLAEFGLQPSRNNIQKYLLFKEMERRAGHVQSPYTGRTISLTDLLGKDNLIQIEHIMPFSKSLNDSFANKTLCESSVNALKGDKTPYAFYHQNSDPKIWGVSSWDEVKHRAFKLLPYAKAKRFVSDKSVDAEDFISRQLNDTRYIAKKATEILSEICSDVQVMPGQLTAELRHLWGLNNVLESSFGVTKQFSDIPLKPGEYYLVLNEQRESIQLIPKHNPKPKTNPNELLVAGEINNAIFESKKLVLELGAPDQANGKYWAKLTLKPIQKFSPKYISKPITDENRIVFKGLVKNQRFSSDSIPKNPIAEHKDGIYWGSFAVKNKRIERSTVAPITNRKEIKLFGEVKDGIFKSYIYECSTTAENGKYWLVLEPDFETPEFIQASNPEPQHSENEHIITGTIDDNGVFVSDLDPSYSVKTDHSAGKYYAVIELASKENDFYLMENPAPKVEKEHRLIEGTVWVDKYSSELKFDPKKNREDQRHHAIDAITIALTKRGYLNALSHYRAKELPEDYKPSFPEPWDGFEHDVKNAAEKILISYRKNDRIISKGKKGFSVRGQLHKENVFGKHKGKEDEKKSFYHRRKYLNDLKTNKHVSKIVDERIKQLVLDHLKNSCDVNISSEKGFKIPPNAFFTKNGKPRLFLPPNPRKKKNSQPVPIKKVRVSETIKNAQQKRLGVNQYVNPRNNHHVMIYKTQSGELKEIIVSFWDAVHRLIKGEDLYKLPKDGIEVVLVLEKNDMVLLNLSKEEFDRRKHDICLLSTNLYRVQKIYSGDESFEYVFRHHLASTLNNKNEEVMIKSFDKFRKINPKKVKVSELGEISLC

SEQ ID NO: 1389 - protein, 356 aa, unidentified
  REGION 1..356: note = Category: MG61 effectors
  REGION 1..356: note = Description: MG61-225 effector
  source 1..356: note = uncultivated organism sequence
MSQYQTSSIVNASTLVKYATIVGRVVPASSEDYMKLTRLAWNFRRAVQVVARIIAKGVEANDVLKELRRMLNKAYADSAFNQAKAVVRACLATGGDPRKIEIGKLFIISEGESSRMGNRNIRFEDTNIVKVKYPYDGSWIQLKARFGEKYLSPLKELVELAKQKKVSYNAKIVFRSSRIYIHVSVPIHLYLKHFKKADARGELVAGFDLNSDRINLAIIDKYGRLADAKTVWFTEITSHGFPHNKAKTTRLRALAKLLKYCYAHGVGTVVFENLYEVKKRRFTKSRNTNRKISRFAKRELLDHAIVMSLKHGFKVLLADPKGTTNSKEHDEAMRTHGLDRHTASAYLIALRGLKPP

SEQ ID NO: 1390 - protein, 365 aa, unidentified
  REGION 1..365: note = Category: MG61 effectors
  REGION 1..365: note = Description: MG61-226 effector
  source 1..365: note = uncultivated organism sequence
MNYITPSFPFNVNGEVAKKLLSTAWLFKIATHRMLSIAKQTPVLPATDIGWKNVFRKIIYEVIPNRRYADGVITLVRGIYESCRELEIGFREVELSNWLMFQQSEKEYPVRNITLKEGYEFRITTIDYNGNSERVVIKPTTSKNYVLLLDKILEERQKHTAKVVIKDYGVRKSRLWVHGEIQLTIPIDFYYKCMTRYKKNKGKLYGGVDVNTDRINLAIVDSEGNLRDAYTFWFRETTARGYPRRRARTVIGMRVHEMLKYAYHHGVKEVFLENPKVLGRLRLLWIRNGRRLHRNYNWKVMTFRSRIIEMITTKAPLYSISIKYVDPRGTTSSKEHDEIMKKYRLNRHTASAYIIALRGLNRKFI

SEQ ID NO: 1391 - protein, 387 aa, unidentified
  REGION 1..387: note = Category: MG61 effectors
  REGION 1..387: note = Description: MG61-227 effector
  source 1..387: note = uncultivated organism sequence
MELPKYITVTMDFHVNGDYARNILSTAWLSKLVAHRVLGLIKENELLADLSEYKFLKVLRSKCYDVLPNRRYVDGILKLVHSTLKSAKALKVNIKDIELKQWLLFQSDGERGYARGNMNIRFIDTQHVRALTLGYDKRTRYVELEVTTPKGWKKLIEFLINRAFDGQIGYPARVVVKDYGIGKHGLHAHGEVQVMVPYSLYLEVMRRYDKPRGSNIAGIDVNVERLDAVVVDEYGNLVSYRTFWMKNTTFMGVRRKRSWSLIGEQIHTLLKWLYSQGVSIIGLENPEIIGHLRYYWIRNGERRDRKWNWKVSMFRNSIIERMTWKAPLYSMKVTYVDPKNTSKEGEKIGKKLGLDKHLGSAYIIAKRTLKHLQKLKTYKEKTVAQLS

SEQ ID NO: 1392 - protein, 364 aa, unidentified
  REGION 1..364: note = Category: MG61 effectors
  REGION 1..364: note = Description: MG61-228 effector
  source 1..364: note = uncultivated organism sequence
MVENPLYTIKLSFNASGDRAKKILSTAWLFKLACHRVLSRSKELLNALIPSKIAWVKMFYSDARDLIPNKRYAYGGIYLVYGIWEGARELGIDYRSIELSDWLMFQHYDREVDGNVIRILEDGSALVTTYSYDGSKDRVLIKSKPNRGHGELLKLVVESKEKYMPRVVVRGYNVRSGKLYVSGEIHVTIGYDFYLKHATRYGEPRGSLIGGVDVNSDRINRAIVDEKGNLRDCKTFWFSETTARGCPRRKAWSIIGMKIHEMLRYAYEHGVSTIALENPEALGYLKFAWVREGDRKHENYNYKIAVFRNSIIERIAMKAPLYWLDVKFVDPRGTTSSREHDEIMKRLGLDRHTASAYIIVLRSI

SEQ ID NO: 1393 - protein, 370 aa, unidentified
  REGION 1..370: note = Category: MG61 effectors
  REGION 1..370: note = Description: MG61-229 effector
  source 1..370: note = uncultivated organism sequence
MDYLTIKLPFNVDGDVAKGLLSTAWLFRVAAHRVLALARQQESLPGSRIGWKNMFRQFAYGVVPNRRYADGAVTLVMSIYESCRELGVDFKGVELSNWLMFQQSELEYPAKSITLKQNHGFHVTTVRFNGSISRVVIKPTVSRSYRELLNAVLFERVKYMGRVVVRDYGVRNNQLWVHGEVQVTVPMDVYYEHMARHRRNAGRLFGGVDVNTDRINLAIIDEEGELRDTHTFWFSEASARGFPMHKAWGIIGMRIHELLDYAYNHGVKTLFLENPEILGRLKLMWVRGGDRRHENYNHKVSVFRSSIIERIALKAPLYSIETKYVSPRGSTNSEEHDELMRKYRLDRHTASAYLIALRGLITNGNKYYYD

SEQ ID NO: 1394 - protein, 351 aa, unidentified
  REGION 1..351: note = Category: MG61 effectors
  REGION 1..351: note = Description: MG61-230 effector
  source 1..351: note = uncultivated organism sequence
MRKLAEYATIQGLLLPETPEDHLRLIRLAYEFRRAVTYATRMIARGVGERAALRELRSMLNKAYGDSAYKVAKMLVRSCASNGGDPRRIKIRKLFIISGGEASRKGNRNIRLGCGYVLIKYPFDGSWLKFRCCFGKYSGLIEELAQLATEKKVSYGARIVFRRGRIYLHLSVPVELYLKHFRRGRASGSHVAGFDFNSDRINMVIVDEYGKIRDARTEWFPEVTSHGYPRSKARARRLEALARLLDYAYHHGVGVVAFENLFLVKRGEFTGCARANRKISKFAKRQLIQHAILMARKYGFKVILVDPKGTTKSREHDEAMRRHGLDRHAASAYLVALRGIERCTTKQNAIV

SEQ ID NO: 1395 - protein, 363 aa, unidentified
  REGION 1..363: note = Category: MG61 effectors
  REGION 1..363: note = Description: MG61-231 effector
  source 1..363: note = uncultivated organism sequence
MSVQRLSSNTVDGVISHVTIIGKLIPETPEDYMKLARLAWSFKRAVELMVREVANGTPMKVATKKLYSLIPNYVYLESAYKHAKLVVEGCRFNNGNPRHVHIKKLFIVSRGNKWDKGNRNIKVIPRHDYFEVLIKYPWGGSWTKCRVFFGEKYIPLLRELVELSEKRIEGYGARIVFRNRRLELHLSVPLSLYLKYFSLPKRRGYELVAGIDLNSDRINMVVIDPNARIITMKTAWFPEVTLHGFPRDRARDIRLKKLKKLLSYARRIGVDYVVFENLFVVKKRGKAPSPSGNRRITRFAKKQLLQHGLLMVLKFGLTPILVDPRGTTHSREHREVMRKRGLDRHMASAYIIAFKGLKIIKNH

SEQ ID NO: 1396 - protein, 379 aa, unidentified
  REGION 1..379: note = Category: MG61 effectors
  REGION 1..379: note = Description: MG61-232 effector
  source 1..379: note = uncultivated organism sequence
MSLDVTKSLPEYLTVDLPFTVKGDHAKLIWFTSWLSKPCARRLLGDVKDDDLLVDLSQTSFLKYARKRCYGILPNRRYVDGVATLMHSTLKSARKLGINIESIELKQWLLFQSEAEKEKKGNLNIRLISANKAEILVFNHRRETEKIVVRLRIPKGYRKVLETLVEKALNKEIGYPARIVIKEYNFYPSNLHLYCSLQVMIPYSIYLETMKKYDKPLRDHVAGVDVNVDRLNLTIVDKYGRLRDTKTFWLREITSRGYRRKQAWTKIHQAIHAMLDYAYHHGVSVVALENPEIIGYLRYYWIRNSYRKTKNYNYKVAVFRNRIIEVVTYKAPLYSLKTIYVNPKGTSHSKEHDETMRKYGLDRHSASAYLIALKGLNLP

SEQ ID NO: 1397 - protein, 392 aa, unidentified
  REGION 1..392: note = Category: MG61 effectors
  REGION 1..392: note = Description: MG61-233 effector
  source 1..392: note = uncultivated organism sequence
MDYLTIRLPFDANGDVVKELLSTAWLFKIAAHRVLAVAKQMQVLPGTRIGWKNTFRDIAYGVIPNRRYADGAVTLVMGVYESCRTLGVDFRGVELGDWLMFQQSELEHPSRNITLKPNYEFHITTIRYNGTTSRVVVKPTIPRSYGELLDAGLTGRVGYIGRVVVRDYGVRGVHGEVQVTIPLDFYYEHMSRHKRNSGRFVGGVDVNADRINLAIIDSVGRLIDHKTFWFSETSRKGYSGHSAWSIIGMRIHETLNYAYHHGVKTLFLENPEILGRLKLMWVRSGDMGHGNYNHKVATFRSTIIEKIALKTPLYGIEVSYVNPRGTTNSIEHDKLMRKYRLDKHTASAYLTALKGLNTNENEQPQITMKTETVQRGLRPCIMCLMVTLTTSQ

SEQ ID NO: 1398 - protein, 364 aa, unidentified
  REGION 1..364: note = Category: MG61 effectors
  REGION 1..364: note = Description: MG61-234 effector
  source 1..364: note = uncultivated organism sequence
MSHYQTNEVIDGKSLVFHVTIIGKLAPQTPNDFMKLVRLAYDFRKAVLYATRMISKGMKANEFLKELRGMLNKGYGDSACKVAESIVEGCKFNGGNPQHIKVKKLFIASEGETSRFGNRNVRLEATDKVKIKYPYDRTWLFFKAQFGKDYLPLVQEIVKLAKEKKMSYGARIVFRDGRIYSHLSIPVDLYLKYFSKGSANGSLTAGFDLNADRINMVVVDKFGRIRDVKTEWFPEVTSHGFPRSKAKIKRLEALARLLDYAYHHNVGVVVFENLFIIKRRKFTKNSSANRKMSRFAKKELLQYGIIMARKYGFKVLLINPKGTTHSKEHGEVMRKYGLDRHTASAYLIALRGIESHNLIRKAII

SEQ ID NO: 1399 - protein, 370 aa, unidentified
  REGION 1..370: note = Category: MG61 effectors
  REGION 1..370: note = Description: MG61-235 effector
  source 1..370: note = uncultivated organism sequence
MDYITLKLPFNADGDAARELLSTAWLFKIATHRVLGVARQQALPGSRIGWKNMFRKIAYGIIPNERYADGVITLVMGVYESCRELSIDFRGVELSDWLMFQQSSLEYPSRNTTLKPNYEFHVTTVRFDGSTGRVVVKPTIPKIYKALLDAVLFEHVKYMGRVVVTDYGVRSNQLWVRGEVHMTVPMDVYYERMARHKKNSGKLIGGVDVNTDRFNLAIIDKEGRLIDHRTFWFSEATARGFPKHSAWSIIGVRIHEMLNYAYHHGVKTLFLENPEVLGRLRLMWIRSGDRNHENYNHKVSIFRSSIIERIAMKAPLYSIETKYVNPRGTTNSKEHDETMKKHGLDKHTTSAYLTALRGLGINKHVHYKQS

SEQ ID NO: 1400 - protein, 364 aa, unidentified
  REGION 1..364: note = Category: MG61 effectors
  REGION 1..364: note = Description: MG61-236 effector
  source 1..364: note = uncultivated organism sequence
MVENTLYTIKFTFNVGGDRAKKILSTAWLFKLACHRVLSRSKELLNALIPSKIAWVKMFYSDARDLIPNKRYAYGAIYLIYGIWESSRSLKIDHRNVELSNWLMFQHYDREVDGNVIRVLGDDTILVTTYSYDGSKDRVLIKAKPNRGHGELLKLVVESKEKYMPRVVVRGYNVRNGKPYVSGEIHVTIGYDFYLKHMTRHREPKGSLIGGVDVNADRINLAIVDEKGNLRDSKTFWFTEVVARGYPRRRAWSVIGMRIHEMLRYAYSHGVATIALETPEVLGYLRLAWVRDGGRKHENYNYKKAIFRSSVIERIAMKAPLYGLNAKLVDPKGTTSSREHDEIMKRSGLDRHTASAYLIALRSI

SEQ ID NO: 1401 - protein, 370 aa, unidentified
  REGION 1..370: note = Category: MG61 effectors
  REGION 1..370: note = Description: MG61-237 effector
  source 1..370: note = uncultivated organism sequence
MAGEVREPEITHATIIGRVVPLDNEGYMELVLLAYRFRKALVKAIKMYTKGIDRNTIVKEITKELNLGYADTIYKLAKLIVKGIRHNESNPLKIKIRKLFIASRGFASNKGNRNIRLLSTNELQVNIPWKGWVKFKVVFGKRYIPLVNELIEKALSKQLSYSGKIVFRDGKPHLHVSVPIELYLKYFSKGRANGKLVAGFDLNSDRINMVIVDIQGIIRDTKTEWFPEATSHGFSKNKAHTMRLQALARLLNYAYRHGVGIVLFEDLARIKKRRYTKSKTANRKITRFPKRKLLQHGIVMAMKYGFRVYLVNPAYTSKIGEKLGKELGLDKHTASAYILALKYLGVANLISGSSSIQKKPEYHYLLNSLV

SEQ ID NO: 1402 - protein, 371 aa, unidentified
  REGION 1..371: note = Category: MG61 effectors
  REGION 1..371: note = Description: MG61-238 effector
  source 1..371: note = uncultivated organism sequence
MSYITLTLPFNIDGGEARKLLSTAWLFKIASHRMLSLAKQIPVLPVTDIGWKNTFRKVIYEVIPNRRYTDGVIVLVRSIYESCRQLGVNFKDVELGDWLMFQQVEKEYPVRNITLKQGYEFHITTIDFNGNSDRIVVKPSIPENYRLLLDGILEEKQKHTARVVIKDYGVRKNKLWVHGEVQLTIPLDFYYKYMVRYRRNYGRLYGGVDVNVDRINLAIIDRYGRLRDVKTFWFEDVTRRGYSKRKARILIGMAVHGMLQYAYHHGVKTLFLENPSILSRLRLIWIRNGRRLHRNYNWKISVFRSSVIETISMKAPLYSINTEYIDPKGTTHSKKHDEVMKKYGLDRHTASAYLIALKGIKGYRMIQKATD

SEQ ID NO: 1403 - protein, 364 aa, unidentified
  REGION 1..364: note = Category: MG61 effectors
  REGION 1..364: note = Description: MG61-239 effector
  source 1..364: note = uncultivated organism sequence
MLHYQTNEVINAETLISHVTITGKLIPQTPSDFMKLVRLAYDFRKAVLYATRMISKSMKANELLKELRGMLNKGYGDSAYKVAKSIVEGCRFNGGNPQHIKVKKLFIVGEGEAVRFGNRNVRLEATDRVKIKYPYNRTWLFFKIQYGKDYLPLVQEIVKLAKEKKISYSARIVFRDGRMYLHLSIPVDSYLKYFSKGSANGSLTAGFDLNADRINMVIVDKFGRIRDVKTEWFPEVTSHGYPRSKAKIKRLEALAKLLKYAYHHNVSVVVFENLFIIKRRKFTRNSTANRKISRFAKKELLQYGIIMAMKWGFKVLLIDPKETTSSKQHSIVMKKYGLDKHTASAHLIALKGIERHSLIQKATT

SEQ ID NO: 1404 - protein, 398 aa, unidentified
  REGION 1..398: note = Category: MG61 effectors
  REGION 1..398: note = Description: MG61-240 effector
  source 1..398: note = uncultivated organism sequence
MPFLSRWQRLGASAIYLSTVSLGPLTVVALGSLTIKLPFNVDGDTAKELLSTAWLFKIATHRVLAVVKQQQILPGSRIGWKNAFRRIAYEIIPNRRYADGAVTLVMGVYESCRALDVDFKSVELGDWLMFQQSELEYPAKSITLKPGYEFNITTIRYNGATGRVVLKPTIPKIYKALLDAIITRRVGYMSRVVVTDYGVRSNQLWVRGEVHVTIPLDLYYERMARHKKNSGKLIGGVDVNADRINLAIIDEDGELIDHKTFWFSEASRKGFSRHKAWSIIGMRIHEMLNYAYHHGVRALFLENPGVLGRLKLVWIKNGDRGRENYNHKVSIFRSTIIEKIALKAPLYSIETKYVNPRGTTNSTEHDETMRKHRLDRHTASAYLIALKGLTPMNTSNRK

SEQ ID NO: 1405 - protein, 363 aa, unidentified
  REGION 1..363: note = Category: MG61 effectors
  REGION 1..363: note = Description: MG61-241 effector
  source 1..363: note = uncultivated organism sequence
MSYITLCLPFNVDGVEAKKLLSTAWLFKVASHRMLSIVKQSPIPPVTDIGWKNTFRKVIYDVIPNRRYTDGVIVLVRGIYESCRQLGIDFKSVELGDWLMFQQVEKEYPVRNITLKQGYEFHITTIDCNGNSDRIVIKPSIPKKYRVLLDKILEEKQKHTARVAIKDYGVRKGMLWIHGEIQLTIPLNFYHKYMIKYRRNYGKLYSGVDVNSDRINLVIVDGEGNLRDTYTFWFREVTARGYPRRRARSVIGMKIHEMLKYAYHHGVRELFLENPEVLGRLKLLWVRNGKRLHKNYNWKVATFRSSVIEMIAMKAPLYSIDVKYVDPRGTTHSKEHVEIMRKHRLDKHTSSAYMTALKGLKQP

SEQ ID NO: 1406 - protein, 369 aa, unidentified
  REGION 1..369: note = Category: MG61 effectors
  REGION 1..369: note = Description: MG61-242 effector
  source 1..369: note = uncultivated organism sequence
MPVDYITLRFPFNASGSTAGELLSTAWWFKIATHRLLNVLKQQQTLPITTIGWVNTFKDIVYGIIPNYRYATGVITLMMGIYESCRKLGIDFKRVELSDWLMFQQGYLEYSVKSITLKTNYKFHITTIKYDGSISRVVINPTIPENYEKLLSVIITKQIKHTGRVVIDRFGVRNNQLWIHGEVQVTIPLDIYYEHMARHKRNNGKLIGGVDVNTDRINLAIVDENGGLRNYKTFWFSETIARGFPKDKARIIIGSKIHEMLDYAYNNGVKTLFLEDPEVLGRLKLMWVRSGDRKHENYNYKVMVFRSSIIERIALKAPLYSIEVKYVNPGGTTNSEEHKDIMRRYGLDKHTASAYLIAIRGLGLSPRAV

SEQ ID NO: 1407 - protein, 314 aa, unidentified
  REGION 1..314: note = Category: MG61 effectors
  REGION 1..314: note = Description: MG61-243 effector
  source 1..314: note = uncultivated organism sequence
MSMFRSIAYGIVPNRRYADGAVTLVMGVYESCRALGVDFRGVGLSGWLMFQQSELEYPAKSITLRRGYEFHITTIRFDGSTSRVVIKPTIPRNYKGLLDAVLTRHVEYMGRVVVRDYGVRNNQLWVHGEVHMTVPLDIYYEHMSRHKRNGGKLFGGVDVNTDRINLAIIDEEGGLRDYKTFWFSEVTARGFPRQKAWRIIGMRIQELLNYAYNNGVKTLFLENPEVLGRLKLMWVRNGDRKHENYNYKVSVFRSSIIERITMKAPLYSIETKYVNPKGTTNSTEHDELMKKYGLDRHTASAYLIALRGLTHQQK

SEQ ID NO: 1408 - protein, 329 aa, unidentified
  REGION 1..329: note = Category: MG61 effectors
  REGION 1..329: note = Description: MG61-244 effector
  source 1..329: note = uncultivated organism sequence
MAKQQQVLPGDKIGWVSMFREVAYGIVPNRRYADGAVTLVMGVYESCRALGVDFRSVELTDWLMFQQSGLEYPAKSITLRRGYEFHITTIKYDGSIGRVVVKPTVSEGYRELIDAIYRERIKYMGRVVIGDYGVRNNQLWVHGEVQVTVPLDVYYEHMARHRRNAGKLIGGVDVNTDRINLAIVDEEGGLRDYKTFWFSEVTTRGFPKHKAWSIIGMRIHEMLNYAYNNGVKTLFLENPEVLGRLRLVWIRNGDRKHENYNYKVSVFRSSIIEKIVLKAPLYSIETKYVNPKGTTNSTEHDEAMRKYGLDRHTASAYLIAIRGLTHQQK

SEQ ID NO: 1409 - protein, 364 aa, unidentified
  REGION 1..364: note = Category: MG61 effectors
  REGION 1..364: note = Description: MG61-245 effector
  source 1..364: note = uncultivated organism sequence
MLQYQISDVVDASKLVTHTTVIGKLIPTSPEDYMKLVKLAYDFRRAVLYATRVISKGMKTNDILRELRSMLNKAYGDSAYKVAKTIVEGCRFNGGESHHIKIRRLFIVSEGEASRLGNRNVRLESTDVVKVRYPYDKSWIVLKVHFGRKYLPLAREVSELAKQRRVSYGARIVFKDGRIYLHLSVPINLYLKYFSKGKAHGELVAGFDLNSDRVNMVIIDRYGKIRDVKTERFSEVTSHGYPRSKAKARRLEALAKLLKYAYHHNVGTIDLENLFVIKKREYTRNPTANRKITRFAKKELLRHGILMAMKYGFKVLLVNPKGTTRSKEHDEVMRKYGLDRHTASAYVIALRGIESHNLMRKAII

SEQ ID NO: 1410 - protein, 370 aa, unidentified
  REGION 1..370: note = Category: MG61 effectors
  REGION 1..370: note = Description: MG61-246 effector
  source 1..370: note = uncultivated organism sequence
MDYLTIKLPFNVDGDVAKGLLSTAWLFRVAAHRVLALARQQESLPGSRIGWKNMFRQFAYGVVPNRRYADGAVTLVMSIYESCRELGVDFKGVELSNWLMFQQSELEYPAKSITLKQNHGFHVTTVRFNGSISRVVIKPTVSRSYRELLNAVLFERVKYMGRVVVRDYGVRNNQLWVHGEVQVTVPMDVYYEHMARHRRNAGRLFGGVDVNTDRINLAIIDEEGELRDTHTFWFSEASARGFPMHKAWGIIGMRIHELLDYAYNHGVKTLFLENPEILGKLRLMWIKNGDRKHENYNHKVSVFRSSIIERIALKAPLYSIETKYVNPKGTTNSKEHDELMRKYRLDRHTASAYLIALRGLITNGNKYYYD

SEQ ID NO: 1411 - protein, 363 aa, unidentified
  REGION 1..363: note = Category: MG61 effectors
  REGION 1..363: note = Description: MG61-247 effector
  source 1..363: note = uncultivated organism sequence
MSYVTVTAGFNTSGEKAKLLLSTAWRFKIAAHRVFTHAKAMPILPATKIAWKSTFREVARSAIPNRRYADSAIILVMGIYEACRELGIDFRDVELGEWLMFQQSEKEWPPRNITLKRLDEVWVTTFDYDGTSRRIRLTVSTSGIFRKLLKALLDEKQPYNPRIYIKSWNMRQGTLYVRGQLQVAIPYSFYVAHAARYRRNRGSLYAGVDVNTDRINLAIVDSKGWLRNVKTFWFREVTARGYPRHRARSVIGMRVHEMLKHAYHNGVKTLFLEDPGVLGRLKFLWIRGGKRKSRNYNYKVSVFRSSTIEMIAMKAPLYAINTRYVSPRGTTNSEEHDEVMRRYGLDKHTASAYIVALRGLGYA

SEQ ID NO: 1412 - protein, 374 aa, unidentified
  REGION 1..374: note = Category: MG61 effectors
  REGION 1..374: note = Description: MG61-248 effector
  source 1..374: note = uncultivated organism sequence
MNEIEYVTLRLPFHAVGEGAKLIYWTAWLSKLCAHRLLDQVKQNPLLASLSQYEFVKMGRSLCYGVLPNRRYVDGVSTIIHASLQSAKALKIDVTKLELKPWLLFQSEAEPRAKGNLNMQFADYSTVKVLVFDKDGTSRKIAIRPVVPKGYAKLVKVLVDKALRREIGYPARIYVRDYGDGLAHLYGELQVMVKYDLYLEVMRRHGKPLGENIAGVDVNVDRLNLVVVNRDGDIVWTHTARFPQVTARGFPRKKAWSIIGEAVHSVLENAYSHGASVLAVESPEVIGYLKYYWIRNGNRGSRSYNYRVSIFRNAIIERLVWKAPLYGLKVVPISPRGTTRSKDHDYVMRRYGLDRHTASAYLIALKTRNIVRTY

SEQ ID NO: 1413 - protein, 366 aa, unidentified
  REGION 1..366: note = Category: MG61 effectors
  REGION 1..366: note = Description: MG61-249 effector
  source 1..366: note = uncultivated organism sequence
MLQYQINSKGVIDATKLVSHVTIVGKLVPISNEDYMKLVRLAHDFRKAVTYATRMIAKKHPTNNILRELRAVLNKAYGDSAYKIAKTLVEGAKFNGSSPRRIKVRKLFIISEGEASRFGNRNVRLEDIDMAKIRYPYNGTWLNFKVLFGTKHIPLVKELVELAKARKVSYGARIVFRNGSIYLHLSIPVHLYLKYFKKRYANGKLVAGFDLNSDRVNMVIVDRYGRIRDMKTAWFPEITSHGFPKNKAKAKRLEALAKLLKYAYYHDVGTVVFENLLMIKHRKYTRSPTANRKISRFAKKELLQHAIISAMKYGFKILLVNPRGTTRSKEHDKAMRKYGLDRHTASAYLIAVKSIEGRTMIQKTIT

SEQ ID NO: 1414 - protein, 364 aa, unidentified
  REGION 1..364: note = Category: MG61 effectors
  REGION 1..364: note = Description: MG61-250 effector
  source 1..364: note = uncultivated organism sequence
MLQYQTSEIVDASSLVSHATVIGRLIPFSPNDFMKLARLARDFRKAVLYATRMIGKGMEANKVLRELRVMLNKAYGDSAYKVAKAIVEGCKFNRGNPRHIKIRKLFIVSEGETLRFGNRNVRFESTDKVKVKYPYDKSWLLFKAQFGEDYIPLVQEVVKLAREKKLSYGTRIVFKNGRIYLHVSIPIDLYLQYFSKGEADGGLIAGFDINADRINMVIVDRYGRIRDIKTEWFPEVTSHGFPRSKARTRRLEALTKLLRYAYCHNVGIVVFENLLTIKRKKFTRNPTANRKITRFAKRELMQYGILMSMKYGFKVLLIDPRGTTRSKEHDDVMKRYGLDKHIASAYMIALRGMKRHSLLQKATV

SEQ ID NO: 1415 - protein, 381 aa, unidentified
  REGION 1..381: note = Category: MG61 effectors
  REGION 1..381: note = Description: MG61-251 effector
  source 1..381: note = uncultivated organism sequence
MSLPDYLTIIIPFTVTRGRAKLFWWTAWLSKLCAHRLLSDVKNNSMLIDLSQASFLKYARKRCYDILPNRRYIDGIATLIHSTLKSIRKLGINVKDIELKQWLLFQSEAEREKKGNLNIRLVTIHEAEILVFNHMKEPEKITIKLRTPKGYRKILETLIEKALNKEIGYPARIVVKEHNFYPNNLHLYRSLQVMIPYNLYLETMRKYNKPLGDHVAGVDVNTDRLNLAIVDKYSKLRDIKTFWFREITSRGYRRKPAWTKIHQAIHNMLDYAYNHGASHIALENSEIIGYLRYYWIRNGERKTKNYNYKISIFRNKVIEVITYKAPLYSLKTIHVNPKGTTRSEEHDEVMRRYGLDRHTASAYLIALRGIKRHTMIQKARI

SEQ ID NO: 1416 - protein, 360 aa, unidentified
  REGION 1..360: note = Category: MG61 effectors
  REGION 1..360: note = Description: MG61-252 effector
  source 1..360: note = uncultivated organism sequence
MSRCLTSSVVDASKLIEYVTVTGKLIPASSEDHVKLARLAWSFRRAVQLAVKMIAKGVKASDALRELRRTLNKAYADSAFKAAKAIVEGCMANGGDPLRVEVRRLFIISGGESSRLGNRNVRLEDVGSVRVKYPYDGSWIALRARFGEEYLSLLRELVELAKQKKASYNAKIVFRGGGIYVHVSVPIQLFLKHFKKGEARGGLIAGLDLNSDRINLAIIDERGRLVDVRTARFPETTSHGFPRSKARAMRLGALAKLLGYCYYHGVGTVAFEDLFEVKGRRFAKSKTANRKMSRFAKRELLQHAITMSLKYGLRVLLVDPKGTTSSREHDEVMKSHGLDRHAASAYLIALKALNQSEQMK

SEQ ID NO: 1417 - protein, 363 aa, unidentified
  REGION 1..363: note = Category: MG61 effectors
  REGION 1..363: note = Description: MG61-253 effector
  source 1..363: note = uncultivated organism sequence
MSYITITAGFSASGEEAKLLLSTAWLFKVATHRVLSYAKSMPLLPASKISWKNTFRKIAYEVIPNRRYADSAVVLVMGIYESCRELGVDFKDVELGDWLMFQQSEKEYPPRNITLKSVNEAWITVFSYDGRSERIKLRVSTSGTYRRLLEALLQEKQEYNPRIYIKSWNVRNGKLYVNGELQIAIPLDFYYKHVARFKVNNGKLYGGVDVNVDRINLAIIDAKGNLRDTYTFWFREVTSRGYPRHRARSVIGMRIHEMLKYAYHNGVKTLFLESPEVLGKLKLTWIRSGNRKSGNYNWKKTVFRSSVIEMVAMKAPLYAINVKYVNPRGTTNSEEHDEVMKRCGLDRHTASAYLIALKGLKQT

SEQ ID NO: 1418 - protein, 370 aa, unidentified
  REGION 1..370: note = Category: MG61 effectors
  REGION 1..370: note = Description: MG61-254 effector
  source 1..370: note = uncultivated organism sequence
MNEVEYVTLRLPFHAVGEGAKLIYWTAWLSKLCAHRLLDQVKQNPLLASLSQYEFVKMGRSLCYGVLPNRRYVDGVSTIIHASLQSAKALKIDVTKLELKPWLLFQSEAEPRAKGNLNIQFADYSTVKALVFDKDGTSRKITIRPVVPKGYTKLVKVLVDKALRREIGYPARIYVRDYGDGLAHLYGELQVMVKYDLYLEVMRRHGKPLGENIAGVDVNVDRLNLVVVNRDGDIVWTHTVRFPQVTARGFPRKKAWSIIGEAVHSVLENAYSHGASVLAVESPEVIGYLKYYWIRNGNRGSRSYNYRVSIFRNAIIERLVWKAPLYGLKVVPISPRGTTRSKDHDYVMRRYGLDRHTASAYLIALKTRKL

SEQ ID NO: 1419 - protein, 281 aa, unidentified
  REGION 1..281: note = Category: MG61 effectors
  REGION 1..281: note = Description: MG61-255 effector
  source 1..281: note = uncultivated organism sequence
MAKEVREPELTHVTITGRVVPLNNESYMELVLLAYRFRKSLTKAIKMYAKGVSRNTIVKEITKELNLGYADTIYKLAKLIVEGVKHNGSNPLKIRVRKLFIASRGFSSNKGNRNIRLLSTNELQVNIPWRGWIKYKAVFGGRYIPLVKELVKRALSKELSYTVKITFRDDKVYLHVSVPMGLYLKYFSKGKADGNLIAGFDLNSDRVNMVIVDRYGIIRDVKTEWFPEVTSHGFLRNKACTLRFQALAKLLKYAYYHGVGVVLFEDLSRIKKRRYTKKQDS

SEQ ID NO: 1420 - protein, 373 aa, unidentified
  REGION 1..373: note = Category: MG61 effectors
  REGION 1..373: note = Description: MG61-256 effector
  source 1..373: note = uncultivated organism sequence
MSETYLTLRLPFNACESEARLLLATARLFRHVALHLHRVILEEMPQITSLITLKRMYRRRLLEIMPNRRYVDGAITLVYSIYESAQALGVSLSEIEFKSWLLFQQSEKEYPCRNITLQKDFSFRITAISYGGESVRIQVKPTIPKKYVPILDKILEKRQPYVARVVLKGFGERKNILWVHGEIHLSVPYSFILEHFRVHKRNYGKLCGGVDVNVDRINLAIIDKYGRLRDVKTFWFEEASWKGCPKQKAWSIIGTAIHDMLKYAFHHGVETLFLENPEALGYLKTLWIRRGERKSNNYNYRVQVFRTRLVERIAMKAPLYAIDVKYVSPRGTTSSEEHDEVMKRCGLDRHSASACMIALRGREKHILTQKGII

SEQ ID NO: 1421 - protein, 365 aa, unidentified
  REGION 1..365: note = Category: MG61 effectors
  REGION 1..365: note = Description: MG61-257 effector
  source 1..365: note = uncultivated organism sequence
MSQCQTSEMSKTEVVSASEFVKYVTITGKLVPISIEDHMKLARLAHYFKRAVLMATRMVAKGVREAEVLRELRKRLNKAYADSAFKTAKAIVEGCSFNGGNPLHIEVRKLFIVSEGEASRLGNRNVKFESTDVIKVKYPHDGSWSLLRAEFGEKYLPLVRDLVDLAERRRISYRAKIVFRSGKVYLHLSIPIELYLKHLGKERSKGELVAGVDLNSDRICMVVVDSLGRVRDVKTEWFSELALHGFSRGRARARRLEALSKLLEYARNHNVGIVVFEDLFKIKRRRFVKSRRANRKISKFAKRELLQHGVVMALRRGFEVSLVEPRGTTSSEEHVKVMRELGLDRHVASAYLIALRRLHEASARK

SEQ ID NO: 1422 - protein, 369 aa, unidentified
  REGION 1..369: note = Category: MG61 effectors
  REGION 1..369: note = Description: MG61-258 effector
  source 1..369: note = uncultivated organism sequence
MSQYQTHRVRDASKLVEYVTIVGRLEPLTEEDYVKLVKLAHEFRKAVTYATRMIAKGIDSKVVLRELRSMLNKAYGDSAFKLAKAVVESARANNGNPLKIEIRRLFIVSEGEAGKQGNRNVRLDDSSKVRIRYPYDKSWLSFRARFGENYIPLVRELSELAKSRKCSYGARIVFRSGRIYLHLSVPVELYLKYFRKGEARGSLIAGFDLNSDRINMVIVDKSGVVRDVRTEWFPEATSPGYPRNKARVVRLRALTKLLSYAYHHGAGVAVFEELDKIKWRRFTSSPKANRKIAKFAKKQLLTHAVVMGLKYGLKPVLVDPRGTTSSSVHSAVMKKHGLDKHTASAYLIVLRYLQNRKTVNSYKAYKQHK

SEQ ID NO: 1423 - protein, 364 aa, unidentified
  REGION 1..364: note = Category: MG61 effectors
  REGION 1..364: note = Description: MG61-259 effector
  source 1..364: note = uncultivated organism sequence
MQEQLLYTLKMSFNASGEEARKILSTAWLFKIACHRVLNKSKQVRDVLIPSKIAWIKMFKSHAYELIPNKRYSYGAVYLVYGVWESCRRLNIDYNVVELSDWLLFRHYEREINGNVIRVYEDSSALVTTYDYSGSKDRILVRAKPNEGQSELLKKIIGSREKYMPKLIIRDYGVRSGTLYIRGEIHIAVSYNFYLKHMKKYNEPKGNLIGGVDVNTDRINLAIVDRDGKLRDVKTFWFSEETARGYPRRRAWSVIGMKVHELLKYAYHHGVSTIALENPEVIGRLRLAWVKNGKRLHRNYNWKVTIFRNRIIEMISMKTPIYGLNVKYVDPKGTSSSREHEEVMKKYGLDRHKASAYLIALKSI

SEQ ID NO: 1424 - protein, 371 aa, unidentified
  REGION 1..371: note = Category: MG61 effectors
  REGION 1..371: note = Description: MG61-260 effector
  source 1..371: note = uncultivated organism sequence
MSYTTLVLPFNVDDVAARWLLSTSWLFKVATHRMLSLAKQFPVLPATDIGWKNTFRKTVYGVVPNRRYTDGVIVLVRDIYESCRQLGVDFREVELGDWLMFQQSEKEFPVRNITLRQNYEFWITTINYNGESKRMTIKPTIPKNCRPLLDRILEEKQKYTARVVIKDYGIRKDKLWIHGEIQVTIPIGFYYKHTARYRGNNGRLYGGVDVNTDRINLAIVDRYCRLRDVKTFWFEDATRRGYPRRKARILVGMAVHKMLRYAYHHGVRMLFLEDPSVVSRLRLLWIRNGRRLHRNYNWRVSVFRSSVIEMIAMKAPLYAVKVDYVDPKGTTNSEGHNEIMKRYGVDRHTASAYLIAMKGIKRHAMIQKATT

SEQ ID NO: 1425 - protein, 359 aa, unidentified
  REGION 1..359: note = Category: MG61 effectors
  REGION 1..359: note = Description: MG61-261 effector
  source 1..359: note = uncultivated organism sequence
MSQYQTSSTVDDASTLVEYATITGRVIPASSEDYMKLAKLAWGFRRAVQVATRMIAKGVVSDDVLKELRRMLNKAYADSAFKIAKAIARGCIASGGDPLHVEVRKLFIVSEGESSRLGNRNVRFEGTNLVKVKYPYDGSWIQLRAKFGEKYLPLLRELVELAKQKKASYNARILFRDAKIYLHLSVPIQLYLKYFKRGDALGEFIAGFDLNSDRVNLVIIDKYGRLVDVKTEWFPEVTSPGFPREKARALRLRALAKLLKYCYTHSVGAVVFENLLDVKKRRFTKSKKANRKISRFAKRKLLQHAILMSLKYGFKVLLVDPKNTTSSREHREVMLKYGLDRHTASAYIVALRGLAYQIT

SEQ ID NO: 1426 - protein, 361 aa, unidentified
  REGION 1..361: note = Category: MG61 effectors
  REGION 1..361: note = Description: MG61-262 effector
  source 1..361: note = uncultivated organism sequence
MSQSQTSSTVASTPTVEYVSITGRLIPISSEDHMKLARLAWSFRRAVQVATRMIARGMDNNEILRELRKMLNKGYADSAFKIAKAIVKGCIATGGDPLHVEVRKLFIVSEGESSRLGNRNVRFMDTSMVKVKYPYDGSWIQLRAKFGEEYLPLLNELIGLANQKKASYTAKIVFRDGEVYLHVSVPIELYLKHFRNGNANGRLIAGFDLNSDRVNMVILDELGVIRDAKTEWFPEATSPGFPRSKATALRLRALAKLLEYAYHHGVGVVVLEDLERIKKRRRYTKSKSANRKITRFPKRKLLEHAIVMAMKYGFEVLLVDPKGTTSSSEHDEAMKKYGVDKHTASAYLVALRALHQIKQTK

SEQ ID NO: 1427 - protein, 363 aa, unidentified
  REGION 1..363: note = Category: MG61 effectors
  REGION 1..363: note = Description: MG61-263 effector
  source 1..363: note = uncultivated organism sequence
MTYITLVFPFNVCCDVAERLLSTAWLFKIATHRLLNVAKHFPALPATDIGWMNTFRGIAYEIIPNRRYADGVVALVRSIYESCRQLGIDFKSVELSNWLMFQQSELEYPARNITLKPGLEFHITTVDYSKNTYRDVVEPIIPKSYKPLLDKTLEERQEYTGRVAVKSYGIRKYNLWVRGEIQITIPTDFYYKHMTRYREPKGGLIGGIDVNVDRLNLAVIDERGNLRDCKTFWFSEATTRGFSRRSARSIVGARICEMLSYAYHHNVKTLFLENPGVLGKLKLLWVRNGDRKHENYNYRKAVFRGSVIEMIALKAPLYSINVKYVDPKGTTNSEEHDEAMKRYGLDRHTASAYLIALRGLRNK

SEQ ID NO: 1428 - protein, 408 aa, unidentified
  REGION 1..408: note = Category: MG61 effectors
  REGION 1..408: note = Description: MG61-264 effector
  source 1..408: note = uncultivated organism sequence
MVAYRGSSRFLPARVFIEDLSTPAGVTENGMWSIGCINPSVLGMSEPRYITVRLPFHADGIYAGLLLSTAWLSKIVAHRVLGIVKGNTILVELPEYRFLGKLRRKCYDILPNRRYVDGVLKLVYSTIRSAMALGVDVSKLELKQWLLFQSDGEASAKGNNNIRLLEPHRARILVFSYDRQPETMEIKLTVPKGYRKLVEELVRKAYSREIGYPARVYISDYGIGKFGLHVAGELQVMVPYQLYCEVMKRYDKPLSDNIAGIDVNVERLDVAIVSPSGRLRRVKTFWLDGTVHMGIRAGRAWSLIGETIHEMLEWLYHSGVSTIVLENPEVLGYLRYYWIRNGKRRGRYWNWKVSMFRTSIIERIAWKTPLYSINVVYIVGAKKFRYFHFSSNSLIFLLRAFQGSKSEA

SEQ ID NO: 1429 - protein, 365 aa, unidentified
  REGION 1..365: note = Category: MG61 effectors
  REGION 1..365: note = Description: MG61-265 effector
  source 1..365: note = uncultivated organism sequence
MTYITLTFPFNACCDVARRLLSTAWLFRVATHRLLSIAREFPVLPGTDIGWKSTFRGMVHEVIPNRRYADGVVVLVRSIYESCRQLRVDFRSVELSSWLMFQQVELEYPARNITLKPGYEFHVTTVDYGGNTHRVVVKPTVPGNYGLLLDKVLRERQRYTGRVVLRSYGIGGGNLWVQGEVQVTIPMDFYYRHMARYRRNDGKLYGGADVNTDRINLAIIDEDGELIDHKTFWFSEASRKGCSGRRAWSIIGMRIHELLDYAYNNGVKTLFLENPEVLGRLKLMWAKSGDRGHGNYNYKVMTFRSSIIERIALKAPLYGIEVSYVNPRGTTNSKEHDETMKKHGLDRHTASAYLTALKGLTHQRK

SEQ ID NO: 1430 - protein, 374 aa, unidentified
  REGION 1..374: note = Category: MG61 effectors
  REGION 1..374: note = Description: MG61-266 effector
  source 1..374: note = uncultivated organism sequence
MELPEYITIDVPFTVRGDSARLVWWTAWLSKLCAHRLLNDVKKNEMLTDLSQTSFLKYARERCYEILPNRRYVDGIAVLIYSTLKSARKLGISIKDIELKQWLLFQSEAEKGREGNLNIRLMSLDKAEILVLDREKTLKRIVVGLRTTKGYLRLLKVLVQKAMSGEIGYPARVVIKEYNFYQNDMHLYCGLQVMVPYYLYLDVMKRYGKPLGGNVGGVDVNVDRINLAIVDTNGKLRDVKTFWFREATSRGCRRKQVWTEIHQAIHDMLNYAHHHGVSTIALENPRIIGYLKYYWIRNNNDRGSRNYNYRKTIFRNRIIEVISYKAPLYGMKTVFVNPRGTTHSEEHDEVMKKYGLDRHLASAYIIALKGLKQP

SEQ ID NO: 1431 - protein, 365 aa, unidentified
  REGION 1..365: note = Category: MG61 effectors
  REGION 1..365: note = Description: MG61-267 effector
  source 1..365: note = uncultivated organism sequence
MGGRWLSVLQSQTGNVVDAFAMVNYVTITGKLHPASGEDYMRLVRLAWDFKNAVRITTRMIAKGVGRSNILKELRGVLNKAYADSAYKLAKAMVEGCLFNGCNPLHIEVRRPFIVSEGESSRLGNRNVRLEDTNIVKVKYPYDGSWITLRAEFGERYLPLLRELAELARRKKVSYGARIVFREGNIYLHLSIPIKLYLKYFKRGEAKGGLVAGFDLNSDRVNLVIIDGHGRIVDTRTAWFTEAVSHGFSRNRARALRLGALAKLLKYCYTHNVSVVVFENLPLIKRRRFTRSRVGNRKITLFAKRQLIQYGIVMALKYGFKTLLTNPKGTTNSKEHSEVMKKYGLDRHTASAYLTALRGLTHQQK

SEQ ID NO: 1432 - protein, 422 aa, unidentified
  REGION 1..422: note = Category: MG61 effectors
  REGION 1..422: note = Description: MG61-268 effector
  source 1..422: note = uncultivated organism sequence
MGSSRRRLDPLTVALRLRVSGIEAHRKLLVKKTYKAFGGIYPYVIVLNRPVTVDIPFTVTGEKARLVWWTAWFSKFCAHRLLNDAKENEILVDLSQTSFLKYARKRCYDVLPNRRYVDGIAVLIHSTLKSARKLGLKVNEIKLRQWLLFQCEADKKKKGNLNVRLTSTREAEALVFNQEREPRKIKINLRTHKKYEKLLKILVERAIKSEVGYPARIVIKEYNTHLNDLRLYCSLQVIVPYDLYLEVMRKYDAPLGNHVAGIDVNVDRLNIAIVDRYGRLRDVKTFWFREITSRGYRRKRAWTKIYQAIHDMLNYAYHHGVSHVVLENPEIVGYLKYYWIKNGNKKTKNYNYRISIFRNRIIETIAYKTPLYGLKTIYVNPKGTTRSKEHEKIMKKYGLDRHTASAYLIALRSLKKIHYATK

SEQ ID NO: 1433 - protein, 361 aa, unidentified
  REGION 1..361: note = Category: MG61 effectors
  REGION 1..361: note = Description: MG61-269 effector
  source 1..361: note = uncultivated organism sequence
MDYITIKLPFNVDGDVAKELLSTAWLFRITTHRVLTIAKQQVLPATRIGWKNAFRGIAYRVIPNRRYADGAIILVMGVYESCRALGIDFRSVELSDWLMFQQSELEYPAKSITLKQNHEFHVTTVRYNGSTGRVIVKPTVPRNYRELLDAILTGRVEYMGRVVVTDYGVRNNRLWVHGEVHITIPLDVYYEHMARHKKNSGKLIGGVDVNTDRINLAIIDEDGELIDHETFWFSEVTARGFPKHKAWSIIGMRVHEMLNYAYHHGVRILFLENPEVLGRLRLMWVRNGDRKHENYNHKVATFRSTIIEKITMKAPLYGIEVKYVNPRGTTNSKEHDKLMRKYGLDKHTTSAYLTALKGLKH

SEQ ID NO: 1434 - protein, 363 aa, unidentified
  REGION 1..363: note = Category: MG61 effectors
  REGION 1..363: note = Description: MG61-270 effector
  source 1..363: note = uncultivated organism sequence
MSYVTLCLPFNVDGVEAKRLLSTAWLFKIATHRMLSIAKQCPVLPATDIGWKNAFRKVIYEVIPNRRYVDGVIVLVQGIYESCRQLGVDFMKVELGDWLMFQQVEKEYPVRNITLKHGYEFHITAIGFDGEPSRVVIKPTIPRNYMKLLDGILVERQKHVARAVIRDYGVRKGRLWVRGEIQVTIPIDFYYRHMARYRVNNGRLYGGVDVNVDRINLAIVDEKGRLRDVKTFWFEEASRKNCPRRRARSIIGMAVHNMLRYAYHHGVKTLFLENPEVLGRLKLLWIRNGSRLHENYNYRVSVFRSSVIEMIAMKAPLYAIKTIYVDPRGTTHSKEHDELMRKYGLDRHTASAYLIALKGLKLP

SEQ ID NO: 1435 - protein, 364 aa, unidentified
  REGION 1..364: note = Category: MG61 effectors
  REGION 1..364: note = Description: MG61-271 effector
  source 1..364: note = uncultivated organism sequence
MLHYQTNEVINAETLISHVTITGKLIPQTPSDFMKLVRLAYDFRKAVLYATRMISKSMKANELLKELRGMLNKGYGDSAYKVAKSIVEGCRFNGGNPQHIKVKKLFIVGEGEAVRFGNRNVRLEATDRVKIKYPYNRTWLFFKIQYGKDYLPLVQEIVKLAKEKKISYSARIVFRDGRMYLHLSIPVDSYLKYFSKGSANGSLTAGFDLNADRINMVIVDKFGRIRDVKTEWFPEVTSHGYPRSKAKIKRLEALAKLLKYAYHHNVSVVVFENLFIIKRRKFTKNSSANRKMSRFAKKELLQYGIIMAMKYGFKVLLINPRGTTHSKEHDEVMRKYGLDRHTASAYIIALRGIESHNLIRKAII

SEQ ID NO: 1436 - protein, 371 aa, unidentified
  REGION 1..371: note = Category: MG61 effectors
  REGION 1..371: note = Description: MG61-272 effector
  source 1..371: note = uncultivated organism sequence
MSQYQISSTVVDASTLIEYVTITGKLAPSTGEDYMKLARLAWSFRKAVKVATRMIAKGVKANAVLKELRKTLDKAYADSAFKLAKAIVKGCMTNGGNPLHVNIRKLFIASEGESSKLGNRNIRFEDTSFVKVKYPYDGSWIQLKAEFGEEYLPLLRELTELAKQKRASYNAKIMFRDGKTYLHVSVPAELYLKHFKKGEAHGELIAGFDLNSDRISLAIVDKYGRLVDAKTEWFPEVTSHGFSREKAKALRLRALAKLLTYCYTHGVGTAVFEDLFNVNKRRFTWNRTANRKMSRFAKRELLQHAILMSLKYGFRVLLADPRGTTSSREHDEVMRSHGLDKHVASAYLIALRVLNQDKQTKQTIMKTETAL

SEQ ID NO: 1437 - protein, 328 aa, unidentified
  REGION 1..328: note = Category: MG61 effectors
  REGION 1..328: note = Description: MG61-273 effector
  source 1..328: note = uncultivated organism sequence
MGYVTVSLSFNVGGDAAKGLLSTAWLFKVATHRVLDLVRQSPVLPATDIGWKNTFRSVAYEVVPNRRYADGVVVLVRGIYESCRQLGVDFRSVELGDWLMFQQSEIEYPVRNITLREGYEFYVTTINYLGKSDRVVIKPTIPRNHKPLLDRLIEEGVEHTGRVMIRDYGVRRGMLWIHGEVQVTLPLDFYYRHMVRYGVNNGRFYGGVDVNADRINLAIVDGDGELRDVRTYWFREVTARGYPRRRAWSVIGMRVHEMLDYAYHHGVRTLLLEDPGVLGRLRLLWVRSGKRKHENYNWRVAIFRSSVIEMIAMKAPLYGIEAKYENPK

SEQ ID NO: 1438 - protein, 371 aa, unidentified
  REGION 1..371: note = Category: MG61 effectors
  REGION 1..371: note = Description: MG61-274 effector
  source 1..371: note = uncultivated organism sequence
MSYITLCLPFNIDSSEAERLFSTAWLFKIASHRMLSLVKQFPILPATDIGWKNSFRKIIYEVIPNRRYTDGVIVLIRGVYESCRQLGVDFKEVELGDWLMFQQVEKEYPVRNITLKQGYEFHVTTIDHNGSSERIVIKPTISKNYKLLLDRILEDKQKHTARIVIKDYGVRKDKLWVHGEVQLTIPLDFYYKYMVRFKRNYGKLYGGVDVNTDRINLAIVDKYGRLRNVKTFWFEDASRKGYPKRKARVLIGMAVHEMLKYAYHHGVKTLFLENPEVLGKLKLLWIRNGRRLYKNCNWKVMTFRSSIVEMVAIKAPLYAIKVDYVSPRGTTNSKEHVKIMRGYGLDRHTVSAYLIALRGIEGHTMIQKAII

SEQ ID NO: 1439 - protein, 362 aa, unidentified
  REGION 1..362: note = Category: MG61 effectors
  REGION 1..362: note = Description: MG61-275 effector
  source 1..362: note = uncultivated organism sequence
MAGEAREPEITHVTVTGRIMPLNSEDYVKLRYLAYKFRKNLVRAVKMYTRGVNKLVIVKEITRELNLGYADTIYKMAKLIVEGARKNGSNPVKIEVKKLFIASRGFSANKGNRNIRLESTDTLYVNIPREGWVKFKVSFGERYVPLVKELVELAESRKTSYTARIVFRNGRIYLHLSIPIELYLKYFRRGEANGDLIAGFDLNSDRVNMVIVDKSGVVRDVRTEWYPEVTSPGYPGSKATVARLQALSKLIEYAYHHGVGVAVFEDLGRIKRRRFTGSPVANRKMSRFPKRKLLEHAVVMALKYGFKVYLVDPSYTSVVGDYLSRELGLDKHTASAYMLTARYLGLDLKSVEITQITRKTKN

SEQ ID NO: 1440 - protein, 324 aa, unidentified
  REGION 1..324: note = Category: MG61 effectors
  REGION 1..324: note = Description: MG61-276 effector
  source 1..324: note = uncultivated organism sequence
MVGEVREPGITHVTITGRIILLNTNDYVKLCYLAYKFRKNLAKAIKMYARGVDKLVMVKEITRELNLGYADTIYKIAKLIVEGARRNGSNPLKIEVKKLFVASRGFSANKGNRNIRLESTDMVYVNILKERWIRFKVSFGEKYVPLVKELVELAKSRKNSYSAKVVFRNGRIYLHLSVPIELYLKYFRRGEAKGDLIAGFDLNSNRINMVIVDRCGVIRDVRIEWFPEVTSPGYPRNKAKVARLQALAKLLNYAYHHGVGVTVFEDLDKVKQRAFTSSPTANSYLSRELGLDKHTASAYMLTARYLGLDLKSVEITQITRKTKN

SEQ ID NO: 1441 - protein, 363 aa, unidentified
  REGION 1..363: note = Category: MG61 effectors
  REGION 1..363: note = Description: MG61-277 effector
  source 1..363: note = uncultivated organism sequence
MTYITLVLPFNVCCDVAKRFLSTAWLFKIATHRLFNVVKYFPVLPVTDIGWKNTFRGIAYEIIPNRRYADGVVTLVRSIYESCRQLRIDFKSVELSNWLMFQQSELEYPARNITLRSGYELHITTVYYNKNTYRDVVKPTIPKSYKPLLDKMSEERQKYTGRVAVKSYGTRKDNLWIRGGVQIIIPTDFYYKHMTRYREPKGSLIGGIDVNADRLNLAIIDEKGNLWDCKTFWLSEAAARGFSRRNARSIISAKIHEMLSYAYHYNVKTLFLESPVVLGKLKPLWVKNGGRRHENYNYKVSVFRSSVIEMIELKTPLYGIEVKYVDPKGTTNSEEHDEAMKRCGLDRHTASAYLIALRGPRNQ

SEQ ID NO: 1442 - protein, 363 aa, unidentified
  REGION 1..363: note = Category: MG61 effectors
  REGION 1..363: note = Description: MG61-278 effector
  source 1..363: note = uncultivated organism sequence
MSYVTIVAGFNTSGEDAKLLLSTAWLFKVATHRLFNIVKQMPVLPASDIGWKSMFYKAVYDVIPNRRYSYGVITLVRSIYESCRQLGVDFKSIELSDWLMFQQSEKEYPPRSITLKSLSEVEVTVFSYSKESKRIALRVSTSGVYRKLLNAILREKQPYMPRIYVKSWNARGGKLFVRGELQVAIPTDFYYKHMPRASANNGKLYGGVDVNVDRVNLVIVDGDERLRDAYTFWFEESSRKGCKRRRARSIIGMRVHEMLEYAYSHGVKTLFLENPEVLGKLKLLWVRSNDKRHENYNYGVSVFRSSVIEMIALKASLYSIEVKYVDPKGTTSSRKHDDVMRKYRLDRHTASAYLIALKGLKQL

SEQ ID NO: 1443 - protein, 362 aa, unidentified
  REGION 1..362: note = Category: MG61 effectors
  REGION 1..362: note = Description: MG61-279 effector
  source 1..362: note = uncultivated organism sequence
MDYLTIRLPFNVDGGVAGELLSTAWLFRVAAHRVLSLAKQMQFLPSTKVGWVNAFRESAYGVIPNRRYADGALTLVMSIYESCRELGVDFKGVELSNWLMFQQSELEYPAKSITLKPGYEFHVTTIKYNGSTGRVVIKPTVPRSYGKLLNAVLTERVKYMGRVVVRDYGVRGSQLWVRGEVQVTVPMDVYYEHMAKHRRNAGRLLGGVDVNSDRINLAIVDEDGELIDHKTFWFSEASRKGFSRHSAWSIIGMRIHEMLNYAYHHGVRALFLENPGVLGRLKLVWIKNGDRGRENYNHKVSIFRSTIIEKIALKAPLYSIEVKYVNPRGTTNSKEHDETMRKHGLDRHTASAYLIALRGLRH

SEQ ID NO: 1444 - protein, 363 aa, unidentified
  REGION 1..363: note = Category: MG61 effectors
  REGION 1..363: note = Description: MG61-280 effector
  source 1..363: note = uncultivated organism sequence
MSYVTVTAGFNASGEEAKLLLSTAWLFKIATHRVLSIAQNTPALPASKIAWKNTFRRIAYEVIPNRRYADSATVLVMGIYESCRQLGVNFKEVELGDWLMFQQSEKEYPPRNITLKYIDEAWVTVLGYEGRRERIKLKVSISGAFRRLLEAILREKQPYNPRIVLKSWNTRGGKLYVKGELHLAIPLDFYYKHMKRFEGNHGKLYGGVDVNSDRVNLAVVDDNGRLRDTYTFWFREATARGYPKRRARSVIGMRLHEMLRYAYHHGVKMLFLENPDVLGRLKLLWVRNGRRLGRNYSWRVMTFRSSIIEMIALKAPLYSIKIGYVDPRGTTHSEEHDEVMRRHGLDKHTASAYLIALKGLKQP

SEQ ID NO: 1445 - protein, 333 aa, unidentified
  REGION 1..333: note = Category: MG61 effectors
  REGION 1..333: note = Description: MG61-281 effector
  source 1..333: note = uncultivated organism sequence
MLHLAKNCDVLPASDIGWKSMFRKAIYSIIPNRRYADGVIVLIRGIYESCRQLEVNFKDVELGNWIMFQQSEMEYPVRTITLKQDYSFRITTFDYNGSSERISISPTIPKSYSLLLSKILEDKQKHTARIVIKDYGVRKNKVWVHGEIQLTIPLSFYYRYMVRFKKNKGKLFGGVDVNCDRINLAIVDRFGRLRDVKTFWFRETTARGFPRRKARVIIGMRVHEMLKYAYFHGVSKIFLENPEILGKLKLLWIRNGKRFSRNYNWKVAVFRSNIIEMISMKATLYSIKTRYVNPKGTTSSNEHKEIARKLGLDRHTASAYLIALRGLKQNDTI

SEQ ID NO: 1446 - protein, 371 aa, unidentified
  REGION 1..371: note = Category: MG61 effectors
  REGION 1..371: note = Description: MG61-282 effector
  source 1..371: note = uncultivated organism sequence
MSYITLCLPFNVDGFKARKLLSTTWLFKTASHRMLSLAKQFPILPATDIGWKNTFRKIIYEIIPNRRYTDGVIVLVRGIYESCRQLGVDFEDVELGDWLMFQQVEKEYPVRNITLKQGYEFHITTIDYNDGVERIAVEPTIPKNYRLLLDKILEEKQKHSARVIIKDYGVRKNKLWVHGEIHVTIPLDFYHKYMTRYRRNYGKLYGGVDVNTDRINLAIVDSEGNLRDTYTFWFREVTARGYPRRKARSVVGMRVHEMLKYAYYHGTKILFLENPEILGKLRLLWVRNGKRLHKNYNWKVATFRSSIIEMITMKAPLYSIKVGYVDPRGTTSSKEHGEIMRKYRLDRHIASAYLIALRGIERRATIQKATA

SEQ ID NO: 1447 - protein, 373 aa, unidentified
  REGION 1..373: note = Category: MG61 effectors
  REGION 1..373: note = Description: MG61-283 effector
  source 1..373: note = uncultivated organism sequence
MSEPRYITVRLPFHADGIYAGLLLSTAWLSKIVAHRVLGIVKGNTILVELPEYRFLGKLRRKCYDILPNRRYVDGVLKLVYSTIRSAMALGVDVSKLELKQWLLFQSDGEASAKGNNNIRLLEPHRARILVFSYDRQPETMEIKLTVPKGYRKLVEELVRKAYSREIGYPARVYISDYGIGKFGLHVAGELQVMVPYQLYCEVMKRYDKPLSDNIAGIDVNVERLDVAIVSPSGRLRRVKTFWLDGTVHMGIRAGRAWSLIGETIHEMLEWLYHSGVSTIVLENPEVLGYLRYYWIRNGKRRGRYWNWKVSMFRTSIIERIAWKTPLYSINVVYIDPKGTTSSREHSEIMRKYGLDRHTASAYLIALKGLKQP

SEQ ID NO: 1448 - protein, 363 aa, unidentified
  REGION 1..363: note = Category: MG61 effectors
  REGION 1..363: note = Description: MG61-284 effector
  source 1..363: note = uncultivated organism sequence
MSYITVTAGFNASGGEAKLLLSTAWLFKLATHRVLSYAKSMPILPASKIGWKSTFRKVAYEIIPNRRYADSAVTLVMGIYESCRQLGINFGDVGLGDWLMFQQSEKEYPPRNITLKDVDEAWITVLGYDGESRRIKLRVHASKAFRKLLDALLRERQPYNPRIVLKTWNVRDGKLYVRGELHVAIPLDFYYKHMARFTRNNGRLYAGVDVNVDRINLAVVDVEGNLRDTYTFWFREVTTRGYPRHRARSVIGMRIHEMLKYAYHHGVKTLFLENPEVLGKLKLLWIRNGDRKSKNYNWKKTIFRSSVIEMIAMKAPLYSINVKYVDPRGTTNSREHDEAMKRCRLDRHTASAYLTALKGLNLT

SEQ ID NO: 1449 - protein, 369 aa, unidentified
  REGION 1..369: note = Category: MG61 effectors
  REGION 1..369: note = Description: MG61-285 effector
  source 1..369: note = uncultivated organism sequence
MWAIALNESPLYTLKLSFNASGEAARRILSTAWLFKLACHRVLNKSKGLIDHLVPSKVAWLKVFYDDARAYIPNKRYAYGAVYLVYGVWQSAGELKVDYKNVELSDWLLFQHYEREVDGNVIRVSEDGSTLITTYSYDGSKDRVFIRARPNRGHAGLLKLVVESKEKYMPKVVVKGYNVRDGTLYLRGELHVAVSYSFYLKHSTRYREPRGGLVGGVDVNADRINLAIVDRKGNLRDYKTFLFAETTARGYPRRGAWSVIGMKIHEMLEYAYHHGVSAIALEGPEVLGYLKSAWMRGDDRSHENYNYKKAVFRSSLIERIAMKAPLYGLSVEFVNPRGTTSSVERDEAMRRYGLDKHTASAYLIALRCI

SEQ ID NO: 1450 - protein, 374 aa, unidentified
  REGION 1..374: note = Category: MG61 effectors
  REGION 1..374: note = Description: MG61-286 effector
  source 1..374: note = uncultivated organism sequence
MAYKLYWGFPITSYITIVLPFNAGGDVAERLLSTAWLFKVASHRMLRLAKQSPVLPATDIGWKNMFRKAVYEVIPNRRYADGAVVLVRGIYESCRQLGVGFKEAELSDWLMFQQAETEYPVRNITLKEDYEFHITTIGYEGATDRVVVEPTIPKNYRTLLDEILEERQRHTARVVIKDYGARENMLWVHGEVQLTIPIDFYCKHMARYRRNYGKLYAGVDVNVDRINLAIIDADGNLRDTYTFWFRETTARGFPRRRARSVIGMAVHEMLKYAYHHGVKTLFLENPDVLGKLKLMWVKSSERRHENYNYKVAIFRGSVIEMVAMKAPLYAIDVKYVSPRRTTNSKEHNEIMRKHRLDRHTASAYLTALKGLKQT

SEQ ID NO: 1451 - protein, 382 aa, unidentified
  REGION 1..382: note = Category: MG61 effectors
  REGION 1..382: note = Description: MG61-287 effector
  source 1..382: note = uncultivated organism sequence
MTSLPEYLTISLPFTVKGENAKLIWLTAWFSKLCAHRLLDDVKNNEFLIDLSQTSFLKYARKRCYDILPNRRYIDGIATLIHSTLKSVRKLGVTIGSIELKRWLLFQSEAEKEKKGNLNIRLVSVNRAEILVFNHKKESRRIEISLRTLKGYRRVLEALLGRALKSEVGYPARVVIKEFNFYPSNLHLYCSLQIMIPYNLYLETMRKYYKALGDHVAGVDVNVDRLNLAIVDKYGRLRDVKTFWFREITSRGYRRRPAWTKIHHAIHNMLNYAYHHGISCIALERPEIIGYLRYYWVRNGDRKSKNYNYRKSIFRNKIIEAITCKAPLYSLKTIYVNPKGTTRSKKHDEAMKKYGLDRHTASAYLIALRGIERHTMIQKATI

SEQ ID NO: 1452 - protein, 364 aa, unidentified
  REGION 1..364: note = Category: MG61 effectors
  REGION 1..364: note = Description: MG61-288 effector
  source 1..364: note = uncultivated organism sequence
MSQYQTNNVVDATNFITYVTITGELVPISPEDYMKLVRLAHDFRKAVLYATRMIAKGKNTNAILKELRSMLNKAYGDSAYKVAKALVEGCRFNGGNPRHIEVRKLFIVSEGESSRLGNRNIRLESTSTTRIKYPYDSSWLTFKARFGEKYLSLIEELVKLTRHKEISYGARIVFRSGKVYLHLSVPIGLYLKYFSKGKTKGNLIAGFDLNSDRINMVVIDRYGRIRDIKTEWFPEVASHGYPRSKAKTKRLEALAKLLRYAYYHNVGAVVFENLLVIRKRRYTRNRKANRKITRFAKRELLQHGIVMAMKHGFKVLLVNPKGTTNSEEHSKIMRRDGLDRHSASAYIIALRGIERHNPIQKTII

SEQ ID NO: 1453 - protein, 378 aa, unidentified
  REGION 1..378: note = Category: MG61 effectors
  REGION 1..378: note = Description: MG61-289 effector
  source 1..378: note = uncultivated organism sequence
MKDTGLPDYIAINIPFTVNGEEAKLVWYTAWFSKLCAHRLLNDVKGNDALLGFSQASFLKYARERCYELLPNRRYIDGVATLVHSTLRSARKLGVNIRDIELGQWLLFQSEAESEKRGNLNIRLLSVNRAEVLVLNYDGASKRIDIGLKTPKGYVELLKVLIERAGKYEVGYPARVMVRGYSFRPGNMHLYCGLQVMVPYSLYLNVMRRYSEPRGNLIGGVDVNVDRLNLAIVDRYGRLRDVKTFWFREVTARGVKGVVAWTKIHQAIHELLNYAYHHGVSAISLENPRTIGYLRYYWVRNGDRGSRNYNYRVSIFRSRTIEVISYKAPLYAMRTIYVNPKGTTNSQQHDEVMRRLGLDRHAASAYLIALRGINKQRK

SEQ ID NO: 1454 - protein, 300 aa, unidentified
  REGION 1..300: note = Category: MG61 effectors
  REGION 1..300: note = Description: MG61-290 effector
  source 1..300: note = uncultivated organism sequence
MLNKAYGDSAFKLAKTIVESARSNRGDPLKIEIRRLFIVSEGEAGRQGNRNVRLDDSSKVRIRYPYERSWLSFRARFGENYVPLVKELSELAKSRKCSYGVMIVFRNGRIYLHLSVPVELYLKYFRKGEAKGDLIAGFDLNSDRINTVIVDKYGRVVDVRTAWFPEVTSPGYPRNKARVVRLQALVELFNYAYHHGANVAVFEDLDKIKRRRFTSSPTANRKITRFAKKQLLTHAVVMSLRYGLKPALVDPRGTMSSPVHSAVMKKHGLDRHTTSAYLIALRYLQDEKTVNSYKAYKQSK

SEQ ID NO: 1455 - protein, 363 aa, unidentified
  REGION 1..363: note = Category: MG61 effectors
  REGION 1..363: note = Description: MG61-291 effector
  source 1..363: note = uncultivated organism sequence
MSYVTVTAGFNACGEEAKLLLSTAWLFKIATYRVLAHAKSMPVLPATKVAWKNAFREVALSAMPNRRYADSSIIVVMGIYESCRQLGMDFREVELGDWLMFQQSEKEYPPRNITLRDVDEVWVTVIGYGGESGRIKLRVSTSKTFRELLGALLRERQPYNPRVVLKAWNVRGGELYVRGELQVSVHMNLYYAHVAKHRRNEGRLYAGVDVNADRINLAIVDERGDLRDAYTFWFREVTARGYPRRRARSVIGMKVHDMLRYAYHHGVKMIFLEDPGILGRLRLMWIRNGRRLHKDYNWKVSAFRSSVIEMIATKAPLYTVKAVYVDPRGTTHSKRHDEVARKYGLDRHTASAYMIALKGLNLP

SEQ ID NO: 1456 - protein, 364 aa, unidentified
  REGION 1..364: note = Category: MG61 effectors
  REGION 1..364: note = Description: MG61-292 effector
  source 1..364: note = uncultivated organism sequence
MVENPLYTIKLSFNVSGDRAKKILSTAWLFKLACYRVLSRSKELLNALIPSKIAWVKMFYSDARDLIPNKRYAYGTIYLVYGIWESARELGINYRSVELSDWLMFQHYDREVDGNVIRILEDGSALVTTYSYDGSKDRVLIKAKPNKGYEELLKLVVESKEKYMPRVVVRGYNVRNDKLYVSGEIHVTIDYNFYLKHTTRYGEPKGSLIGGVDVNSDRINLAIVDEKGNLRDCKTFWFPETVTRGYPKRRAWSIIGIKIHEMLRYAYNHDVSTIALENPETLGYLKLAWVRNGDRKHENYNYKKSVFRNTIIERIVMKAPLYGLNTKFVDPKWTTSSREHDEIMKRFGLDRHTASAYIIALRSI

SEQ ID NO: 1457 - protein, 359 aa, unidentified
  REGION 1..359: note = Category: MG61 effectors
  REGION 1..359: note = Description: MG61-293 effector
  source 1..359: note = uncultivated organism sequence
MNYVTLTLPFNVDGDVAKRLVSTAWLFKTASHRMLSLAKQRPILPATDIGWKNTFRKLVYEIIPNRRYADGVIVLVRGVYESCRQLSIDFRRVELGDWLMFQQAEKEYPVRNITVKLGYEFHITTIDYNGIAERIVLKPTIPKNYKCLLDKILEEKQKHTARVVIKDYGVRKDRLWVHGEIQLTIPLDFYYKYMVRYTVNNGKLYGGVDVNTDRINLAIVDGNGRLRDTYTFWFSETTARGYPRHRARSIIGMKIHDMLRYAYHHGVKTLFLENPGVLGKLRLLWIKNGKRLHSNYNWKVSVFKSSAIEMIAMKAPLYAIITRNVDPGGETNSREHDNDTTNKILHTQLYKFIEFIIYA

SEQ ID NO: 1458 - protein, 1262 aa, unidentified
  REGION 1..1262: note = Category: MG61 effectors
  REGION 1..1262: note = Description: MG61-294 effector
  source 1..1262: note = uncultivated organism sequence
DRYMDFTKFQKLNSIIKTCSFEMIPIGKTRETMEKHNVIEEDAERKSNAELTKEVSDSFIREFIADYKEDMDWKDLYDAYGEDRARFTDIMNQKAEKLAKRFSDSFNEYINTFLKANGINDKKSKWSDSGYVDVVLPLYVSIHPDFSNDKYERAVASLLHCSNSLFKKYTTSYARIIAGTKKGSFADRSMENFQTACANSVMFDLISRNLSSVGSHDAFKEVFADAPLNMNEYLSQKGISRYNEFVGDSFDESGQVIRYGVNHYINEWNQTHPDERMPKIHKLKKQILSIVEPSFRIRTINDETELFGTFDNIRTAEQRYAGMLESILENMNTADIYDKSGILVTSAERDSLANAITGEWSYFRRQIKEEEENRIREEYLQKKNRVKTKLTQKDNKQIEDALNKSIYSVADLNKMLGSDFGTIEEKLLDEYIRNKSKKESAYAQLVKTDFYDKKTIPAGDDVQRIQQYLDKVLSLTHIVRGLCADSQDPRTDFVFSDDVSSLEDDRVQIISCYNLIRNFVTKKREKTAKEKQIQLCFGRPAHFEQVWNNKQEGKFGNVDAALLEYAGKYYYMVPAAKNEAKLNFPVTDEPQMGECYNYLATKKAIGFAKAFAKFYIKSPEAMEGFEKTEEPFEISVGNDTMIISRKVYEDYEVKTFRESEEAKNKLIDCAKEFLSKNLSYCIYDWSVLKEANDYVNYGEFCNEVDSIAFRVINRYVSKKLVDDAVERGNLYMFEISSLDMYKDSSRMKNIMALRFNQIINGMFTGDKSIIINNAPQIRYRPVVIEKKDVHPVGSRLVNKNTTDGRTIPGDVYLELCAYYNGKKDSLSPEASLYNEKVSVKDSDRAHIKDKHYTEEKFLITFSYTANKNVASATSGYQLNEMVRKEIRENGCNIMAVIRGIDNLLYYAVVDENGNRIEAGDLNVVGDTDFYEKLTILGKQRYTDQKNWKHENKVADLKDTYLGQVCRKIASIAVKNNAVIVIDKINESTKRKNAAFDNNMYRKFENALVNSLTDYYDIGIRGDEPGSVKNPLQLTVKEDNGFQNGIIFYQFDTFTKNICMRTGFVNLLNTFEIKTVASKVAFLKKLSGIYYDNDINEFVFEFTWRNIGCILKDEELPLYDGMDKIWKVRTHFTRYMRNAEKNKYVEIDGTEVLKELIRKNHPDMIGGKIDVDRLTSEEVKKVFEIFTLYTNGYIPRMDDAESGYMSPACDWNNFGTIRYDEMTALQLAKKSSLMIGKVKSGKDWKDMNVSRVEWLNHVLKADW

SEQ ID NO: 1459 - protein, 376 aa, unidentified
  REGION 1..376: note = Category: MG61 effectors
  REGION 1..376: note = Description: MG61-295 effector
  source 1..376: note = uncultivated organism sequence
RYVSKKLVDDAVERGNLYMFEISSLDMYKDSSRMKNIMALRFNQIMNGMFTGDKFIIINNAPQIRYRPVVIEKKDVHPVGSRLVNKNTTDGRTIPGDVYLELCAYYNGKKDSFSPEASLYNEKVSVKDSDRAHIKDKHYTEEKFLITFSYTANKNVASATSGYQLNEMVRKEIRENGCNIMAVIRGIDNLLYYAVVDENGNRIEAGDLNVVGDTDFYEKLTILGKQRYTDQKNWKHENKVADLKDTYLGQVCRKIASIAVKNNAVIVIDKINERTKRKNAAFDNNMYRKFENALVNSLTDYYDIGIRGDEPGSVKNPLQLTVKEDNGFQNGIIFYQFDTFTKNICMRTGFVNLLNTFEIKTVASKVAFLKKLSGIY

SEQ ID NO: 1460 - protein, 258 aa, unidentified
  REGION 1..258: note = Category: MG61 effectors
  REGION 1..258: note = Description: MG61-296 effector
  source 1..258: note = uncultivated organism sequence
MYRKFENALVNSLTDYYDIGIRGDEPGSVKNPLQLTVKEDNGFQNGIIFYQFDTFTKNICMRTGFVNLLNTFEIKTVASKVAFLKKLSGIYYDNDINEFVFEFTWRNIGCILKDEELPLYDGMDKIWKVRTHFTRYMRNAEKNKYVEIDGTEVLKELIRKNHPDMIGGKIDVDRLTSEEVKKVFEIFTLYTNGYIPRMDDAESGYMSPACDWNNFGTIRYDEMTALQLAKKSSLMIGKVKSGKDWKDMNVSRVEWLNH

SEQ ID NO: 1461 - protein, 122 aa, unidentified
  REGION 1..122: note = Category: MG61 effectors
  REGION 1..122: note = Description: MG61-297 effector
  source 1..122: note = uncultivated organism sequence
NKYVEIDGTEVLKELIRKNHPDMIGGKIDVDRLTSEEVKKVFEIFTLYTNGYIPRMDDAESGYMSPACDWNNFGTIRYDEMTALQLAKKSSLMIGKVKSGKDWKDMNVSRVEWLNHVLKADW

SEQ ID NO: 1462 - protein, 1264 aa, unidentified
  REGION 1..1264: note = Category: MG61 effectors
  REGION 1..1264: note = Description: MG61-298 effector
  source 1..1264: note = uncultivated organism sequence
MEDIYMDFTKFQKLNSIIKTCSFEMIPIGKTRETMEKHNVIEEDAERKSNAELTKEASDSFIREFIADYKEDMDWKDLYDAYGEDRARFTDIMNQKAEKLAKRFSDSFNEYINTFLKANGINDKKSKWSDSGYVDVVLPLYVSIHPDFSNDKYERAVASLLHCSNSLFKKYTTSYARIIAGTKKGSFADRSMENFQTACANSVMFDLISRNLSSVGSHDAFKEVFADAPLNMNEYLSQKGISRYNEFVGDSFDESGQVIRYGVNHYINEWNQTHPDERMPKMHKLKKQILSIVEPSFRIRTINDETELFGTFDNIRTAEQRYAGMLESILENMNTADIYDKSGILVTSAERDSLANAITGEWSYFRRQIKEEEENRIREEYLQKKNRVKTKLTQKDNKQIEDALNKSIYSVADLNKMLGPDFGTIEEKLLDEYIRNKSKKESAYAQLVKTDFYDKKTIPAGDDVQRIQQYLDKVLSLTHIVRGLCADSQDPRTDFVFSDDVSSLEDDRVQIISCYNLIRNFVTKKREKTAKEKQIQLCFGRPAHFEQVWNNKQEGKFGNVDAALLEYAGKYYYMVPAAKNEAKLNFPVTDEPQMGECYNYLATKKAIGFAKAFAKFYIKSPEAMEGFEKTEEPFEISVGNDTMIISRKVYEDYEAKTFRESEEAKNKLIDCAKEFLSKNLSYCIYDWSVLKEANDYVNYGEFCNEVDSIAFRVINRYVSKKLVDDAVERGNLYMFEISSLDMYKDSSRMKNIMALRFNQIMNGMFTGDKSIIINNAPQIRYRPVVIEKKDVHPVGSRLVNKNTTDGRTIPGDVYLELCAYYNGKKDSLSPEASLYNEKVSVKDSDRAHIKDKHYTEEKFLITFSYTANKNVASATSGYQLNEMVRKEIRENGCNIMAVIRGIDNLLYYAVVDENGNRIEAGDLNVVGDTDFYEKLTILGKQRYTDQKNWKHENKVADLKDTYLGQVCRKIASIAVKNNAVIVIDKINESTKRKNAAFDNNMYRKFENALVNSLTDYYDIGIRGDEPGSVKNPLQLTVKEDNGFQNGIIFYQFDTFTKNICMRTGFVNLLNTFEIKTVASKVAFLKKLSGIYYDNDINEFVFEFTWRNIGCILKDEELSLYDGMDKIWKVRTHFTRYMRNAEKNKYVEIDGTEVLKELIRKNHPDMIGGKIDVDRLTSEEVKKVFEIFTLYTNGYIPRMDDAESGYMSPACDWNNFGTIRYDEMTALQLAKKSSLMIGKVKSGKDWKDMNVSRVEWLNHVLKADW

SEQ ID NO: 1463 - protein, 343 aa, unidentified
  REGION 1..343: note = Category: MG61 effectors
  REGION 1..343: note = Description: MG61-299 effector
  source 1..343: note = uncultivated organism sequence
FNEYINTFLKANGINDKKSKWSDSGYVDVVLPLYVSIHPDFSNDKYERAVASLLHCSNSLFKKYTTSYARIIAGTKKGSFADRSMENFQTACANSVMFDLISRNLSSVGSHDAFKEVFADAPLNMNEYLSQKGISRYNELVGDSFDESGQVIRYGVNHYINEWNQTHPDERMPKMHKLKKQILSIVEPSFRIRTINDETELFGTFDNIRTAEQRYAGMLESILENMNTADIYDKSGILVTSAERDSLANAITGEWSYFRRQIKEEEENRIREEYLQKKNRVKTKLTQKDNKQIEDALNKSIYSVADLNKMLGSDFGTIEEKLLDEYIRNKSKKESAYAQLVKT

SEQ ID NO: 1464 - protein, 1258 aa, unidentified
  REGION 1..1258: note = Category: MG61 effectors
  REGION 1..1258: note = Description: MG61-300 effector
  source 1..1258: note = uncultivated organism sequence
MEFTKYTRSNKIVRSVIFEMSPIGNTRAAIKEHGVIEEDAVRKSNAVLIKEVSDNFIREFLNDDKLEKYDWVEWEDLCLLIDDKPAFDAKAEKMKESIATSISKSFDSYINRFMAANGKANGKYSWKSAGYIDEVIPMYILCHPDYQDEKYTLAAESLKHASSAMFKKYFVSYERILNGTKTGSIAYRVMENVLIFCTNSKMYKKFAAKISGADLFAKIADITVLEDLISQNGIDFYNEMIGDLYDKDGQLIRKGFNSRINEYNSTHPDDKIPYLKKMKKQILSYVEPFFTIDKIESKEDLDNILTSVRATEESLTENLKTLFSNLLSNDKFPLDRILLTSAARSTIANSLAGRWDYFENIIREKETDKLKADYFEKKNRILTKLTKKDQKKINDAVTSNISSIADLNQMLHNVSEETVEDFLIKSLNKQISLKESSYSVLNNSGFMKSDSKPAWDDNQKIQDYLDHVIAISRMLKYFYTDLMNEKVDPIFVEELQMFDDSKDKIVKSYNMIRNYCTTKTELTAKEKRIQLCFGRPVHFEQTWNNKQEGKFGNLDAALLEFDGLYYYIVPAAKNKRKLNFPVTDIPQEGVNYHYLSTKKSIKLSMALPKMTFKSPAAVKKYAETEEPFTINIGNSTMTVSKKMYDDYNLKTFSSSPDARIALIDYAKEFISKEFSFKCYDYSSLKPSEEYRSYGEFCNEVDSITFSTTSKYVNKDLVDNAVMDGDLYMFLITSADMYKDREKNKDITAIRFNTIMQSMFTGDTSIIINNSPTIYYRPQIIEAVDKHPVGSILVNKMTTDGRTIPGEIYLELCDFYNGKKDYLSAEAKAYNENVSVKESSFSHIKDAHYTREMFTISLSYTLNKGVSNEKLGYALNDEIRRDIVEEGCNIMSIIRGINNLLYYCIVDQNGNQLKAGSLNIVGGVDYYEKLTLLSTQRYLDSKNWKYEKKSAELKDTYLGQVCREIAKIAIANNAIIVIDKLIDSIKNKAAAFDNQVYKKFENRLISTLGNYYDVTLPDNEPGGSTNPLQLTVPDNTSIQNGIIFFIIDSGTKNICQETGYVNLLNTYNVNTVTAKAKFLSKISKIYFDADLNEFVFEFSWKDIGSINLKEDEEIPLYLGMNKVWKVRTHITRYKKNKEKRSYEEIDGTEMMKAVMKNYPDMIGKDIDITKLSSKDIQAVYEVFTYYANGFIPRIGNEDSEFISPVSTWTSIGNVPYDEMSAYQLAKKSLLGINKIQFTEDSGRYQYTPVSKVEWYNSLL

SEQ ID NO: 1465 - protein, 327 aa, unidentified
  REGION 1..327: note = Category: MG61 effectors
  REGION 1..327: note = Description: MG61-301 effector
  source 1..327: note = uncultivated organism sequence
MDFTKFQKLNSIIKTCSFEMIPIGKTRETMEKHNVIEEDAERKSNAELTKEVSDSFIREFIADYKEDMDWKDLYDAYGEDRARFTDIMNQKAEKLAKRFSDSFNEYINTFLKANGIKDKKSKWSDSGYVDVVLPLYVSIHPDFSNDKYERAVASLLHCSNSLFKKYTTSYARIIAGTKKGSFADRSMENFQTACANSVMFDLISINLSNVGSHDAFKEVFADAPLNMNEYLSQKGISRYNEFVGDSFDESGQVIRYGVNHYINEWNQTHPDERMPKMHKLKKQILSIVEPSFRIRTINDETELFGTFDNIRTAEQRYAGMLESILEK

SEQ ID NO: 1466 - protein, 278 aa, unidentified
  REGION 1..278: note = Category: MG61 effectors
  REGION 1..278: note = Description: MG61-302 effector
  source 1..278: note = uncultivated organism sequence
MDFTKFQKLNSIIKTCSFEMIPIGKTRETMEKHNVIEEDAERKSNAELTKEASDSFIREFIADYKEDMDWKDLYDAYGEDRARFTDIMNQKAEKLAKRFSDSFNEYINTFLKANGINDKKSKWSDSGYVDVVLPLYVSIHPDFSNDKYERAVASLLHCSNSLFKKYTTSYARIIAGTKKGSFADRSMENFQTACANSVMFDLISRNLSSVGSHDAFKEVFADAPLNMNEYLSQKGISRYNEFVGDSFDESGQVIRYGVNHYINEWNQTHPDERMPKMH

SEQ ID NO: 1467 - protein, 367 aa, unidentified
  REGION 1..367: note = Category: MG61 effectors
  REGION 1..367: note = Description: MG61-303 effector
  source 1..367: note = uncultivated organism sequence
MIRGIDNLLYYAVVDENGNRIEAGDLNVVGDTDFYEKLTILGKQRYTDQKNWKHENKVADLKDTYLGQVCRKIASIAVKNNAVIVIDKINESTKRKNAAFDNNMYRKFENALVNSLTDYYDIGIRGDEPGSVKTPLQLTVKEDNGFQNGIIFYQFDTFTKNICMRTGFVNLLNTFEIKTVASKVAFLKKLSGIYYDNDINEFVFEFTWRNIGWILKEEELPLYDGMDKIWKVRTHFTRYMRNAEKNKYVEIDGTEVLKELIRKNHPDMIGGKIDVDRLTSEEVKKVFEIFTLYTNGYIPRMDDAESGYMSPACDWNNFGTIRYDEMTALQLAKKSSLMIGKVKSGKDWKDMNVSRVEWLNHVLKADW

SEQ ID NO: 1468 - protein, 410 aa, unidentified
  REGION 1..410: note = Category: MG61 effectors
  REGION 1..410: note = Description: MG61-304 effector
  source 1..410: note = uncultivated organism sequence
FVHIISRKYKEATYNMNYAKFTKQGKLIKGIKLELVPQGNTRDAISEYKIVEADQQLADMVKEVVMAGNEFYKDFIKQIVEHMDGTDWQAYGEAVENKTADQKAYDEAVKSISASIKNAILDTAELYGGKKTLFAKDFITIVLRKYVETAENFPYNRERVLTCIDVLSDKNVLFKTPYVKWEHIIFGESKGSIAERMLSNFDIFYDNKNKYAALKEATAITDFDDFFTDYASYTRYVGQDGIELYNSAIRGIYSESGAKISEGINEYINKLKMKHPELHVNMLKKLQKQILSNSEPLFKVATIQNAEELKGIMNKVKVTEESVLSSAKELLVHMETSDLHDLYISGQRLYFVCQKIAKDGGLLEELIFNDECSRVEKLTEKKKEEIRGAIVKHDYSFAYVDSLLSEYAEK

SEQ ID NO: 1469 - protein, 1259 aa, unidentified
  REGION 1..1259: note = Category: MG61 effectors
  REGION 1..1259: note = Description: MG61-305 effector
  source 1..1259: note = uncultivated organism sequence
MDFTKFQKLNSIIKTCSFEMIPIGKTRETMEKHNVIEEDAERKSNAELTKEVSDSFIREFIADYKEDMDWKDLYDAYGEDRARFTDIMNQKAEKLAKRFSDSFNEYINTFLKANGINDKKSKWSDSGYVDVVLPLYVSIHPDFSNDKYERAVASLLHCSNSLFKKYTTSYARIIAGTKKGSFADRSMENFQTVCANSVMFDLISRNLSSVGSHDAFKEVFADAPLNMNEYLSQKGISRYNEFVGDSFDESGQVIRYGVNHYINEWNQTHPDERMPKMHKLKKQILSIVEPSFRIRTINDETELFGTFDNIRTAEQRYAGMLESILENMNTADIYDKSGILVTSAERDSLANAITGEWSYFRRQIKEEEENRIREEYLQKKNRVKTKLTQKDNKQIEDALNKSIYSVADLNKMLGSDFGTIEEKLLDEYIRNKSKKESAYAQLVKTDFYDKKTIPAGDDVQRIQQYLDKVLSLTHIVRGLCADSQDPRTDFVFSDDVSSLEDDRVQIISCYNLIRNFVTKKREKTAKEKQIQLCFGRPAHFEQVWNNKQEGKFGNVDAALLEYAGKYYYMVPAAKNEAKLNFPVTDEPQMGECYNYLATKKAIGFAKAFAKFYIKSPEAMEGFEKTEEPFEISVGNDTMIISRKVYEDYEAKTFRESEEAKNKLIDCAKEFLSKNLSYCIYDWSVLKEANDYVNYGEFCNEVDSIAFRVINRYVSKKLVDDAVERGNLYMFEISSLDMYKDSSRMKNIMALRFNQIMNGMFTGDKSIIINNAPQIRYRPVVIEKKDVHPVGSRLVNKNTTDGRTIPGDVYLELCAYYNGKKDSLSPEASLYNEKVSVKDSDRAHIKDKHYTEEKFLITFSYTANKNVASATSGYQLNEMVRKEIRENGCNIMAVIRGIDNLLYYAVVDENGNRIEAGDLNVVGDTDFYEKLTILGKQRYTDQKNWKHENKVADLKDTYLGQVCRKIASIAVKNNAVIVIDKINESTKRKNAAFDNNMYRKFENALVNSLTDYYDIGIRGDEPGSVKNPLQLTVKEDNGFQNGIIFYQFDTFTKNICMRTGFVNLLNTFEIKTVASKVAFLKKLSDIYYDNDINEFVFEFTWRNIGCILKDEELPLYDGMDKIWKVRTHFTRYMRNAEKNKYVEIDGTEVLKELIRKNHPDMIGGKIDVDRLTSEEVKKVFEIFTLYTNGYIPRMDDAESGYMSPACDWNNFGTIRYDEMTALQLAKKSSLMIGKVKSGKDWKDMNVSRVEWLNHVLKADW

SEQ ID NO: 1470 - protein, 1334 aa, unidentified
  REGION 1..1334: note = Category: MG62 effectors
  REGION 1..1334: note = Description: MG62-1 effector
  source 1..1334: note = uncultivated organism sequence
MKTFENFTNLYELNKTLRFELKPIWGTKELIEEKHILKLDKEKRENYEKVRPYFNKIHQEFINFALKNPNFDFLKHKEKYLNWLKDKKNKDLLKEKEKIDKIFLEKIWELFENSVKDFLKENGFESIIKQEDQDLKFFRRKEIFEVLQEKYGSELETQIIWKDWETKSIFSGWDKWLWYFDKFFNTRDNFYKTDGTSTAIATRIIKDNLKIFLENTIIFEKVKNKKIDFSEVEKNFSINIDSFFEINNFNNYFLQDGIDFYNKIIWWETLENWKKLKGLNEIINKYRQDTGDKIPYFKKLQKQILSEKDWVFIEKIEDDGGFYDILKKFYENAVEKEWFLRNIFENFYGIWDENLEKIYFNKVAFNTISHKFWNAQEFEKILYEEMKKSKVDWIKFEKKENKYKFPDFIQIIFIKKALENYDSENLFWKERYYKSEENTDWFLERNNKNLWEQFCKIFKFEFLNILKRKIIDDAWEEHEVWFDISKEILWKKLENFELNQENKWIIKDFADYALVLYSFWKYFAVEKWRNWDPNTEDIDDEFYKWENWYIEKFYDTGYDEIVKPYNLMRNYISKKPWEDSKKWKINFETSSLLSWWDKNLESNWSYIFQKWNKYYIWIINWSKPAKEVLEKLYSWNGEKIKRFIYDFQKPDNKNTPRMFIRSKKDSFSPAVGKYNLPVEDILEIYDNWLFKTENKDNSNYKESLSKLIDYFKLGFSKHESFKHFNFVWKDSKEYENIADFYRDVEKSCYQITSEFLDFEELKKLTFKKHLYLFQIYNKDFELDESLQKNWYNFRDEWQKNIHTKYFEALFLEENILRKSWAVFKLSWGWEVFFRKESIKAEKEKRKNIEVTKNRRYTEEKYFLHFPIQVNFKNEISWNFNQEINKFLANNPDINIIGIDRWEKHLAYFSVINQKWEILESGSFNKIENYDKNGEKILYSEREIKKTYKDWKLIDLELVETWKKVDYVDYKLLLEYKEEKRILQRQSWKEVEQIKDLKKWYISLLVRKIADLIIKYNAIVIFENLNFRFKQIRGWIEKSIYQQLEKALIDKLSFLVNKNEINLEKAGSLLKAYQLTVPVDSLKEIWKQTWVIFYTEAAYTSKIDPITGWRPNLYLKKNNSKINKENILKFDNIIFNSKENRFEFTYDLKKFLWKDAKFPEKTIWTVCSCVERFKWNKFLANNLWDYDHYEDLTDWKLLNRALKEWEFSNFKELFKKYLIDINWNILEQIKNLDTKNNERFFSEFINLFSLICQIRNTNQKEKWDENDFILSPVEPFFDSRKSKKFWKNLPKNGDENWAFNIARKGLIILDRISQNPEKTDLLILNSDWDNFVRNA

SEQ ID NO: 1471 - protein, 1333 aa, unidentified
  REGION 1..1333: note = Category: MG62 effectors
  REGION 1..1333: note = Description: MG62-2 effector
  source 1..1333: note = uncultivated organism sequence
MKNFQDFTNLYELSKTLRFELKPIWGTKKLIEEKNILKLDKKKRENYEKVKPYFNKIHQEFINFALRNPNFDFSQFEEKYLNWLKDKKNKDLLKEKESIDKIFLEKIWKLFENSVKDFLKENGFESIVKSEDQNLKFFRRKEIFEVLQEKYGSELETQMVNKDWEIKSIFNGWEKWLWYFDKFFNTRDNFYKTDWTSTAIATRIIKDNLKIFLENTIIFEKVKNKKIDFSEVEKNFSVSIDTFFEINNFNNCFLQDWIDFYNKVIWGETLENWEKLKWLNEIINKYRQDTGEKIPYFKKLQKQILSEKDWVFIDKIEDDGGFYEVLKNFYKNAAEKEWFLKNIFENFYTISDKNLEKIYFNKIAFNTISHKFWSALEFERILYEEMKKEKADWIKFEKKENKYKFPDFIQIIFIKRSLENYDSENLFWKERYYKSEENVDWFLEKNNNNIWEQFCKILNFEFLNILKRRIIDEAWEEYEVWFEISKNILWEKLENFELNQENKWIIKDFADYSLALYSFWKYFAVEKWRNWDLNIDISDDFYGWEDWYIEKFYNTGYDEIVKPYNLMRNYISKKPWEDSKKWKINFETSSLLSWWDKNLESNWSYIFQKWNKYYIWIINWSKPAKEVLEKLYSWNGEKIKRFIYDFQKPDNKNTPRMFIRSKKDSFSPAVGKYNLPVEDILEIYDNWLFKTENKDNSNYKESLSKLIDYFKLGFSKHESFKHFNFVWKDSKEYENIADFYRDVEKSCYQITSEFLDFEELKKLTFKKHLYLFQIYNKDFELDESLQKNWYNFRDEWQKNIHTKYFEALFLEENILRKSWAVFKLSWGWEVFFRKESIKAEKEKRKNIEVTKNRRYTEEKYFLHFPIQVNFKNEISWNFNQEINKFLANNPDINVIWIDRWEKHLAYFSVINQKWEILESWSFNKIENYNKNWEKLLFPEREIKEIHKDWSLIDLELVETWRKVDYVDYKLLLEYKERKRLLQRQSWKEVEQIKDLKKWYISALVRKIADLIIKHNAIVIFEDLNFRFKQIRGWIEKSIYQQLEKALIDKLNFLVNKNEINLEKAGSILKAYQLTVPVDSLKEIWKQTWVIFYTEAAYTSKIDPIKWWRPNLYLKKQNAEINKENILKFDNIIFNSKENRFEFTYDLKKFFWKDSKFPAKTVNTVCSCVERFKWNRNLNNNKWGYIHYENLTDWKLANKEQKEDEFSNFKELFEKYFIDINWNILEQIKNLDTKNNEKFFSSFIDLFTLVCQIRNTNQNAKWDENDFILSPVEPFFDSRKSQNFWKSLPKNWDENWAFNIARKGLIILNRISENPEKPDLLIFNADWDNFARNI

SEQ ID NO: 1472 - protein, 1333 aa, unidentified
  REGION 1..1333: note = Category: MG62 effectors
  REGION 1..1333: note = Description: MG62-3 effector
  source 1..1333: note = uncultivated organism sequence
MKNFQDFTNLYELSKTLRFELKPIWGTKKLIEEKNILKLDKKKRENYEKVKPYFNKIHQEFINFALRNPNFDFSQFEEKYLNWLKDKKNKDLLKEKESIDKIFLEKIWKLFENSVKDFLKENGFESIVKSEDQNLKFFRRKEIFEVLQEKYGSELETQMVNKDWEIKSIFNGWEKWLWYFDKFFNTRDNFYKTDWTSTAIATRIIKDNLKIFLENTIIFEKVKNKKIDFSEVEKNFSVSIDTFFEINNFNNCFLQDWIDFYNKVIWGETLENWEKLKWLNETINKYRQDTGEKIPYFKKLQKQILSEKDWVFIDKIEDDGGFYEVLKNFYKNAAEKEWFLKNIFENFYTISDKNLEKIYFNKIAFNTISHKFWSALEFERILYEEMKKEKTDWIKFEKKENKYKFPDFIQIIFIKRALENYDSENLFWKERYYKSEENADWFLEKNNNNLWEQFCKILNFEFLNILKRRIIDEAWEEYEVWFEISKNILWEKLENFELNQENKWIIKDFADYSLALYSFWKYFAVEKWRNWDLNIDISDDFYGWEDWYIEKFYNTGYDEIVKPYNLMRNYISKKPWEDNKKWKINFETSSLLSGWDKNLESNWSYIFQKWNKYYLWIINWSKPTNEILEKLYSWDGEKIKRFVCDFQKPDKKNTPRMFIRSKKDSFSPAVEKYNLPINDILEIYDNWLFKTENKDNPNYKESLRKLIDYFKLGFSKHESFKHFNFVWKDSKSYENIADFYRDVEKSCYKIDFEFLNFEELKKLTFEKHLYLFQIYNKDFELDESLQEKWYNFKGEWQKNIHTKYFEALFLEENISRKSWAVFKLSWGWEVFFRKKSIEVEKEKRNSVEVIKNKRYTECKYFLHFPIQVNFKEEISWNFNQEINKFLANNPDINVIWIDRWEKHLAYFSIINQKWEILESWSFNKIENYNKNWEKLLFPEREIKEIHKDWSLIDLELVETWRKVDYVDYKLLLEYKERKRLLQRQSWKEVEQIKDLKKWYISALVRKIADLIIKHNAIVIFEDLNFRFKQIRGWIEKSIYQQLEKALIDKLNFLVNKNEINLEKAGSILKAYQLTVPVDSLKEIWKQTWVIFYTEAAYTSKIDPITGWRPNLYLKKNNSKINKENILKFNNIVFNSKENRFEFTYDLKKFFWKDSKFPAKTVNTVCSCVERFKWNRNLNNNKWGYIHYENLTDWKLANKEQKEDEFSNFKELFEKYFIDINWNILEQIKNLDTKNNEKFFSSFIDLFTLVCQIRNTNQNAKWDENDFILSPVEPFFDSRKSQNFWKSLPKNWDENWAFNIARKGLIILNRISENPEKPDLLIFNADWDNFARNI

SEQ ID NO: 1473 - protein, 372 aa, unidentified
  REGION 1..372: note = Category: MG70 effectors
  REGION 1..372: note = Description: MG70-1 effector
  source 1..372: note = uncultivated organism sequence
MNYNTVYVGMDVHKESFTLCAYTIDAEKGSHFQRTEADYKNVLKYLEFLRTVYGNDANFICGYEAGCLGYTLYHQLTEHDVNCVILAPTTMLEQRSKRRIKTDRRDAEIIGKCLAQHNYSPVHIPTATDEETKEFLRMRDDHKLALKKVKQQILAFCLRHNYRYDGNSHWTAAHIKWLKSLNPEALYKEILDEYLLTYTTLSDKVERLDKRIEELASKDEYRESVKKLCCFIGIKTHTALSVLVEVGDFQRFASAQNFASYLGLVPGEDSSGDGQTRLGITKAGNRHVRMLLTEASQCYARGQIGFKSKELKSRQAGNSPQVIAYADKANERLRRRYYKMVLGKSKKHNVAKTAIARELACFMWGMMTEHIA

SEQ ID NO: 1474 - protein, 167 aa, unidentified
  REGION 1..167: note = Category: MG70 effectors
  REGION 1..167: note = Description: MG70-2 effector
  source 1..167: note = uncultivated organism sequence
MEFLRTIYGDDANFICGYEAGCLGYNLYHQLTANNIKCIILAPTTMLEQRSKKRIKTDKRDAEIIAKCLAQHNYSPVHIPTAKDEETKEFLRMRDDHKLALKKVPLLDRYKFYSHVICSGTKIKVITQPIDNRFYSHVICSGTKIHAADNTEAPVFYSHVICSGTKI

SEQ ID NO: 1475 - protein, 50 aa, unidentified
  REGION 1..50: note = Category: MG70 effectors
  REGION 1..50: note = Description: MG70-3 effector
  source 1..50: note = uncultivated organism sequence
MNNTTVYVGMDVHKESFTLCAYTLEKEKGSYSRRTPADYKEVLKYLEFLR

SEQ ID NO: 1476 - protein, 172 aa, unidentified
  REGION 1..172: note = Category: MG70 effectors
  REGION 1..172: note = Description: MG70-4 effector
  source 1..172: note = uncultivated organism sequence
MNYNTVYVGIDVHKESFSLCAYTIETKKASHYQKTDADYKNVLKYVEFLRTIYGDDANFICGYEAGCLGYNLYHQLTANNIKCIILAPTTMLEQRSKKRIKTDKRDAEIIAKCLAQHNYSPVHIPTAKDEETKEFLRMRDDHKLALKKVPLLDRYKFYSHVICSGTKIQREV

SEQ ID NO: 1477 - protein, 182 aa, unidentified
  REGION 1..182: note = Category: MG70 effectors
  REGION 1..182: note = Description: MG70-5 effector
  source 1..182: note = uncultivated organism sequence
MNYNTVYVGIDVHKESFSLCAYTIETKKASHYQKTDADYKNVLKYVEFLRTIYGDDANFICGYEAGCLGYNLYHQLTANNIKCIILAPTTMLEQRSKKRIKTDKRDAEIIAKCLAQHNYSPVHIPTAKDEETKEFLRMRDDHKLALKKVPLLDRYKFYSHVICSGTKIRILCNPIIISFTVT

SEQ ID NO: 1478 - protein, 172 aa, unidentified
  REGION 1..172: note = Category: MG70 effectors
  REGION 1..172: note = Description: MG70-6 effector
  source 1..172: note = uncultivated organism sequence
MNYNTVYVGIDVHKESFSLCAYTIETKKASHYQKTDADYKNVLKYVEFLRTIYGDDANFICGYEAGCLGYNLYHQLTANNIKCIILAPTTMLEQRSKKRIKTDKRDAEIIAKCLAQHNYSPVHIPTAKNEETKEFLRMRDDHKLALKKVPLLDRYKFYSHVICSGTKIQREV

SEQ ID NO: 1479 - protein, 183 aa, unidentified
  REGION 1..183: note = Category: MG70 effectors
  REGION 1..183: note = Description: MG70-7 effector
  source 1..183: note = uncultivated organism sequence
MNYNTVYVGIDVHKESFSLCAYTIETKKASHYQKTEADYKNVLKYVEFLRTIYGDDANFICGYEADCLDYNLYHQLTANNIKCIILAPTTMLEQRSKKKRIKTDKRDSEIIAKCLAQHNYSPVHIPTAKDEETKEFLRLRDDHKLALKKVPLLDRYKFYSHVICSGTKICTDTWVMMSCFTVT

SEQ ID NO: 1480 - protein, 198 aa, unidentified
  REGION 1..198: note = Category: MG70 effectors
  REGION 1..198: note = Description: MG70-8 effector
  source 1..198: note = uncultivated organism sequence
MNYNTVYVGIDVHKESFSLCAYTIETKKASHYQKTEVDYKNVLKYVEFLRTIYGDDANFICGYETGYLGYNLYHQLTANNIKCIILAPTTMLEQRSKKRIKTDKRDAEIIAKCLAQHNYSPVHIPTAKDEETKEFLRMRDDHKLALKKVPLLDRYKFYSHVICSGTKIESEEVTRLGQFYSHVICSGTKINCCIAVLH

SEQ ID NO: 1481 - protein, 173 aa, unidentified
  REGION 1..173: note = Category: MG70 effectors
  REGION 1..173: note = Description: MG70-9 effector
  source 1..173: note = uncultivated organism sequence
MNYNTVYVGMDVHKESFSLCAYTIEAEKASQYQRTEADYKKVLNYLEFLRTIYGDDANFICGYETGYLGYNLYHQLTANNIKCIILAPTTMLEQRSKKRIKTDKRDAEIIAKCLAQHNYSPVHIPTAKDEETKEFLRMRDDHKLALKKVPLLDRYKFYSHVICSGTKIFSLPG

SEQ ID NO: 1482 - protein, 173 aa, unidentified
  REGION 1..173: note = Category: MG70 effectors
  REGION 1..173: note = Description: MG70-10 effector
  source 1..173: note = uncultivated organism sequence
MNYNTVYVGMDVHKESFSLCAYTIETEKASHYQKTEVDYKNVLKYVEFLRTIYGDDANFICGYETGYLGYNLYHQLTANNIKCIILAPTTMLEQRSKKRIKTDKRDAEIIAKCLAQHNYSPVHIPTAKDEETKEFLRMRDDHKLALKKVPLLDRYKFYSHVICSGTKIFSLPG

SEQ ID NO: 1483 - protein, 198 aa, unidentified
  REGION 1..198: note = Category: MG70 effectors
  REGION 1..198: note = Description: MG70-11 effector
  source 1..198: note = uncultivated organism sequence
MNYNTVYVGMDVHKESFSLCAYTIETEKASHYQKTEVDYKNVLKYVEFLRTIYGDDANFICGYETGYLGYNLYHQLTANNIKCIILAPTTMLEQRSKKRIKTDKRDAEIIAKCLAQHNYSPVHIPTAKDEETKEFLRMRDDHKLALKKVPLLDRYKFYSHVICSGTKIIGGFVKHHDLFYSHVICSGTKICMPSFRTT

SEQ ID NO: 1484 - protein, 151 aa, unidentified
  REGION 1..151: note = Category: MG70 effectors
  REGION 1..151: note = Description: MG70-12 effector
  source 1..151: note = uncultivated organism sequence
MNYNTVYVGMDVHKESFSLCAYTIETEKASHYQKTEVDYKNVLKYVEFLRTIYGDDANFICGYETGYLGYNLYHQLTANNIKCIILAPTTMLEQRSKKRIKTDKRDAEIIAKCLAQHNYSPVHIPTAKDEETKEFLRMRDDTSWLSKKYLF

SEQ ID NO: 1485 - protein, 199 aa, unidentified
  REGION 1..199: note = Category: MG70 effectors
  REGION 1..199: note = Description: MG70-13 effector
  source 1..199: note = uncultivated organism sequence
MNYNTVYVGMDVHKESFSLCAYTIETEKASHYQKTEVDYKNVLKYVEFLRTIYRDDANFICGYETGYLGYNLYHQLTANNIKCIILAPTTMLEQRSKKRIKTDKRDAEIIAKCLAQHNYSPVHIPTAKDEETKEFLRMRDDHKLALKKVPLLDRYKFYSHVICSGTKIAPQAVYHGCWFYSHVICSGTKILNVHVKHLH

SEQ ID NO: 1486 - protein, 218 aa, unidentified
  REGION 1..218: note = Category: MG70 effectors
  REGION 1..218: note = Description: MG70-14 effector
  source 1..218: note = uncultivated organism sequence
MNYNTVYVGMDVHKESFSLCAYTIETEKASHYQKTEVDYKNVLKYVEFLRTIYRDDANFICGYETGYLGYNLYHQLTANNIKCIILAPTTMLEQRSKKRIKTDKRDAEIIAKCLAQHNYSPVHIPTAKDEETKEFLRMRDDHKLALKKVPLLDRYKFYSHVICSGTKIAPQAVYHGCWFYSHVICSGTKMQGLISPSTLGFYRHVICSGTKIGNTADS

SEQ ID NO: 1487 - protein, 214 aa, unidentified
  REGION 1..214: note = Category: MG70 effectors
  REGION 1..214: note = Description: MG70-15 effector
  source 1..214: note = uncultivated organism sequence
MNYNTVYVGMDVHKESFSLCAYTIETEKASHYQKTEVDYKNVLKYVEFLRTIYRDDANFICGYETGYLGYNLYHQLTANNIKCIILAPTTMLEQRSKKRIKTDKRDAEIIAKCLAQHNYSPVHIPTAKDEETKEFLRMRDDHKLALKKVPLLDRYKFYSHVICSGTKIAPQAVYHGCWFYSHVICSGTKMQGLISPSTLGFYRHVICSGTKIKV

SEQ ID NO: 1488 - protein, 172 aa, unidentified
  REGION 1..172: note = Category: MG70 effectors
  REGION 1..172: note = Description: MG70-16 effector
  source 1..172: note = uncultivated organism sequence
MNYNTVYVGMDVHKESFSLCAYTIETKKASHYQKTEADYKNVLKYVEFLRTIYGDDANFICGYEAGCLGYNLYHQLTANNIKCIILAPTTMLEQRSKKRIKTDKRDAEIIAKCLAQHNYSPVHIPTAKDEETKEFLRMRDDHKLALKKVPLLDRYKFYSHVICSGTKIVPSQ

SEQ ID NO: 1489 - protein, 372 aa, unidentified
  REGION 1..372: note = Category: MG70 effectors
  REGION 1..372: note = Description: MG70-17 effector
  source 1..372: note = uncultivated organism sequence
MNYNTVYVGMDVHKESFTLCSCKYEDEKASHYQRTPASYKNVLRYLAFLRTIYGEDTRFVCGYEAGCLRYSLYHQLENFNVECVILAPTTMLEQRSKRRIKTDKRDAEIIAKSLAQHNYSPVHIPTKMDNQTKEFIRMRDDHKAELKKIKQQILSFCLRQGYQYDGSGNWTAKHVKWLRSLKPAGLYKEILDEYLLTYTILTDKLNRLDQRIEELASKEEYKESVSKLTCFLGIKIHTALSVIVEVGDFQRFVSARKFAGYLGLVPGQHSSGDDRNGLGITKAGNTHVRRLLVESAQSYTRGKIGYKSRVLRSRQAGNSPQIINYADRANERLRRRYYQMVLKDGKKYNIAKIAVARELACFIWGMMTDNIY

SEQ ID NO: 1490 - protein, 414 aa, unidentified
  REGION 1..414: note = Category: MG70 effectors
  REGION 1..414: note = Description: MG70-18 effector
  source 1..414: note = uncultivated organism sequence
MQFGFLGIDYKNADLTIRDEISFTDQKKLEFFHKAEEIGVEQVMILSTCNRSEIYYFFDDEQQIKKIQNIYCDMFDKAEIEQYIRHCEEDKAVSYLFQVTAGLESMVLGEDQILGQVKDALDFSRTMGFSKKELNKVVRDAITCAKKVKTTFRISEKPVSVGYIGICELQKICDIKDKMVLVIGSGDTAVLALRYLQEYEAGKIYLCSRTLAHAGNVQKEFQEIEIISYEQRYEIMKQCDIVVSATSAPHVVVKQEYYTPEKQVTFLDLATPRDIDPKLSDDSKVNLINLDTIKEISKANQSEREELCRQSNTMISKAKEETMQWLFQAPMEETIRSLQEKCTEIVEDSYSYLSRKIDFGTREQKLLKKVLNASLQRMIKEPIQELKHLETRQEQADYKKMVEQLFGIETKKGK

SEQ ID NO: 1491 - protein, 372 aa, unidentified
  REGION 1..372: note = Category: MG70 effectors
  REGION 1..372: note = Description: MG70-19 effector
  source 1..372: note = uncultivated organism sequence
MYYNTIYVGMDVHKSSFTLCSYTIEAEKVSHFQRTEADYKKVLKYLEFLRTVYGDDARFVCGYEAGCLGYTLYHQLTEHHVECVILAPTTMLEQRSRKRIKTDKRDAEVIARCLAQHNYSAVHIPTATDEETKEYLRMRNDHKLALKRIKQQILAFCLRHGHIYGGKSNWTISHLKWLKELELNSMHREILDEYLLTYTTLTDKLERLDSRIEEIASKPEYNESVKKLSCFIGIKTHTALSTLVEVGDFHRFATASKFASYLGLVPGEDSSGDDQTRLGITKAGNRHLRLLLTEAAQCYARGQIGYKSKALKARQSGNPPEIIAYADKANERLRRKYYKMVLQERKTHNVAKTAITRELACFIWGMMTDRIA

SEQ ID NO: 1492 - protein, 198 aa, unidentified; identical to SEQ ID NO: 1480
  REGION 1..198: note = Category: MG70 effectors
  REGION 1..198: note = Description: MG70-20 effector
  source 1..198: note = uncultivated organism sequence

SEQ ID NO: 1493 - protein, 373 aa, unidentified
  REGION 1..373: note = Category: MG70 effectors
  REGION 1..373: note = Description: MG70-21 effector
  source 1..373: note = uncultivated organism sequence
MNYSIVYLGIDAHMQSFSLCCYTNEKEKAEYPQKVDGHYSKVINYIEAMRFHFGDDALFICGYEAGSLGFTLYHQLTDHGVKCVILAPTTMPTQKGGKRIKTDKRDAALIARCLAHRDYSPVHIPTEQDEQTKEYIRMRDDHKLALKKVKQQILSFCLRHNYRFDGTKHYWTQAHLNWLRALKPEGLYAEILMEYLLTYDNLTNKIERLDKRIEELAAGDAYRQNVHKLSCFLGVKTITALSVLTEVGDFKRFASAQHFSSYIGLTPGEDSSGNDKKRLGITKAGNRHVRTLLVEAAQNYSRGRIGVKSKALMARQEGNAPEVIAYADKANERLRRKYYRMVLKNNKKTNVAKTAVARELACFMWGMVTGNVV

SEQ ID NO: 1494 - protein, 373 aa, unidentified
  REGION 1..373: note = Category: MG70 effectors
  REGION 1..373: note = Description: MG70-22 effector
  source 1..373: note = uncultivated organism sequence
MEYSTVYVGMDVHKNSFSLCCFTNEKEEAEYPQKVTAHYSKVINYIEAMRFHYGNDALFICGYEAGCLGYTLYHQLTDHNIKCVILAPTTMAQQRGKKKVKTDKRDAALIARCLAHHDYSAVHIPTDQDEQTKEYIRMRDDHKLALKKIKQQILSFCLRHNCHYDGTKTHWTQTHLNWLRSLKLDGLYQEILDEYLLTYDRLSEKLERLENRIEELASGEAYADNVHKLSCFIGVKTTTALAALTEVGDFKRFETAQQFSSFLGLTPGEDSSGDDQNRLGITKAGNRHLRMLLIEAAQCYSRGAIGSKSKALKQRQEGNKPEVISYADKANERLRRKYYRMVLHNSKKANVAKTAVARELACFVWGMMVEDFA

SEQ ID NO: 1495 - protein, 372 aa, unidentified
  REGION 1..372: note = Category: MG70 effectors
  REGION 1..372: note = Description: MG70-23 effector
  source 1..372: note = uncultivated organism sequence
MNYNTVYVGMDVHKESFTFCAYTIDAEKGSHFQRTEADYKNVLKYLEFLRTVYGNDANFICGYEAGCLGYTLYHQLIEHHVNCVILAPTTMLEQCSRRRIKTDRRDAEIIAKCLAQHNYSPVHIPTATDEETKEFLRMRDDHKLALKKVKQQILAFCLRHNYRYDGNSHWTAAHIKWLKSLKPEALYKEILDEYLLTYTTLSDKLERLDKRIEELASKDEYRESVKKLCCFIGIKTHTALSVLIEVGDFQRFASAQKFASYLGLVPGEDSSGDEQTRLGITKAGNRHVRMLLTEASQCYARGQIGFKSKELKSRQAGNSPQVIAYADKANERLRRRYYKMVLGKSKKHNVAKTAIARELACFMWGMMTDHIT

SEQ ID NO: 1496 - protein, 376 aa, unidentified
  REGION 1..376: note = Category: MG70 effectors
  REGION 1..376: note = Description: MG70-24 effector
  source 1..376: note = uncultivated organism sequence
MNTNTIYVGMDVHKESFSLCCYSIEKDEASHQQKIGADYRLILKYLGSMRGVFGEDTEFVCGYEAGCLGFTLYRQLTDLNVKCIILAPTTMMAEQGRKRIKTDKRDAVLIARCLAYHTYHAVHIPTEQDEQIKEYIRMRDDHRLALKKDKQQILSFCLRHGFQYTETNSRWTQAHINWLRKLELEGLYQETMAEYLMTFDRLTEVIERLDKRIAGLAEQDTYRSNVKKLTCFMGVKTQTALAVLVEVGDFNRFARAENIAAYIGLVPGEDSSGGDKQRLSITKAGNTHVRRLLIEAAQSYSRGVVGYKSKALKERQEGNPPEVIAYADKANTRLRRRYYHMILQNGRKANVAKTAIARELMCFMWGMVTGNIEARI

SEQ ID NO: 1497 - protein, 379 aa, unidentified
  REGION 1..379: note = Category: MG70 effectors
  REGION 1..379: note = Description: MG70-25 effector
  source 1..379: note = uncultivated organism sequence
MKRIIKIGMDVHSTNYTLCALEPVIGAEDKIFAQIQVTPDYKNILMFINKLMLKLEPSDDYSIECGYEAGCLGYSLYNQLTSAGVKCTILAPTTMLTPKNKRVKTDSRDALMIAQCLAYGGYHPVYVPTEEDNSVKEYLRMRDDHKLALKKVKQQIISFCMRHGHQYSGTNWTGRHIAWLRKADFSALFREALNEYLVTYEELTSKIERFDKRIEEISSQKAYQEKVKKLSCFLGIRTHTALSLIVETGDFYRYKKGNIYSSFLGMAPGENSSGDHIKRTGITKAGNSHLRRLLIESARGICKGTIGYKSKDLKSRQAGNSAEVIAYADKANQRLRSRYYKMIRHGKKKNVAVVAIARELACFVWGMMTDNIYSASSAT

SEQ ID NO: 1498 - protein, 388 aa, unidentified
  REGION 1..388: note = Category: MG70 effectors
  REGION 1..388: note = Description: MG70-26 effector
  source 1..388: note = uncultivated organism sequence
MESLVAIGIDVHKEKFALVAILLVLGAQDQILGEIEVGSDYKEILAFIESIKQKALPGQTYSFVCGYEAGCLGYVLYHQLTAAGVRCVIMAPTTMLSEQGKRIKTDRRDARLIAKCLCCNGYHQVYIPTAEDEDVRDYLRMRDDHQGALKKLKQQINAFVLRHGCSYVGTKWTARHIGWLMDLQNKLDEMQAETLKEYMLSYAEQKDKIERFDEKIEEIARMDRYSKLVSKLVCFLGVKTHTALSLIVETGDFMRFAKGNIFAAFLGLAPGEHSSGSGVHRLGITKAGNTHLRTLLIEAASGICKGAVGHKSKALKARQAGQESEVIAYADKANTRLRSKYYRMMRHGKKRNVAVAAVARELACFIWGMATGNTGLTRQAQASAKAGI

SEQ ID NO: 1499 - protein, 372 aa, unidentified
  REGION 1..372: note = Category: MG70 effectors
  REGION 1..372: note = Description: MG70-27 effector
  source 1..372: note = uncultivated organism sequence
MNYNTVYVGMDVHKESFSLCAYTIEAEKASHYQRTEADYKKVLNYLEFLRTIYGDDANFICGYEAGCLGYTLYHQLTANNVKCIILAPTTMLEQRSKKRIKTDKRDAEIIAKCLAQHNYSPVHIPTAKDEETKEFLRMRDDHKLALKKVKQQILAFCLRHNYRYDGNSHWTAAHLKWLKALTPEALYKEILDEYLLTYQTLSDKLERLDKRIEELSTQDEYKEAVKKLCCFIGVKTHTALSVLVEVGDFNRFASAQHFASYLGLVPGEDSSGNDQNRLGITKAGNRHVRLLLTEASQCYARGQVGFKSKELKARQSGNTPAVIAYADKANERLRRRYYKMVLNKCKKHNVAKTAIARELACFMWGMMTDNIA

SEQ ID NO: 1500 - protein, 372 aa, unidentified
  REGION 1..372: note = Category: MG70 effectors
  REGION 1..372: note = Description: MG70-28 effector
  source 1..372: note = uncultivated organism sequence
MNYNTVYVGMDVHKESFTFCAYTIDAEKGSHFQRTEADYKNVLKYLEFLRTVYGNDANFICGYEAGCLGYTLYHQLTEYHVNCVILAPTTMPEQCSKRRIKTDRRDAEIIAKCLAQHNYSPVHIPTATDEETKEFLRMRDDHKLALKKLKQQILAFCLRHNYRYDGNSHWTAAHIKWLKSLKPEALYKEILDEYLLTYTTLSDKLERLDKRIEELASKDEYRESVKKLCCFIGIKTHTALSVLVEVGDFQRFASAQKFASYLGLVPGEDSSGDEQTRLGITKAGNRHVRMLLTEASQCYARGQIGFKSKELKSRQAGNSPQVIAYADKANERLRRRYYKMVLGKSKKHNVAKTAIARELACFMWGMMTDHIA

SEQ ID NO: 1501 - protein, 371 aa, unidentified
  REGION 1..371: note = Category: MG70 effectors
  REGION 1..371: note = Description: MG70-29 effector
  source 1..371: note = uncultivated organism sequence
MKSIIYLGMDVHTTNYTLCCYTLEDDRMCHLQQIAPDYRLILKYMDQVRRLYNNDVEFLCGYEAGCLGYSLYHQLTAHQVRCVILAPTTMGAVLGIRKVKTDKRDAMLIAKCLAFHTYHPVHIPTPEEEQVKEFIRMRDDHKLALKRIKQQISAFCLRHGFHYTATKSKWTQAHWKWLKSLKPDGLHQETLNEYLLTCSSLSDKLERLDRRIEELAAQEPFQERVRQLTCLVGVKTHTALSIIVEVGDFNRFPTAGKFASFLGLTPGEASSSDKQNRFGITKAGNTHVRRLLVEAAQSYARGQTGRKSKDLKARQAGNKEQVIAYADKGSERLRRRFRQLLYKGKQHNVIKTAIARELSCFIWGMMTDRIA

SEQ ID NO: 1502 - protein, 378 aa, unidentified
  REGION 1..378: note = Category: MG70 effectors
  REGION 1..378: note = Description: MG70-30 effector
  source 1..378: note = uncultivated organism sequence
MNRIIKIGMDVHTSNYTLCIFEPSFEHDGTVHCITQVKPEVKNIIHVIETFKKKHENEELNIVCGYEAGCLGYSLYHELKEKGIECVILAPTTMKTEKGGRKLKNDYRDAKMIAECLAYGGYSAVHIPTELDNSVKEFIRMRDDIKENLKSIKQQIIAFLTRNGKQFEGKSFWTRKHIDWINTVSFSEPLLQDTLKEYMIEYNHLCNRIETLDRQIEEISLKEEYVEKVQQLQCLIGIKTHTALSLIVETSDFNRFKKGNMYSAYLGLIPGDDSSGGHENKLGITKAGNSHLRRLLVEAAQGYTRGRVGFKSKDLKSRQEKCSSEVVAYADRANERLRRKYYRMTLRGKKFNVAKTAIARELACFVWGIMTDHIDLCN

SEQ ID NO: 1503 - protein, 405 aa, unidentified
  REGION 1..405: note = Category: MG70 effectors
  REGION 1..405: note = Description: MG70-31 effector
  source 1..405: note = uncultivated organism sequence
MQLGYVGINYKNSDLSVRDKITFTDSGIADFMQQAEEAGVNQCMCLSTCNRCEVFYLYEDETFVQVMSDLFNDYFGLTDTKLAGVKCGEEALVYLFCIAAGLESMVLGEDQILGQLKDAADLSRTLGHSGKELNYIVREAVSCAKRIKTEYKVSEKPVSVCYVGIQELDRVCGISGKHALVIGSGKTAALAIRYLAEYGADVTVCSRTYQHAKALLKEFPDIQVIAYDKKTEALKSSDIVVSATSSPHLVIKCAELSGGKKMTLLDLAAPRDIEKSAGDICGVTLIDLDRIGGIVKSNQNERAHLLKESQCVIDEYIAETKKWLTSSRMDTTIQSLGKKCDEIVQDSYDYLNRKIDLSDHDRVILKKILKSSLHRLLKEPIEELKNVEENEQQQYKDMVERLFGL

SEQ ID NO: 1504 - protein, 204 aa, unidentified
  REGION 1..204: note = Category: MG70 effectors
  REGION 1..204: note = Description: MG70-32 effector
  source 1..204: note = uncultivated organism sequence
MNYNTVYVGMDVHKESFSLCAYTIETKKASHYQKTEADYKNVLKYVEFLRTIYGDDANFICGYEAGCLGYNLYHQLTANNIKCIILAPTTMLEQRSKKRIKTDKRDAEIIAKCLAQHNYSPVHIPTAKDEETKEFLRMRDDHKLALKKVPLLDRYKFYSHVICSGTKIKVITQPIDNRFYSHVICSGTKIAWDYENCMNGFTVT

SEQ ID NO: 1505 - protein, 193 aa, unidentified
  REGION 1..193: note = Category: MG70 effectors
  REGION 1..193: note = Description: MG70-33 effector
  source 1..193: note = uncultivated organism sequence
MNYNTVYVGMDVHKESFSLCAYTIETKKASHYQKTEADYKNVLKYVEFLRTIYGDDANFICGYEAGCLGYNLYHQLTANNIKCIILAPTTMLEQRSKKRIKTDKRDAEIIAKCLAQHNYSPVHIPTAKDEETKEFLRMRDDHKLALKKVPLFDRYKFYSHVICSGTKIMFAGVAVYFGFYSHVICSGTKIVLH

SEQ ID NO: 1506 - protein, 415 aa, unidentified
  REGION 1..415: note = Category: MG70 effectors
  REGION 1..415: note = Description: MG70-34 effector
  source 1..415: note = uncultivated organism sequence
MIFGYVGICYKEAPLALRGQVALPDSKKIELWERLSVIGLKQCVIVSTCNRSEIFYFSHSDAVTGEQVQSCYQDIFPNVSFGDYCKKKEGSEAVSYLFRVAAGLESLVVGEDQILGQVVEAMDFARTMGHSGKELERIVRDAVTCAKWIKTNYRISEKPLSVSYIGVKELHRAGGVSGKNILVIGSGKTAALALTYLFEYGAKKIYLCSRTLAHAKELLAVHENLTVVDYHERYDAMKRCETVVSATSSPHLVVLYDKWKETGVTQMQFLDLASPRDIDSRLQEVPGVQLIDMDTLQKITEKNQNEREKLAADCEQVIEEKVQETMEWLLLSRVDGTIETLQKRCLQIETDSYEYLNRKISLNHREQKLLKKVLHASLQRLIREPIQELKQLEDEEKQKEYQNILKTLFRMYEDE

SEQ ID NO: 1507 - protein, 405 aa, unidentified
  REGION 1..405: note = Category: MG70 effectors
  REGION 1..405: note = Description: MG70-35 effector
  source 1..405: note = uncultivated organism sequence
MQLGYVGINYKNTDLSVRDKITFTDSGIADFMQQAEEAGVNQCMCLSTCNRCEVFYLYEDETFVQVMSDLFNDYFGLTDTKLAGVKCGEEALVYLFCIAAGLESMVLGEDQILGQLKDAADLSRTLGHSGKELNYIVREAVSCAKRIKTEYKVSEKPVSVCYVGIQELDRVCGISGKHALVIGSGKTAALAIRYLAEYGADVTVCSRTYQHAKALLKEFPDIQVIAYDKKTEALKNSDIVVSATSSPHLVIRASELSEGKKMTLLDLAAPRDIEKSAGDICGVTLIDLDRIGGIVKSNQNERAHLLKESQCVIDEYIAETKKWLTSSRMDTTIQSLGKKCDEIVQDSYDYLNRKIDLSDHDRVILKKILKSSLHRLLKEPIEELKNVEENEQQQYKDMVERLFGL

SEQ ID NO: 1508 - protein, 377 aa, unidentified
  REGION 1..377: note = Category: MG70 effectors
  REGION 1..377: note = Description: MG70-36 effector
  source 1..377: note = uncultivated organism sequence
MNRIIKIGMDVHTTNYTLCIFEPSFEHDGTVHCITQVKPEVKNILRVIETFKNKHPEESFKITCGYEAGCLGYSLYHDLKAKGIECVILAPTTMKVEKGGRKIKNDYRDARMIAECLAYGGYSAVHVPTQLDNSVKEYIRMRDDVQSNLKSIKQQIIGFMTRNGKFYDGKSYWTQKHLDWIRQTTFHDPLLREVLDEYMIEYSRLKERVETLDKRIEELSTKEEYVEKVKQLQCLIGIKTHTALSLIVETSDFKRFRKGDMYAAYLGLIPGEDSSAEHENRLGITKAGNRHLRRLLVEAAQGYTRGQIGFKSKALKERQEKCDHEVVAYADRANERLRRKYYRMIGRGKKYNVAKTAIARELACFVWGIMTDHIELQ

SEQ ID NO: 1509 - protein, 388 aa, unidentified
  REGION 1..388: note = Category: MG70 effectors
  REGION 1..388: note = Description: MG70-37 effector
  source 1..388: note = uncultivated organism sequence
MNRIIKIGMDVHSTNYTLCAMEPTIGAEDRVYGEVQVAPDYKEVVTFIASLKQKLGLDHDYSIECGYEAGCLGYTLYHQLSNAGIKCVILAPTTMLTQQGQRIKTDKRDAHLIAQCLCYGGYHPVYIPTGEDDSVKEYLRMRDDHKLALKKLKQQINAFVLRHGNQFTGTKWTIKHITWLKKLELDPMYRETLDEYLSSYEEQEAKIERYDKRIEEIADEARYQENTKKLGCFLGIRTHTALSLIVETGDFKRFAKGNTYAAFLGLAPGEHSSSKSVNRLGISKAGNTHLRCLLIEAAKGICKGAIGHKSRELRSRQSGQSAEVITYADKANTRLRSKYYRMIRHGKKKNVAVAAVARELACFIWGMMTGNISTAYSAGASNPAVSQG

SEQ ID NO: 1510 - protein, 373 aa, unidentified
  REGION 1..373: note = Category: MG70 effectors
  REGION 1..373: note = Description: MG70-38 effector
  source 1..373: note = uncultivated organism sequence
MKYSTVYVGMDVHKESFSLCCYTNEKEQAEYPQKVDAHYSKVINYIEAMRFHYGDDTLFICGYEAGCLGFTLYHQLMDHGVKCVILAPTTMLQQKGRKKVKTDKRDAALIARCLAHHDYSPVHIPTEQDEQTKEYIRMRDDHKLALKKVKQQILSFCLRHNYRFDGTANHWTQAHLKWLRSLKPEGLYAEILQEYLLTYDSLIDKLKRFDKRIEELAADEVYQENVRKLSCFIGVKTVTALAVLTEVGDFKRFASAQHFASYIGLTPGEDSSGDDQHRLGITKAGNRHVRSLLVEAAQSYSRGQIGFKSKALKARQDGNPPEVIAYADKANERLRRKYYHMVLKNNKKTNVAKTAVARELACFMWGMITGNVA

SEQ ID NO: 1511 - protein, 384 aa, unidentified
  REGION 1..384: note = Category: MG70 effectors
  REGION 1..384: note = Description: MG70-39 effector
  source 1..384: note = uncultivated organism sequence
MVTGITAYNRRSHMNSIVYVGMDVHKESYTLCCYCFDTDKVEFKQTIPSDYKLILKYIEAMRGKYGEDSKFVCGYEAGCLGYSLYHQLKEHSVDCRILAPTTMAITNTNHVKTDRRDAANIARCLAFHTYSEVYVPDDEDNSVKEYIRMRDDQKLMLKKTKQQILAFVLRQGKKFEGGKTYWTIAHMKWLKSLELDGLNKETLSEYLITYEYLTEKIARLDDRIEELASGEKYKEKVKNMGCFLGVKTHTALSMVVEIGDFNRFEKAPKFAGFLGLVPSEDSSGGNVNRYSITKAGNSHLRRLMVEAAQSYTRGNVGHKSVALKARQKGCNAEVIAYADKANERLRRRFYKMTLNKGVNRNVATTAIARELACFMWGMATGNIS

SEQ ID NO: 1512 - protein, 372 aa, unidentified
  REGION 1..372: note = Category: MG70 effectors
  REGION 1..372: note = Description: MG70-40 effector
  source 1..372: note = uncultivated organism sequence
MNYNTVYVGMDVHKESFSLCAYTIEAEKASHYQRTEADYKKVLNYLEFLRTIYGDDANFICGYEAGCFGYTLYHQLTANNVKCIILAPTTMLEQRSKKRIKTDRRDAEIIAKCLAQHNYSPVHIPTAKDEETKEFLRMRDDHKLALKKVKQQILAFCLRHNYRYDGKSHWTAAHLKWLKALTPEALYKEILDEYLLTYQTLSDKIERLDKRIEELATQDEYKEAVKKLCCFIGVKTHTALSVLVEVGDFKRFASAQHFASYLGLVPGEDSSGDDQNRLGITKAGNRHVRLLLTEASQCYARGQVGFKSKELKSRQSGNTPAVIAYADKANERLRRRYYKMVLNKYKKHNVAKTAIARELACFMWGMMTDNIA

SEQ ID NO: 1513 - protein, 382 aa, unidentified
  REGION 1..382: note = Category: MG70 effectors
  REGION 1..382: note = Description: MG70-41 effector
  source 1..382: note = uncultivated organism sequence
MNRIIKIGMDVHSTNFTLCALEPKIDGEDRIFANIKVEPDYKYILRFIEKLKEKLGSSDNYSIECGYEAGCLGYSLYRQLTKAGVKCVILAPTTMLTQQGKRVKTDTRDAVMIAQCLAYNGYHAVHVPTEKDNSVKEYLRMRDDHKIALKKLKQQINAFCLRNGHQYCGNKWTISHLTWLRKLELPELYRETLNEYLATYDEETAKIERFDKRIEELASDTDYKDHVRNLGALLGIKTHTALSLIVETGDFNRFAKGNTYAAFLGLAPGESSSGEHICRTGISKAGNAHLRTLLIEASRGICKGAVGYKSRALRARQAECSAEIIAYADRANTRLRSKYYRLIRHDKKKNVAVAAIARELACFIWGIMTDHTEIKTNGQKTA

SEQ ID NO: 1514 - protein, 392 aa, unidentified
  REGION 1..392: note = Category: MG70 effectors
  REGION 1..392: note = Description: MG70-42 effector
  source 1..392: note = uncultivated organism sequence
MNRIVYIGMDVHTSNYTLCSLDPGYGVEKDNYFAEVQFTNNFVTNVVNYVSNLKKKLKDCEFVCGYEAGCLGYSTYKDLTKVGIKCVLMAPSTMAVQKGGKKVKNDRRDARVIAQCLAYQTYKEVYVLSEHDEAVRGYLRMRDSHNKALKRIKQQIIAFCTGHGLFSPTKSNWTVAHLKWLKDLKFNDPVEQEILNEYLSSLTFLSDKIKAMDVRIEELASEKQYCENVKKLRCIKGIETNVALTLLAEIGDFNRFSKPTDFASYLGLIPGEQSSGDKVRGTGITKAGNSTLRRKLTESAKGYWRGRIGIKSATFKKLEKELPKEVTEYALKANTRLQRKFFNMTHVKGKNMNVAASACAREMACFVWGLITNHYDKAPAVPKTDEELLDLN

SEQ ID NO: 1515 - protein, 1272 aa, unidentified
  REGION 1..1272: note = Category: MG75 effectors
  REGION 1..1272: note = Description: MG75-1 effector
  source 1..1272: note = uncultivated organism sequence
MKFEEFTHLYQRSITIRMGLKPIGNTLEQIKEKHFLEKDEHRANSYKRVKNIIDEYYKDYIEKRLSDFSHSHHSDTDSSWNKLLKEYNGLYHSKRAENTEKSRFAEIQQTLRKEISKALNDKAQSLSGKELIQKDLISFLKTRKDLSKDEINDRLIPLVNEFEKFSTYFTGFSQNRENIFSSKEKSSSASYRLINENLPKFIDNMGTYGKLHSIPEISEMQDKLYEAFKKQIHYLKLGISSIDEMFQLEYFNNVLTQSQIDLYNAIIGGKTEGDLHIDGINQYVNRYNQTHKDERLPKLKTLFKQILSDRASLSAIPEKIENDDQAVKAVTGIYETIEQQVLAEDKLKNMLVSLSDYNLEGIFISNGQQLTQISKNMLGRREFISDAIVKCYQKSLPQKKRENYEDYLNRIRNNVRSIGSFSIADINQYIAKQPNGKDDYPKENPSTTIQDYFAKLDASDHTADIFSRISKAHQALLPALGKQNTGNISSFKDKNTLLLIKNLLDAILDLVHFVKPLLGTGDEIGKDERFYGDFSPLWNELKKFMSVYDMIRNYATQKPYKKDKIKINFENVQLLQGWDQNKEKEYASIILRRDGKYYLAIMDKDSKKLLGKAMPSDGDCYEKMVYKFIPDAKKMFPKVFLSKKGQETFKPTPLLIDNYNRGTHKKGKNFNLKDCHDLIDYFKHSIGMHEDWGKFGFNFSDTSSYEDISEFYNEVNQQSYKLTFTKVSVHFIDKLVDEGKMYMFQIYNKDFSEYSKGTPNIHTLYWKALFDERNLADVVYKLNGKAELFYRKKSIGHTHPTHPANQPIKNKSKDNEKAESTFGYDLIKDRRYTVDMFQFHVPITMNFKCGEKEKINLQVAEYLHTADDIHIIGVDRGERNLLYLVVIDIHGNIKEQFTLNDIVNEHNGNTYHTNYHDLLGEREEERIKARQSWQAIENIKELKEGYLSQVIHKITQLMMKYHAIVVLEDLNFGFKRSRQKVEKSVYQKFEKQLINKLQFLVNKQQSDPQAPGGVFNAYQLADKFESFQKLGKQSGFIFYIPAWNTSNIDPVTGFVNLFDTHYANVEKSKEFFKKFDTIRYNAEKDWFEFSFDYNHFTKKAEGSRTNWTLYTYGTRIKTFRNDKRNNEWDNEEMNLTDSFKTFFADNYVDINSNLQEAITNQNDKGFFVKLFELFKLLLQMRNSKIKSDVDFLLSPVADENGVFFDSRKYKGSRKCSGVVLPENADANGAFNIARKGLMLVRQMRIAKDEPFKPDLSNRQWLKFAQDKPYLND

SEQ ID NO: 1516 - protein, 1245 aa, unidentified
  REGION 1..1245: note = Category: MG75 effectors
  REGION 1..1245: note = Description: MG75-2 effector
  source 1..1245: note = uncultivated organism sequence
METFSGFTNLYPLSKTLRFRLIPVGETLKHFIDSGILEEDQHRAESYVKVKAIIDDYHRAYIENSLSGFELPLESTGKFNSLEEYYLYHNIRNKTEEIQNLSSKVRTNLRKQVVAQLTKNEIFKRIDKKELIQSDLIDFVKNEPDANEKIALISEFRNFTVYFKGFHENRRNMYSDEEKSTSIAFRLIHENLPKFIDNMEVFAKIQNTSISENFDAIQKELCPELVTLCEMFKLGYFNKTLSQKQIDAYNTVIGGKTTSEGKKIKGLNEYINLYNQQHKQEKLPKMKLLFKQILSDRESASWLPEKFENDSQVVGAIVNFWNTIHDTVLAEGGLKTIIASLGSYGLEGIFLKNDLQLTDISQKATGSWGKISSEIKQKIEVMNPQKKKESYETYQERIDKIFKSYKSFSLAFINECLRGEYKIEDYFLKLGAVNSSSLQKENHFSHILNTYTDVKEVIGLYSESTDTKLIQDNDSIQKIKQFLDAVKDLQAYVKPLLGNGDETGKDERFYGDLIEYWSLLDLITPLYNMVRNYVTQKPYSVDKIKINFQNPTLLNGWDLNKETDNTSVILRRDGKYYLAIMNNKSRKVFLKYPSGTDRNCYEKMEYKLLPGANKMLPKVFFSKSRINEFMPNERLLSNYEKGTHKKSGTCFSLDDCHTLIDFFKKSLDKHEDWKNFGFKFSDTSTYEDMSGFYKEVENQGYKLSFKPIDATYVDQLVDEGKIFLFQIYNKDFSEHSKGTPNMHTLYWKMLFDETNLGDVVYKLNGEAEVFFRKASINVSHPTHPANIPIKKKNLKHKDEERILKYDLIKDKRYTVDQFQFHVPITMNFKADGNGNINQKAIDYLRSASDTHIIGIDRGERNLLYLVVIDGNGKICEQFSLNEIEVEYNGEKYSTNYHDLLNVKENERKQARQSWQSIANIKDLKEGYLSQVIHKISELMVKYNAIVVLEDLNAGFMRGRQKVEKQVYQKFEKKLIEKLNYLVFKKQSSDLPGGLMHAYQLANKFESFNTLGKQSGFLFYIPAWNTSKMDPVTGFVNLFDVKYESVDKAKSFFSKFDSIRYNVERDMFEWKFNYGEFTKKAEGTKTDWTVCSYGNRIITFRNPDKNSQWDNKEINLTENIKLLFERFGIDLSSNLKDEIMQRTEKEFFIELISLFKLVLQMRNSWTGTDIDYLVSPVCNENGEFFDSRNVDETLPQNADANGAYNIARKGMILLDKIKKSNGEKKLALSITNREWLSFAQGCCKNG

SEQ ID NO: 1517 - protein, 1254 aa, unidentified
  REGION 1..1254: note = Category: MG75 effectors
  REGION 1..1254: note = Description: MG75-3 effector
  source 1..1254: note = uncultivated organism sequence
MRFEDFTGLYPVSKTLRFEARPVGNTLKYLIKSGLLEQDTHRADSYQKVKKLIDEYHKAFIDSVMSGFMFSNETLEEYFVLYANKSVDEESRNKYVELQKKMRESVSNALKGDERFKNIDKKELIKEDLYAFVRKADESQLAGLTLEQAEELLLEFKDFTTYFGGFHQNRANMYVPDEKSTSIAYRLVNENLPRFVDNIYVFKKIYSIPELRDNVKTVYDAFKEHLNVVELSDIFDVTFYSEVLTQKHIDLYNSIIGGRTDKESSKKIQGLNEYINLYNQTHKDEKLPKFKVLYKQILSDRVAVSWLPEAFSNDNETLCAIRDCYSGLEEHILGEKDLKILLESLDKYDLCGVFISNNKQLLSEISQKLYGNWGTIENAVRRHFEEVSPQRGKKETEEKYRERIAKSTKRYESFSIADLNEWVKQSNPDEARRIEDYFTSLGVVNSEDEQKEDLFRRVENAYTDVTDLLSSDYPEGKKLAQDSKAVEKIKNLLDAIKELQWFVKPLNGSGDENNKDERFYGEFSMLWAELDSFSLLYDKVRNYMTRKPYSQDKIKLNFANATLLKGWDRNKEVDNACVILRRNGLYYLGIMDKEHRRSFEGNYPCNGDVYEKMVYKLLPDPKKMLPKVFFSESREKDFNPTDSIRQLYKGNTYKAGPQFKIEDCRELIDFYKKSISLHEDWKNFGFQFSDTSTYEDLNGFFREVEQQGYKMTFKNVSVSYVEKLVDEGKLYLFQLYNKDFSAYSKGTPNIHTLYWKAVFDEKNLLNVVYKLNGEAELFFRKKSINITNPTHPANVSVANKNKLNQKRESVFDYDLVKDRRYTVDKFLFHVPITMNFKSKGKPQIEQQVRSYLHSAENTHIIGIDRGERHLLYVSVIDSYGNIKEQFSLNEIVNENAGNIYVTDYHALLDTKEAERKEARQSWQTIENIKELKEGYLSQAVHKVTQLMIKYNAIVVLEDLNMGFMRGRQKVEKQVYQKFEKMLIDKLNYMVDKKICVDEPGGIFHAYQLASKFESFTKLGKQSGFLFYIPAWNTSKIDPVTGFVNLFDLRYESIERTKLFFSKFKFVRYNQSSDWFEFAFDYNDFTDKATGTRTEWNITTHGTRIITFRNPEKNSQWDSREVVLTDEFKVLFSKYSIALNGNLKESIAIQTDRLFFETLLNCFKLTLQMRNSITGTDIDYLISPVADENGVFYDSRNCSNSLPKNADANGAYNIARKGLMLIDQIKHSDDFKTVKFDITNKAWLEFAQKKPYLND

SEQ ID NO: 1518 - protein, 1245 aa, unidentified
  REGION 1..1245: note = Category: MG75 effectors
  REGION 1..1245: note = Description: MG75-4 effector
  source 1..1245: note = uncultivated organism sequence
METFSGFTNLYPLSKTLRFRLIPVGETLKYFIGSGILEEDQHRAESYVKVKAIIDDYHRAYIENSLSGFELPLESTGKFNSLEEYYLYHNIRNKTEEIQNLSSKVRTNLRKQVVAQLTKNEIFKRIDKKELIQSDLIDFVKNEPDANEKIALISEFRNFTVYFKGFHENRRNMYSDEEKSTSIAFRLIHENLPKFIDNMEVFAKIQNTSISENFDAIQKELCPELVTLCEMFKLGYFNKTLSQKQIDAYNTVIGGKTTSEGKKIKGLNEYINLYNQQHKQEKLPKMKLLFKQILSDRESASWLPEKFENDSQVVGAIVNFWNTIHDTVLAEGGLKTIIASLGSYGLEGIFLKNDLQLTDISQKATGSWGKISSEIKQKIEVMNPQKKKESYETYQERIDKIFKSYKSFSLAFINECLRGEYKIEDYFLKLGAVNSSSLQKENHFSHILNTYTDVKEVIGLYSESTDTKLIQDNDSIQKIKQFLDAVKDLQAYVKPLLGNGDETGKDERFYGDLIEYWSLLDLITPLYNMVRNYVTQKPYSVDKIKINFQNPTLLNGWDLNKETDNTSVILRRDGKYYLAIMNNKSRKVFLKYPSGTDRNCYEKMEYKLLPGANKMLPKVFFSKSRINEFMPNERLLSNYEKGTHKKSGTCFSLDDCHTLIDFFKKSLDKHEDWKNFGFKFSDTSTYEDMSGFYKEVENQGYKLSFKPIDATYVDQLVDEGKIFLFQIYNKDFSEHSKGTPNMHTLYWKMLFDETNLGDVVYKLNGEAEVFFRKASINVSHPTHPANIPIKKKNLKHKDEERILKYDLIKDKRYTVDQFQFHVPITMNFKADGNGNINQKAIDYLRSASDTHIIGIDRGERNLLYLVVIDGNGKICEQFSLNEIEVEYNGEKYSTNYHDLLNVKENERKQARQSWQSIANIKDLKEGYLSQVIHKISELMVKYNAIVVLEDLNAGFMRGRQKVEKQVYQKFEKKLIEKLNYLVFKKQSSDLPGGLMHAYQLANKFESFNTLGKQSGFLFYIPAWNTSKMDPVTGFVNLFDVKYESVDKAKSFFSKFDSIRYNVERDMFEWKFNYGEFTKKAEGTKTDWTVCSYGNRIITFRNPDKNSQWDNKEINLTENIKLLFERFGIDLSSNLKDEIMQRTEKEFFIELISLFKLVLQMRNSWTGTDIDYLVSPVCNENGEFFDSRNVDETLPQNADANGAYNIARKGMILLDKIKKSNGEKKLALSITNREWLSFAQGCCKNG

SEQ ID NO: 1519 - protein, 1245 aa, unidentified
  REGION 1..1245: note = Category: MG75 effectors
  REGION 1..1245: note = Description: MG75-5 effector
  source 1..1245: note = uncultivated organism sequence
METFSGFTNLYPLSKTLRFRLIPVGETLKHFIDSGILEEDQHRAESYVKVKAIIDDYHRAYIENSLSGFELPLESTGKFNSLEEYYLYHNIRNKTEEIQNLSSKVRTNLRKQVVVQLTKNEIFKRIDKKELIQSDLIDFVKNEPDANEKIALISEFRNFTVYFKGFHENRRNMYSDEEKSTSIAFRLIHENLPKFIDNMEVFAKIQNTSISENFDAIQKELCPELVTLCEMFKLGYFNKTLSQKQIDAYNTVIGGKTTSEGKKIKGLNEYINLYNQQHKQEKLPKMKLLFKQILSDRESASWLPEKFENDSQVVGAMVNFWNTIHDTVLAEGGLKTIIASLGSYGLEGIFLKNDLQLTDISQKATGSWSKISSEIKQKIEVMNPQKKKESYESYQERIDKLFKSYKSFSLAFINECLRGEYKIEDYFLKLGAVNSSSLQKENHFSHILNAYTDVKEAIGFYSESTDTKLIQDNDSIQKIKQFLDAVKDLQAYVKPLLGNGDETGKDERFYGDLIEYWSLLDLITPLYNMVRNYVTQKPYSVDKIKINFQNPTLLNGWDLNKETDNTSVILRRDGKYYLAIMNNKSRKVFLKYPSGTDGNCYEKMEYKLLPGANKMLPKVFFSKSRINEFMPNERLLSNYEKGTHKKSGICFSLDDCHTLIDFFKKSLDKHEDWKNFGFKFSDTSTYEDMSGFYKEVENQGYKLSFKPIDATYVDQLVDEGKIFLFQIYNKDFSEHSKGTPNMHTLYWKMLFDETNLGDVVYKLNGEAEVFFRKASINVSHPTHPANIPIKKKNLKHKDEERILKYDLIKDKRYTVDQFQFHVPITMNFKADGNGNINQKAIDYLCSASDTHIIGIDRGERNLLYLVVIDGNGKICEQFSLNEIEVEYNGEKYSTNYHDLLNVKENERKQARQSWQSIANIKDLKEGYLSQVIHKISELMVKYNAIVVLEDLNAGFMRGRQKVEKQVYQKFEKKLIEKLNYLVFKKQSSDLPGGLMHAYQLANKFESFNALGKQSGFLFYIPAWNTSKMDPVTGFVNLFDVKYESVDKAKSFFSKFDSMRYNVERDMFEWKFNYGEFTKKAEGTKTDWTVCSYGNRIITFRNPDKNSQWDNKEINLTENIKLLFERFGIDLSSNLKDEIMQRTEKEFFIELISLFKLVLQMRNSWTGTDIDYLVSPVCNENGEFFDSRNVDETLPQNADANGAYNIARKGMILLDKIKKSNGEKKLALSITNREWLSFAQGCCKNG

SEQ ID NO: 1520 - protein, 1245 aa, unidentified
  REGION 1..1245: note = Category: MG75 effectors
  REGION 1..1245: note = Description: MG75-6 effector
  source 1..1245: note = uncultivated organism sequence
METFSGFTNLYPLSKTLRFRLIPVGETLKHFIGSGILEEDQHRAESYVKVKAIIDDYHRAYIENSLSGFELPLESTGKFNSLEEYYLYHNIRNKTEEIQNLSSKVRTNLRKQVVTQLTKNEIFKRIDKKELIQSDLIDFVKNEPDANEKIALISEFRNFTVYFKGFHENRRNMYSDEEKSTSIAFRLIHENLPKFIDNMEVFAKIKNTSISENFEAIQKELCPELVTLCEMFKLGYFNKTLSQKQIDAYNTVIGGKTTSEGKKIKGLNEYINLYNQQHKQEKLPKMKLLFKQILSDRESASWLPEKFENDSQVVGAMVNFWNTIHDTVLAEGGLKTIIVSLGSYGLEGIFLKNDLQLTDISQKATGSWSKISSEIKQKIEVMNPQKKKESYESYQERIDKLFKSYKSFSLAFINECLRGEYKIEDYFLKLGAVNSSSLQKENHFSHILNTYTDVKEVIGFYSESTDTKLIQDNDSIQKIKQFLDAVKDLQAYVKPLLGNGDETGKDERFYGDLIEYWSQLDLITPLYNMVRNYVTQKPYSVDKIKINFQNPTLLNGWDLNKEMDNTSVILRRDGKYYLAIMNNKSRKVFLKYPSGTDRNCYEKMEYKLLPGANKMLPKVFFSKSRINEFMPNERLLSNYEKGTHKKSGTCFSLDDCHTLIDFFKKSLNKHEDWKNFGFKFSDTSTYEDMSGFYKEVENQGYKLSFKPIDATYVDQLVDEGKIFLFQIYNKDFSEHSKGTPNMHTLYWKMLFDETNLGDVVYKLNGEAEVFFRKASINVSHPTHPANIPIKKKNLKHKDEERILKYDLIKDKRYTVDQFQFHVPITMNFKADGNGNINQKAIDYLCSASDTHIIGIDRGERNLLYLVVIDGNGKICEQFSLNEIEVEYNGEKYSTNYHDLLNVKENERKQARQSWQSIANIKDLKEGYLSQVIHKISELMVKYNAIVVLEDLNAGFMRGRQKVEKQVYQKFEKKLIEKLNYLVFKKQSSDLPGGLMHAYQLANKFESFNALGKQSGFLFYIPAWNTSKMDPVTGFVNLFDVKYESVDKAKSFFSKFDSMRYNVERDMFEWKFNYGEFTKKAEGTKTDWTVCSYGNRIITFRNPDKNSQWDNKEINLTENIKLLFERFGIDLSSNLKDEIMQRTEKEFFIELISLFKLVLQMRNSWTGTDIDYLVSPVCNENGEFFDSRNVDETLPQNADANGAYNIARKGMILLDKIKKNNGEKKLALSITNREWLSFAQGCCKNG

SEQ ID NO: 1521 - protein, 1236 aa, unidentified
  REGION 1..1236: note = Category: MG75 effectors
  REGION 1..1236: note = Description: MG75-7 effector
  source 1..1236: note = uncultivated organism sequence
METFSGFTNLYPLSKTLRFRLIPVGETLKHFIDSGILEEDQHRAESYVKVKAIIDDYHRAYIENSLSGFELPLESTGKFNSLEEYYLYHNIRNKTEKNQKSLSTVRFNLRKQMVKQLTKNELYKRIYKQNLIKKDLIDFVKNEPDANEKIALISEFRNFTVYFKGFHENRRNMYLDEEKSTSIAFRLIHENLPKFIDNMEVFAKIQNTSISENFDVIQKELCPELVTLCEMFKLGYFNKTLSQKQINAYNTVIGELNKYLNHYNQQHKQEKLPKMKLLFKQILSDRESTSWLPERFANDGQVVGAMVNFWNTIHDTVLAEGGLKTIIASLGSYGLEGIFLKNDLQLTDISQKATGSWSKISSEIKQKIEVMNPQKKKESYESYQERIDKLFKSYKSFSLAFINECLRGEYKIEDYFLKLGAVNSSSLQKENHFSHILNTYTDVKEVIGFYSESTDTKLIRDNGSIQKIKLFLDAVKDLQAYVKPLLGNGDETGKDERFYGDLIEYWSLLDLITPLYNMVRNYVTQKPYSVDKIKLNFRNPTLLDGWDLNRETANTSVILRRDGKYYLAIMNNKSRKVFLKYPSGTGKDCYEKMEYKLIPGAYKMLPKAFFSKSKINKFMPDEHLLSNYKKGTHKKNNANFDLDDCHTLIDFFKKSLNKHEDWKNFDFKFSDTSTYTDINNFYKEIDNQAYKLSFRPVPSDFVDKLVEEGKIFLFWIYNKDFSGHSKGTPNMHTLYWRMLFDERNLEDVVYSLNGGAEVFFRKASINVSHPTHPANIPIKKKNLKHKDEERILKYDLIKDKRYTIDQFQFHVPITMNFKVAGNGNININQKAIDYLRSASDTHIIGIDRGERNLLYLVVIDGNGKICEQFSLNEIEVEYNGEKYSTNYHDLLNVKENERKQARQSWQSIANIKDLKEGYLSQVIYKISELIVKYNAIVVLEDLNAGFMRGRQKVEKQVYQKFEKKLIEKLNYLVFKKQSSDLPGGLMHAYQLANKFESFNTLGKQSGFLFYIPAWNTSKMDPVTGFVNLFDVKYESVDKAKSFFSKFDSIRYNVERDMFEWKFNYGEFTKKAEGAKTDWTVCSYGNRIITFRNPDKNSQWDNKEINLTENVKLLFERFGIDLSSNLKDEIMERTEKEFFIELISLFKLVLQMRNSWTGTDIDYLVSPVCNENGEFFDSRNVDETLPQNADANGAYNIARKGMILLDKIKKNNGEKKLALSITNREWLSFAQGCCKNG

SEQ ID NO: 1522 - protein, 1248 aa, unidentified
  REGION 1..1248: note = Category: MG75 effectors
  REGION 1..1248: note = Description: MG75-8 effector
  source 1..1248: note = uncultivated organism sequence
METFSGFTNLYPLSKTLRFRLIPVGETLKHFIDSGILEEDQHRAESYVKVKAIIDDYHRAYIENSLSGFELPLESTGKFNSLEEYYLYHNIRNKTEEIQNLSSKVRTNLRKQVVTQLTKNEIFKRIDKKELIQSDLIDFVKNEPDANEKIALISEFRNFTVYFKGFHENRRNMYSDEEKSTSIAFRLIHENLPKFIDNMEVFAKIQNTSISENFDAIQKELCTELVTLCEMFKLGYFNKTLSQKQIDAYNTVIGGKTTSEGKKIKGLNEYINLYNQQHKQEKLPKMKLLFKQILSDRESASWLPEKFENDSQVVGAMVNFWNTIHDTVLAEGGLKTIIASLGSYGLEGIFLKNDLQLTDISQKATGSWSKISSEIKQKIEVMNPQKKKESYESYQERIDKLFKSYKSFSLAFINECLRGEYKIEDYFLKLGAVNSSSLQKENHFSHILNTYTDVKEVIGFYSESTDTKLIRDNGSIQKIKLFLDAVKDLQAYVKPLLGNGDETGKDERFYGDLIEYWSLLDLITPLYNMVRNYVTQKPYSVDKIKLNFRNPTLLDGWDLNRETANTSVILRRDGKYYLAIMNNKSRKVFLKYPLGTGKDCYEKMEYKLIPGAYKMLPKAFFAKSKINKFMPDEHLLSNYKKGTHKKNNANFDLDDCHTLIDFFKKSLNKHEDWKNFDFKFSDTSTYTDINNFYKEIDNQAYKLSFRPVPSDFVDKLVEEGKIFLFWIYNKDFSGHSKGTPNMHTLYWRMLFDERNLEDVVYSLNGGAEVFFRKASINVSHPTHPANIPIKKKNLKHKDEERILKYDLIKDKRYTVDQFQFHVPITMNFKADGNGNINQKAIDYLCSASDTHIIGIDRGERNLLYLVVIDGNGKICEQFSLNEIEVEYNGENYSTNYHDLLNVKENERKQARQSWQSIANIKDLKEGYLSQVIHKISELMVKYNAIVVLEDLNAGFMRGRQKVEKQVYQKFEKKLIEKLNYLVFKKQSSDLPGGLMHAYQLANKFESFNTLGKQSGFLFYIPAWNTSKMDPVTGFVNLFDVKYESVDKAKSFFSKFDSMRYNVERDMFEWKFNYGEFTKKAEGTKTDWTVCSYGNRIITFRNPDKNSQWDNKEINLTENIKLLFERFGIDLSSNLKDEIMQRTEKEFFIELISLFKLVLQMRNSWTGTDIDYLVSPVCNENGEFFDSRNVDETLPQNADANGAYNIARKGMILLDKIKKSNGEKKLALSITNREWLSFAQGCCKKWMIT

SEQ ID NO: 1523 - protein, 1250 aa, unidentified
  REGION 1..1250: note = Category: MG75 effectors
  REGION 1..1250: note = Description: MG75-9 effector
  source 1..1250: note = uncultivated organism sequence
MKTLSDFTNLFPLSKTLRFKLIPIGNTLKNIEASGILDEDRHRAESYVKVKAIIDEYHKAFIDRVLSDTCLQTESIGKHNSLEEFFFYYQIGAKSEQQKKTFKKIQDALRKQIADSLTKDKHFSRIDKKELIQEDLIQFVRDGEDAAEKTSLISEFQNFTVYFTGFHENRQNMYSPDEKSTAIAYRLINENLPKFVDNMKVFDRIAASELASCFDELYHNFEEYLQVERLHDIFSLDYFNLLLTQKHIDVYNALIGGKATETGEKIKGLNEYINLYNQRHKQEKLPKFKMLFKQILTDREAISWLPRQFDDNSQLLSAIEQCYNHLSTYTLKDGSLKYLLENLHTYDTEKIFIRNDSLLTEISQRHYGSWSILPEAIKRHLERANPQKRRETYEAYQSRIEKAFKAYPGFSIAFLNGCLTETGKESPSIESYFESLGAVETETSQQENWFARIANAYTDFREMQNRLHATDVPLAQDAEAVARIKKLLDALKGLQLFIKPLLDTGEEAEKDERFYGDFTEFWNELDTITPLYNMVRNYLTRKPYSEEKIKLNFQNPTLLNGWDLNKEVDNTSVILRRNGRYYLAIMHRNHRRVFSQYPGTERGDCYEKMEYKLLPGANKMLPKVFFSKSRIDEFNPSEELLARYQQGTHKKGENFNLHDCHALIDFFKDSIEKHEEWRNFHFKFSDTSSYTDMSGFYREIETQGYKLSFVPVACEYIDELVRDGKIFLFQIYNKDFSTYSKGKPNMHTLYWEMLFDERNLMNVVYKLNGQAEIFFRKASLSARHPEHPAGLPIKKKQAPTEESCFPYDLIKNKRYTVDQFQFHVPITINFKATGTSNINPSVTDYIRTADDLHIIGIDRGERHLLYLVVIDSQGRICEQFSLNEIVTQYQGHQYRTDYHALLQKKEDERQKARQSWQSIENIKELKEGYLSQVVHKVSELMIKYKAIVVLEDLNAGFKRSRQKVEKQVYQKFEKMLIDKLNYLVFKTAEADQPGGLLHAYQLTNKFESFKKMGKQSGFLFYIPAWNTSKIDPTTGFVNLFDTRYENVDKSRAFFGKFDSIRYRADKGTFEWTFDYNNFHKKAEGTRSSWCLSSHGNRVRTFRNPAKNNQWDNEEIDLTQAFRDLFEAWGIEITSNLKEAICNQSEKKFFSELFELFKLMIQLRNSVTGTNIDYMVSPVENHYGTFFDSRTCDSSLPANADANGAYNIARKGLMLARRIQATPENDPISLTLSNKEWLRFAQGLDETTTYE

SEQ ID NO: 1524 - protein, 1246 aa, unidentified
  REGION 1..1246: note = Category: MG75 effectors
  REGION 1..1246: note = Description: MG75-10 effector
  source 1..1246: note = uncultivated organism sequence
MMETFSDFTNLYPLSKTLRFRLIPVGETLRHFIDSGILEEDQHRAESYVKVKAIIDDYHRTYIENSLSGFELPVESTGKANSLEEYYLYHNIRNKTEDIQNALSKVRNNLRKQIVTQLTKNEMFKRIDKKELIQTDLIDFVKNDPDANEKIALISEFRNFTVYFKGFHENRKNMYSDEEKSTSIAFRLIHENLPKFIDNMEVFAKIQNTSISENFEAIQKDLCPETIAFADMFKLGYFNKTLSQKQIDAYNTVISGRTTAEGEKIKGLNEYINLYNQQHKQEKLPKMKLLFKQILSDRESASWLPEKLENDKQVVGALVDFWNAIHDTVLAEGGLKTVISSLVSYSLEGIFLKNDLQLTDVSQKATGSWSKIPAAIKQKLEAMNPQKKKESYEGYQERIDKIFKSYKSFSLAFINECLHGEYKIEDYFIKLGAINTDLLQKENHFSHILNTYTDIKEMIESYFESTDTKLIRDNGSIQKIKQFLDAVKDLQVYVKPLLGNGDETGKDERFYGDFVEYWNLLDLITPLYNMVRNYVTQKPYSIEKIKINFQNPTLLNGWDLNKETDNTSVILRRDGKYYLAIMNSKFRKVFLKYPSGSDRNCYEKMEYKLLPGANKMLPKVFFSKSRIQEFMPDERLLSNYEKGTHKKTGNCFSLTDCHALIDFFKKSLNKHEDWKNFGFKFSDTSTYTDMSGFYKEVENQGYKLSFKPIDAVYVDQLVDEGKIFLFQIYNKDFSGHSKGTPNMHTLYWKMLFDETNLGDVVYKLNGEAEVFFRKASIKVSSPTHPANVPIKKKNPKHKDEERILKYDLIKDKRYTVDQFQFHVPITMNFKSDGNGNINQKVIEYLRSASNIHIMGIDRGERNLLYLVVIDGSGNICEQFSLNEIKVEHNGETYSTNYHDLLDIKENERKQARQSWQSIANIKELKEGYLSQVIHKISELMVKYNAIVVLEDLNTGFMRGRQKVEKQVYQKFEKMLIEKLNYLVFKKQPSNLCGGLMHAYQLTNKFEGFNKLGKQSGFLFYIPTWNTSKMDPVTGFVNLFDLKYESIDKAKSFFSKFDSIRYNEERDMFEWKFNYDEFTKKAEGTKTNWTVCSYGNRIITFRNPNKNSQWDNKEINLTENIKLLFERFGIDLSSNLKDEIMQRTEKEFFIELISLFKLVLQMRNSWTGTDIDYLVSPVCNEKGEFFDSRNVDKALPQNADANGAYNIARKGLILLDRIKESTSDKKLNFSITNKEWLSFAQGCCKNG

SEQ ID NO: 1525 - protein, 1319 aa, unidentified
  REGION 1..1319: note = Category: MG75 effectors
  REGION 1..1319: note = Description: MG75-11 effector
  source 1..1319: note = uncultivated organism sequence
MAKNFEDFKRLYPLSKTLRFEAKPIGATLDNIVKSGLLDEDEHRAASYVKVKKLIDEYHKVFIDRVLDNGCLPLKNEGHNNSLTEYYDSYVSKSQNEDAKKAFEENQQNLRSIIAKKLTEDKAYANLFGKNLIESYKDKEDKTKIIDSDLIKFINTAESTQLDSMSQDEVKELVKEFWGFITYFYGFFDNRKNMYTSEEKSTGIAYRLINENLPKFIDNMEAFNTAITRPEIQANMDELYSNFSEYLNVESIQEMFQLDYYNMLLTQKQIDVYNAIIGGKTDDEHDVKIKGINEYINLYNQQHKDDKLPKLKALFKQILSDRNAISWLPEEFNSDQEVLNAIKDCYERLAENVLGDKVLKSLLGSLADYSLDGIFIRNDLQLTDISQKMFGNWGVIQNAIMQNIKRVAPARKHKESEEDYEKRIAGIFKKADSFSISYINDCLNEADPNNAYFVENYFATFGAVNTPTMQRENLFALVQNAYTEVAALLHSDYPTVKHLAQDKANVSKIKALLDAIKSLQHFVKPLLGKGDESDKDERFYGELASLWAELDTVTPLYNMIRNYMTRKPYSQKKIKLNFENPQLLGGWDANKEKDYATIILRRNGLYYLAIMDKDSKNLLGKAMPSDGECYEKMVYKQFDISKQLPKCTTELKHVRKALVEDAKRSCLLSDFNNWNKPLNVTRKLWELNNFVWDKKREDWVLRKKDNETRPKKFHKKYLELTSDKKGYNQAKNDWIKFTKEFLSSYKKVEAYDIHYKKRYNSVDELYKQLNGDLYAISFTYVSVSFIEQLVSEGKMYLFQIYNKDFSEYSKGTPNMHTLYWKALFDERNLADVVYKLNGQAEMFYRKKSIENTHPTHPANHPILNKNKDNKKKESLFEYDLIKDRRYTVDKFMFHVPITMNFKSSGSENINQDVKAYLRHADDMHIIGIDRGERHLLYLVVIDLQGNIKEQFSLNEIVNDYNGNTYHTNYHDLLDVREDERLKARQSWQTIENIKELKEGYLSQVIHKITQLMVKYHAIVVLEDLNMGFMRGRQKVEKQVYQKFEKMLIEKLNYLVDKKADASVSGGLLNAYQLTSKFDSFQKLGKQSGFLFYIPAWNTSKIDPVTGFVNLLDTRYQNVEKAKVFFSKFDAIRYNKDKDWFEFNLDYDKFGKKAEGTRTKWTLCTRGMRIDTFRNKEKNSQWDNQEVDLTAEMKSLLEHYYIDIHGNLKDAISAQTDKAFFMGLLHILKLTLQMRNSITGTETDYLVSPVADENGIFYDSRSCGDELPENADANGAYNIARKGLMMIEQIKEAKDLDNLKFDISNKSWLNFAQQKPYKNG

SEQ ID NO: 1526 - protein, 1245 aa, unidentified
  REGION 1..1245: note = Category: MG75 effectors
  REGION 1..1245: note = Description: MG75-12 effector
  source 1..1245: note = uncultivated organism sequence
METFSGFTNLYPLSKTLRFRLIPVGETLKHFIDSGILEEDQHRAESYVKVKAIIDDYHRAYIENSLSGFELPLESTGKFNSLEEYYLYHNIRNKTEEIQNLSSKVRTNLRKQVVVQLTKNEIFKRIDKKELIQSDLIDFVKNEPDANEKIALISEFRNFTVYFKGFHENRRNMYSDEEKSTSIAFRLIHENLPKFIDNMEVFAKIQNTSISENFDAIQKELCPELVTLCEMFKLGYFNKTLSQKQIDAYNTVIGGKTTSEGKKIKGLNEYINLYNQQHKQEKLPKMKLLFKQILSDRESASWLPEKFENDSQVVGAMVNFWNTIHDTVLAEGGLKTIIASLGSYGLEGIFLKNDLQLTDISQKATGSWSKISSEIKQKIEVMNPQKKKESYESYQERIDKLFKSYKSFSLAFINECLRGEYKIEDYFLKLGAVNSSSLQKENHFSHILNTYTDVKEVIGFYSESTDTKLIQDNDSIQKIKLFLDAVKDLQAYVKPLLGNGDETGKDERFYGDLIEYWSLLDLITPLYNMVRNYVTQKPYSIDKIKINFQNPTLLNGWDLNKETDNTSVILRRDGKYYLAIMNNKSRKVFLKYPSGTDRNCYEKMEYKLLPGANKMLPKVFFSKSRINEFMPNERLLSNYEKGTHKKSGTCFSLDDCHTLIDFFKKSLDKHEDWKNFGFKFSDTSTYEDMSGFYKEVENQGYKLSFKPIDATYVDQLVDEGKIFLFQIYNKDFSEHSKGTPNMHTLYWKMLFDETNLGDVVYKLNGEAEVFFRKASINVSHPTHPANIPIKKKNLKHKDEERILKYDLIKDKRYTVDQFQFHVPITMNFKADGNGNINQKAIDYLRSASDTHIIGIDRGERNLLYLVVIDGNGKICEQFSLNEIEVEYNGEKYSTNYHDLLNVKENERKQARQSWQSIANIKDLKEGYLSQVIHKISELMVKYNAIVVLEDLNAGFMRGRQKVEKQVYQKFEKKLIEKLNYLVFKKQSFDLPGGLMHAYQLANKFESFNALGKQSGFLFYIPAWNTSKMDPVTGFVNLFDVKYESVDKAKSFFSKFDSIRYNVERDMFEWKFNYGEFTKKAEGTKTDWTVCSYGNRIITFRNPDKNSQWDNKEINLTENIKLLFERFGIDLSSNLKDEIMQRTEKEFFIELISLFKLVLQMRNSWTGTDIDYLVSPVCNENGEFFDSRNVDETLPQNADANGAYNIARKGMILLDKIKKSNGEKKLALSITNREWLSFAQGCCKNG

SEQ ID NO: 1527 - protein, 1275 aa, unidentified
  REGION 1..1275: note = Category: MG75 effectors
  REGION 1..1275: note = Description: MG75-13 effector
  source 1..1275: note = uncultivated organism sequence
MAKNFEDFKRLYSLSKTLRFEAKPIGATLDNIVKSGLLDEDEHRAASYVKVKKLIDEYHKVFIDRVLANGCLPLKNEGHNNSLTEYYDNYVSKSQNEDAKKTFEENQQNLRSIIAKKLTEDKAYANLFGKNLLESYKDKTDKTKIIDSDLFKFINTAESTQLDSMSQDEAKELVKEFWGFITYFYGFFDNRKNMYTSEDKSTGIAYRLINENLPKFIDNMEAFNTAVTRPEIQANMDELYSNFSEYLNVESIQEMFQLDYYNMLLTQKQIDVYNAIIGGKTDDEHDVKIKGINEYINLYNQKHKDDKLPKLKALFKQILSDRNAISWLPEEFNSDQEVLNAIKDCYERLSENVLGDKVLKSLLGSLADYSLDGIFIRNDLQLTDISQKMFGNWGVIQNAIMQDIKHVAPARKHKESEEDYEKRIAGIFKKADSFSISYINDCLNEADPNNAYFVENYFATLGAVDTPTMQRENLFALVQNAYTEITALLHSDYPTEKNLAQDKANVAKIKALLDAIKSLQHFVKPLLGKGDESDKDERFYGELASLWTELDTVTPLYNMIRNYMTRKPYSQKKIKLNFENPQLLGGWDVNKKKDYATIILRRNGLYYLAIMNKDSKKLLGKAMPSDGECYEKMVYKLLPGANKMLPKVFFAKSRMEDFKPSKELVEKYNNGTHKKGKNFNIQDCHNLIDYFKQSIDKHEDWSKFGFKFSDTSTYEDFSGFYREVEQQGYKLSFARVSVSYINQLVEEGKMYLFQIYNKDFSEYSKGTPNMYTLYWKALFDERNLADVVYKLNGQAEMFYRKKSIENTHPTHPANHPILNKNKDNKKKESLFDYDLIKDRRYTVDKFMFHVPITMNFKSVGSENINQDVKAYLRHADDMHIIGIDRGERHLLYLVVIDLQGNIKEQYSLNEIVNEYNGNTYHTNYHDLLDVREEERLKARQSWQTIENIKELKEGYLSQVIHKITQLMVGYHAIVVLEDLSKGFMRSRQKVEKQVYQKFEKMLIDKLNYLVDKKTDVSTPGGLLNAYQLTCKSDSSQKLGKQSGFLFYIPAWNTSKIDPVTGFVNLLDTHSLNSKEKIKAFFSKFDAIRYNKDKKWFEFNLDYDKFGKKAEDTRTKWTLCTRGMRIGTFRNKEKNSQWDNQEVDLTTEMKSLLEHYYIDIHGNLKDAISTQTDKAFFTGLLHILKLTLQMRNSITGTETDYLVSPVADENGIFYDSRSCGDQLPENADANGAYNIARKGLMLIEQIKNAEDLNNVKFDISNKAWLNFAQQKPYKNG

SEQ ID NO: 1528 - protein, 1245 aa, unidentified
  REGION 1..1245: note = Category: MG75 effectors
  REGION 1..1245: note = Description: MG75-14 effector
  source 1..1245: note = uncultivated organism sequence
METFSGFTNLYPLSKTLRFRLIPVGETLKYFIGSGILEEDQHRAESYVKVKAIIDDYHRAYIENSLSGFELPLECTGKFNSLEEYYLYHNIRNKTEEIQNLSSKVRTNLRKHVVAQLTKNEIFKRIDKKELIQSDLIDFVKNEPDANEKIALISEFRNFTVYFKGFHENRRNMYSDEEKSTSIAFRLIHENLPKFIDNMEVFAKIQNTSISENFDAIQKELCPELVTLCEMFKLGYFNKTLSQKQIDAYNTVIGGKTTSEGKKIKGLNEYINLYNQQHKQEKLPKMKLLFKQILSDRESASWLPEKFENDSQVVGAIVNFWNTIHDTVLAEGGLKTIIASLGSYGLEGIFLKNDLQLTDISQKATGSWGKISSEIKQKIEVMNPQKKKESYETYQERIDKIFKSYKSFSLAFINECLRGEYKIEDYFLKLGAVNSSSLQKENHFSHILNTYTDVKEVIGLYSESTDTKLIQDNDSIQKIKQFLDAVKDLQAYVKPLLGNGDETGKDERFYGDLIEYWSLLDLITPLYNMVRNYVTQKPYSVDKIKINFQNPTLLNGWDLNKETDNTSVILRRDGKYYLAIMNNKSRKVFLKYPSGTDRNCYEKMEYKLLPGANKMLPKVFFSKSRINEFMPNERLLSNYEKGTHKKSGTCFSLDDCHTLIDFFKKSLDKHEDWKNFGFKFSDTSTYEDMSGFYKEVENQGYKLSFKPIDATYVDQLVDEGKIFLFQIYNKDFSEHSKGTPNMHTLYWKMLFDETNLGDVVYKLNGEAEVFFRKASINVSHPTHPANIPIKKKNLKHKDEERILKYDLIKDKRYTVDQFQFHVPITMNFKADGNGNINQKAIDYLRSASDTHIIGIDRGERNLLYLVVIDGNGKICEQFSLNEIEVEYNGEKYSTNYHDLLNVKENERKQARQSWQSIANIKDLKEGYLSQVIHKISELMVKYNAIVMLEDLNAGFMRGRQKVEKQVYQKFEKKLIEKLNYLVFKKQSSDLPGGLMHAYQLANKFESFNTLGKQSGFLFYIPAWNTSKMDPVTGFVNLFDVKYESVDKAKSFFSKFDSIRYNVERDMFEWKFNYGEFTKKAEGTKTDWTVCSYGNRIITFRNPDKNSQWDNKEINLTENIKLLFERFGIDLSSNLKDEIMQRTEKEFFIELISLFKLVLQMRNSWTGTDIDYLVSPVCNENGEFFDSRNVDETLPQNADANGAYNIARKGMILLDKIKKSNGEKKLALSITNREWLSFAQGCCKNG

SEQ ID NO: 1529 - protein, 1302 aa, unidentified
  REGION 1..1302: note = Category: MG75 effectors
  REGION 1..1302: note = Description: MG75-15 effector
  source 1..1302: note = uncultivated organism sequence
MEFNDFKRLYPLSKTLRFEAKPIGATLKNIIKSGLLEEDEHRAQSYVKVKKLIDEYHKVFIDRVLNEGCLTIENKGKKNSLEEYYESYMSKSNDENVSKTFKEIQENLRSVIAKKLTDDNAYANLFGNKLIESYKDKEEKNKIIDSDLIQFINSAEPSQLDSMSQDEANELVKEFWGFTTYFVGFFDNRKNMYTSEEKSTGIAYRLINENLPKFIDNMEAFKKAVAKPEIQANMEELYSNFAEYLNVESIQEMFQLDYYNMLLTQKQIDVYNAIIGGKTDEEHDVKIKGINEYINLYNQQHKDEKLPKLKALFKQILSDRNAISWLPEEFNSDQEVLNAIKDCYERLSENVLGDKVLKSLLCSLSDYNLNGIFVRNDLQLTDISQKMFGNWSVVQDAIMQNIKNVAPARKRKESEEDYEKRISDIFKKADSFSIQYINDCLNEMDDNNLHAVDGYFATLGAVNTPTMQRENLFALIQNAYTDISDMLDTPYPKNMNLAQDKTNVAKVKALLDAIKSLQHFVKPLLGKGDESDKDERFYGELASLWTELDTVTPLYNMIRNYMTRKPYSEKKIKLNFENPQLLGGWDANKEKDYATIILRRNGMYYLAIMNKDSKRLLGKSMPSDGEYYEKMVYKFFKDVTTMIPKCSTQLKDVQAFFKVNTDDFVLNSKAFNKPLTITKEVFDLNNVLYGKFKKFQKGYLSATGDTAGYTHAVNVWIKFCMDFLNSYESTCMYDFSLLKFESYLSLDAFYQDANLLLYKLSFTNVSVSFIDKLVDEGKMYLFQIYNKDFSDFSKGTPNMHTLYWKALFDERNLADVVYKLNGKAEIFYRKKSINNTHPTHPANHTIQNKNKDNKKKESVFEYDLIKDRRYTVDKFLFHVPITMNFKSVGSENINQQVREYLQQAEDTHIIGIDRGERHLLYLVVIDMQGEIKEQFTLNEIVNEYNGNTYRTNYHDLLDTREEERLKARPSWQTIENIKDLKEGYLSQAIHKITQLMVKYHAVVVLEDLNKGFMRGRQKVEKQVYQKFEKMLIDKLNYLVDKKADAAQSGGLLNAYQLTSKFDSFQKLGKQSGFLFYIPAWNTSKIDPVTGFVNLLDTRYQNIEKAKAFFSKFDAIRYNANKDWFEFNLDYDKFGTKAEGTRTKWILCTQGNRICTFRNAEKNSQWDNLKIDLTREMKSLFEHYHINICGNLKEEICSQTDKAFFTGLLHMLKLTLQMRNSITETETDYLVSPVADENGVFYDSRSCGDTLPKNADANGAYNIARKGLMLIGQIKETKDLANFKYDISNKAWLNFAQQKPYKK

SEQ ID NO: 1530 - protein, 1274 aa, unidentified
  REGION 1..1274: note = Category: MG75 effectors
  REGION 1..1274: note = Description: MG75-16 effector
  source 1..1274: note = uncultivated organism sequence
MAKNFEDFKRLYPLSKTLRFEAKPIGATLDNIVKSGLLDEDEHRAASYVKVKKLIDEYHKVFIDRVLDNGCLPLEDKGDNNSLAEYYDSYVSKSQNEDAKKAFKEIQQNLRSIIAKKLTDDKAYANLFGNKLIESYKDKADKTKIIDSDLIQFIHTAESTQLDSMSQDEAKELVKEFCGFTTYFVGFFDNRKNMYTAEEKSTGIAYRLINENLPKFIDNMEAFKKAIARPEIQANMEELYSDFSEYLNVESILEMFQLDYYNMLLTQKQIDVYNAIIGGKTDDEHDVKIKGINEYINLYNQQHKDDKLPKLKALFKQILSDRNAISWLPEEFNSDQEVLNAIKDCYERLAENVLGDKVLKSLLGSLADYSLDGIFIRNDLQLTDISQKMFGNWGVIQNAIMQNIKHVAPARKHKESEEDYEKRIAGIFKKADSFSISYINDCLNEEEPNNAYFVENYFATFGAVNTPTMQRENLFALVQNAYTEVAALLHSDYPTVKHLAQDKANVSKIKALLDAIKSLQHFVKPLLGKGDESDKDERFYGELASLWAELDTVTPLYNMIRNYMTRKPYSQKKIKLNFENPQLLGGWDANKEKDYATIILRRNGLYYLAIMNKDSKKLLGKAMPSDGECYEKMVYKLLPGANKMLPKVFFAKSRMEDFKPSKELVEKYNNGTHKKGKNFCIQDCHNLIDYFKQSIDKHEDWSKFGFNFSETSTYEDLSGFYREVEQQGYKLSFARVSVSYINQLVEEGKMYLFQIYNKDFSEYSKGTPNMHTLYWKALFDERNLADVVYKLNGQAEMFYRKKSIENTHPTHPANHPILNKNKDNKKKESLFEYDLIKDRRYTVDKFMFHVPITMNFKSSGSENINQDVKAYLRYADDMHIIGIDRGERHLLYLVVIDLQGNIKEQFSLNEIVNDYNGNTYHTNYHDLLDVREDERLKARQSWQAIENIKELKEGYLSQVIHKITQLMVKYHAIVVLEDLNMGFMRGRQKVEKQVYQKFEKMLIEKLNYLVDKKVDVSVSGGLLNAYQLTSKFDSFQKLGKQSGFLFYIPAWNTSKIDPVTGFVNLLDTRYQNVEKAKCFFSKFDAIRYIEDKEWFEFNLDYDKFGKKAEGTRTKWTLCTRGMRIDTFRNKEKNSQWDNQEVDLTAEMKSLLEHYYIDIHGNLKDAISAQTDKAFFTGLLHILKLTLQMRNSITGTETDYLVSPVADENGIFYDSRSCGDQLPENADANGAYNIARKGLMLIEQIKNAEDLNNVKFDISNKAWLNFAQQKPYKNG

SEQ ID NO: 1531 - protein, 1246 aa, unidentified
  REGION 1..1246: note = Category: MG75 effectors
  REGION 1..1246: note = Description: MG75-17 effector
  source 1..1246: note = uncultivated organism sequence
MMETFSDFTNLYPLSKTLRFRLIPVGKTLRHFIDSGILEEDQHRAESYVKVKAIIDDYHRSYIESSLSGFELPVESMGKSNSLEEYYLYHNIRNKTEDIQNALSKVRNNLRKQIVAQLTKNEMFKRIDKKELIQNDLIDFVKNEPDANEKIALISEFRNFTVYFKGFHENRKNMYSDEEKSTSIAFRLIHENLPKFIDNMEVFAKIQNTSISEKFDAIQKELCPDSVAFVDMFKLGYFNRTLSQKQIDAYNTVISGRTTAEGEKIKGLNEYINLYNQQHKQEKLPKMKLLFKQILSDRESASWLPEKLENDKQVVGALVDFWNTIHDTVLAEGGLKTVISLLVSYSLEGIFLKNDLQLTDVSQKATGSWSKIPTAIKQKLKAMNPQKKKESYEGYQERIDKIFKSYKSFSLAFINECLHGEYKIEDYFIKLGAINTDLLQKENHFSHILNTYTDIKEVIESYSESTDTKLIRDNGSIQKIKQFLDSVKDLQAYVKPLLGNGDETGKDERFYGDFVEYWNLLDLITPLYNMIRNYVTQKPYSVEKIKINFQNPTLLNGWDLNKETDNTSVILRRDDKYYLAIMTSKFRKVFLEYPSGSDRSCYEKMEYKLLPGANKMLPKVFFSKSRIQEFMPDERLLSNYEKGTHKKTGNCFSLTDCHALIDFFKKSLNKHEDWRNFGFKFSDTSTYTDMSGFYKEVENQGYKLSFKPIDAVYVDQLVDEGKIFLFQIYNKDFSEHSKGTPNMHTLYWKMLFDETNLGDVVYKLNGEAEVFFRKASIKVSSPTHPASVPIKKKNPKHMDEERILKYDLIKDKRYTVDQFQFHVPITMNFKSDGNGNINQKVVEYLRSASNIHIIGIDRGERNLLYLVVIDGSGKICEQFSLNEIKVEHNGETYSTNYHDLLDIKENERKQARQSWQSIANIKELKEGYLSQVIHKISELMVKYNAIVVLEDLNTGFMRGRQKVEKQVYQKFEKMLIEKLNYLVFKKQSLNLCGGLMHAYQLTNKFEGFNKLGKQSGFLFYIPAWNTSKMDPVTGFVNLFDLKYESIDKAKSFFSKFDSIRYNVERDMFEWKFNYDKFTKKAEGTKTNWTVCSYGNRIITFRNPNKNSQWDNKEINLTENIKLLFERFGIDLSSNLKDEIIQRTEKEFFIELISLFKLVLQMRNSWTGTDIDYLVSPVCNEKGEFFDSRNVDKALPQNADANGAYNIARKGLIFLDRIKESTSDKKLNCSITNKEWLLFVQNCCKNG

SEQ ID NO: 1532 - protein, 1270 aa, unidentified
  REGION 1..1270: note = Category: MG75 effectors
  REGION 1..1270: note = Description: MG75-18 effector
  source 1..1270: note = uncultivated organism sequence
MNFEQFTHLYPLSKTLRFELRPVGATLARIKEGGFLENDNHRAESYKKVKKLIDEYHKHFIEQALGDFSLTENETEGSKCLNSYLETYIQLYRSSRIEDAEKKAFEKVQAEMRKFIAKTLKGSEAYKRLFKKELIKEDLPAFLRTHADKELVAEFKNFTTYFKGFYKNRKNMYSEEEKSTAISYRLVNENLPKFVDNMAAFAIIAQVPEVRAMLDVLQKDLGAELDGTTIDELFTLPFFNKVLTQKQIAVYNAVIGGKVSDSHSKEESHIKGINQIVDCYNQQHKDARLPKLKKLYKQILSDREALSWIPEKFDKDADLLKAIHDGYERLASDRALEKLRTLLESMADYQTEGIFITNDQQLTRISQKMFGEWSFISEAILCALKKEVSQKRNECDEKYEKRIDKMLKNHGGFSIRFIDDCVAAYVNTLDDEEQKKRFIPTVEAYFATLGAFDTEKGQTINFFSRIQNARVALRGLLDSAYPEGRSLIQDKENGALLKELLDAILALMHFIKPLLGKNENGKDERFYGELIQIWDEFDTFVPLYNMSRNYLTQKAYSEEKYKLNFENSQLLNGWDLNKEVANTSIILRKDGLFYLAIMNKKHNKLFTRELPTDGDCYDKMTYKFLSGYRDLPHVFFSKSRKAEFVPSEHIMDVYEKGAFKKGDTFNLQDCHDLIDFYKASILKHEDWRQFDFKFSETEQYDDISGFYREVEAQGYKVTFRQVSVSYIDRLVKEGKLYLFQIYNKDFSPYSKGTPNMHTLYWRALFDERNLSDVVYKLNGEAEVFYRKKSIEAHPTHPANRPIKNKNKLNDKEESLFAYDLIKDRRYSEDKFSLHVPITMNFKSVGGPNINDDVVEFLRTNENLHFIGIDRGERHLLYLTVIDSHGHILEQRTLNDVVNNYQGKDYHTDYHDLLKTRERQRQEERSSWKVIENIKDLKEGYLAQVVHQIAQLMVKYHAIVVLEDLNGGFMRERQKKAERSVYQQFEKKLIDKLNYLVDKKTDAHAPGGLMNAYQLANQVESSKNKSSRNKNFKSMGRQSGFIFYIPAWNTSNIDPVTGFTNLFDTRYKNAHDAQQFFSTFKSIRYNKTADRFEFRFSYSDFTRKAEGSRTDWTVCTYGTRIKTFRDPQKNNEWTSKEVVLTEEFKKFFAAYHVDIHSNLKDSIAAHGEKAFFKQLLALMRLTLQIRNSKSGTDIDYLLSPVADENGVFFDSRSCGNSLPQDADANGAYNIARKGLMLVRQMREAKDLKKFKADMTNRNWLKFVQEKPYLND

SEQ ID NO: 1533 - protein, 1121 aa, unidentified
  REGION 1..1121: note = Category: MG75 effectors
  REGION 1..1121: note = Description: MG75-19 effector
  source 1..1121: note = uncultivated organism sequence
MVQFINTANLKQRLNLSKEEAKDLVQEFCGFTTYFGDFYQNRENMYSAEEKSTGIAYRLINENLPKFIDNMETFKKIAAIPEMEDNLKEIHDNLSEHLNVENIQDMFQLNYYNQLLTQKQIDVYNAIIGGKTDDEHKEKIKGINEYVNLYNQAHKDAKLPKLKTLFKQILSDRNAISWLPEEFDNDQETLNAIKDCYAHLSGNILKDENLKRLLCSLSEYDTKGIFLRNDSQLTSISKKMSGSWTDIPSAIKNDMKDGVPAKKRKESEEDYEKRIDNLFKKQDSFSIDYMDACLNKFVENNPYTIEGYFKELGAKDTQSEDIFKQIENAYTDVKPLLNSTYPKNKNLSQDKENVAKIKRFLDTLMSLVHFVKPLLGKGDERNKDEKFYGELSLLWTELETIVPLYNMVRNYMTRKPYSNSKIKLNFDNSQLLGGWDANKESDYSSILLYRDGKYYLAIFDKDSKKLLGKSMPSDGECYEKMVYKLLPGANKMLPKVFFAKSRIKDFKPSEQLLEKYNKGTHKKGKNFSISDCHALIDFFKQSINKHEDWKNFDFNFSETSTYEDLNSFYREVELQGYKITFTKVSASFIDKLVEEGKVYLFQIYNKDFSEYSKGTPNMHTLYWKALFDDRNLKDVVYKLNGQAEMFFRKKSINCNHPTHPANQPIQNKNKDNKKKESVFEYDLIKDHRYTVDKFMFHVPITMNFKSTNEKDINLHVREYLQTSNDTHIIGIDRGERHLLYLVVIDLHGNIVEQYTLNDIVNEYNGNTYRTNYHDLLDAREEDRLKQRQSWQTIENIKELKEGYLSQVIHKITQLMIKYHAIIVLEDLNIGFMRGRQKVEKQEYQKFEKMLIDKLNYLVDKKADIESTGGLLNAYQLTNKFASFKKLGKQSGFLFYIPAWNTSKIDPVTGFVNLLDTRYQNVDKAKAFFAKFDSIRYNKDKDWFEFALDYNNFGSKAEGTRTKWTLCTQGKRIKTSFNKMSSKWNNQEIDLTKDLKQLFVQYDIDINGNLKEAISKQTKYTFFVELMGLLKLTLQMRNSITGTETDYLVSPVADENGNFYDSRTCGPSLPENADANGAFNIARKGLMIIEQIKASDDLSKLKFDISNKSWLNFAQKKPYKHE

SEQ ID NO: 1534 - protein, 1235 aa, unidentified
  REGION 1..1235: note = Category: MG75 effectors
  REGION 1..1235: note = Description: MG75-20 effector
  source 1..1235: note = uncultivated organism sequence
METFSGFTNLYPLSKTLRFRLIPVGETLKHFIGSGILEEDQHRAESYVKVKAIIDDYHRAYIENSLSGFELPLESTGKFNSLEEYYLYHNIRNKTEKNQKSLSTVRFNLRKQIVKQLTKNELYKRIYKQNLIKKDLIDFVKNEPDANEKIALISEFRNFTVYFKGFHENRRNMYLDEEKSTSIAFRLIHENLPKFIDNMEVFAKIQNTSISENFDVIQKELCPELVTLCEMFKLGYFNKTLSQKQINAYNTVIGELNKYLNHYNQQHKQEKLPKMKLLFKQILSDRESTSWLPERFANDGQVIGAIVNFWNTIHDTVLAEGGLKTIIASLGSYSLEGIFLKNDLQLTDVSQKATGSWSKITAAIKQKLEDMNPQTKKESYETYQGRIDKLFKFYKSFSLAFINECLRGEYKIEDYFLKLGAVNSSSLQKENHFSHILNTYTDVKEVIGFYSESTDTKLIRDNGSIQKIKLFLDAVKDLQAYVKPLLGNGDETGKDERFYGDLIEYWSQLDLITPLYNMVRNYVTQKPYSVDKIKLNFRNPTLLDGWDLNQETANTSVILRRDGKYYLAIMNNKSRKVFLKPSGTGKDCYEKMEYKLIPGAYKMLPKVFFAKSKINKFMPDEYLLSNYKKGTHKKNNANFDLDDCHTLIDFFKRSLNKHEDWKNFDFKFSDTSTYTDINNFYKEIDNQAYKLSFRPVPSDFVDKLVEEGKIFLFWIYNKDFSGHSKGTPNMHTLYWRMLFDERNLEDVVYSLNGGAEVFFRKASINVSHPTHPANIPIKKKNLKHKGEERILKYDLIKDKRYTIDQFQFHVPITMNFKVAGNGNININQKAIDYLRSASDTHIIGIDRGERNLLYLVVIDGNGKICEQFSLNEIEVEYNGEKYSTNYHDLLNVKENERKQARQSWQSIANIKDLKEGYLSQVIHKISELIVKYNAIVVLEDLNAGFMRGRQKVEKQVYQKFEKKLIEKLNYLVFKKQSSDLPGGLMHAYQLANKFESFNTLGKQSGFLFYIPAWNTSKMDPVTGFVNLFDVKYESVDKAKSFFSKFDSIRYNVERDMFEWKFNYGEFTKKAEGAKTDWTVCSYGNRIITFRNPDKNFQWDNKEINLTENIKLLFERFGIDLSSNLKDEIMERTEKEFFIELISLFKLVLQMRNSWTGTDIDYLVSPVCNENGEFFDSRNVDETLPQNADANGAYNIARKGMILLDKIKKNNGEKKLALSITNREWLSFAQGCCKNG

SEQ ID NO: 1535 - protein, 1245 aa, unidentified
  REGION 1..1245: note = Category: MG75 effectors
  REGION 1..1245: note = Description: MG75-21 effector
  source 1..1245: note = uncultivated organism sequence
METFSGFTNLYPLSKTLRFRLIPVGETLKHFIDSGILEEDQHRAESYVKVKAIIDDYHRAYIENSLSGFELPLESTGKFNSLEEYYLYHNIRNKTEEIQNLSSKVRTNLRKQVVAQLTKNEIFKRIDKKELIQSDLIDFVKNEPDANEKIALISEFRNFTVYFKGFHENRRNMYSDEEKSTSIAFRLIHENLPKFIDNMEVFAKIQNTSISENFDAIQKELCPELVTLCEMFKLGYFNKTLSQKQIDAYNTVIGGKTTSEGKKIKGLNEYINLYNQQHKQEKLPKMKLLFKQILSDRESASWLPEKFENDSQVVGAMVNFWNTIHDTVLAEGGLKTIIASLGSYGLEGIFLKNDLQLTDISQKATGSWSKISSEIKQKIEVMNPQKKKESYETYQERIDKIFKSYKSFSLAFINECLRGEYKIEDYFLKLGAVNSSSLQKENHFSHILNAYTDVKEAIGFYSESTDTKLIQDNDSIQKIKQFLDAVKDLQAYVKPLLGNGDETGKDERFYGDLIEYWSLLDLITPLYNMVRNYVTQKPYSIDKIKINFQNPTLLNGWDLNKETDNTSVILRRDGKYYLAIMNNKSRKVFLKYPSGTDRNCYEKMEYKLLPGANKMLPKVFFSKSRINEFMPNERLLSNYEKGTHKKSGTCFSLDDCHTLIDFFKKSLDKHEDWKNFGFKFSDTSTYEDMSGFYKEVENQGYKLSFKPIDATYVDQLVDEGKIFLFQIYNKDFSEHSKGTPNMHTLYWKMLFDETNLGDVVYKLNGEAEVFFRKASINVSHPTHPANIPIKKKNLKHKDEERILKYDLIKDKRYTVDQFQFHVPITMNFKADGNGNINQKAIDYLRSASDTHIIGIDRGERNLLYLVVIDGNGKICEQFSLNEIEVEYNGEKYSTNYHDLLNVKENERKQARQSWQSIANIKDLKEGYLSQVIHKISELMVKYNAIVVLEDLNAGFMRGRQKVEKQVYQKFEKKLIEKLNYLVFKKQSSDLPGGLMHAYQLANKFESFNALGKQSGFLFYIPAWNTSKMDPVTGFVNLFDVKYESVDKAKSFFSKFDSMRYNVERDMFEWKFNYGEFTKKAEGTKTDWTVCSYGNRIITFRNPDKNSQWDNKEINLTENIKLLFERFGIDLSSNLKDEIMQRTEKEFFIELISLFKLVLQMRNSWTGTDIDYLVSPVCNENGEFFDSRNVDETLPQNADANGAYNIARKGMILLDKIKKSNGEKKLALSITNREWLSFAQGCCKNG

SEQ ID NO: 1536 - protein, 1245 aa, unidentified
  REGION 1..1245: note = Category: MG75 effectors
  REGION 1..1245: note = Description: MG75-22 effector
  source 1..1245: note = uncultivated organism sequence
METFSGFTNLYPLSKTLRFRLIPVGETLKHFIDSGILEEDQHRAESYVKVKAIIDDYHRAYIENSLSGFELPLESTGKFNSLEEYYLYHNIRNKTEEIQDLSSKVRTNLRKQVVVQLTKNEIFKRIDKKELIQSDLIDFVKNEPDANEKIALISEFRNFTVYFKGFHENRRNMYSDEEKSTSIAFRLIHENLPKFIDNMEVFAKIQNTSISENFDAIQKELCPELVTLCEMFKLGYFNKTLSQKQIDAYNTVIGGKTTSEGKKIKGLNEYINLYNQQHKQEKLPKMKLLFKQILSDRESASWLPEKFENDSQVVGAMVNFWNTIHDTVLAEGGLKTIIASLGSYGLEGIFLKNDLQLTDISQKATGSWSKISSEIKQKIEVMNPQKKKESYESYQERIDKLFKSYKSFSLAFINECLRGEYKIEDYFLKLGAVNSSSLQKENHFSHILNAYTDVKEAIGFYSESTDTKLIQDNDSIQKIKQFLDAVKDLQAYVKPLLGNGDETGKDERFYGDLIEYWSLLDLITPLYNMVRNYVTQKPYSVDKIKINFQNPTLLNGWDLNKETDNTSVILRRDGKYYLAIMNNKSRKVFLKYPSGTDGNCYEKMEYKLLPGANKMLPKVFFSKSRINEFMPNERLLSNYEKGTHKKSGICFSLDDCHTLIDFFKKSLDKHEDWKNFGFKFSDTSTYEDMSGFYKEVENQGYKLSFKPIDATYVDQLVDEGKIFLFQIYNKDFSEHSKGTPNMHTLYWKMLFDETNLGDVVYKLNGEAEVFFRKASINVSHPTHPANIPIKKKNLKHKDEERILKYDLIKDKRYTVDQFQFHVPITMNFKADGNGNINQKAIDYLCSASDTHIIGIDRGERNLLYLVVIDGNGKICEQFSLNEIEVEYNGEKYSTNYHDLLNVKENERKQARQSWQSIANIKDLKEGYLSQVIHKISELMVKYNAIVVLEDLNAGFMRGRQKVEKQVYQKFEKKLIEKLNYLVFKKQSSDLPGGLMHAYQLANKFESFNALGKQSGFLFYIPAWNTSKMDPVTGFVNLFDVKYESVDKAKSFFSKFDSMRYNVERDMFEWKFNYGEFTKKAEGTKTDWTVCSYGNRIITFRNPDKNSQWDNKEINLTENIKLLFERFGIDLSSNLKDEIMQRTEKEFFIELISLFKLVLQMRNSWTGTDIDYLVSPVCNENGEFFDSRNVDETLPQNADANGAYNIARKGMILLDKIKKSNGEKKLALSITNREWLSFAQGCCKNG

SEQ ID NO: 1537 - protein, 1264 aa, unidentified
  REGION 1..1264: note = Category: MG75 effectors
  REGION 1..1264: note = Description: MG75-23 effector
  source 1..1264: note = uncultivated organism sequence
MNFEQFTHLYPLSKTLRFELRPVGATLAKIKEGGFLENDNHRAESYKKVKKLIDEYHKHFIEQALGDFSLTKNETEGSKCLNSYLETYIQLYRSSRIEDAEKKAFEKVQAEMRKFIAKTLKGSEAYKRLFKQELIKEDLTAFLRTHGGTVADEELVAEFKNFTTYFTGLYENRENMYSEEEKSTAISYRLVNENLPKFVDNMAAFAIIAQVPEVRAMLDVMQKDLGAELDGTTIDELFTLPFFNKVLTQKQIAVYNAVIGGKVSDSHSKGESHIKGINQIVNLYNQQHKDARLPKLKMLYKQILSDREALSWLPEKFDKDADLLKAIHDGYERLASDGVLENLRTLLESMADYQAEGIFITNDQQLTRISQKMFGEWSFISEAILCALKKDVPQKRNECDEKYEERIDKMLKNHGGFSIRFIDDCVAAYVNTLDDEEQKKRFIPTVEAYFATLGAFDTEEEQTINFFSRIQNARDALQGLLDSAYPEGRALIQDKENGALLKELLDAILALMHFVKPLLGKNENGKDERFYGELMQIWDEFDSFVPLYNMSRNYLTQKPYSEEKYKLNFENSQLLKGWDLNKEADNTSIILRKDGLFYLAIMNKKHNKLFTRELPTDGDCYDKMDYKLLPGPNKMFPKVFFSKSRKAEFAPSEHIMDVYKKGSFKKGDTFNLQDCHDLIDFFKASILKHEDWRQFEFKFSETEQYDDISGFYREVEAQGYKVTFRQVSVSYIDRLVNEGKLYLFQIYNKDFSSYSKGTPNMHTLYWRALFDERNLSDVVYKLNGEAEVFYRKKSIEAHPTHPANRPIKNKNKLNDKEKSLFAYDLIKDRRYSEDKFSLHVPITMNFKSVGGPNINDDVVEFLRTNENLHFIGIDRGERHLLYLTVIDSHGHILEQRTLNDVVNNYQGKDYHTDYHDLLETRERQRQEARSSWKAIENIKDLKEGYLAQVVHQIAQLMVKYHAIVVLEDLNGGFMRGRQKVERSVYQQFEKKLIDKLNYLVDKKTDAHAPGGLMNAYQLANQFKSFKSMGRQSGFIFYIPAWNTSKIDPVTGFTNLFDTRYKNVHDAQQFFSAFKSIRYNETADRFEFKFSYSDFTRKAEGSRTDWTVCTYGTRIKTFRDPQKNNEWTSKEVVLTEEFKKFFAAYHVDIHSNLKDSIAAHDEKAFFEQLLALMRLTLQIRNSKSGTDVDYLLSPVADENGVFFDSRSCGNSLPQDADANGAYNIARKGLMLVRQMREAKDLKKFKADMTNRNWLKFAQEKPYLND

SEQ ID NO: 1538 - protein, 1274 aa, unidentified
  REGION 1..1274: note = Category: MG75 effectors
  REGION 1..1274: note = Description: MG75-24 effector
  source 1..1274: note = uncultivated organism sequence
MAKNFEDFKRLYSLSKTLRFEAKPIGATLDNIVKSGLLDEDEHRAASYVKVKKLIDEYHKVFIDRVLDDGCLPLENKGNNNSLAEYYESYVSRAQDEDAKKKFKEIQQNLRSVIAKKLTEDKAYANLFGNKLIESYKDKEDKKKIIDSDLIQFINTAESTQLDSMSQDEAKELVKEFWGFVTYFYGFFDNRKNMYTAEEKSTGIAYRLVNENLPKFIDNIEAFNRAITRPEIQENMGVLYSDFSEYLNVESIQEMFQLDYYNMLLTQKQIDVYNAIIGGKTDDEHDVKIKGINEYINLYNQKHKDDKLPKLKSLFKQILSDRNAISWLPEEFNSDQEVLNAIKDCYERLSENVLGDKVLKSMLGSLADYSLDGIFIRNDLQLTDISQKMFGNWSVIQNAIMQNIKHVAPARKHKESEEEYENRIAGIFKKADSFSISYIDACLNETDPNNAYFVENYFATLGAVDTPTMQRENLFALVQNAYTEITALLHSDYPTEKNLAQDKANVAKIKALLDAIKSLQHFVKPLLGKGDESDKDERFYGELASLWAELDTMTPLYNMIRNYMTRKPYSQKKIKLNFENPQLLGGWDANKEKDYATIILRRNGLYYLAIMNKDSKKLLGKAMPSDGECYEKMVYKLLPGANKMLPKVFFAKSRMEDFKPSKELVEKYNNGTHKKGKNFNIQDCHNLIDYFKQSIDKHEDWSKFGFKFSDTSTYEDLSGFYREAEQQGYKLSFARVSVSYINQLVEEGKMYLFQIYNKDFSEYSKGTPNMHTLYWKALFDERNLADVVYKLNGQAEMFYRKKSIENTHPTHPANHPILNKNKDNNKKESLFEYDLIKDRRYTVDKFMFHVPITMNFKSSGSENINQDVKAYLCHADDMHIIGIDRGERHLLYLVVIDLQGNIKEQFSLNEIVNDYNGNTYHTNYHDLLDVREDERLKARQSWQTIENIKELKEGYLSQVIHKITQLMVKYHAIVVLEDLNMGFMRGRQKVEKQVYQKFEKMLIEKLNYLVDKKADASVSGGLLNAYQLTSKFDSFQKLGKQSGFLFYIPAWNTSKIDPVTGFVNLLDTRYQNVEKAKSFFSKFDAIRYNKDKEWFEFNLDYDKFGKKAEGTRTKWTLCTRGMRIDTFRNKEKNSQWDNQEVDLTAEMKSLLEHYYIDIHGNLKDAISAQTDKAFFTGLLHILKLTLQMRNSITGTETDYLVSPVADENGIFYDSRSCGNQLPENADANGAYNIARKGLMLIEQIKNAEDLNNVKFDISNKAWLNFAQQKPYKNG

SEQ ID NO: 1539 - protein, 1274 aa, unidentified
  REGION 1..1274: note = Category: MG75 effectors
  REGION 1..1274: note = Description: MG75-25 effector
  source 1..1274: note = uncultivated organism sequence
MAKNFEDFKRLYPLSKTLRFEAKPIGATLDNIIKSGLLDEDEHRAASYVKMKKLIDEYHKVFIDRVLDNGCLPLEDKGDNNSLAEYYESYVSKAQDEDAIKKFKEIQQNLCSIIAKKLTDDKAYANLFGNKLIESYKDKADKTKIIDSDLIQFINTAESTQLVSMSQDEAKELVKEFWGFTTYFEGFFKNRKNMYTPEEKSTGIAYRLINENLPKFIDNMEAFKKAIARPEIQANMEELYSDFSEYLNVESIQEMFQLDYYNMLLTQKQIDVYNAIIGGKTDDEHDVKIKGINEYINLYNQQHKDDKLPKLKALFKQILSDRNAISWLPEEFNSDQEVLNAIKDCYERLAENVLGDKVLKSLLCSLSDYTLDGIFIRNDLQLTDISQKMFGNWGVIQNAIMQNIKRVAPARKHKESEEDYEKRIAGIFKKADSFSISYINDCLNEADPNNAYFVENYFATFGAVNTPTMQRENLFALVQNAYTEVASLLHSDYPTAKHLAQDKANVAKIKALLDAIKSLQHFVKPLLGKGDESDKDERFYGELASLWAELDTVTPLYNMIRNYITRKPYSQKKIKLNFENPQLLGGWDANKEKDYATIILRRNGLYYLAIMNKESKKLLGKAMPSDGECYEKMVYKLLPGANKMLPKVFFAKSRMEDFKPSKELVEKYNNGTHKKGKNFNIQDCHNLIDYFKQSISKHEDWGKFGFNFSDTSTYEDLSGFYREVEQQGYKLSFARVSVSYINQLVEEGKMYLFQIYNKDFSEYSKGTPNMHTLYWKALFDERNLADVVYKLNGQAEMFYRKKSIENTHPTHPANHPILNKNKDNKKKESLFEYDLIKDRRYTVDKFMFHVPITMNFKSVGSENINQGVKEYLHHADDMHIIGIDRGERHLLYLVVIDLQGNIKEQYSLNEIVNEYNGNTYHTNYHDLLDVREDERLKARQSWQTIENIKELKEGYLSQVIHKITQLMVKYHAIVVLEDLNMGFMRGRQKVEKQVYQKFEKMLIDKLNYLVDKKADASVSGGWLNAYQLTSKFDSFQKLGKQSGFLFYIPAWNTSKIDPVTGFVNLLDARYQNVEKAKAFFSKFDAIRYNKDKDWFEFNLDYDKFGKKAEGTRTKWTLCTRGMRIDTFRNKEKNSQWDNQEVDLTAEMKSLLEHYYIDIHGNLKDAISAQTDKAFFTGLLHILKLTLQMRNSITGTETDYLVSPVADENGIFYDSRSCGEELPENADANGAYNIARKGLMLIEQIKGAEDLGNLKFDMSNKAWLNFAQKKPYKNG

SEQ ID NO: 1540 - protein, 1274 aa, unidentified
  REGION 1..1274: note = Category: MG75 effectors
  REGION 1..1274: note = Description: MG75-26 effector
  source 1..1274: note = uncultivated organism sequence
MAKNFEDFKRLYPLSKTLRFEAKPIGATLDNIIKSGLLDEDEHRAASYVKMKKLIDEYHKVFIDRVLDNGCLPLKNEGQNNSLTEYYESYVSKSQNEDAKKAFEENQQNLRSIVAKKLTDDKAYANLFGKNLIESYKDKEDKKKIIDSDLIQFICTAEATQLDSMSQDEAKEIVKEFWGFTTYFVGFFDNRKNMYTAEEKSTGIAYRLINENLPKFIDNMEAFKKAIARPEIQANMEELYSNFSEYLNVESIQEMFLLDYYNMLLTQKQIDVYNAIIGGKTDDEHDVKIKGINEYINLYNQQHKDDKLPKLKALFKQILSDRNAISWLPEEFNSDQEVLNAIKDCYERLSENVLGDKVLKSLLGSLSDYTLDGIFIRNDLQLTDISQKMFGNWGVIQNAIMQNIKRVAPARKHKESEEDYEKRIAGIFKKADSFSISYINDCLNEADPNNAYFVENYFATFGAVNTPTMQRENLFALVQNAYTEVASLLHSDYPTAKHLAQDKANVAKIKALLDAIKSLQHFVKPLLGKGDESDKDERFYGELASLWAELDTVTPLYNMIRNYITRKPYSQKKIKLNFENPQLLGGWDANKEKDYATIILRRNGLYYLAIMNKDSKKLLGKAMPSDGECYEKMVYKLLPGANKMLPKVFFAKSRMEDFKPSKELVEKYNNGTHKKGKNFNIQDCHNLIDYFKQSINKHEDWGKFGFNFSDTSTYEDLSGFYREVEQQGYKLSFARVSVSYINQLVEEGKMYLFQIYNKDFSEYSKGTPNMHTLYWKALFDERNLADVVYKLNGQAEMFYRKKSIENTHPTHPANHPILNKNKDNKKKESLFDYDLIKDRRYTVDKFMFHVPITMNFKSSGSENINQDVKAYLRHADDMHIIGIDRGERHLLYLVVIDLQGNIKEQYSLNEIVNEYNGNTYHTNYHDLLDVREEERLKARQSWQTIENIKELKEGYLSQVIHKITQLMVKYHAIVVLEDLNMGFMRGRQKVEKQVYQKFEKMLIDKLNYLVDKKADASVSGGWLNAYQLTSKFDSFQKLGKQSGFLFYIPAWNTSKIDPVTGFVNLLDARYQNVEKAKAFFSKFDAIRYNKDKDWFEFNLDYDKFGKKAEGTRTKWTLCTRGMRIDTFRNKEKNSQWDNQEVDLTAEMKSLLEHYYIDIHGNLKDAISAQTDKAFFTGLLHILKLTLQMRNSITGTETDYLVSPVADENGIFYDSRSCGEELPENADANGAYNIARKGLMLIEQIKGAEDLGNLKFDISNKAWLNFAQQKPYKNG

SEQ ID NO: 1541 - protein, 1274 aa, unidentified
  REGION 1..1274: note = Category: MG75 effectors
  REGION 1..1274: note = Description: MG75-27 effector
  source 1..1274: note = uncultivated organism sequence
MAKNFEDFKRLYPLSKTLRFEAKPIGATLDNIIKSGLLDEDEHRAASYVKMKKLIDEYHKVFIDRVLDNGCLPLEDKGDNNSLAEYYESYVSKAQDEDAIKKFKEIQQNLCSIIAKKLTDDKAYANLFGNKLIESYKDKADKTKIIDSDLIQFINTAESTQLVSMSQDEAKELVKEFWGFTTYFEGFFKNRKNMYTPEEKSTGIAYRLINENLPKFIDNMEAFKKAITRPEIQANMEELYSDFSEYLNVESIQEMFQLDYYNMLLTQKQIDVYNAIIGGKTDDEHDVKIKGINEYINLYNQQHKDDKLPKLKALFKQILSDRNAISWLPEEFNSDQEVLNAIKDCYERLAENVLGDKVLKSLLGSLADYSLDGIFIRNDLQLTDISQKMFGNWGVIQNAIMQNIKHVAPARKHKESEEDYEKRIAGIFKKADSFSISYINDCLNEADPNNAYFVENYFATFGAVNTPTMQRENLFALIQNAYTEVAALLHSDYPTAKHLAQDKANVAKIKALLDAIKSLQHFVKPLLGKGDESDKDERFYGELASLWAELDMVTPLYNMIRNYMTRKPYSQKKIKLNFENPQLLGGWDANKEKDYATIILRRDGLYYLAIMNKESKKLLGKAMPSDGECYEKMVYKLLPGANKMLPKVFFAKSRMEDFKPSKELVEKYNNGTHKKGKNFNIQDCHNLIDYFKQSISKHEDWGKFGFNFSDTSTYEDLSGFYREVEQQGYKLSFARVSVSYISQLVEEGKMYLFQIYNKDFSEYSKGTPNMHTLYWKALFDERNLADVVYKLNGQAEMFYRKKSIENTHPTHPANHPILNKNKDNKKKESLFDYDLIKDRRYTVDKFMFHVPITMNFKSSGSENINQNVKTYLRHADDMHIIGIDRGERHLLYLVVIDLQGNIKEQYSLNEIVNEYNGNTYHTNYHDLLDVREEERLKARQSWQTIENIKELKEGYLSQVIHKITQLMVKYHAIVVLEDLNMGFMRGRQKVEKQVYQKFEKMLIDKLNYLVDKKADASVSGGLLNAYQLTSKFDSFQKLGKQSGFLFYIPAWNTSKIDPVTGFVNLLDTRYQNVEKAKVFFSKFDAIRYNKDKDWFEFNLDYDKFGKKAEGTRTKWTLCTRGMRIDTFRNKEKNSQWDNQEVDLTAEMKSLLEHYYIDIHGNLKDAISAQTDKAFFTGLLHILKLTLQMRNSITGTETDYLVSPVADENGIFYDSRSCGEELPENADANGAYNIARKGLMLIEQIKGAEDLGNLKFDISNKAWLNFAQKKPYKNG

SEQ ID NO: 1542 - protein, 1274 aa, unidentified
  REGION 1..1274: note = Category: MG75 effectors
  REGION 1..1274: note = Description: MG75-28 effector
  source 1..1274: note = uncultivated organism sequence
MAKNFEDFKRLYPLSKTLRFEAKPIGATLDNIVKSGLLDEDEHRAASYVKVKKLIDEYHKVFIDRVLDNGCLPLEDKGDNNSLAEYYDSYVSKSQNEDAKKAFKEIQQNLRSIIAKKLTDDKAYANLFSNKLIESYKDKADKTKIIDSDLIQFIHTAESTQLDSMSQDEAKELVKEFWGFTTYFVGFFDNRKNMYTAEEKSTGIAYRLINENLPKFIDNMEAFKKAIARPEIQANMEELYSIFSEYLNVESIQEMFLLDYYNMLLTQKQIDVYNAIIGGKTDEEHDVKIKGINEYINLYNQQHKDDKLPKLKALFKQILSDRNAISWLPEEFNSDQEVLNAIKDCYERLAENVLGDKVLKSLLGSLADYSLDGIFIRNDLQLTDISQKMFGNWGVIQNAIMQNIKHVAPARKHKESEEDYEKRIAGIFKKADSFSISYINDCLNEADPNNAYFVENYFATFGAINTPTMQRENLFALVQNAYTEVAVLLHSDYPTAKQLAQDKANVSKIKALLDAIKSLQHFVKPLLGKGDESDKDERFYGDLASLWAELDTVTPLYNMIRNYMTRKPYSQKKIKLNFENPQLLGGWDANKEKDYATIILRRNGLYYLAIMNKESKKLLGKSMPSDGECYEKMVYKLLPGANKMLPKVFFAKSRMDDFKPSKELIEKYNNGTHKKGKNFDIQDCHNLIDYFKQSIDKHEDWSKFGFNFSDTSTYEDLSGFYREVEQQGYKLSFARVSVSYINQLVEEGKMYLFQIYNKDFSEYSKGTPNMHTLYWKALFDERNLADVVYKLNGQAEMFYRKKSIENTHPTHPANHPILNKNKDNKKKESLFDYDLIKDRRYTVDKFMFHVPITMNFKSSGSENINQDVKAYLRHADDMHIIGIDRGERHLLYLVVIDLQGNIKEQFSLNEIVNDYNGNTYHTNYHDLLDVREDERLKARQSWQTIENIKELKEGYLSQVIHKITQLMVKYHAIVVLEDLNMGFMRGRQKVEKQVYQKFEKMLIDKLNYLVDKKADVSVSGGLLNAYQLTSKFDSFQKMGKQSGFLFYIPAWNTSKIDPITGFVNLLDTRYQNVEKAKVFFSKFDAIRYNKDKDWFEFNLDYDKFGKKAEGTRTKWALCTRGMRIDTFRNKEKNSQWDNQEVDLTAEMKSLLEHYYIDIHGNLKDAISAQTDKAFFTGLLHILKLTLQMRNSIIGTETDYLVSPVADENGIFYDSSSCGDELPENADANGAYNIARKGLMMIEQIKDAKDLDNLKFDISNKSWLNFAQQKPYKNG

SEQ ID NO: 1543 - protein, 1274 aa, unidentified
  REGION 1..1274: note = Category: MG75 effectors
  REGION 1..1274: note = Description: MG75-29 effector
  source 1..1274: note = uncultivated organism sequence
MAKNFEDFKRLYPLSKTLRFEAKPIGATLDNIIKSGLLDEDEHRAASYVKMKKLIDEYHKVFIDRVLDNGCLPLKNEGQNNSLTEYYESYVSKSQNEDAKKAFEENQQNLRSIVAKKLTDDKAYANLFGKNLIESYKDKEDKKKIIDSDLIQFICTAEATQLDSMSQDEAKEIVKEFWGFTTYFVGFFDNRKNMYTAEEKSTGIAYRLINENLPKFIDNMEAFKKAIARPEIQANMEELYSNFSEYLNVESIQEMFLLDYYNMLLTQKQIDVYNAIIGGKTDDEHDVKIKGINEYINLYNQQHKDDKLPKLKALFKQILSDRNAISWLPEEFNSDQEVLNAIKDCYERLSENVLGDKVLKSLLGSLSDYTLDGIFIRNDLQLTDISQKMFGNWGVIQNAIMQNIKRVAPARKHKESEEDYEKRIAGIFKKADSFSISYINDCLNEADPNNAYFVENYFATFGAVNTPTMQRENLFALVQNAYTEVASLLHSDYPTAKHLAQDKANVAKIKALLDAIKSLQHFVKPLLGKGDESDKDERLYGELASLWAELDTVTPLYNMIRNYITRKPYSQKKIKLNFENPQLLGGWDANKEKDYATIILRRNGLYYLAIMNKESKKLLGKAMPSDGECYEKMVYKLLPGANKMLPKVFFAKSRMEDFKPSKELVEKYNNGTHKKGKNFNIQDCHNLIDYFKQSINKHEDWGKFGFNFSDTSTYEDLSGFYREVEQQGYKLSFARVSVSYINQLVEEGKMYLFQIYNKDFSEYSKGAPNMHTLYWKALFDERNLADVVYKLNGQAEMFYRKKSIENTHPTHPANHPILNKNKDNKKKESLFDYDLIKDRRYTVDKFMFHVPITMNFKSSGSENINQDVKAYLRHADDMHIIGIDRGERHLLYLVVIDLQGNIKEQYSLNEIVNEYNGNTYHTNYHDLLDVREEERLKARQSWQTIENIKELKEGYLSQVIHKITQLMVKYHAIVVLEDLNMGFMRGRQKVEKQVYQKFEKMLIDKLNYLVDKKADASVSGGWLNAYQLTSKFDSFQKLGKQSGFLFYIPAWNTSKIDPVTGFVNLLDARYQNVEKAKAFFSKFDAIRYNKDKDWFEFNLDYDKFGKKAEGTRTKWTLCTRGMRIDTFRNKEKNSQWDNQEVDLTAEMKSLLEHYYIDIHGNLKDAISTQTDKAFFTGLLHILKLTLQMRNSITGTETDYLVSPVADENGIFYDSRSCGEELPENADANGAYNIARKGLMLIEQIKGAEDLGNLKFDISNKAWLNFAQQKPYKNG

SEQ ID NO: 1544 - protein, 1245 aa, unidentified
  REGION 1..1245: note = Category: MG75 effectors
  REGION 1..1245: note = Description: MG75-30 effector
  source 1..1245: note = uncultivated organism sequence
METFSGFTNLYPLSKTLRFRLIPVGETLKYFIGSGILEEDQHRAESYVKVKAIIDDYHRAYIENSLSGFELPLESTGKSNSLEEYYLYHNIRNKTEEIQNLSSKVRTNLRKQVVAQLTKNEIFKRIDKKELIQSDLIDFVKNEPDANEKIALISEFRNFTVYFKGFHENRRNMYSDEEKSTSIAFRLIHENLPKFIDNMEVFAKIQNTSISENFDAIQKELCPELVTLCEMFKLGYFNKTLSQKQIDAYNTVIGGKTTSEGKKIKGLNEYINLYNQQHKQEKLPKMKLLFKQILSDRESASWLPEKFENDSQVVGAIVNFWNTIHDTVLAEGGLKTIIASLGSYGLEGIFLKNDLQLTDISQKATGSWGKISSEIKQKIEVMNPQKKKESYETYQERIDKIFKSYKSFSLAFINECLRGEYKIEDYFLKLGAVNSSSLQKENHFSHILNTYTDVKEVIGLYSESTDTKLIQDNDSIQKIKQFLDAVKDLQAYVKPLLGNGDETGKDERFYGDLIEYWSLLDLITPLYNMVRNYVTQKPYSVDKIKINFQNPTLLNGWDLNKETDNTSVILRRDGKYYLAIMNNKSRKVFLKYPSGTDRNCYEKMEYKLLPGANKMLPKVFFSKSRINEFMPNERLLSNYEKGTHKKSGTCFSLDDCHTLIDFFKKSLDKHEDWKNFGFKFSDTSTYEDMSGFYKEVENQGYKLSFKPIDATYVDQLVDEGKIFLFQIYNKDFSEHSKGTPNMHTLYWKMLFDETNLGDVVYKLNGEAEVFFRKASINVSHPTHPANIPIKKKNLKHKDEERILKYDLIKDKRYTVDQFQFHVPITMNFKADGNGNINQKAIDYLRSASDTHIIGIDRGERNLLYLVVIDGNGKICEQFSLNEIEVEYNGEKYSTNYHDLLNVKENERKQARQSWQSIANIKDLKEGYLSQVIHKISELMVKYNAIVVLEDLNAGFMRGRQKVEKQVYQKFEKKLIEKLNYLVFKKQSSDLPGGLMHAYQLANKFESFNTLGKQSGFLFYIPAWNTSKMDPVTGFVNLFDVKYESVDKAKSFFSKFDSIRYNVERDMFEWKFNYGEFTKKAEGTKTDWTVCSYGNRIITFRNPDKNSQWDNKEINLTENIKLLFERFGIDLSSNLKDEIMQRTEKEFFIELISLFKLVLQMRNSWTGTDIDYLVSPVCNENGEFFDSRNVDETLPQNADANGAYNIARKGMILLDKIKKSNGEKKLALSITNREWLSFAQGCCKNG

SEQ ID NO: 1545 - protein, 1274 aa, unidentified
  REGION 1..1274: note = Category: MG75 effectors
  REGION 1..1274: note = Description: MG75-31 effector
  source 1..1274: note = uncultivated organism sequence
MAKNFEDFKRLYPLSKTLRFEAKPIGATLDNIIKSGLLDEDEHRAASYVKMKKLIDEYHKVFIDRVLDNGCLPLKNEGQNNSLTEYYESYVSKSQNEDAKKAFEENQQNLRSIVAKKLTDDKAYANLFGKNLIESYKDKEDKKKIIDSDLIQFICTAEATQLDSMSQDETKEIVKEFWGFTTYFVGFFDNRKNMYTAEEKSTGIAYRLINENLPKFIDNMEAFKKAIARPEIQANMEELYSNFSEYLNVESIQEMFLLDYYNMLLTQKQIDVYNAIIGGKTDDEHDVKIKGINEYINLYNQQHKDDKLPKLKALFKQILSDRNAISWLPEEFNSDQEVLNAIKDCYERLSENVLGDKVLKSLLGSLSDYTLDGIFIRNDLQLTDISQKMFGNWGVIQNAIMQNIKRVAPARKHKESEEDYEKRIAGIFKKADSFSISYINDCLNEADPNNAYFVENYFATFGAVNTPTMQRENLFALVQNAYTEVASLLHSDYPTAKHLAQDKANVAKIKALLDAIKSLQHFVKPLLGKGDESDKDERFYGELASLWAELDTVTPLYNMIRNYITRKPYSQKKIKLNFENPQLLGGWDANKEKDYATIILRRNGLYYLAIMNKESKKLLGKAMPSDGECYEKMVYKLLPGANKMLPKVFFAKSRMEDFKPSKELVEKYNNGTHKKGKNFNIQDCHNLIDYFKQSINKHEDWGKFGFNFSDTSTYEDLSGFYREVEQQGYKLSFARVSVSYINQLVEEGKMYLFQIYNKDFSEYSKGTPNMHTLYWKALFDERNLADVVYKLNGQAEMFYRKKSIENTHPTHPANHPILNKNKDNKKKESLFDYDLIKDRRYTVDKFMFHVPITMNFKSSGSENINQDVKAYLRHADDMHIIGIDRGERHLLYLVVIDLQGNIKEQYSLNEIVNEYNGNTYHTNYHDLLDVREEERLKARQSWQTIENIKELKEGYLSQVIHKITQLMVKYHAIVVLEDLNMGFMRGRQKVEKQVYQKFEKMLIDKLNYLVDKKADASVSGGWLNAYQLTSKFDSFQKLGKQSGFLFYIPAWNTSKIDPVTGFVNLLDARYQNVEKAKAFFSKFDAIRYNKDKDWFEFNLDYDKFGKKAEGTRTKWTLCTRGMRIDTFRNKEKNSQWDNQEVDLTAEMKSLLEHYYIDIHGNLKDAISAQTDKAFFTGLLHILKLTLQMRNSITGTETDYLVSPVADENGIFYDSRSCGEELPENADANGAYNIARKGLMLIEQIKGAEDLGNLKFDISNKAWLNFAQQKPYKNG

SEQ ID NO: 1546 - protein, 1252 aa, unidentified
  REGION 1..1252: note = Category: MG75 effectors
  REGION 1..1252: note = Description: MG75-32 effector
  source 1..1252: note = uncultivated organism sequence
MKFEDFTGLYPVSKTLRFEAKPVGATLENVIKSGVLEDDAHRARSYKKVKKLIDEYHKVFIDSVMSKFKFKEEILEEICSLYAAKSMDDKSKDRFVKLQGEMRKDVSVAFASDDRYKTINKKELVKEDLFEFVSHADNGQLAGLTKEEAEELILEFKDFTTYFSGFHKNRSNMYVADEKTTSVAYRLVNENLPRFLYNVSVFQKVVSVPEFENKIRAIYDSFREYLCVDNLASMFETSYYNDVLSQMQIDIYNSVIGGKTDKDSSTKIQGLNECINLYNQTHRNDKLPKFKILYKQIRSDRVAMSWLPDEFSDDKETLEAIRNCYDSLTDHILGERDLKTLLESLGQYDMSGVFIANGPYLADISQKLYGDWRAIEKAIRKQEAVNSPKKAKETEEEYFNRITKHIHNYDSFSIEYLNFCITESYPNDGRRVEDYFATLGAVNTDTSQRENLFSRIDNAYTNVSGLLSSEYPETKKLSQDTENVEKIKDLLDSIKELQRFVKPLMGNGDESDNDKRFYGELSPLWDELETFSLLYDKVRNYVTRKPYSQNKIKLNFNNATLFAGWDQNKEKDNACIILRRGGMYYLGIMNKSYRIVFENNFPCDGDCYEKMVYKLLPGANKMLPKVFFSKSRIREFNPSDRILKNYEEGTHKKGPKFKLEDCHELIDFFKASINLHEDWKKFKFKFSDTSSYEDISDFYKEVEQQGYKITFVNVSVSYIDSLVNDGKLYLFQLYNKDFSQYSKGVPNMHTLYWKALFDKANLADVVYKLNGEAELFFRKKSIDMERPTHRANISVANKNIHNIKKESIFKYDLTKDRRYTVDKFLFHVPITMNFKSEGNIAIEQQVRSYLQSAEDTHVIGIDRGERHLLYVSVIDRRGLIKEQFSLNEIINEHNGSTYATNYHDLLDAKESERRKARQSWQTIENIKDLKEGYLSQAVHKIAQLMVKYHAVVVLEDLNVGFMRGRQKVEKQVYQKFEKMLTDKLNYLVDKKLNANDPGGVFHAYQLSSVFKSAEKRGKQSGFIFYIPAWNTSKIDPVTGFVNLFDLKYENIDKAKSFFSKFQIIRYNSERDWFEFIFDYDSFNSKASGTKVGWTLTTHGDRILSFRNSEKNNQWDSRAVILTDEYKALFDKYGIDYNDNLKEAITNQTEKAFFEDLLKCLRLTLQMRNSVIGTDTDFLISPVADNNGVFYDSRICADSLPKNADANGAYNIARKGLMLIDQIKKASDVRNIKFDIANKSWLDFAQKKPYLDE

SEQ ID NO: 1547 - protein, 1274 aa, unidentified
  REGION 1..1274: note = Category: MG75 effectors
  REGION 1..1274: note = Description: MG75-33 effector
  source 1..1274: note = uncultivated organism sequence
MAKNFEDFKRLYPLSKTLRFEAKPIGATLDNIIKSGLLDEDEHRAASYVKMKKLIDEYHKVFIDRVLDNGCLPLEDKGDNNSLAEYYESYVSKAQDEDAIKKFKEIQQNLCSIIAKKLTDDKAYANLFGNKLIESYKDKADKTKIIDSDLIQFINTAESTQLVSMSQDEAKELVKEFWGFTTYFEGFFKNRKNMYTPEEKSTGIAYRLINENLPKFIDNMEAFKKAITRPEIQANMEELYSDFSEYLNVESIQEMFQLDYYNMLLTQKQIDVYNAIIGGKTDDEHDVKIKGINEYINLYNQQHKDDKLPKLKALFKQILSDRNAISWLPEEFNSDQEVLNAIKDCYERLAENVLGDKVLKSLLCSLSDYTLDGIFIRNDLQLTDISQKMFGNWGVIQNAIMQNIKRVAPARKHKESEEDYEKRIAGIFKKADSFSISYINDCLNEADSNNAYFVENYFATFGAVNTPTMQRENLFALVQNAYTEVASLLHSDYPTAKHLAQDKANVAKIKALLDAIKSLQHFVKPLLGKGDESDKDERFYGELASLWAELDTVTPLYNMIRNYITRKPYSQKKIKLNFENPQLLGGWDANKEKDYATIILRRNGLYYLAIMNKESKKLLGKAMPSDGECYEKMVYKLLPGANKMLPKVFFAKSRMEDFKPSKELVEKYNNGTHKKGKNFNIQDCHNLIDYFKQSISKHEDWGKFGFNFSDTSTYEDLSGFYREVEQQGYKLSFARVSVSYINQLVEEGKMYLFQIYNKDFSEYSKGTPNMHTLYWKALFDERNLADVVYKLNGQAEMFYRKKSIENTHPTHPANHPILNKNKDNKKKESLFEYDLIKDRRYTVDKFMFHVPITMNFKSVGSEIINQGVKEYLHHADDMHIIGIDRGERHLLYLVVIDLQGNIKEQYSLNEIVNEYNGNTYHTNYHDLLDAREDERLKARQSWQTIENIKELKEGYLSQVIHKITQLMVKYHAIVVLEDLNMGFMRGRQKVEKQVYQKFEKMLIDKLNYLVDKKADASVSGGWLNAYQLTSKFDSFQKLGKQSGFLFYIPAWNTSKIDPVTGFVNLLDARYQNVEKAKAFFSKFDAIRYNKDKDWFEFNLDYDKFGKKAEGTRTKWTLCTRGMRIDTFRNKEKNSQWDNQEVDLTAEMKSLLEHYYIDIHGNLKDAISAQTDKAFFTGLLHILKLTLQMRNSITGTETDYLVSPVADENGIFYDSRSCGEELPENADANGAYNIARKGLMLIEQIKGAEDLGNLKFDISNKAWLNFAQKKPYKNG

SEQ ID NO: 1548 - protein, 1274 aa, unidentified
  REGION 1..1274: note = Category: MG75 effectors
  REGION 1..1274: note = Description: MG75-34 effector
  source 1..1274: note = uncultivated organism sequence
MAKNFEDFKRLYPLSKTLRFEAKPIGATLDNIIKSGLLDEDEHRAASYVKMKKLIDEYHKVFIDRVLDNGCLPLEDKGDNNSLAEYYESYVSKAQDEDAIKKFKEIQQNLCSIIAKKLTDDKAYANLFGNKLIESYKDKADKTKIIDSDLIQFINTAESTQLVSMSQDEAKELVKEFWGFTTYFEGFFKNRKNMYTPEEKSTGIAYRLINENLPKFIDNMEAFKKAITRPEIQANMEELYSDFSEYLNVESIQEMFQLDYYNMLLTQKQIDVYNAIIGGKTDDEHDVKIKGINEYINLYNQQHKDDKLPKLKALFKQILSDRNAISWLPEEFNSDQEVLNAIKDCYERLAENVLGDKVLKSLLCSLSDYTLDGIFIRNDLQLTDISQKMFGNWGVIQNAIMQNIKRVAPARKHKESEEDYEKRIAGIFKKADSFSISYINDCLNEADPNNAYFVENYFATFGAVNTPTMKRENLFALVQNAYTEVASLLHSDYPTAKHLAQDKANVAKIKALLDAIKSLQHFVKPLLGKGDESDKDERFYGELASLWAELDTVTPLYNMIRNYITRKPYSQKKIKLNFENPQLLGGWDANKEKDYATIILRRNGLYYLAIMNKESKKLLGKAMPSDGECYEKMVYKLLPGANKMLPKVFFAKSRMEDFKPSKELVEKYNNGTHKKGKNFNIQDCHNLIDYFKQSISKHEDWGKFGFNFSDTSTYEDLSGFYREVEQQGYKLSFARVSVSYINQLVEEGKMYLFQIYNKDFSEYSKGTPNMHTLYWKALFDERNLADVVYKLNGQAEMFYRKKSIENTHPTHPANHPILNKNKDNKKKESLFEYDLIKDRRYTVDKFMFHVPITMNFKSVGSENINQGVKEYLHHADDMHIIGIDRGERHLLYLVVIDLQGNIKEQYSLNEIVNEYNGNTYHTNYHDLLDAREDERLKARQSWQTIENIKELKEGYLSQVIHKITQLMVKYHAIVVLEDLNMGFMRGRQKVEKQVYQKFEKMLIDKLNYLVDKKADASVSGGWLNAYQLTSKFDSFQKLGKQSGFLFYIPAWNTSKIDPVTGFVNLLDARYQNVEKAKAFFSKFDAIRYNKDKDWFEFNLDYDKFGKKAEGTRTKWTLCTRGMRIDTFRNKEKNSQWDNQEVDLTAEMKSLLEHYYIDIHGNLKDAISAQTDKAFFTGLLHILKLTLQMRNSITGTETDYLVSPVADENGIFYDSRSCGEELPENADANGAYNIARKGLMLIEQIKGAEDLGNLKFDISNKAWLNFAQKKPYKNG

SEQ ID NO: 1549 - protein, 1271 aa, unidentified
  REGION 1..1271: note = Category: MG75 effectors
  REGION 1..1271: note = Description: MG75-35 effector
  source 1..1271: note = uncultivated organism sequence
MEFNDFKRLYPLSKTLRFEAKPIGATLKNIIKSGLLEEDEHRTQSYVKVKKLIDEYHKVFIDRVLNDGCLTIENKGKKDSLEEYYESYMSKTNDENANKTYKEIQQNLRSVIVKKLTDDNAYANLFGNKLIESYKDKDDKNKIIDSDLIQFINTADPSQLDYMSQDEAKELVKEFWGFTTYFVGFFDNRKNMYTPEDKSTGIAYRLVNENLPKFIDNMEAFKKAVAKPEIQANMEELYSNFAGYLNVESIQEMFQLDYYNMLLSQKQIDVYNAIIGGKTDEEHDVKIKGINEYINLYNQQHKDEKLPKLKALFKQILSDRNAISWLPEEFNSDQDVLNAIDDCYKRLSENVLGDKVLKSLLCSLSDYNLNVIFVRNDLQLTDISQKMFGNWSVIQDAIMQNIKNVAPARKRKESEEDYEKRISDIFKKADSFSIQYINDCLNEMDDNNLHAVDGYFATLGAVNTPTMQRENLFALIQNAYTDISNLLETPYPEKKNLAQDKTNVAKVKALLDAIKSLQHFVKPLLGKGDESDKDERFYGELASLWTELDTVTPLYNMVRNYMTRKPYSEKKIKLNFENPQLLGGWDANKEKDYATIILRRNGMYYLAIMDKDSKKLLGKTMPSDGECYEKMVYKLLPGANKMLPKVFFAKSRINDFKPSKQIVENYNNGTHKKGKNFNINDCHNLIDYFKQSIGKHEDWSKFGFNFSDTSTYEDLSGFYREVEQQGYKLSFTNVSVSFIDKLVDEGKMYLFQIYNKDFSDYSKGTPNMHTLYWKALFDERNLADVVYKLNGQAEMFYRKKSINNTHPTHPANHPIQNKNKDNKKKESVFEYDLIKDRRYTVDKFLFHVPITMNFKSVGSENINQQVREYLQQADDTHIIGIDRGERHLLYLVVIDMQGEIKEQFTLNEIVNEYNGNTYRTNYHDLLDTREEERLKARQSWQTIENIKELKEGYLSQVIHKITQLMVKYHAVVVLEDLNKGFMRGRQKVEKQVYQKFEKMLIDKLNYLVDKKADAAQSGGLLNAYQLTSKFDSFQKLGKQSGFLFYIPAWNTSKIDPVTGFVNLLDTRYQNTEKAKAFFSKFDAIRYNANKDWFEFNLDYDKFGTKAEGTRTKWILCTQGNRICTFRNTEKNSQWDNQEVDLTREMKSLFEYYHINICGNLKEEICSQTDKAFFTGLLHMLKLTLQMRNSITGTETDYLVSPVADENGVFYDSRSCGDALPKNADANGAYNIARKGLMLIGQIKETKDLANFKYDISNKAWLNFAQQKPYKK

SEQ ID NO: 1550 - protein, 1275 aa, unidentified
  REGION 1..1275: note = Category: MG75 effectors
  REGION 1..1275: note = Description: MG75-36 effector
  source 1..1275: note = uncultivated organism sequence
MAKNFEDFKRLYYLSKTLRFEAKPIGATLDNIVKSGLLDEDEHRAASYVKVKKLIDEYHKVFIDRVLDDGCLPLENKGNNNSLAEYYESYVSRAQDEDAKKKFKEIQQNLRSVIAKKLTEDKAYANLFGNKLIESYKDKEDKKKIIDSDLIQFINTAESTQLDSMSQDEAKELVKEFWGFVTYFYGFFDNRKNMYTAEEKSTGIAYRLVNENLPKFIDNIEAFNRAITRPEIQENMGVLYSDFSEYLNVESIQEMFQLDYYNMLLTQKQIDVYNAIIGGKTDDEHDVKIKGINEYINLYNQKHKDDKLPKLKSLFKQILSDRNAISWLPEEFNSDQEVLNAIKDCYERLSENVLGDKVLKSMLGSLADYSLDGIFIRNDLQLTDISQKMFGNWSVIQNAIMQNIKHVAPARKHKESEEEYENRIAGIFKKADSFSISYIDACLNETDPNNAYFVENYFATLGAVDTPTMQRENLFALVQNAYTEITALLHSDYPTEKNLAQDKANVAKIKALLDAIKSLQHFVKPLLGKGDESDKDERFYGELASLWAELDTMTPLYNMIRNYMTRKPYSQKKIKLNFENPQLLGGWDANKEKDYATIILRRNGLYYLAIMNKDSKKLLGKAMPSDGECYEKMVYKLLPGANKMLPKVFFAKSRMEDFKPSKELVEKYNNGTHKKGKNFNIQDCHNLIDYFKQSIDKHEDWSKFGFKFSDTSTYEDLSGFYREVEQQGYKLSFARVSVSYINQLVEEGKMYLFQIYNKDFSEYSKGTPNMHTLYWKALFDERNLADVVYKLNGQAEMFYRKKSIENTHPTHPANHPILNKNKDNKKKESLFGYDLIKDRRYTVDKFLFHVPITMNFKSSGSENINQDVKAYLRHADDMHIIGIDRGERHLLYLVVIDLQGNIKEQFSLNEIVNDYNGNTYHTNYHDLLDVREEERLKARQSWQTIENIKELKEGYLSQVIHKITQLMVGYHAIVVLEDLSKGFMRSRQKVEKQVYQKFEKMLIDKLNYLVDKKTDVSTPGGLLNAYQLTCKSDSSQKLGKQSGFLFYIPAWNTSKIDPVTGFVNLLDTHSLNSKEKIKAFFSKFDAIRYNKDKKWFEFNLDYDKFGKKAEDTRTKWTLCTRGMRIDTFRNKEKNSQWDNQEVDLTTEMKSLLEHYYIDIHGNLKDAISTQTDKAFFTGLLHILKLTLQMRNSITGTETDYLVSPVADENGIFYDSRSCGDQLPENADANGAYNIARKGLMLIEQIKNAEDLNNVKFDISNKAWLNFAQQKPYKNG

SEQ ID NO: 1551 - protein, 1276 aa, unidentified
  REGION 1..1276: note = Category: MG75 effectors
  REGION 1..1276: note = Description: MG75-37 effector
  source 1..1276: note = uncultivated organism sequence
MAKKFEDFTKLYPLSKTLCFEARPIGATKSNIIKNGLLDEDKHRAESYVKVKKLIDEYHKAFIDRVLADGCLCYKNEGNEDSLEEYYEFYSLSSKDKSDDTRKHFATIQQNLRSKIAETLTKDKAYANLFGNKLIESHKDKEDKNNIIDSDLIQFVSTATPDQLDSQSKDDATKLIKEFWGFTTYFTGFFENRKNMYTSEEKSTGIAYRLINENLPKFIDNMESFKKIMEKPEMSANMEELRANLEEYLNVESISEMFELNYYNMLLTQKQIDVYNAVIGGKTDEEQDIKTKGINEYVNLYNQQHKDAKLPKLKTLFKQILSDRNAISWLPEEFDKDQNVLNAIKDCYVRLTANVLGNNVLNSLLSTLSEYNTESIFIRNDIQLTNISQKMAGSWNYIQDAIKQDIKNVAPARKRKESEEDYEERISKNFKKADSYSIKYIDDCLNRAYKNNTYTVEGYFATLGATNTPSLQRENLFAQIANAYTNISSLLSSDYSAEKNLAQDKENVAKIKTLLDCIKSLQHFVKPLLGKGDESDKDERFYGELSMLWKELDTVTPLYNMVRNYMTRKPYSQKKIKLNFENPQLLGGWDANKEKDYASILLRRDGKYYLGIMDKESKKLLGKSMPSDGACYQKMVYKLLPGANKMLPKVFFAKSRLADFNPSKEIIENYNNGTHKKGKNFNLKDCHALIDYFKESIKKHEDWSKFGFKFSESTTYEDLSGFYHEVEQQGYKLSFTNVSASYIDKMVDEGKMYLFQIYNKDFSEYSKGTPNMHTLYWKALFDERNLADVVYKLNGQAELFYREKSIDCTHPTHPANHPILNKNKDNEKKESIFEYDLIKDRRYTVDKFMFHVPITMNFKSTGADNINQLVREHLKDADAPHIIGIDRGERHLLYLVVIDMHGNIKEQFTLNDIVNEYNGNTYRTNYHDLLDAREDARLKARQSWQTIENIKELKEGYLSQVIHKITQLMVKYHAIVVLEDLNMGFMRGRQKVEKQVYQKFEKMLIDKLNYYVDKKANAEQAGGLLNAYQLTSKFDSFQKLGKQSGFLLYIPAWNTSKIDPVTGFVNLLDTRYQNVEKAKAFFCKFEAIRYNSNKNWFEFTIDYNNFGQKAEGTRTKWTLCTQGKRIRTFRNPEKNSEWDNQEIDLTSALKNLFAHYHIDINGNIKEAISAQSDKTFFTELLHLLKLTLQMRNSITGTETDYLISPVADDNGYFYDSRTCNDTLPKNADANGAYNIARKGLMLIEQIKKAKDIANIKFDISNKSWLNFAQQKPYKDE

SEQ ID NO: 1552 - protein, 1273 aa, unidentified
  REGION 1..1273: note = Category: MG75 effectors
  REGION 1..1273: note = Description: MG75-38 effector
  source 1..1273: note = uncultivated organism sequence
MTKKYNDFNRLYPLSKTLRFEARPIGATLDNIIKSGMLEEDEHRAQSYVKVKKLIDEYHKAFIDRVLNDGCLTIENKGRKDSLEEYYESYMSKFNDENVSKTFKEIQENLRSVIAKKLTDDKAYANLFCKNLIESYKDKDDKKIIIDSDLIQFINTAEPSQLDSMSQEEAKELVKEFWGFTTYFVGFFDNRKNMYTSEEKSTGIAYRLVNENLPKFIDNMQAFKKAVAKPEIQANMEELYSNFAEYLNVESIQEMFQLDYYNMLLTQKQIDVYNAIIGGKTDEDHDVKIKGINEYINLYNQQHKDEKLPKLKALFKQILSDRNAISWLPEEFNRDQEVLDAIKDCYGRLSENVLGDKVLKSLLCSLSDYNLNGIFVRNDQQLTDISQKIFGNWSVIQNAIMQNIKNVAPARKRKESEEDYEKRISDIFKKADSFSIQYINDCLNEMDDNNLHAVDGYFATLGAINTPMQRENLFALIQNAYTDISDLLDTPYPENKNLAQDKTNVAKVKALLDAIKSLQHFVKPLLGKGNESNKDERFYGELDSLWEELDTLTPLYNMTRNYMTRKPYSQKKIKLNFENTQLLAGWDANKEKDNATIILRRNGLYYLAIMNKDSKKFLGKAMPSDGECYEKMVYKLLPGANKMLPKVFFAKSRINDFKPSMQIIENYNNGTHKKGKTFNINDCHDLIDFFKRSIDKHEDWSQFGFNFSDTSTYEDLSGFYREVEQQGYKLSFTNVSAYFIDKLIEEGKMYLFQIYNKDFSNYSKGTPNMHTLYWKALFDERNLADVVYKLNGQAEMFYRKKSIDYTHPTHPANHPIQNKNKDNKKKESVFEYDLIKDRRYTVDKFLFHVPITMNFKSVGSENINQQVREYLQQADDTHIIGIDRGERHLLYLVVIDMQGNIKEQFTLNEIMNEYNGNTYRTNYHDLLDTREEERLTARQSWQTIENIKELKEGYLSQVIHKITQLMVKYHAIVVLEDLNKGFMRGRQKVEKQVYQKFEKMLIDKLNYLVDKKADATQSGGLLNAYQLTSKFDSFQKLGKQSGFLFYIPAWNTSKIDPVTGFVNLLDTRYQNTEKAKAFFSKFDAIRYNADKDWFEFNLDYDKFGTKAEGTRTKWALCTQGMRIDTFRNEEKNSQWDNQEVDLTTEMKSLFEHYHINMDGNLKEEICSQTDKAFFTKLLHILKLTLQMRNSITGTETDYLVSPVADENGRFYDSRSCGDKLPENADANGAYNIARKGLMLIEQIKDADDLGNLKFDISNKAWLNFAQQKPYKNE

SEQ ID NO: 1553 - protein, 1274 aa, unidentified
  REGION 1..1274: note = Category: MG75 effectors
  REGION 1..1274: note = Description: MG75-39 effector
  source 1..1274: note = uncultivated organism sequence
MAKNFEDFKRLYSLSKTLRFEAKPIGATLNNIVKSGLLDEDEHRAASYVKVKKLIDEYHKVFIDRVLADGCLPLENKGNNNSLAEYYESYVSRAQDEDAKKKFKEIQQNLRSIIAKKLTEDKAYANLFGKNLIESYKDKTDKTKIIDSDLIKFINTAESTQLDSMSQDEAKEIVKEFWGFTTYFVGFFDNRKNMYTAEEKSTGIAYRLINENLPKFIDNMEAFKKAIARPEIQANMEELYSNFSEYLNVESIQEMFLLDYYNMLLTQKQIDVYNAIIGGKTDDEHDFKIKGINEYINLYNQQHKDDKLPKLKALFKQILSDRNAISWLPEEFNSDQEVLNAIKDCYERLAENVLGDKVLKSLLGSLADYSLDGIFIRNDLQLTDISQKMFGNWGVIQNAIMQNIKHVAPARKHKESEEDYEKRIAGIFKKADSFSISYINDCLNEEDPNNAYFVENYFATFGAVNTPTMQRENLFALVQNAYTEVAALLHSDYPTVKNLAQDKANVSKIKALLDAIKSLQHFVKPLLGKGDESDKDERFYGELASLWAELDTVTPLYNMIRNYMTRKPYSQKKIKLNFENPQLLGGWDANKEKDYATIILRRNGLYYLAIMNKDSKKLLGKAMPSDGECYEKMVYKLLPGANKMLPKVFFAKSRMEDFKPSKELVEKYNNGTHKKGKNFCIQDCHNLIDYFKQSIDKHEDWSKFGFNFSETSTYEDLSGFYREVEQQGYKLSFARVSVSYINQLVEEGKMYLFQIYNKDFSEYSKGTPNMHTLYWKALFDERNLADVVYKLNGQAEMFYRKKSIENTHPTHPANHPILNKNKDNKKKESLFGYDLIKDRRYTVDKFMFHVPITMNFKSVGSENINQDVKAYLRHADDMHIIGIDRGERHLLYLVVIDLQGNIKEQFSLNEIVNDYNGNTYHTNYHDLLDVREDERLKARQSWQTIENIKELKEGYLSQVIHKITQLMVKYHAIVILEDLNMGFMRGRQKVEKQVYQKFEKMLIEKLNYLVDKKADASVSGGLLNAYQLTSKFDSFQKLGKQSGFLFYIPAWNTSKIDPVTGFVNLLDTRYQNVEKAKSFFSKFDAIRYNKDKDWFEFNLDYDKFGKKAEGTRTKWTLCTRGMRIDTFRNKEKNSQWDNQKVDLTAEMKSLLEHYYIDIYGNLKDAISAQTDKAFFTGLLHILKLTLQMRNSITGTEIDYLVSPVVDENGIFYDSRSCGDQLPENADANGAYNIARKGLMLVEQIKDAEDLDNVKFDISNKAWLNFAQQKPYKNG

SEQ ID NO: 1554 - protein, 1274 aa, unidentified
  REGION 1..1274: note = Category: MG75 effectors
  REGION 1..1274: note = Description: MG75-40 effector
  source 1..1274: note = uncultivated organism sequence
MAKIFEDFKRLYPLSKTLRFEAKPIGATLDNIIKSGLLDEDEHRAASYVRVKKLIDEYHKVFIDRVLDNGCLPLKNEGHNNSLTEYYESYVTKSQNEDAKKVFKEIQQNLRSIIAKKLTEDKAYANLFGKNLIESYKDKTDKTKIIDSDLIKFINTAESTQLDSMSQDEAKELVKEFWGFTTYFVGFYDNRKNMYTAEEKSTGIAYRLVNENLPKFIDNMEAFKKAIARPEIQANMEELYSDFSEYLNVESVQEMFQLDYYNMLLTQKQIDVYNAIIGGKTDDEHDVKIKGINEYINLYNQQHKDDKLPKLKALFKQILSDRNAISWLPEEFNGDQEVLNAIKDCYERLSENVLGDKVLKSLLGSLSDYSLDGIFIRNDLQLTDISQKMFGNWCVIQNAIMQNIKHVAPARKHKESEEDYEKRIAGIFKKVDSFSISFINDCLNEADPNNAYFVENYFATFGAVNTPTMQRENLFALVQNAYTEVAALLHSDYPTAKHLAQDKVNVAKIKALLDAIKSLQHFVKPLLGKGDESDKDERFYGELASLWAELDTVTPLYNMIRNYMTRKPYSQKKIKLNFENPQLLGGWDANKEKDYATIILRRDGLYYLAIMNKESKKLLGKAMPSDGECYEKMVYKLLPGANKMLPKVFFAKSRMEDFKPSKELVEKYNNGTHKKGKNFNIQDCHNLIDYFKQSISKHEDWGKFGFNFSDTSTYEDLSGFYREVEQQGYKLSFTRVSVSYISQLVEEGKMYLFQIYNKDFSEYSKGTPNMHTLYWKALFDERNLADVVYKLNGQAEMFYRKKSIENSHPTHPANHPILNKNKDNKKKESLFDYDLIKDRRYTVDKFMFHVPITMNFKSSSSENINQDVKAYLRHADDMHIIGIDRGERHLLYLVVIDLQGNIKEQYSLNEIVNEYNGNTYHTNYHDLLDVREEERLKARQSWQTIENIKELKEGYLSQVIHKITQLMVKYHAIVVLEDLNMGFMRGRQKVEKQVYQKFEKMLIDKLNYLVDKKADASVSGGLLNAYQLTSKFDSFQKLGKQSGFLFYIPAWNTSKIDPITGFVNLLDTRYQNVEKAKVFFSKFDAIRYNKDKDWFEFNLDYDKFGKKAEGTRTKWTLCTRGMRIDTFRNKEKNSQWDNQEVDLTAEMKSLLEHYYIDIHGNLKDAISAQTDKAFFTGLLHILKLTLQMRNSITGTETDYLVSPVADENGIFYDSRSCGDELPENADANGAYNIARKGLMMIEQIKEAKDLDNLKFDISNKSWLNFAQQKPYKNE

SEQ ID NO: 1555 - protein, 1177 aa, unidentified
  REGION 1..1177: note = Category: MG75 effectors
  REGION 1..1177: note = Description: MG75-41 effector
  source 1..1177: note = uncultivated organism sequence
MQKKAFEENQQNLRSIIAKKLTEDKAYANLFGKNLLESYKDKTDKTKIIDSDLIKFINTAESTQLDSMSQDEAKEIVKEFWGFTTYFVGFFDNRKNMYTAEEKSTGIAYRLINENLPKFIDNMEAFKKAIARPEIQADMEELYSNFSEYLNVESIQEMFLLDYYNMLLTQKQIDVYNAIIGGKTDDEHDVKIKGINEYINLYNQQHKDDKLPKLKALFKQILSDRNAISWLPEEFNSDQEVLNAIKDCYERLSENVLGDKVLKSMLGSLADYSLDGIFIRNDLQLTDISQKMFGNWSVIQNAIMQNIKHVAPARKHKESEEEYENRIAGIFKKADSFSISYIDACLNETDPNNAYFVENYFATLGAVDTPTMQRENLFALVQNAYTEITALLHSDYPTEKNLAQDKANVAKIKALLDAIKSLQHFVKPLLGKGDESDKDERFYGELASLWAELDTMTPLYNMIRNYMTRKPYSQKKIKLNFENPQLLGGWDANKEKDYATIILRRNGLYYLAIMNKDSKKLLGKAMPSDGECYEKMVYKLLPGANKMLPKVFFAKSRMEDFKPSKELVEKYNNGTHKKGKNFNIQDCHNLIDYFKQSIDKHEDWSKFGFKFSDTSTYEDLSGFYREVEQQGYKLSFARVSVSYINQLVEEGKMYLFQIYNKDFSEYSKGTPNMHTLYWKALFDERNLADVVYKLNGQAEMFYRKKSIENTHPTHPANHPILNKNKDNKKKESLFEYDLIKDRRYTVDKFMFHVPITMNFKSVGSENINQDVKAYLRHADDMHIIGIDRGERHLLYLVVIDLQGNIKEQFSLNEIVNDYNGNTYHTNYHDLLDVREDERLKARQSWQTIENIKELKEGYLSQVIHKITQLMVKYHAIVVLEDLNMGFMRGRQKVEKQVYQKFEKMLIEKLNYLVDKKADASVSGGLLNAYQLTSKFDSFQKLRKQSGFLFYIPAWNTSKIDPITGFVNLLDTRYQNVEKAKAFFSKFDAIRYNKDKEWFEFDLDYDKFGRKAEGTRTKWTLCTRGMRIDTFRNKEKNSQWDNQEIDLTAEMKSLLEHYYIDIQGNLKEAICTQTDKAFFTGLLHILKLTLQMRNSITGTQTDYLVSPVADENGIFYDSRSCGDSLPENADANGAYNIARKGLMLIEKIKNAEDLDTIKFDISNKAWLNFAQQKPYKNG

SEQ ID NO: 1556 - protein, 886 aa, unidentified
  REGION 1..886: note = Category: MG75 effectors
  REGION 1..886: note = Description: MG75-42 effector
  source 1..886: note = uncultivated organism sequence
MFGNWGVIQNAVMQNIKRVAPARKHKESEEDYEKRIAGIFKKADSFSISYINDCLNEADPNNAYFVENYFATFGAVNTPTMQRENLFALVQNAYTEITALLHSDYPTEKNLAQDKANVAKIKALLDAIKSLQHFVKPLLGKGDESDKDERFYGELASLWAELDTMTPLYNMIRNYMTRKPYSQKKIKLNFENPQLLGGWDANKEKDYATIILRRNGLYYLAIMNKDSKKLLGKAMPSDGECYEKMVYKLLPGANKMLPKVFFAKSRMEDFKPSKELVEKYNNGTHKKGKNFNIQDCHNLIDYFKQSIDKHEDWSKFGFKFSDTSTYEDLSGFYREVEQQGYKLSFARVSVSYINQLVEEGKMYLFQIYNKDFSEYSKGTPNMHTLYWKALFDERNLADVVYKLNGQAEMFYRKKSIENTHPTHPANHPILNKNKDNNKKESLFEYDLIKDRRYTVDKFMFHVPITMNFKSSGSENINQDVKAYLCHADDMHIIGIDRGERHLLYLVVIDLQGNIKEQFSLNEIVNDYNGNTYHTNYHDLLDVREDERLKARQSWQTIENIKELKEGYLSQVIHKITQLMVKYHAIVVLEDLNMGFMRGRQKVEKQVYQKFEKMLIEKLNYLVDKKADASVSGGLLNAYQLTSKFDSFQKLGKQSGFLFYIPAWNTSKIDPVTGFVNLLDTRYQNVEKAKSFFSKFDAIRYNKDKEWFEFNLDYDKFGKKAEGTRTKWTLCTRGMRIDTFRNKEKNSQWDNQEVDLTAEMKSLLEHYYIDIHSNLKDAISAQTDKAFFTGLLHILKLTLQMRNSITGTETDYLVSPVVDENGIFYDSRSCGDELPENADANGAYNIARKGLMMIEQIKDAKDLDNLKFDISNKAWLNFAQQKPYKNG

SEQ ID NO: 1557 - protein, 1321 aa, unidentified
  REGION 1..1321: note = Category: MG75 effectors
  REGION 1..1321: note = Description: MG75-43 effector
  source 1..1321: note = uncultivated organism sequence
MEFDDFKRLYPLSKTLRFEAKPIGATLNNIIKSGLLEEDEHRAQSYVKVKKLIDEYHKVFIDRVLDDGCLTIENKGKKDSLEEYYESYMSKSNDENVSKTFKEIQENLRSVIAKKLTDDNAYANLFGNKLIESYKDKDDKKKIIDSDLIQFINTAEPSKLDSMSQDEAKELVKEFWGFTTYFEGFHKNRKNMYTSEEKSTGIAYRLVNENLPKFIDNMEAFKKAIAKPEIQANMEELYSNFAEYLNVESIQEMFQLDYYNMLLTQKQIDDYNAIIGGKTDEDHDVKIKGINEYINLYNQQHKDEKLPKLKALFKQILSDRNAISWLPEEFNSDQDVLNAIKDCYERLSENVLGDKVLKSLLCSLSDYNLNGIFVRNDLQLTDISQKMFGNWNVIQNAIMQNFFFKKVAPARKRKESEEDYEKRISDIFKKTDSFSIQYINDCLNEMDDNNLHAVDGYFATLGAVNTPTMQRENLFALIQNAYTDISDLLDTPYPENKNLAQDKTNVAKVKALLDAIKSLQHFVKPLLGKGDESDKDERFYGELASLWTELDTVTLLFNMVHNYMTRKPYSQKKIKLNYKNTQLLAGWDANKEKEHAAIILRRNGMYYLAIMDKDSKNLLDKAMPSDGECYEKMVYKQFDISKQLPKCTTELKRVRKALVEDAKRSCLLSDSKDWNKPLNVTRKLWELNNYVWDKKKADWVLRKKENETRPKKFHKKYLELTSDKNGYNQAKNDWIKFTKEFLSSYKKVEDYDIHYKKRYNSVDELYKQLNSDFYTISFTYVSVSFIDKLVNEGKMYLFKIYNKDFSNYSKGTPNMHTLYWKALFDERNLADVVYKLNGEAEMFYRKKSINNTHPTHPANHPIQNKNKDNKKKESVFEYDLVKDYRYTEDKFLFHVPITMNFKSVGSENINQQVKEYLQQADDTHIIGIDRGERHLLYLVVIDMEGNIKEQFSLNEIVNEYNGNTYRTNYHDLLDVCADKRLKASQSWQTIENIKELKEGYLSQAIHKITQLMVKYHAVVVLEDLNKGFMRGRQKVEKQVYQKFEKMLIDKLNYLVDKKADAAQSGGLLNAYQLTSKFDSFQKLGKQSGFLFYIPAWNTSKIDPVTGFVNLFDTRYTNADKALEFFSKFDAIRYNEEKDWFEFEFDYDKFTQKAHGTRTKWTLCTYGMRLRSFKNPAKQYNWDSEVVALTDEFKRILEEAGIDIHENLKDAIRNLKGKKQKYLEPLMQFMKLLLQLRNSKAGTDEDYILSPVADENGIFYDSRSCGDELPENADANGAYNIARKGLMMIEQIKDAKDLDNLKFDISNKAWLNFAQQKPYKNG

SEQ ID NO: 1558 - protein, 1274 aa, unidentified
  REGION 1..1274: note = Category: MG75 effectors
  REGION 1..1274: note = Description: MG75-44 effector
  source 1..1274: note = uncultivated organism sequence
MAKNFEDFKRLYPLSKTLRFEAKPIGATLDNMVKSGLLDEDEHRAASYVKVKKLIDEYHKVFIDRVLDNGCLPLKNEGHNNSLTEYYESYVTKSQNEDAKKVFKEIQQNLRSIIAKKLTEDKAYANLFGKNLIESYKDKTDKTKIIDSDLIKFINTAESTQLDSMSQDEAKELVKEFWGFTTYFVGFYDNRKNMYTAEEKSTGIAYRLVNENLPKFIDNMEAFKKAIARSEIQANMEELYSDFSEYLNVESVQEMFQLDYYNMLLTQKQIDVYNAIIGGKTDDEHDVKIKGINEYINLYNQQHKDDKLPKLKALFKQILSDRNAISWLPEEFNGDQEVLNAIKDCYERLSENVLGDKVLKSLLGSLSDYSLDGIFIRNDLQLTDISQKMFGNWCVIQNAIMQNIKHVAPARKHKESEEDYEKRIAGIFKKVDSFSISFINDCLNEADPNNAYFVENYFATFGAVNTPTMQRENLFALVQNAYTEVAALLHSDYPTAKHLAQDKVNVAKIKALLDAIKSLQHFVKPLLGKGDESDKDERFYGELASLWAELDTVTPLYNMIRNYMTRKPYSQKKIKLNFENPQLLGGWDANKEKDYATIILRRDGLYYLAIMNKESKKLLGKAMPSDGECYEKMVYKLLPGANKMLPKVFFAKSRMEDFKPSKELVEKYNNGTHKKGKNFNIQDCHNLIDYFKQSISKHEDWGKFGFNFSDTSTYEDLSGFYREVEQQGYKLSFTRVSVSYISQLVEEGKMYLFQIYNKDFSEYSKGTPNMHTLYWKALFDERNLADVVYKLNGQAEMFYRKKSIENTHPTHPANHPILNKNKDNKKKESLFDYDLIKDRRYTVDKFMFHVPITMNFKSSGSENINQDVKAYLRHADDMHIIGIDRGERHLLYLVVIDLQGNIKEQYSLNEIVNEYNGNTYHTNYHDLLDVREEERLKARQSWQTIENIKELKEGYLSQVIHKITQLMVKYHAIVVLEDLNMGFMRGRQKVEKQVYQKFEKMLIDKLNYLVDKKADASVSGGLLNAYQLTSKFDSFQKLGKQSGFLFYIPAWNTSKIDPVTGFVNLLDTRYQNVEKAKVFFSKFDAIRYNKDKDWFEFNLDYDKFGKKAEGTRTKWTLCTRGMRIDTFRNKEKNSQWDNQKVDLTAEMKSLLEHYYIDIHGNLKDAISAQTDKAFFTGLLHILKLTLQMRNSITGTETDYLVSPVADENGIFYDSRSCGDELPENADANGAYNIARKGLMMIEQIKDAKDLDNLKFDISNKSWLNFAQQKPYKNE

SEQ ID NO: 1559 - protein, 1272 aa, unidentified
  REGION 1..1272: note = Category: MG75 effectors
  REGION 1..1272: note = Description: MG75-45 effector
  source 1..1272: note = uncultivated organism sequence
MKFDDFKKLYSLSKTLRFEAKPVGSTLKNIIESGLLEEDEHRAQSYVKVKKLIDEYHKVFIDRVLNDGCLTIENKGKKDSLEEYYESYMSKSNDENVSKTFKEIQENLRSVIAKKLTDDNAYANLFGNKLIESYKDKDEKNKIIDSDLIQFINTAEPSQLDSMSQDEAKELVKEFWGFTTYFVGFFDNRKNMYTSEEKSTGIAYRLVNENLPKFIDNMEAFKKAIAKPEIQASMEELYSNFAEYLNVESIQEMFQLDYYNMLLTQKQIDVYNAIIGGKTDEEHDVKIKGINEYINLYNQQHKDEKLPKLKALFKQILSDRNAISWLPEEFNSDQEVLNAIDDCYKRLSENVLGDKVLKSLLCSLDDYNLDGIFVRNDLQLTDISQKMFGNWSVIQSAIMQNIKNVAPARKRKESEEDYEKRISDIFKKADSFSIQYINDCLNEMDNNNLHAVDGYFATLGAVNTPTMQRENLFALIQNAYTDISNLLETPYPENKNLAQDKTNVAKVKALLDAIKSLQHFVKPLLGKGDESDKDERFYGELASLWTELDTVTPLYNMIRNYMTRKPYSEKKIKLNFENPQLLGGWDANKEKDYATIILRRNGMYYLAIMDKDSKKLLGKTMPSNGECYEKMVYKLLPGANKMLPKVFFAKSRINDFKPSKLIVENYNNGTHKKGKNFNINDCHNLIDYFKQSIDKHEDWSKFGFNFSDTSTYEDLSGFYREVEQQGYKLSFTNVSVSFIDKLVDEGKMYLFQIYNKDFSDFSKGTPNMHTLYWKALFDERNLADVVYKLNGQAEMFYRKKSINNTHPTHPANHPIQNKNKDNKKKESVFEYDLIKDRRYTVDKFLFHVPITMNFKSVGSENINQQVREYLQQADDTHIIGIDRGERHLLYLVVIDMQGNIKEQFTLNEIVNEYNGNTYRTNYHDLLDTREEERLTARQSWQTIENIKELKEGYLSQVVHKITQLMVKYHAVVVLEDLNKGFMRGRQKVEKQVYQKFEKMLIDKLNYLVDKKADAAQSGGLLNAYQLTSKFDSFQKLGKQSGFLFYIPAWNTSKIDPVTGFVNLLDTRYQNTEKAKAFFSRFDAIRYNANKDWFEFYLDYDKFCTKAEGTRTRWTLCTQGSRISTFRNAEKNSQWDNLEVDLTREMKSLFEHYHINICGNLKEEICLQTDKAFFTGLLHMLKLTLQMRNNITGTETDYLISPVADENGTFYDSRSCGDTLPKNADANGAYNIARKGLMFIGQIKETKDLANFKYDISNKAWLNFAQQKPYKNE

SEQ ID NO: 1560 - protein, 1307 aa, unidentified
  REGION 1..1307: note = Category: MG75 effectors
  REGION 1..1307: note = Description: MG75-46 effector
  source 1..1307: note = uncultivated organism sequence
MAKKFEDFTKLYPLSKTLCFEARPIGATKSNIIKNGLLDEDKHRAESYVKVKKLIDEYHKAFIDRVLADGCLCYKNEGNEDSLEEYYEFYSLSSKDKSDDTRKHFATIQQNLRSKIAETLTKDKAYANLFGNKLIESHKDKEDKNNIIDSDLIQFVSTATPDQLDSQSKDDATKLIKEFWGFTTYFTGFFENRKNMYTSEEKSTGIAYRLINENLPKFIDNMESFKKIMEKPEMSANMEELRANLEEYLNVESISEMFELNYYNMLLTQKQIDVYNAVIGGKTDEEQDIKTKGINEYVNLYNQQHKDAKLPKLKTLFKQILSDRNAISWLPEEFDKDQNVLNAIKDCYVRLTANVLGNNVLNSLLSTLSEYNTESIFIRNDIQLTNISQKMAGSWNYIQDAIKQDIKNVAPARKRKESEEDYEERISKNFKKADSYSIKYIDDCLNRAYKNNTYTVEGYFATLGATNTPSLQRENLFAQIANAYTNISSLLSSDYSAEKNLAQDKENVAKIKTLLDCIKSLQHFVKPLLGKGDESDKDERFYGELSMLWKELDTVTPLYNMVRNYMTRKPYSQKKIKLNFENPQLLGGWDANKEKDYASILLRRDGKYYLGIMDKESKKLLGKPMPSDGDYYEKMVYKFFKDITTMIPKCSTQLKAVKEHFSKSNADFVLSGKNFNTPLIISKEVFELNNVKYGQFKKFQKDYVATTNDIEGYAHAVKIWIKFCMDFLGTYDSTISYDLSSLASNEYTSLDTFYQDVNRLLYAVSFIKVSVSHIDSLVEEGKMYLFQIYNKDFSEYSKGTPNMHTLYWKALFDERNLADVVYKLNGQAELFYREKSIDCTHPTHPANHPILNKNKDNEKKESIFEYDLIKDRRYTVDKFMFHVPITMNFKSTGADNINQLVREHLKDADAPHIIGIDRGERHLLYLVVIDMHGNIKEQFTLNDIVNEYNGNTYRTNYHDLLDAREDARLKARQSWQTIENIKELKEGYLSQVIHKITQLMVKYHAIVVLEDLSMGFMRGRQKVEKQVYQKFEKMLIDKLNYYVDKKANAEQAGGLLNAYQLTSKFDSFQKLGKQSGFLLYIPAWNTSKIDPVTGFVNLLDTRYQNVEKAKAFFCKFEAIRYNSNKNWFEFTIDYNNFGQKAEGTRTKWTLCTQGKRIRTFRNPEKNSEWDNQEIDLTSALKNLFAHYHIDINGNIKEAISAQSDKTFFTELLHLLKLTLQMRNSITGTETDYLISPVADDNGYFYDSRTCNDTLPKNADANGAYNIARKGLMLIEQIKKAKDIANIKFDISNKSWLNFAQQKPYKDE

SEQ ID NO: 1561 - protein, 1270 aa, unidentified
  REGION 1..1270: note = Category: MG75 effectors
  REGION 1..1270: note = Description: MG75-47 effector
  source 1..1270: note = uncultivated organism sequence
MEFDDFKRLYPLLKTLRFEAKPIGATLKNIIKSGLLEEDEHRAQSYVKVKKLIDEYHKVFIDRVLNDGCLTIENKGKQDSLEEYFESYISKSNDENANKAFKEIQGNLRSLIANKLTKDKGYANLFGKNLIESYKDKDDTKKIIDSDLIQFINTAEPSKLDSMSQDEAKELVKEFRGFTTYFVGFFDNRKNMYTSEEKSTGIAYRLVNENLPKFIDNMEAFKKAIAKPEIQANMEELYSNFAEYLNVESIQEMFKLDYYNMLLTQKQIDVYNAIIGGKTDEDHDVKIKGINEYINLYNQQHKDEKLPKLKALFKQILSDRNAISWLPEEFNSDQDVLNAIKDCYERLSENVLGDKVLKSLLCSLSDYNLNGIFVRNDLQLTDISQKTFGNWSVIQNAIMQNIKNVAPARKRKESEEDYEKRISDIFKKADSFSIQYINDCLNEMDNNNLHAVDGYFATLGAVNTPTMQRENLFALIQNAYTDISDLLDTPYPENKNLAQDKTNVAKVKALLDAIKSLQHFVKPLLGMGDESDKDERFYGELASLWTELDTVTPLYNMIRNYMTRKPYSEKKIKLNFENPQLLGGWDANKEKDYATIILRRNGMYYLAIMDKDSKKLLGKTMPSDGECYEKMVYKLLPGANKMLPKVFFAKSRINDFKPSKKIVENYNNGTHKKGKNFNINDCHDLIDYFKQSIDKHEDWSKFGFNFSDTSTYEDLSGFYREVEQQGYKLSFTNISVSFIDKLVDEGKMYLFQIYNKDFSDYSKGTPNMHTLYWKALFDERNLADVVYKLNGQAEMFYRKKSIDYTHPTHPANHPIQNKNKDNKKKESVFEYDLVKDRRYTVDKFLFHVPINMNFKSVGSENINQQVREYLQQADDTHIIGIDRGERHLLYLVVIDMQGNIKEQFTLNEIVNEYNGNTYRTNYHDLLDTREEERLTARQSWQTIENIKELKEGYLSQVVHKITQLMVKYHAVVVLEDLNKGFMRGRQKVEKQVYQKFEKMLIDKLNYLVDKKADAAQSGGLLNAYQLTSKFDSFQKLGKQSGFLFYIPAWNTSKIDPVTGFVNLLDTRYQNTEKSKAFFSKFDAIRYNADKDWFEFNLDYDKFGTKAEGTRTKWILCTQGNRICRNADKNPQWDNPKIDLTRELKSLFEHYNINICGNLKEEICSQTDKAFFTGLLHILKLTLQMRNSITGTETDYLVSPVADENGVFYDSRSCGDRLPENADANGAYNIARKGLMLIGQIKETKDLANFKYDISNKAWLNFAQQKPYKNE

SEQ ID NO: 1562 - protein, 1274 aa, unidentified
  REGION 1..1274: note = Category: MG75 effectors
  REGION 1..1274: note = Description: MG75-48 effector
  source 1..1274: note = uncultivated organism sequence
MAKNFEDFKRLYPLSKTLRFEAKPIGATLDNIIKSGLLDEDEHRAASYVKMKKLIDEYHKVFIDRVLDNGCLPLKNEGQNNSLTEYYESYVSKSQNEDAKKAFEENQQNLRSIVAKKLTDDKAYANLFGKNLIESYKDKEDKKKIIDSDLIQFICTAEATQLDSMSQDEAKEIVKEFWGFTTYFVGFFDNRKNMYTAEEKSTGIAYRLINENLPKFIDNMEAFKKAIARPEIQANMEELYSNFSEYLNVESIQEMFLLDYYNMLLTQKQIDVYNAIIGGKTDDEHDVKIKGINEYINLYNQQHKDDKLPKLKALFKQILSDRNAISWLPEEFNSDQEVLNAIKDCYERLSENVLGDKVLKSLLGSLSDYTLDGIFIRNDLQLTDISQKMFGNWGVIQNAIMQNIKRVAPARKHKESEEDYEKRIAGIFKKADSFSISYINDCLNEADPNNAYFVENYFATFGAVNTPTMQRENLFALVQNAYTEVASLLHSDYPTAKHLAQDKANVAKIKALLDAIKSLQHFVKPLLGKGDESDKDERFYGELASLWAELDTVTPLYNMIRNYITRKPYSQKKIKLNFENPQLLGGWDANKEKDYATIILRRNGLYYLAIMNKESKKLLGKAMPSDGECYEKMVYKLLPGANKMLPKVFFAKSRMEDFKPSKELVEKYNNGTHKKGKNFNIQDCHNLIDYFKQSINKHEDWGKFGFNFSDTSTYEDLSGFYREVEQQGYKLSFARVSVSYINQLVEEGKMYLFQIYNKDFSEYSKGTPNMHTLYWKALFDERNLADVVYKLNGQAEMFYRKKSIENTHPTHPANHPILNKNKDNKKKESLFDYDLIKDRRYTVDKFMFHVPITMNFKSSGSENINQDVKAYLRHADDMHIIGIDRGERHLLYLVVIDLQGNIKEQYSLNEIVNEYNGNTYHTNYHDLLDVREEERLKARQSWQTIENIKELKEGYLSQVIHKITQLMVKYHAIVVLEDLNMGFMRGRQKVEKQVYQKFEKMLIDKLNYLVDKKADASVSGGWLNAYQLTSKFDSFQKLGKQSGFLFYIPAWNTSKIDPVTGFVNLLDARYQNVEKAKAFFSKFDAIRYNKDKDWFEFNLDYDKFGKKAEGTRTKWTLCTRGMRIDTFRNKEKNSQWDNQEVDLTAEMKSLLEHYYIDIHGNLKDAISAQTDKAFFTGLLHILKLTLQMRNSITGTETDYLVSPVADENGIFYDSRSCGEELPENADANGAYNIARKGLMLIEQIKGAEDLGNLKFDISNKAWLNFAQQKPYKNG

SEQ ID NO: 1563 - protein, 1274 aa, unidentified
  REGION 1..1274: note = Category: MG75 effectors
  REGION 1..1274: note = Description: MG75-49 effector
  source 1..1274: note = uncultivated organism sequence
MAKNFEDFKRLYPLSKTLRFEAKPIGATLDNIVKSGLLDEDEHRAASYVKVKKLIDEYHKVFIDRVLDDGCLPLENKGNNNSLAEYYESYVSRAQDEDAKKKFKEIQQNLRSVIAKKLTEDKAYANLFGNKLIESYKDKEDKKKIIDSDLIQFINTAESTQLDSMSQDEAKELVKEFWGFVTYFYGFFDNRKNMYTAEEKSTGIAYRLVNENLPKFIDNIEAFNRAITRPEIQENMGVLYSDFSEYLNVESIQEMFQLDYYNMLLTQKQIDVYNAIIGGKTDDEHDVKIKGINEYINLYNQKHKDDKLPKLKSLFKQILSDRNAISWLPEEFNSDQEVLNAIKDCYERLSENVLGDKVLKSMLGSLADYSLDGIFIRNDLQLTDISQKMFGNWSVIQNAIMQNIKHVAPARKHKESEEEYENRIAGIFKKADSFSISYIDACLNETDPNNAYFVENYFATLGAVDTPTMQRENLFALVQNAYTEITALLHSDYPTEKNLAQDKANVAKIKALLDAIKSLQHFVKPLLGKGDESDKDERFYGELASLWAELDTMTPLYNMIRNYMTRKPYSQKKIKLNFENPQLLGGWDANKEKDYATIILRRNGLYYLAIMNKDSKKLLGKAMPSDGECYEKMVYKLLPGANKMLPKVFFAKSRMEDFKPSKELVEKYNNGTHKKGKNFNIQDCHNLIDYFKQSIDKHEDWSKFGFKFSDTSTYEDLSGFYREVEQQGYKLSFARVSVSYINQLVEEGKMYLFQIYNKDFSEYSKGTPNMHTLYWKALFDERNLADVVYKLNGQAEMFYRKKSIENTHPTHPANHPILNKNKDNNKKESLFEYDLIKDRRYTVDKFMFHVPITMNFKSSGSENINQDVKAYLCHADDMHIIGIDRGERHLLYLVVIDLQGNIKEQFSLNEIVNDYNGNTYHTNYHDLLDVREDERLKARQSWQTIENIKELKEGYLSQVIHKITQLMVKYHAIVVLEDLNMGFMRGRQKVEKQVYQKFEKMLIEKLNYLVDKKADASVSGGLLNAYQLTSKFDSFQKLGKQSGFLFYIPAWNTSKIDPVTGFVNLLDTRYQNVEKAKSFFSKFDAIRYNKDKEWFEFNLDYDKFGKKAEGTRTKWTLCTRGMRIDTFRNKEKNSQWDNQEVDLTAEMKSLLEHYYIDIHSNLKDAISAQTDKAFFTGLLHILKLTLQMRNSITGTETDYLVSPVVDENGIFYDSRSCGDELPENADANGAYNIARKGLMMIEQIKDAKDLDNLKFDISNKAWLNFAQQKPYKNG

SEQ ID NO: 1564 - protein, 1271 aa, unidentified
  REGION 1..1271: note = Category: MG75 effectors
  REGION 1..1271: note = Description: MG75-50 effector
  source 1..1271: note = uncultivated organism sequence
MKFDDFKKLYSLSKTLRFESKPVGSTLKNIIESGLLEEDEHRAQSYVKVKKLIDEYHKVFIDRVLNDGCLTIENKGKKDSLEEYYESYMSKSNDENVSKTFKDIQENLRSVIAKKLTDDKAYANLFGKNLIESYKDKDDKNKIIDSDLIQFINTAEPSQLDSMSQDEAKELVKEFWGFTTYFVGFFDNRKNMYTSEEKSTGIAYRLVNENLPKFIDNMEAFKKAIAKPEIQANIEELYSNFAEYLNVESIQEMFQLDYYNMLLTQKQIDVYNAIIGGKTDEDHDVKIKGINEYINLYNQQHKDEKLPKLKALFKQILSDRNAISWLPEEFNSDQEVLDAIKDCYERLSENVLGDKVLKSLLCSLSDYNLNGIFVRNDLQLTDISQKMFGNWSVIQNAIMQNIKNVAPARKRKESEEDYEKRISDIFKKADSFSIQYINDCLNEMDDNNLHAVDGYFATLGAVNTPTMQRENLFALIQNAYTDISDLLDTPYPENKNLAQDKTNVAKVKALLDAIKSLQHFVKPLLGMGDESDKDERFYGELASLWTELDTVTPLYNMIRNYMTRKPYSEKKIKLNFENPQLLGGWDANKEKDYATIILRRNGMYYLAIMDKDSKKLLGKTMPSDGECYEKMVYKLLPGANKMLPKVFFAKSRINDFKPSKKIVENYNNGTHKKGKNFNINDCHDLIDYFKQSIDKHEDWSKFGFNFSDTSTYEDLSGFYREVEQQGYKLSFTNISVSFIDKLVDEGKMYLFQIYNKDFSDYSKGTPNMHTLYWKALFDERNLADVVYKLNGQAEMFYRKKSIDYTHPTHPANHPIQNKNKDNKKKESVFEYDLVKDRRYTVDKFLFHVPITMNFKSVGSENINQQVREYLQQADDTHIIGIDRGERHLLYLVVIDMQGNIKEQFTLNEIVNEYNGSTYRTNYHDLLDTREEERLTARQSWQTIENIKELKEGYLSQVIHKITQLMVKYHAVVVLEDLNKGFMRGRQKVEKQVYQKFEKMLIDKLNYLVDKKADAAQSGGLLNAYQLTSKFDSFQKLGKQSGFLFYIPAWNTSKIDPVTGFVNLLDTRYQNTEKAKAFFSKFDAIRYNADKDWFEFNLDYDKFGTKAEGTRTTWTLCTQGNRICTFRNAEKNSQWDNQEVDLTGELKSLFEHYNINICGNLKEEICSQTEKAFFTGLLHILKLTLQMRNSITGTETDYLVSPVADENGVFYDSRSCGDRLPENADANGAYNIARKGLMLIGQIKETKDLADFKYDISNKAWLNFAQQKPYKK

SEQ ID NO: 1565 - protein, 1219 aa, unidentified
  REGION 1..1219: note = Category: MG75 effectors
  REGION 1..1219: note = Description: MG75-51 effector
  source 1..1219: note = uncultivated organism sequence
MIDEYHKVFIDRVLNDGCLTIENKGKQDSLEEYFESYISKSNDENANKAFKEIQGNLRSLIANKLTKDKGYANLFGKNLIESYKDKDDTKKIIDSDLIQFINTAEPSKLDSMSQDEAKELVKEFRGFTTYFVGFFDNRKNMYTSEEKSTGIAYRLVNENLPKFIDNMEAFKKAIAKPEIQANMEELYSNFAEYLNVESIQEMFKLDYYNMLLTQKQIDVYNAIIGGKTDEDHDVKIKGINEYINLYNQQHKDEKLPKLKALFKQILSDRNAISWLPEEFNSDQDVLNAIKDCYERLSENVLGDKVLKSLLCSLSDYNLNGIFVRNDLQLTDISQKTFGNWSVIQNAIMQNIKNVAPARKRKESEEDYEKRISDIFKKADSFSIQYINDCLNEMDNNNLHAVDGYFATLGAVNTPTMQRENLFALIQNAYTDISDLLDTPYPENKNLAQDKTNVAKVKALLDAIKSLQHFVKPLLGMGDESDKDERFYGELASLWTELDTVTPLYNMIRNYMTRKPYSEKKIKLNFENPQLLGGWDANKEKDYATIILRRNGMYYLAIMDKDSKKLLGKTMPSDGECYEKMVYKLLPGANKMLPKVFFAKSRINDFKPSKKIVENYNNGTHKKGKNFNINDCHDLIDYFKQSIDKHEDWSKFGFNFSDTSTYEDLSGFYREVEQQGYKLSFTNISVSFIDKLVDEGKMYLFQIYNKDFSDYSKGTPNMHTLYWKALFDERNLADVVYKLNGQAEMFYRKKSIDYTHPTHPANHPIQNKNKDNKKKESVFEYDLVKDRRYTVDKFLFHVPINMNFKSVGSENINQQVREYLQQADDTHIIGIDRGERHLLYLVVIDMQGNIKEQFTLNEIVNEYNGNTYRTNYHDLLDTREEERLTARQSWQTIENIKELKEGYLSQVVHKITQLMVKYHAVVVLEDLNKGFMRGRQKVEKQVYQKFEKMLIDKLNYLVDKKADAAQSGGLLNAYQLTSKFDSFQKLGKQSGFLFYIPAWNTSKIDPVTGFVNLLDTRYQNTEKSKAFFSKFDAIRYNADKDWFEFNLDYDKFGTKAEGTRTKWILCTQGNRICRNADKNPQWDNPKIDLTRELKSLFEHYNINICGNLKEEICSQTDKAFFTGLLHILKLTLQMRNSITGTETDYLVSPVADENGVFYDSRSCGDRLPENADANGAYNIARKGLMLIGQIKETKDLANFKYDISNKAWLNFAQQKPYKNE

SEQ ID NO: 1566 - protein, 1235 aa, unidentified
  REGION 1..1235: note = Category: MG75 effectors
  REGION 1..1235: note = Description: MG75-52 effector
  source 1..1235: note = uncultivated organism sequence
METFSGFTNLYPLSKTLRFRLIPVGETLKHFIGSGILEEDQHRAESYVKVKAIIDDYHRAYIENSLSGFELPLESTGKFNSLEEYYLYHNIRNKTEKNQKSLSTVRFNLRKQIVKQLTKNELYKRIYKQNLIKKDLIDFVKNEPDANEKIALISEFRNFTVYFKGFHENRRNMYLDEEKSTSIAFRLIHENLPKFIDNMEVFAKIQNTSISENFDVIQKELCPELVTLCEMFKLGYFNKTLSQKQINAYNTVIGELNKYLNHYNQQHKQEKLPKMKLLFKQILSDRESTSWLPERFANDGQVIGAIVNFWNTIHDTVLAEGGLKTIIASLGSYSLEGIFLKNDLQLTDVSQKATGSWSKITAAIKQKLEDMNPQTKKESYETYQGRIDKLFKFYKSFSLAFINECLRGEYKIEDYFLKLGAVNSSSLQKENHFSHILNTYTDVKEVIGFYSESTDTKLIRDNGSIQKIKLFLDAVKDLQAYVKPLLGNGDETGKDERFYGDLIEYWSQLDLITPLYNMVRNYVTQKPYSVDKIKLNFRNPTLLDGWDLNQETANTSVILRRDGKYYLAIMNNKSRKVFLKPSGTGKDCYEKMEYKLIPGAYKMLPKVFFAKSKINKFMPDEYLLSNYKKGTHKKNNANFDLDDCHTLIDFFKRSLNKHEDWKNFDFKFSDTSTYTDINNFYKEIDNQAYKLSFRPVPSDFVDKLVEEGKIFLFWIYNKDFSGHSKGTPNMHTLYWRMLFDERNLEDVVYSLNGGAEVFFRKASINVSHPTHPANIPIKKKNLKHKGEERILKYDLIKDKRYTIDQFQFHVPITMNFKVAGNGNININQKAIDYLRSASDTHIIGIDRGERNLLYLVVIDGNGKICEQFSLNEIEVEYNGEKYSTNYHDLLNVKENERKQARQSWQSIANIKDLKEGYLSQVIHKISELIVKYNAIVVLEDLNAGFMRGRQKVEKQVYQKFEKKLIEKLNYLVFKKQSSDLPGGLMHAYQLANKFESFNTLGKQSGFLFYIPAWNTSKMDPVTGFVNLFDVKYESVDKAKSFFSKFDSIRYNVERDMFEWKFNYGEFTKKAEGAKTDWTVCSYGNRIITFRNPDKNSQWDNKEINLTENIKLLFERFGIDLSSNLKDEIMERTEKEFFIELISLFKLVLQMRNSWTGTDIDYLVSPVCNENGEFFDSRNVDETLPQNADANGAYNIARKGMILLDKIKKNNGEKKLALSITNREWLSFAQGCCKNG

SEQ ID NO: 1567 - protein, 1275 aa, unidentified
  REGION 1..1275: note = Category: MG75 effectors
  REGION 1..1275: note = Description: MG75-53 effector
  source 1..1275: note = uncultivated organism sequence
MAKNFEDFKRLYPLSKTLRFEAKPIGATLDNIVKSGLLDEDEHRAASYVKVKKLIDEYHKVFIDRVLADGCLPLENEGHNNSLTEYYDSYVSKSQNEDAKKVFEENQQNLRSIIAKKLTEDKAYSNLFGTKLIESYKDKADKAKIIDSELIQFINTAESTQLDSMSQDEAKKLVKEFWGFTTYFVGFFDNRKNMYTAEEKSTGIAYRLVNENLPKFIDNMEAFKKAIARPEIQANMGELYSNFSEYLNVESVPEMFQLDYYNMLLTQKQIDVYNAIIGGKTDDEHDVKIKGINEYINLYNQQHKDDKLPKLKALFKQILSDRNAISWLPEEFNSDQEVLNAIKDCYERLSENVLGDKVLKSLLGSLADYSLDGIFIRNDLQLTDISQKMFGNWGVIQNAIMQNIKHVAPARKHKESEEDYEKRIAGIFKKADSFSISYINDCLNEADPNNAYFVENYFATLGAVDTPTMQRENLFALVQNAYTEMTALLHSDYPTEKKLAQDKANVAKIKALLDAIKSLQHFVKPLLGKGDESDKDERFYGELALLWAELETVTPLYNMIRNYMTRKPYSQKKIKLNFENPQLLGGWDANKEKDYATIILRRNGLYYLAIMNKDSKKLLGKAMPSDGECYEKMVYKLLPGANKMLPKVFFAKSRMEDFKPSKELVEKYNNGTHKKGKNFNIQDCHNLIDYFKQSIDKHEDWSKFGFNFSDTSTYEDLSGFYREVEQQGYKLSFTRVSVSFIDQLVEEGKMYLFQIYNKDFSEYSKGTPNMHTLYWKALFDERNLADVVYKLNGQAEMFYRKKSIENTHPTHPANHPILNKNKDNKKKESLFGYDLIKDRRYTVDKFMFHVPITMNFKSSGSENINQDVKAYLRHADDMHIIGIDRGERHLLYLVVIDLQGNIKDQFSLNEIVNDYNGNTYHTNYHDLLDVREEERLKARQSWQTIENIKELKEGYLSQVIHKITQLMVRYHAIVVLEDLSKGFMRSRQKVEKQVYQKFEKMLIDKLNYLVDKKTDVSTPGGLLNAYQLTCKSDSSQKLGKQSGFLFYIPAWNTSKIDPVTGFVNLLDTHSLNSKEKIKAFFSKFDAIRYNKDKKWFEFNLDYDKFGKKAEDTRTKWTLCTRGMRIDTFRNKEKNSQWDNQEVDLTTEMKSLLEHYYIDIHGNLKDAISTQTDKAFFTGLLHILKLTLQMRNSITGTETDYLVSPVADENGIFYDSRSCGDQLPENADANGAYNIARKGLMLIEQIKNAEDLNNVKFDISNKAWLNFAQQKPYKNG

SEQ ID NO: 1568 - protein, 1274 aa, unidentified
  REGION 1..1274: note = Category: MG75 effectors
  REGION 1..1274: note = Description: MG75-54 effector
  source 1..1274: note = uncultivated organism sequence
MIKEFEDFKRLYPIQKTLRFEAKPIGSTLEHLVKSGILDEDEHRAASYVRVKKLIDEYHKAFIDRVLNDGCLPFKNKGEKNSIEEYYESYTSKDKEEDSKKRFKEIQQNLRSIIVNKLTKDKAYANLFGNYLIESHKDKEDKKTMIDSDLIQFIKDADSLELGSMSKDEAIELVKEFWSFTTYFVGFYDNRKNMYSAEEKSTAIAYRLINENLPKFIDNMEAFKKIISRPEIQANTEQLYSDFAEYLNVESIQEMFQLDYYDLLLTQKQIDVYNAIIGGKTDEKHDIKTKGINEYINLYNQQHKEDKLPKLKVLFKQILSDRNAISWLPEEFNSDQEMLISIKDCYERLCINVLGDKVLKSLLSSLDDYELEGIFLQNDQQLTNISQKIFGSWSVIQEAITRNIKNTAPARKHKETEEDYEKRIFSIFKQASSFSIKYIDDCLYDLDKNNINTIENYFATLGAENTPEIQRENLFAIIKNAYTDVAGLLCSAYPTEKNLSQDENHVAKIKALLDAIKSLQHFVKPLLGNGDEHDKDERFYGELVSLWTELDTVTPLYNMVRNRITQKPYSQKKIKLNFENPQLLGGWDANKEKDYSCIILRREGMYYLAIMDKDSRKLLGKEMPSDGECYEKMVYKLLPGANKMLPKVFFAKSRIEEFMPSEQIIEKYNNGTHKKGKDFNITDCHNLIDYFKQSINKHEDWSKFGFTFSETSTYEDLSGFYREVEQQGYKLSFTNVSASYINSLVDEGKMYLFQIYNKDFSEYSKGTPNMHTLYWKALFDEQNLADVIYKLNGQAEIFYRKKSIDATHPTHPANRPVQNKNKDNKKKESLFEYDLIKDRRYSVDKFMFHVPITMNFKSSGSENINQQVKEYLQLANDTHIIGIDRGERHLLYLVVIDMHGNIKEQFSLNEIVNTYKGNIYHTNYHDLLEAREEERLKARQSWQTIENIKELKEGYLSQVVHKITQLMVKYHAIVVLEDLNMGFMRGRQKVEKQVYQKFEKMLIDKLNYLVNKQANITEAGGLLNAYQLTSKFDSFQKLGKQSGFLFYIPAWNTSKIDPVTGFVNLLDTRYQNVEKAKAFFSKFDAIRFNQDKDWFEFNLDYNKFGEKAEGTRTRWTLCTQGKRIYTFRNEDKNSQWDNIEIDLTSEMKSLLELYHIDIQGNLKEAINSQTDKSFFTKLIHLLKLTLQIRNSITRTETDYLISPVADEDGEFYDSRSCGPELPKNADANGAYNIARKGLMLIRQIKEAKELDKIKFDISNKAWLNFAQQKPYKND

SEQ ID NO: 1569 - protein, 957 aa, unidentified
  REGION 1..957: note = Category: MG75 effectors
  REGION 1..957: note = Description: MG75-55 effector
  source 1..957: note = uncultivated organism sequence
MAKNFEDFKRLYSLSKTLRFEAKPIGATLDNIVKSGLLDEDEHRAASYVKVKKLIDEYHKVFIDRVLANGCLPLKNEGHNNSLTEYYDNYVSKSQNEDAKKTFEENQQNLRSIIAKKLTEDKAYANLFGKNLLESYKDKTDKTKIIDSDLFKFINTAESTQLDSMSQDEAKELVKEFWGFITYFYGFFDNRKNMYTSEDKSTGIAYRLINENLPKFIDNMEAFNTAVTRPEIQANMDELYSNFSEYLNVESIQEMFQLDYYNMLLTQKQIDVYNAIIGGKTDDEHDVKIKGINEYINLYNQKHKDDKLPKLKALFKQILSDRNAISWLPEEFNSDQEVLNAIKDCYERLSENVLGDKVLKSLLGSLADYSLDGIFIRNDLQLTDISQKMFGNWGVIQNAIMQDIKHVAPARKHKESEEDYEKRIAGIFKKADSFSISYINDCLNEADPNNAYFVENYFATLGAVDTPTMQRENLFALVQNAYTEITALLHSDYPTEKNLAQDKANVAKIKALLDAIKSLQHFVKPLLGKGDESDKDERFYGELASLWTELDTVTPLYNMIRNYMTRKPYSQKKIKLNFENPQLLGGWDVNKEKDYATIILRRNGLYYLAIMNKDSKKLLGKAMPSDGECYEKMVYKLLPGANKMLPKVFFAKSRMEDFKPSKELVEKYNNGTHKKGKNFNIQDCHNLIDYFKQSIDKHEDWSKFGFKFSDTSTYEDFSGFYREVEQQGYKLSFARVSVSYINQLVEEGKMYLFQIYNKDFSEYSKGTPNMHTLYWKALFDERNLADVVYKLNGQAEMFYRKKSIENTHPTHPANHPILNKNKDNKKKESLFDYDLIKDRRYTVDKFMFHVPITMNFKSVGSENINQDVKAYLRHADDMHIIGIDRGERHLLYLVVIDLQGNIKEQYSLNEIVNEYNGNTYHTNYHDLLDVREEERLKARQSWQTIENIKELKEGYLS

SEQ ID NO: 1570 - protein, 1270 aa, unidentified
  REGION 1..1270: note = Category: MG75 effectors
  REGION 1..1270: note = Description: MG75-56 effector
  source 1..1270: note = uncultivated organism sequence
MEFDDFKRLYPLSKTLRFEAKPIGATLKNIIKSGLLEEDEHRAQSYVKVKKLIDEYHKVFIDRVLNDGCLTIENKGKQDSLEEYFESYISKSNDENANKAFKEIQGNLRSLIANKLTKDKGYANLFGNKLIESYKDKDDTKKIIDSDLIQFINTAEPSKLDSMSQDEAKELVKEFRGFTTYFVGFFDNRKNMYTSEEKSTGIAYRLVNENLPKFIDNMEAFKKAIAKPEIQANMEELYSNFAEYLNVESIQEMFKLDYYNMLLTQKQIDVYNAIIGGKTDEDHDVKIKGINEYINLYNQQHKDEKLPKLKALFKQILSDRNAISWLPEEFNSDQDVLNAIKDCYERLSENVLGDKVLKSLLCSLSDYNLNGIFVRNDLQLTDISQKTFGNWSVIQNAIMQNIKNVAPARKRKESEEDYEKRISDILKKADSFSIQYINDCLNEMDNNNLHAVDGYFATLGAVNTPTMQRENLFALIQNAYTDISDLLDTPYPENKNLAQDKTNVAKVKALLDAIKSLQHFVKPLLGMGDESDKDERFYGELASLWTELDTVTPLYNMIRNYMTRKPYSEKKIKLNFENPQLLGGWDANKEKDYATIILRRNGMYYLAIMDKDSKKLLGKTMPSDGECYEKMVYKLLPGANKMLPKVFFAKSRINDFKPSKKIVENYNNGTHKKGKNFNINDCHNLIDYFKQSIDKHEDWSKFGFNFSDTSTYEDLSGFYREVEQQGYKLSFTNISVSFIDKLVDEGKMYLFQIYNKDFSDYSKGTPNMHTLYWKALFDERNLADVVYKLNGQAEMFYRKKSIDYTHPTHPANHPIQNKNKDNKKKESVFEYDLVKDRRYTVDKFLFHVPITMNFKSVGSENINQQVREYLQQADDTHIIGIDRGERHLLYLVVIDMQGNIKEQFTLNEIVNEYNGNTYRTNYHDLLDTREEKRLTARQSWQTIENIKELKEGYLSQVVHKITQLMVKYHAVVVLEDLNKGFMRGRQKVEKQVYQKFEKMLIDKLNYLVDKKADAAQSGGLLNAYQLTSKFDSFQKLGKQSGFLFYIPAWNTSKIDPVTGFVNLLDTRYQNTEKSKAFFSKFDAIRYNADKDWFEFNLDYDKFGTKAEGTRTKWILCTQGNRICRNADKNPQWDNPKIDLTRELKSLFEHYNINICGNLKEEICSQTDKAFFTGLLHILKLTLQMRNSITGTETDYLVSPVADENGVFYDSRSCGDRLPENADANGAYNIARKGLMLIGQIKETKDLANFKYDISNKAWLNFAQQKPYKNE

SEQ ID NO: 1571 - protein, 1292 aa, unidentified
  REGION 1..1292: note = Category: MG75 effectors
  REGION 1..1292: note = Description: MG75-57 effector
  source 1..1292: note = uncultivated organism sequence
MNRKTKYQKPKTESKIKSMIKEFEDFKRLYPIQKTLRFEAKPIGSTLEHLVKSGILDEDEHRAASYVRVKKLIDEYHKAFIDRVLNDGCLPFKNKGEKNSIEEYYESYTSKDKEEDSKKRFKEIQQNLRSIIVNKLTKDKAYANLFGNYLIESHKDKEDKKTMIDSDLIQFIKDADSLELGSMSKDEAIELVKEFWSFTTYFVGFYDNRKNMYSAEEKSTAIAYRLINENLPKFIDNMEAFKKIISRPEIQANTEQLYSDFAEYLNVESIQEMFQLDYYDLLLTQKQIDVYNAIIGGKTDEKHDIKTKGINEYINLYNQQHKEDKLPKLKVLFKQILSDRNAISWLPEEFNSDQEMLISIKDCYERLCINVLGDKVLKSLLSSLDDYELEGIFLQNDQQLTNISQKIFGSWSVIQEAITRNIKNTAPARKHKETEEDYEKRIFSIFKQASSFSIKYIDDCLYDLDKNNINTIENYFATLGAENTPEIQRENLFAIIKNAYTDVAGLLCSAYPTEKNLSQDENHVAKIKALLDAIKSLQHFVKPLLGNGDEHDKDERFYGELVSLWTELDTVTPLYNMVRNRITQKPYSQKKIKLNFENPQLLGGWDANKEKDYSCIILRREGMYYLAIMDKDSRKLLGKEMPSDGECYEKMVYKLLPGANKMLPKVFFAKSRIEEFMPSEQIIEKYNNGTHKKGKDFNITDCHNLIDYFKQSINKHEDWSKFGFTFSETSTYEDLSGFYREVEQQGYKLSFTNVSASYINSLVDEGKMYLFQIYNKDFSEYSKGTPNMHTLYWKAPFDEQNLADVIYKLNGQAEIFYRKKSIDATHPTHPANRPVQNKNKDNKKKESLFEYDLIKDRRYSVDKFMFHVPITMNFKSSGSENINQQVKEYLQLANDTHIIGIDRGERHLLYLVVIDMHGNIKEQFSLNEIVNTYKGNIYHTNYHDLLEAREEERLKARQSWQTIENIKELKEGYLSQVVHKITQLMVKYHAIVVLEDLNMGFMRGRQKVEKQVYQKFEKMLIDKLNYLVNKQANITEAGGLLNAYQLTSKFDSFQKLGKQSGFLFYIPAWNTSKIDPVTGFVNLLDTRYQNVEKAKAFFSKFDAIRFNQDKDWFEFNLDYNKFGEKAEGTRTRWTLCTQGKRIYTFRNEDKNSQWDNIEIDLTSEMKSLLELYHIDIQGNLKEAINSQTDKSFFTKLIHLLKLTLQIRNSITRTETDYLISPVADEDGEFYDSRSCGPELPKNADANGAYNIARKGLMLIRQIKEAKELDKIKFDISNKAWLNFAQQKPYKND

SEQ ID NO: 1572 - protein, 1272 aa, unidentified
  REGION 1..1272: note = Category: MG75 effectors
  REGION 1..1272: note = Description: MG75-58 effector
  source 1..1272: note = uncultivated organism sequence
MKFDDFKKLYSLSKTLRFEAKPVGSTLKNIIESGLLEEDEHRAQSYVKVKKLIDEYHKVFIDRVLNDGCLTIENKGKKDSLEEYYESYMSKSNDENVSKTFKEIQENLRSVIAKKLTDNNAYANLFGNKLIESYKDKDEKNKIIDSDLIQFINTAEPSQLDSMSQDEAKELVKEFWGFTTYFVGFFDNRKNMYTSEEKSTGIAYRLVNENLPKFIDNMEAFKKAIAKPEIQANMEELYSNFAEYLNVESIQEMFQLDYYNMLLTQKQIDVYNAIIGGKTDEEHDVKIKGINEYINLYNQQHKDEKLPKLKALFKQILSDRNAISWLPEEFNSDQEVLNAIDDCYKRLSENVLGDKVLKSLLCSLDDYNLDGIFVRNDLQLTDISQKMFGNWSVIQNAIMQNIKNVAPARKRKESEEDYEKRISDIFKKADSFSIQYINDCLNEMDDNNLHAVDGYFATLGAVNTPAMQRENLFALIQNAYTDISNLLETPYPENKNLAQDKTNVAKVKALLDAIKSLQHFVKPLLGKGDESDKDERFYGELASLWTELDTVTPLYNMIRNYMTRKPYSEKKIKLNFENPQLLGGWDANKEKDYATIILRRNGMYYLAIMDKDSKKLLGKTMPSDGECYEKMVYKLLPGANKMLPKVFFAKSRINDFKPSKLIVENYNNGTHKKGKNFNINDCHNLIDYFKQSIDKHEDWSKFGFNFSDTSTYEDLSGFYREVEQQGYKLSFTNVSVSFIDKLVDEGKMYLFQIYNKDFSDFSKGTPNMHTLYWKALFDERNLADVVYKLNGQAEMFYRKKSINNTHPTHPANHPIQNKNKDNKKKESVFEYDLIKDRRYTVDKFLFHVPITMNFKSVGSENINQQVREYLQQADDTHIIGIDRGERHLLYLVVIDMQGNIKEQFTLNEIVNEYNGNTYRTNYHDLLDTREEERLTARQSWQTIENIKELKEGYLSQVVHKITQLMVKYHAVVVLEDLNKGFMRGRQKVEKQVYQKFEKMLIDKLNYLVDKKADAAQSGGLLNAYQLTSKFDSFQKLGKQSGFLFYIPAWNTSKIDPVTGFVNLLDTRYQNTEKAKAFFSRFDAIRYNANKDWFEFYLDYDKFCTKAEGTRTRWTLCTQGSRISTFRNADKNSQWDNQKVDLTREIKSLFNYYHINICGNLKEEICSQTDKAFFTGLLHMLKLTLQMRNSITGTETDYLISPVADENGTFYDSRSCGDTLPKNADANGAYNIARKGLMFIGQIKKTKDLANFKYDISNKAWLNFAQQKPYKNE

SEQ ID NO: 1573 - protein, 1274 aa, unidentified
  REGION 1..1274: note = Category: MG75 effectors
  REGION 1..1274: note = Description: MG75-59 effector
  source 1..1274: note = uncultivated organism sequence
MAKNFEDFKRLYPLSKTLRFEAKPIGATLDNIIKSGLLDEDEHRAASYVKMKKLIDEYHKVFIDRVLDNGCLPLEDKGDNNSLAEYYESYVSKAQDEDAIKKFKEIQQNLCSIIAKKLTDDKAYANLFGNKLIESYKDKADKTKIIDSDLIQFINTAESTQLVSMSQDEAKELVKEFWGFTTYFEGFFKNRKNMYTPEEKSTGIAYRLINENLPKFIDNMEAFKKAITRPEIQANMEELYSDFSEYLNVESIQEMFQLDYYNMLLTQKQIDVYNAIIGGKTDDEHDVKIKGINEYINLYNQQHKDDKLPKLKALFKQILSDRNAISWLPEEFNSDQEVLNAIKDCYERLAENVLGDKVLKSLLCSLSDYTLDGIFIRNDLQLTDISQKMFGNWGVIQNAIMQNIKRVAPARKHKESEEDYEKRIAGIFKKADSFSISYINDCLNEADSNNAYFVENYFATFGAVNTPTMQRENLFALVQNAYTEVASLLHSDYPTAKHLAQDKANVAKIKALLDAIKSLQHFVKPLLGKGDESDKDERFYGELASLWAELDTVTPLYNMIRNYITRKPYSQKKIKLNFENPQLLGGWDANKEKDYATIILRRNGLYYLAIMNKESKKLLGKAMPSDGECYEKMVYKLLPGANKMLPKVFFAKSRMEDFKPSKELVEKYNNGTHKKGKNFNIQDCHNLIDYFKQSISKHEDWGKFGFNFSDTSTYEDLSGFYREVEQQGYKLSFARVSVSYINQLVEEGKMYLFQIYNKDFSEYSKGTPNMHTLYWKALFDERNLADVVYKLNGQAEMFYRKKSIENTHPTHPANHPILNKNKDNKKKESLFEYDLIKDRRYTVDKFMFHVPITMNFKSVGSENINQGVKEYLHHADDMHIIGIDRGERHLLYLVVIDLQGNIKEQYSLNEIVNEYNGNTYHTNYHDLLDAREDERLKARQSWQTIENIKELKEGYLSQVIHKITQLMVKYHAIVVLEDLNMGFMRGRQKVEKQVYQKFEKMLIDKLNYLVDKKADASVSGGWLNAYQLTSKFDSFQKLGKQSGFLFYIPAWNTSKIDPVTGFVNLLDARYQNVEKAKAFFSKFDAIRYNKDKDWFEFNLDYDKFGKKAEGTRTKWTLCTRGMRIDTFRNKEKNSQWDNQEVDLTAEMKSLLEHYYIDIHGNLKDAISAQTDKAFFTGLLHILKLTLQMRNSITGTETDYLVSPVADENGIFYDSRSCGEELPENADANGAYNIARKGLMLIEQIKGAEDLGNLKFDISNKAWLNFAQKKPYKNG

SEQ ID NO: 1574 - protein, 1275 aa, unidentified
  REGION 1..1275: note = Category: MG75 effectors
  REGION 1..1275: note = Description: MG75-60 effector
  source 1..1275: note = uncultivated organism sequence
MAKNFEDFKRLYSLSKTLRFEAKPIGATLDNIVKSGLLDEDEHRAASYVKVKKLIDEYHKVFIDRVLANGCLPLKNEGHNNSLTEYYDNYVSKSQNEDAKKTFEENQQNLRSIIAKKLTEDKAYANLFGKNLLESYKDKTDKTKIIDSDLFKFINTAESTQLDSMSQDEAKELVKEFWGFITYFYGFFDNRKNMYTSEDKSTGIAYRLINENLPKFIDNMEAFNTAVTRPEIQANMDELYSNFSEYLNVESIQEMFQLDYYNMLLTQKQIDVYNAIIGGKTDDEHDVKIKGINEYINLYNQKHKDDKLPKLKALFKQILSDRNAIFWLPEEFNSDQEVLNAIKDCYERLSENVLGDKVLKSLLGSLADYSLDGIFIRNDLQLTDISQKMFGNWGVIQNAIMQDIKHVAPARKHKESEEDYEKRIAGIFKKADSFSISYINDCLNEADPNNAYFVENYFATLGAVDTPTMQRENLFALVQNAYTEITALLHSDYPTEKNLAQDKANVAKIKALLDAIKSLQHFVKPLLGKGDESDKDERFYGELASLWTELDTVTPLYNMIRNYMTRKPYSQKKIKLNFENPQLLGGWDVNKEKDYATIILRRNGLYYLAIMNKDSKKLLGKAMPSDGECYEKMVYKLLPGANKMLPKVFFAKSRMEDFKPSKELVEKYNNGTHKKGKNFNIQDCHNLIDYFKQSIDKHEDWSKFGFKFSDTSTYEDFSGFYREVEQQGYKLSFARVSVSYINQLVEEGKMYLFQIYNKDFSEYSKGTPNMYTLYWKALFDERNLADVVYKLNGQAEMFYRKKSIENTHPTHPANHPILNKNKDNKKKESLFDYDLIKDRRYTVDKFMFHVPITMNFKSVGSENINQDVKAYLRHADDMHIIGIDRGERHLLYLVVIDLQGNIKEQYSLNEIVNEYNGNTYHTNYHDLLDVREEERLKARQSWQTIENIKELKEGYLSQVIHKITQLMVGYHAIVVLEDLSKGFMRSRQKVEKQVYQKFEKMLIDKLNYLVDKKTDVSTPGGLLNAYQLTCKSDSSQKLGKQSGFLFYIPAWNTSKIDPVTGFVNLLDTHSLNSKEKIKAFFSKFDAIRYNKDKKWFEFNLDYDKFGKKAEDTRTKWTLCTRGMRIGTFRNKEKNSQWDNQEVDLTTEMKSLLEHYYIDIHGNLKDAISTQTDKAFFTGLLHILKLTLQMRNSITGTETDYLVSPVADENGIFYDSRSCGDQLPENADANGAYNIARKGLMLIEQIKNAEDLNNVKFDISNKAWLNFAQQKPYKNG

SEQ ID NO: 1575 - protein, 1245 aa, unidentified
  REGION 1..1245: note = Category: MG75 effectors
  REGION 1..1245: note = Description: MG75-61 effector
  source 1..1245: note = uncultivated organism sequence
METFSGFTNLYPLSKTLRFRLIPVGETLKHFIDSGILEEDQHRAESYVKVKAIIDDYHRAYIENSLSGFELPLESTGKFNSLEEYYLYHNIRNKTEEIQNLSSKVRTNLRKQVVVQLTKNEIFKRIDKKELIQSDLIDFVKNEPDANEKIALISEFRNFTVYFKGFHENRRNMYSDEEKSTSIAFRLIHENLPKFIDNMEVFAKIQNTSILENFDAIQKELCPELVTLCEMFKLGYFNKTLSQKQIDAYNTVIGGKTTSEGKKIKGLNEYINLYNQQHKQEKLPKMKLLFKQILSDRESASWLPEKFENDSQVVGAMVNFWNTIHDTVLAEGGLKTIIASLGSYGLEGIFLKNDLQLTDISQKATGSWSKISSEIKQKIEVMNPQKKKESYESYQERIDKLFKSYKSFSLAFINECLRGEYKIEDYFLKLGAVNSSSLQKENHFSHILNAYTDVKEAIGFYSESTDTKLIQDNDSIQKIKQFLDAVKDLQAYVKPLLGNGDETGKDERFYGDLIEYWSLLDLITPLYNMVRNYVTQKPYSVDKIKINFQNPTLLNGWDLNKETDNTSVILRRDGKYYLAIMNNKSRKVFLKYPSGTDGNCYEKMEYKLLPGANKMLPKVFFSKSRINEFMPNERLLSNYEKGTHKKSGICFSLDDCHTLIDFFKKSLDKHEDWKNFGFKFSDTSTYEDMSGFYKEVENQGYKLSFKPIDATYVDQLVDEGKIFLFQIYNKDFSEHSKGTPNMHTLYWKMLFDETNLGDVVYKLNGEAEVFFRKASINVSHPTHPANIPIKKKNLKHKDEERILKYDLIKDKRYTVDQFQFHVPITMNFKADGNGNINQKAIDYLCSASDTHIIGIDRGERNLLYLVVIDGNGKICEQFSLNEIEVEYNGEKYSTNYHDLLNVKENERKQARQSWQSIANIKDLKEGYLSQVIHKISELMVKYNAIVVLEDLNAGFMRGRQKVEKQVYQKFEKKLIEKLNYLVFKKQSSDLPGGLMHAYQLANKFESFNALGKQSGFLFYIPAWNTSKMDPVTGFVNLFDVKYESVDKAKSFFSKFDSMRYNVERDMFEWKFNYGEFTKKAEGTKTDWTVCSYGNRIITFRNPDKNSQWDNKEINLTENIKLLFERFGIDLSSNLKDEIMQRTEKEFFIELISLFKLVLQMRNSWTGTDIDYLVSPVCNENGEFFDSRNVDETLPQNADANGAYNIARKGMILLDKIKKSNGEKKLALSITNREWLSFAQGCCKNG

SEQ ID NO: 1576 - protein, 1274 aa, unidentified
  REGION 1..1274: note = Category: MG75 effectors
  REGION 1..1274: note = Description: MG75-62 effector
  source 1..1274: note = uncultivated organism sequence
MDKKFEDFKRLYPLSKTLRFEAKPIGSTLDNIIKSGLLDEDEHRAVSYVKVKKLIDEYHKSFIDRVLDEGCLPFENNGEKDSLEEYYESYKLKSNDENANKTFKEIQQNLRSVIANKLTDDKAYANLFGNKLIESYKDKEDKKKTIDSDLIQFINTAEPSQLDSMSQDEAKELVKEFWGFTTYFVGFFDNRKNMYTSEEKSTGIAYRLVNENLPKFIDNMEAFKKVIAKSEIQANIEELYSNFAEYLNVESIQEMFQLDYYNMLLTQKQIDVYNAIIGGKTDEKHDVKIKGINEYINLYNQQHKDEKLPKLKALFKQILSDRNAISWLPEEFNDDQEVLNAIKDCYERLSENVLGNKVLKSLLCSLADYNLDDIFIRNDLQLTDISQKMFGNWSVIQDAIIQNIKNVAPARKRKESEEDYEKRISGIFKKADSFSILYINSCLNEMDDNSLHAVDGYFATLGAVNTPTMQRENLFALIQNAYTDISDLLNTKYPANKNLAQDKTNVAKVKALLDAIKSLQHFVKPLLGKGDESDKDERFYGELASLWTELDTVTPLYNMIRNYMTRKPYSEKKIKLNFENPQLLGGWDANKEKDYSTIILRRNGMYYLAIMNKDSRRLLGKAMPSDGECYEKMVYKLLPGANKMLPKVFFAKSRIDDFKPNIQIVENYNNGTHKKRKNFNIQDCHDLIDFFKQSIKKHEDWSKFSFNFSDTSTYEDLSGFYREVEQQGYKLSFMNVSVSFIDKLVDEGKMYLFQIYNKDFSEYSKGTPNMHTLYWKALFDERNLADVVYKLNGQAEMFYRKKSIDYTHPTHPANHPILNKNKDNKKKESLFEYDLIKDRRYTVDKFLFHVPITMNFKSVGSENINQQVREYLQQADDTHIIGIDRGERHLLYLVVIDMQGNIKEQFTLNEIVNEYNGNTYRTNYHDLLDIREEERLAARQSWQTIENIKELKEGYLSQVIHKITQLMVKYHAIVVLEDLNMGFMRGRQKVEKQVYQKFEKMLIDKLNYLVDKKADATQPGGILNAYQLTSKFDSFQKLGKQSGFLFYIPAWNTSKIDSVTGFVNLLDTRYQNTEKAKVFFSKFDAIRYNEEKDWFEFYLDYDKFGSKAEGTRTKWTLCTQGKRIRTFRNPDKNSQWDNQEVDLTREMKSLFEHYHINICGNLKEEICSQTDKAFFTGLLHVLKLTLQMRNSITGTETDYLVSPVADEEGNFYDSRYCNITLPKNADANGAYNIARKGLMLVKQIKAATDLANFKYDISNKAWLNFAQQKPYKNE

SEQ ID NO: 1577 - protein, 1321 aa, unidentified
  REGION 1..1321: note = Category: MG75 effectors
  REGION 1..1321: note = Description: MG75-63 effector
  source 1..1321: note = uncultivated organism sequence
MEFDDFKRLYPLSKTLRFEAKPIGATLNNIIKSGLLEEDEHRAQSYVKVKKLIDEYHKVFIDRVLDDGCLTIENKGKKDSLEEYYESYMSKSNDENVSKTFKEIQENLRSVIAKKLTDDNAYANLFGNKLIESYKDKDDKKKIIDSDLIQFINTAEPSKLDSMSQDEAKELVKEFWGFTTYFEGFHKNRKNMYTSEEKSTGIAYRLVNENLPKFIDNMEAFKKAIAKPEIQANMEELYSNFAEYLNVESIQEMFQLDYYNMLLTQKQIDDYNAIIGGKTDEDHDVKIKGINEYINLYNQQHKDEKLPKLKALFKQILSDRNAISWLPEEFNSDQDVLNAIKDCYERLSENVLGDKVLKSLLCSLSDYNLNGIFVRNDLQLTDISQKMFGNWNVIQNAIMQNFFFKKVAPARKRKESEEDYEKRISDIFKKTDSFSIQYINDCLNEMDDNNLHAVDGYFATLGAVNTPTMQRENLFALIQNAYTDISDLLDTPYPENKNLAQDKTNVAKVKALLDAIKSLQHFVKPLLGKGDESDKDERFYGELASLWTELDTVTLLFNMVHNYMTRKPYSQKKIKLNYKNTQLLAGWDANKEKEHAAIILRRNGMYYLAIMDKDSKNLLDKAMPSDGECYEKMVYKQFDISKQLPKCTTELKRVRKALVEDAKRSCLLSDSKDWNKPLNVTRKLWELNNYVWDKKKADWVLRKKENETRPKKFHKKYLELTSDKNGYNQAKNDWIKFTKEFLSSYKKVEDYDIHYKKRYNSVDELYKQLNSDFYTISFTYVSVSFIDKLVNEGKMYLFKIYNKDFSNYSKGTPNMHTLYWKALFDERNLADVVYKLNGEAEMFYRKKSINNTHPTHPANHPIQNKNKDNKKKESVFEYDLVKDYRYTEDKFLFHVPITMNFKSVGSENINQQVKEYLQQADDTHIIGIDRGERHLLYLVVIDMEGNIKEQFSLNEIVNEYNGNTYRTNYHDLLDVCADKRLKASQSWQTIENIKELKEGYLSQAIHKITQLMVKYHAVVVLEDLNKGFMRGRQKVEKQVYQKFEKMLIDKLNYLVDKKADAAQSGGLLNAYQLTSKFDSFQKLGKQSGFLFYIPAWNTSKIDPVTGFVNLFDTRYTNADKALEFFSKFDAIRYNEEKDWFEFEFDYDKFTQKAHGTRTKWTLCTYGMRLRSFKNPAKQYNWDFEVVVLTDEFKRILGEAGIDIHENLKDAIRNLEGKRRKYLEPLMQFMKLLLQLRNSRKNPEEDYILSPVADENGVFYDSRSCGDKLPENADANGAYNIARKGLMLIRQIKEAKELDKVKFDISNKAWLNFAQQKPYKNE

SEQ ID NO: 1578 - protein, 1275 aa, unidentified
  REGION 1..1275: note = Category: MG75 effectors
  REGION 1..1275: note = Description: MG75-64 effector
  source 1..1275: note = uncultivated organism sequence
MAKNFEDFKRLYSLSKTLRFEAKPIGATLDNIVKSGLLDEDEHRAASYVKVKKLIDEYHKVFIDRVLANGCLPLKNEGHNNSLTEYYDNYVSKSQNEDAKKTFEENQQNLRSIIAKKLTEDKAYANLFGKNLLESYKDKTDKTKIIDSDLFKFINTAESTQLDSMSQDEAKELVKEFWGFITYFYGFFDNRKNMYTSEDKSTGIAYRLINENLPKFIDNMEAFNTAITRPEIQANMDELYSNFSEYLNVESIQEMFQLDYYNMLLTQKQIDVYNAIIGGKTDDEHDVKIKGINEYINLYNQKHKDDKLPKLKALFKQILSDRNAISWLPEEFNSDQEVLNAIKDCYERLSENVLGDKVLKSLLGSLADYSLDGIFIRNDLQLTDISQKMFGNWGVIQNAIMQDIKHVAPARKHKESEEDYEKRIAGIFKKADSFSISYINDCLNEADPNNAYFVENYFATLGAVDTPTMQRENLFALVQNAYTEITALLHSDYPTEKNLAQDKANVAKIKALLDAIKSLQHFVKPLLGKGDESDKDERFYGELASLWTELDTVTPLYNMIRNYMTRKPYSQKKIKLNFENPQLLGGWDVNKEKDYATIILRRNGLYYLAIMNKDSKKLLGKAMPSDGECYEKMVYKLLPGANKMLPKVFFAKSRMEDFKPSKELVEKYNNGTHKKGKNFNIQDCHNLIDYFKQSIDKHEDWSKFGFKFSDTSTYEDLSGFYREVEQQGYKLSFARVSVSYINQLVEEGKMYLFQIYNKDFSEYSKGTPNMHTLYWKALFDERNLADVVYKLNGQAEMFYRKKSIENTHPTHPANHPILNKNKDNKKKESLFEYDLIKDRRYTVDKFMFHVPITMNFKSVGSENINQDVKAYLRHADDMHIIGIDRGERHLLYLVVIDLQGNIKEQYSLNEIVNEYNGNTYHTNYHDLLDVREEERLKARQSWQTIENIKELKEGYLSQVIHKITQLMVGYHAIVVLEDLSKGFMRSRQKVEKQVYQKFEKMLIDKLNYLVDKKTDVSTPGGLLNAYQLTCKSDSSQKLGKQSGFLFYIPAWNTSKIDPVTGFVNLLDTHSLNSKEKIKAFFSKFDAIRYNKDKKWFEFNLDYDKFGKKAEDTRTKWTLCTRGMRIDTFRNKEKNSQWDNQEVDLTTEMKSLLEHYYIDIHGNLKDAISTQTDKAFFTGLLHILKLTLQMRNSITGTETDYLVSPVADENGIFYDSRSCGDQLPENADANGAYNIARKGLMLIEQIKNAEDLNNVKFDISNKAWLNFAQQKPYKNG

SEQ ID NO: 1579 - protein, 1274 aa, unidentified
  REGION 1..1274: note = Category: MG75 effectors
  REGION 1..1274: note = Description: MG75-65 effector
  source 1..1274: note = uncultivated organism sequence
MAKNFEDFKRLYPLSKTLRFEAKPIGATLDNIVKSGLLDEDEHRAASYVKVKKLIDEYHKVFIDRVLADGCLPLKNEGHNNSLTEYYDSYVSKSQNEDAKKAFEENQQNLRSIIAKKLIEDKAYANLFGKNLIESYKDKEDKKKIIDSELIQFICTAEATQLDSMSQDEAKEIVKEFWGFTTYFVGFFDNRKNMYTAEEKSTGIAYRLINENLPKFIDNMEAFKKAIARPEIQANMEELYSNFSEYLNVESIQEMFQLDYYNMLLTQKQIDVYNAIIGGKTDDEHDVKIKGINEYINLYNQQHKDDKLPKLKSLFKQILSDRNAISWLPEEFNSDQEVLNAIKDCYERLAENVLGDKVLKSLLGSLADYSLDGIFIRNDLQLTDISQKMFGNWGVIQNAIMQNIKHVAPARKHKESEEDYEKRIAGIFKKADSFSISYINDCLNEADSNNAYFVENYFAAFGAVNTPTMQRENLFSLVQNAYTEVAALLHSDYPTAKHLAQDKANVAKIKALLDAIKSLQHFVKPLLGKGDESDKDERFYGELASLWAELDTVTPLYNMIRNYMTRKPYSQKKIKLNFENPQLLGGWDANKEKDYATIILRRDGLYYLAIMNKESKKLLGKAMPSDGECYEKMVYKLLPGANKMLPKVFFAKSRMEDFKPSKELVEKYNNGTHKKGKNFNIQDCHNLIDYFKQSISKHEDWGKFGFNFSDTSTYEDLSGFYREVEQQGYKLSFARVSVSYISQLVEEGKMYLFQIYNKDFSEYSKGTPNMHTLYWKALFDERNLADVVYKLNGQAEMFYRKKSIENTYPTHPANHPILNKNKDNKKKESLFDYDLIKDRRYTVDKFMFHVPITMNFKSSGSENINQDVKAYLRHADDMHIIGIDRGERHLLYLVVIDLQGNIKEQYSLNEIVNEYNGNTYHTNYHDLLDVREEERLKARQSWQTIENIKELKEGYLSQVIHKITQLMVKYHAIVVLEDLNMGFMRGRQKVEKQVYQKFEKMLIDKLNYLVDKKADASVSGGLLNAYQLTSKFDSFQKLGKQSGFLFYIPAWNTSKIDPVTGFVNLLDTRYQNVEKAKVFFSKFDAIRYNKDKDWFEFNLDYDKFGKKAEGTRTKWALCTRGMRIDTFRNKEKNSQWDNQEVDLTAEMKSLLEHYYIDIHGNLKDAISAQTDKAFFTGLLHILKLTLQMRNSITGTETDYLVSPVADENGIFYDSRSCGDELPENADANGAYNIARKGLMMIEQIKDAKDLDNLKFDISNKSWLNFAQQKPYKNE

SEQ ID NO: 1580 - protein, 1089 aa, unidentified
  REGION 1..1089: note = Category: MG75 effectors
  REGION 1..1089: note = Description: MG75-66 effector
  source 1..1089: note = uncultivated organism sequence
MAKNFEDFKRLYPLSKTLRFEAKPIGATLDNIVKSGLLDEDEHRAASYVKVKKLIDEYHKVFIDRVLADGCLPLKNEGHNNSLTEYYDSYVSKSQNEDAKKAFEENQQNLRSIIAKKLIEDKAYANLFGKNLIESYKDKEDKKKIIDSELIQFICTAEATQLDSMSQDEAKEIVKEFWGFTTYFVGFFDNRKNMYTAEEKSTGIAYRLINENLPKFIDNMEAFKKAIARPEIQANMEELYSNFSEYLNVESIQEMFQLDYYNMLLTQKQIDVYNAIIGGKTDDEHDVKIKGINEYINLYNQQHKDDKLPKLKSLFKQILSDRNAISWLPEEFNSDQEVLNAIKDCYERLAENVLGDKVLKSLLGSLADYSLDGIFIRNDLQLTDISQKMFGNWGVIQNAIMQNIKHVAPARKHKESEEDYEKRIAGIFKKADSFSISYINDCLNEADSNNAYFVENYFAAFGAVNTPTMQRENLFSLVQNAYTEVAALLHSDYPTAKHLAQDKANVAKIKALLDAIKSLQHFVKPLLGKGDESDKDERFYGELASLWAELDTVTPLYNMIRNYMTRKPYSQKKIKLNFENPQLLGGWDANKEKDYATIILRRDGLYYLAIMNKESKKLLGKAMPSDGECYEKMVYKLLPGANKMLPKVFFAKSRMEDFKPSKELVEKYNNGTHKKGKNFNIQDCHNLIDYFKQSISKHEDWGKFGFNFSDTSTYEDLSGFYREVEQQGYKLSFARVSVSYISQLVEEGKMYLFQIYNKDFSEYSKGTPNMHTLYWKALFDERNLADVVYKLNGQAEMFYRKKSIENTHPTHPANHPILNKNKDNKKKESLFDYDLIKDRRYTVDKFMFHVPITMNFKSSGSENINQDVKAYLRHADDMHIIGIDRGERHLLYLVVIDLQGNIKEQYSLNEIVNEYNGNTYHTNYHDLLDVREEERLKARQSWQTIENIKELKEGYLSQVIHKITQLMVKYHAIVVLEDLNMGFMRGRQKVEKQVYQKFEKMLMDKLNYLVDKKADASVSGGLLNAYQLTSKFDSFQKLGKQSGFLFYIPAWNTSKIDPVTGFVNLLDTRYQNVEKAKVFFSKFDAIRYN

SEQ ID NO: 1581 - protein, 1250 aa, unidentified
  REGION 1..1250: note = Category: MG75 effectors
  REGION 1..1250: note = Description: MG75-67 effector
  source 1..1250: note = uncultivated organism sequence
MISLNYFQNQYAVAKTLCLELRPIGKTMEYIISSGILKEDEHRNESYKLVKKIIDDYHKAYIELSLSRFELKITSCSKNDALEDFYCQYLANSQEEKDKNIFKKTQDNLRKQIAKHLTQGEAYKRIDKKELIQEDLLEFVAADPDAANKKILINEFRDFTTYFTGFYENRKNMYSEEAQSTAIAYRIIHENLPKFIDNMGTFKQLMQSSITDILPQIFDNFKKDLEVSSIQEIFDLNYFNKVLTQKQIDIYNAIIGGKSLNENSRIQGLNEYINLYNQQHKENKLPLLKLLFKQILSDRNSLSWLPEAFETDKQVLHAVRKCYANLKESVLHEAGLVQLLSSLPSYDSTRIYIRNDQALTTISQKLFGDWGIIPHAIKERLKKDISAKRKETEEAYLERIEKAFKQADSYTIAYINDSLKEIGVDKKNIEDYFIHLGAICAEGQEQENILQRIASAYSQAQPLLEEKVPVHKNLMQDKDSVELIKSLLDELKNLQHFIKPLLGKGSESDKDERFYGEFVGLWNELDQITTLYNKVRNYVTRKPYSTEKFKINFQNATLLKGWDRNKERDNTSIILRKNGLYYLAIMRKEYNKVFEKYPAGTEGNCYEKMEYKLLPGANKMLPKVFFSKSRINEFNPSPQLLQNYQMGTHKKGDQFKKEDCHALIDFFKTSIEKHEDWKNFNFQFSPTSVYEDMSGFYREVEQQGYKLVFRSIDAEYIDKLVEEGKIFLFQIYNKDFSPFSKGTPNLHTLYWKMLFDERNLNNVVYKLNGEAEIFFRKKSITYTNPTHPAEIPIKNKNVQNKKKESVFRYDLIKNHRFTIDSFQFHVPITMNFKNAGLSNLNEQVYTYLRENKDAHIIGIDRGERHLLYLVVIDRYGRIVKQFSLNEIVNEYHGNTYTTNYHDLLDKREEARQQARQSWQSIENIKELKEGYLSQVVHKIANLMVEYHAIVVLEDLNIGFMRGRQKVEKQVYQKFEKMLIDKLNYLVDKKKAPEADGGLLKAFQLTNQFESFQKLGKQSGFLFYVPAWNTSKIDPCTGFTNLLDTRYENIAKAQKFFRTFDAIRYNAVKDYFELELDYDKFHKRAEGTQTKWTLCTYGTRIKTFRNPENNNQWDNVEINLTEEFKKLFKQFEINLSGDLQQAICAQTEKSFFESLLRLLKLTLQMRNSITGTDVDYLLSPVQNAEGYFYDSRKGDKSLPANADANGAYNIARKGLWVIQQIKQTPQGQKAKLSISNKEWLKFAQEKPYLKD

SEQ ID NO: 1582 - protein, 1245 aa, unidentified
  REGION 1..1245: note = Category: MG75 effectors
  REGION 1..1245: note = Description: MG75-68 effector
  source 1..1245: note = uncultivated organism sequence
METFSGFTNLYPLSKTLRFRLIPVGETLKHFIGSGILEEDQHRAESYVKVKAIIDDYHRTYIENSLSGFELPLESTGKFNSLEEYYLYHNIRNKTEEIQNLSSKVRTNLRKQVVTQLTKNEIFKRIDKKELIQSDLIDFVKNEPDANEKIALISEFRNFTVYFKGFHENRRNMYSDEEKSTSIAFRLIHENLPKFIDNMEVFAKIQNTSISENFDAIQKELCPELVTLCEMFKLGYFNKTLSQKQIDAYNTVIGGKTTSEGKKIKGLNEYINLYNQQHKQEKLPKMKLLFKQILSDRESASWLLEKFENDSQVVGAMVNFWNTIHDTVLAEGGLKTIIASLGSYGLEGIFLKNDLQLTDISQKATGSWSKISSEIKQKIEAMNPQKKKESYESYQERIDKLFKSYKSFSLAFVNECLRGEYKIEDYFLKLGAVNSSLLQKENHFSHILNTYTDVKEVIGFYSESTDTKLIQDNDSIQKIKQFLDAVKDLQAYVKPLLGNSDETGKDERFYGDLIEYWSLLDLITPLYNMVRNYVTQKPYSVDKIKINFQNPTLLNGWDLNKEMDNTSVILRRDGKYYLAIMNNKSRKVFLKYPSGTDRNCYEKMEYKLLPGANKMLPKVFFSKSRINEFMPNERLLSNYEKGTHKKSGTCFSLDDCHTLIDFFKKSLNKHEDWKNFGFKFSDTSTYEDMSGFYKEVENQGYKLSFKPIDATYVDQLVDEGKIFLFQIYNKDFSEHSKGTPNMHTLYWKMLFDETNLGDVVYKLNGEAEVFFRKASINVSHPTHPANIPIKKKNLKHKDEERILKYDLIKDKRYTVDQFQFHVPITMNFKANGNGNINQKAIDYLRSASDTHIIGIDRGERNLLYLVVIDGNGKICEQFSLNEIEVEYNGEKYSTNYHDLLNVKENERKQARQSWQSIANIKDLKEGYLSQVIHKISELMVKYNAIVVLEDLNAGFMRGRQKVEKQVYQKFEKKLIEKLNYLVFKKQSSDLPGGLMHAYQLANKFESFNTLGKQSGFLFYIPAWNTSKMDPVTGFVNLFDVKYESVDKAKSFFSKFDSIRYNVERDMFEWKFNYDEFTKKAEGTKTDWTVCSYGNRIITFRNPDKNSQWDNKEINLTENIKLLFERFGIDLSSNLKDEIMERTEKEFFIELISLFKLVLQMRNSWTGTDIDYLVSPVCNENGEFFDSRNVDETLPQNADANGAYNIARKGMILLDKIKKNNGEKKLTLSITNREWLSFAQGCCKNG

SEQ ID NO: 1583 - protein, 1274 aa, unidentified
  REGION 1..1274: note = Category: MG75 effectors
  REGION 1..1274: note = Description: MG75-69 effector
  source 1..1274: note = uncultivated organism sequence
MAKIFEDFKRLYPLSKTLRFEAKPIGATLDNIIKSGLLDEDEHRAASYVRVKKLIDEYHKVFIDRVLDNGCLPLKNEGHNNSLTEYYESYVTKSQNEDAKKVFKEIQQNLRSIIAKKLTEDKAYANLFGKNLIESYKDKTDKTKIIDSDLIKFINTAESTQLDSMSQDEAKELVKEFWGFTTYFVGFYDNRKNMYTAEEKSTGIAYRLVNENLPKFIDNMEAFKKAIARPEIQANMEELYSDFSEYLNVESVQEMFQLDYYNMLLTQKQIDVYNAIIGGKTDDEHDVKIKGINEYINLYNQQHKDDKLPKLKALFKQILSDRNAISWLPEEFNGDQEVLNAIKDCYERLSENVLGDKVLKSLLGSLSDYSLDGIFIRNDLQLTDISQKMFGNWCVIQNAIMQNIKHVAPARKHKESEEDYEKRIAGIFKKVDSFSISFINDCLNEADPNNAYFVENYFATFGAVNTPTMQRENLFALVQNAYTEVAALLHSDYLTAKHLAQDKVNVAKIKALLDAIKSLQHFVKPLLGKGDESDKDERFYGELASLWAELDTVTPLYNMIRNYMTRKPYSQKKIKLNFENPQLLGGWDANKEKDYATIILRRDGLYYLAIMNKDSKKLLGKAMPSDGECYEKMVYKLLPGANKMLPKVFFAKSRMEDFKPSKELVEKYNNGTHKKGKNFNIQDCHNLIDYFKQSISKHEDWGKFGFNFSDTSTYEDLSGFYREVEQQGYKLSFTRVSVSYISQLVEEGKMYLFQIYNKDFSEYSKGTPNMHTLYWKALFDERNLADVVYKLNGQAEMFYRKKSIENTHPTHPANHPILNKNKDNKKKESLFDYDLIKDRRYTVDKFMFHVPITMNFKSSGSENINQDVKAYLRHADDMHIIGIDRGERHLLYLVVIDLQGNIKEQYSLNEIVNEYNGNTYHTNYHDLLDVREEERLKARQSWQTIENIKELKEGYLSQVIHKITQLMVKYHAIVVLEDLNMGFMRGRQKVEKQVYQKFEKMLIDKLNYLVDKKADASVSGGLLNAYQLTSKFDSFQKLGKQSGFLFYIPAWNTSKIDPITGFVNLLDTRYQNVEKAKVFFSKFDAIRYNKDKDWFEFNLDYDKFGKKAEGTRTKWTLCTRGMRIDTFRNKEKNSQWDNQEVDLTAEMKSLLEHYYIDIYGNLKDAISAQTDKAFFTGLLHILKLTLQMRNSITGTETDYLVSPVADENGIFYDSRSCGDELPENADANGAYNIARKGLMMIEQIKDAKDLDNLKFDISNKSWLNFAQQKPYKNE

SEQ ID NO: 1584 - protein, 1264 aa, unidentified
  REGION 1..1264: note = Category: MG75 effectors
  REGION 1..1264: note = Description: MG75-70 effector
  source 1..1264: note = uncultivated organism sequence
MNFEQFTHLYPLSKTLRFELRPVGATLARIKEGGFLENDNHRAESYKKVKKLIDEYHKHFIEQALGDFSLTENETEGSKCLNSYLETYIQLYRSSRIEDAEKKAFEKVQAEMRKLIAKTLKGSEAYKRLFKQELIKEDLITFLRTHGGTVADEELVEEFKNFTTYFTGFYENRENMYSEEEKSTAISYRLVNENLPIFVDNMAAFAIIAQVPEVRAKLDVLQKDLGVELDGTTIDELFTLPFFNKVLTQKQIVVYNAAIGGKVSDSHSKGESHIKGINQIVNLYNQQHKDARLPKLKMLYKQILSDREALSWLPEKFDKDADLLKAIHDGYERLVSDGVLENLRTLLESIADYQTEGIFITNDQQLTRISQKMFGEWSFISEAILCALKKKVPQKRNECDEKYEERIDKMLKNYGGFSIRFIDDCVAAYVNTLDDEERKKRFIPTMEAYFATLGAFDTEEGQTINFFSRIQNARDALQGLLDSAYPERRALIQDKENGALLKELLDAILALMHFVKPLLGKNENGKDERFYGELMQIWDEFDSFVPLYNMSRNYLTQKPYSEEKYKLNFENSQLLKGWDLNKEADNTSIILRKDGLFYLAIMNKKHNKLFARELPADGDCYDKMDYKLLPGPNKMFPKVFFSKSRIAEFAPSEHIMDVYRKGSFKKGDTFNLQDCHDLIDFFKASILKHEDWRQFEFKFSETEQYDDISGFYREVEAQGYKVTFRQVSVSYIDRLVNEGKLYLFQIYNKDFSSYSKGTPNMHTLYWRALFDERNLSDVVYKLNGEAEVFYRKKSIEAHPTHPANRPIKNKNKLNDKEESLFAYDLIKDRRYSKDKFSLHVPITMNFKSVGGPNINDDVVEFLRTNENLHFIGIDRGERHLLYLTVIDSHGHILEQRTLNDVVNNYQGKDYHTDYHDLLETRERQRQEARSSWKAIENIKDLKEGYLAQVVHQIAQLMVKYHAIVVLEDLNGGFMRGRQKVERSVYQQFEKKLIDKLNYLVDKKSDAHAPGGLMNAYQLANQFKSFKSMGRQSGFIFYIPAWNTSKIDPVTGFTNLFDTRYKNVHDAQQFFSKFKSIRYNETADRFEFKFSYSDFTRKAEGSRTDWTVCTYGTRIKTFRDPQKNNEWTSKEVVLTEEFKKFFAAYGMDIHSNLKDSIAAHDEKAFFEQLLVLMRLTLQIRNSKSGTDVDYLLSPVADENGVFFDSRSCGNSLPQDADANGAYNIARKGLMLVRQMREAKDLKKFKADMTNRNWLKFAQEKPYLND

SEQ ID NO: 1585 - protein, 1275 aa, unidentified
  REGION 1..1275: note = Category: MG75 effectors
  REGION 1..1275: note = Description: MG75-71 effector
  source 1..1275: note = uncultivated organism sequence
MAKNFEDFKRLYPLSKTLRFEAKPIGATLDNIIKSGLLDEDEHRAASYVKMKKLIDEYHKVFIDRVLDNGCLPLEDKGDNNSLAEYYESYVSKAQDEDAIKKFKEIQQNLCSIIAKKLTDDKAYANLFGNKLIESYKDKADKTKIIDSDLIQFINTAESTQLVSMSQDEAKELVKEFWGFTTYFEGFFKNRKNMYTPEEKSTGIAYRLINENLPKFIDNMEAFKKAITRPEIQANMEELYSDFSEYLNVESIQEMFQLDYYNMLLTQKQIDVYNAIIGGKTDDEHDVKIKGINEYINLYNQQHKDDKLPKLKALFKQILSDRNAISWLPEEFNSDQEVLNAIKDCYERLAENVLGDKVLKSLLCSLSDYTLDGIFIRNDLQLTDISQKMFGNWGVIQNAIMQNIKRVAPARKHKESEEDYEKRIAGIFKKADSFSISYINDCLNEADPNNAYFVENYFATFGAVNTPTMKRENLFALVQNAYTEVASLLHSDYPTAKHLAQDKANVAKIKALLDAIKSLQHFVKPLLGKGDESDKDERFYGELASLWAELDTVTPLYNMIRNYITRKPYSQKKIKLNFENPQLLGGWDANKEKDYATIILRRNGLYYLAIMNKESKKLLGKAMPSDGECYEKMVYKLLPGANKMLPKVFFAKSRMEDFKPSKELVEKYNTGTHKKGKNFNIQDCHNLIDYFKQSISKHEDWGKFGFNFSDTSTYEDLSGFYREVEQQGYKLSFARVSVSYINQLVEEGKMYLFQIYNKDFSEYSKGTPNMHTLYWKALFDERNLADVVYKLNGQAEMFYRKKSIENTHPTHPANHPILNKNKDNKKKESLFEYDLIKDRRYTVDKFMFHVPITMNFKSSGSENINQDVKAYLRHADDMHIIGVDRGERHLLYLVVIDLQGNIKEQYSLNEIVNEYNGNTYHTNYHDLLDVREDERLKARQSWQTIENIKELKEGYLSQVIHKITQLMVKYHAIVVLEDLNKGFMRGRQKVEKQVYQKFEKMLIDKLNYLVDKKADASVSGGLLNAYQLTSKFDSFQKLGKQSGFLFYIPAWNTSKIDPVTGFVNLLDTHSLNSKEKIKAFFSKFDAIRYNKDKDWFEFNLDYDKFGKKAEGTRTKWTLCTRGMRIDTFRNKEKNSQWDNQEVDLTAEMKSLLEHYYIDIHGNLKDAISAQTDKAFFTGLLHILKLTLQMRNSITGTETDYLVSPVADENGIFYDSRSCGDELPENADANGAYNIARKGLMMIEQIKEVKDLDNLKFDISNKSWLNFAQQKPYKNE

SEQ ID NO: 1586 - protein, 439 aa, unidentified
  REGION 1..439: note = Category: MG75 effectors
  REGION 1..439: note = Description: MG75-72 effector
  source 1..439: note = uncultivated organism sequence
MIKDKRYTVDQFQFHVPITMNFKADGNGNINQKAIDYLCSASDTHIIGIDRGERNLLYLVVIDGNGKICEQFSLNEIEVEYNGEKYSTNYHDLLNVKENERKQARQSWQSIANIKDLKEGYLSQVIHKISELMVKYNAIVVLEDLNAGFMRGRQKVEKQVYQKFEKKLIEKLNYLVFKKQSSDLPGGLMHAYQLANKFESFNALGKQSGFLFYIPAWNTSKMDPVTGFVNLFDVKYESVDKAKSFFSKFDSMRYNVERDMFEWKFNYGEFTKKAEGTKTDWTVCSYGNRIITFRNPDKNSQWDNKEINLTENIKLLFERFGIDLSSNLKDEIMQRTEKEFFIELISLFKLVLQMRNSWTGTDIDYLVSPVCNENGEFFDSRNVDETLPQNADANGAYNIARKGMILLDKIKKSNGEKKLALSITNREWLSFAQGCCKNG

SEQ ID NO: 1587 - protein, 1274 aa, unidentified
  REGION 1..1274: note = Category: MG75 effectors
  REGION 1..1274: note = Description: MG75-73 effector
  source 1..1274: note = uncultivated organism sequence
MARIFEDFKRLYPLSKTLRFEAKPIGATLDNIVKSGLLDEDEHRAESYVKVKKLIDEYHKVFIDRVLDNGCLPLKNEGHNNSLTEYYDSYVSKSQNEDAKKAFEENQQNLRSIIAKKLTEDKAYANLFGKNLIESYKDKTDKTKIIDSDLIQFINTAESTQLNSMSQDEAKELVKEFWGFTTYFVGFFDNCKNMYTAEEKSTGIAYRLINENLPKFIDNMEAFKKAIARPEIQANMEELYSNFSEYLNVESIQEMFLLDYYNMLLTQKQIDVYNAIIGGKTDDEHDVKIKGINEYINLYNQQHKDDKLPKLKALFKQILSDRNAISWLPEEFNSDQEVLNAIKDCYERLSENVLGDKVLKSLLGSLADYSLDGIFIRNDLQLTDISQKMFGNWGVIQNAIMQNIKRVAPARKHKESEEDYEKRIAGIFKKADSFSISYINDCLNEADPNNAYFVENYFATFGAVNTPTMQRENLFALVQNAYTEVASLLHSYYPAEKKLAQDKANVAKIKALLDAIKSLQHFVKPLLGKGDESDKDERFYGELASLWAELDTVTPLYNMIRNYITRKPYSQKKIKLNFENPQLLGGWDANKEKDYATIILRRNGLYYLAIMDKDSRKLLGKAMPSDGECYEKMVYKLLPGANKMLPKVFFAKSRMDDFKPSKELIEKYNNGTHKKGKNFDIQDCHNLIDYFKQSIDKHEDWSKFGFNFSDTSTYEDLSGFYREVEQQGYKLSFARVSVSYINQLVEEGKMYLFQIYNKDFSEYSKGTPNMHTLYWKALFDERNLADVVYKLNGQAEMFYRKKSIENTHPTHPANHPILNKNKDNKKKESLFEYDLIKDRRYTVDKFMFHVPITMNFKSVGSENINQGVKEYLHHADDMHIIGIDRGERHLLYLVVIDLQGNIKEQYSLNEIVNEYNGNTYHTNYHDLLDAREDERLKARQSWQTIENIKELKEGYLSQVIHKITQLMVKYHAIVVLEDLNMGFMRGRQKVEKQVYQKFEKMLIDKLNYLVDKKADASVSGGLLNAYQLTSKFDSFQKLGKQSGFLFYIPAWNTSKIDPVTGFVNLLDARYQNVEKAKAFFSKFDAIRYNKDKDWFEFNLDYDKFGKKAEGTRTKWILCTRGMRIDTFRNKEKNSQWDNQEVDLTAELKSLLEHYYIDIHGNLKEAISAQTDKAFFTGLLHILKLTLQMRNSITGTETDYLVSPVADENGIFYDSRSCGEQLPENADANGAYNIARKGLMMIEQIKNAEDLGNLKFDISNKAWLNFAQQKPYKNG

SEQ ID NO: 1588 - protein, 1203 aa, unidentified
  REGION 1..1203: note = Category: MG75 effectors
  REGION 1..1203: note = Description: MG75-74 effector
  source 1..1203: note = uncultivated organism sequence
MTIENKGKKDSLEEYYESYMSKSNDENVSKTFKEIQENLRSVIAKKLTDDNAYANLFGNKLIESYKDKDEKNKIIDSDLIQFINTAEPSQLDSMSQDEAKELVKEFWGFTTYFVGFFDNRKNMYTSEEKSTGIAYRLVNENLPKFIDNMEAFKKAIAKPEIQASMEELYSNFAEYLNVESIQEMFQLDYYNMLLTQKQIDVYNAIIGGKTDEEHDVKIKGINEYINLYNQQHKDEKLPKLKALFKQILSDRNAISWLPEEFNSDQEVLNAIDDCYKRLSENVLGDKVLKSLLCSLDDYNLDGIFVRNDLQLTDISQKMFGNWSVIQSAIMQNIKNVAPARKRKESEEDYEKRISDIFKKADSFSIQYINDCLNEMDNNNLHAVDGYFATLGAVNTPTMQRENLFALIQNAYTDISNLLETPYPENKNLAQDKTNVAKVKALLDAIKSLQHFVKPLLGKGDESDKDERFYGELASLWTELDTVTPLYNMIRNYMTRKPYSEKKIKLNFENPQLLGGWDANKEKDYATIILRRNGMYYLAIMDKDSKKLLGKTMPSNGECYEKMVYKLLPGANKMLPKVFFAKSRINDFKPSKLIVENYNNGTHKKGKNFNINDCHNLIDYFKQSIDKHEDWSKFGFNFSDTSTYEDLSGFYREVEQQGYKLSFTNVSVSFIDKLVDEGKMYLFQIYNKDFSDFSKGTPNMHTLYWKALFDERNLADVVYKLNGQAEMFYRKKSINNTHPTHPANHPIQNKNKDNKKKESVFEYDLIKDRRYTVDKFLFHVPITMNFKSVGSENINQQVREYLQQADDTHIIGIDRGERHLLYLVVIDMQGNIKEQFTLNEIVNEYNGNTYRTNYHDLLDTREEERLTARQSWQTIENIKELKEGYLSQVVHKITQLMVKYHAVVVLEDLNKGFMRGRQKVEKQVYQKFEKMLIDKLNYLVDKKADAAQSGGLLNAYQLTSKFDSFQKLGKQSGFLFYIPAWNTSKIDPVTGFVNLLDTRYQNTEKAKAFFSRFDAIRYNANKDWFEFYLDYDKFCTKAEGTRTRWTLCTQGSRISTFRNAEKNSQWDNLEVDLTREMKSLFEHYHINICGNLKEEICLQTDKAFFTGLLHMLKLTLQMRNNITGTETDYLISPVADENGTFYDSRSCGDTLPKNADANGAYNIARKGLMFIGQIKETKDLANFKYDISNKAWLNFAQQKPYKNE

SEQ ID NO: 1589 - protein, 1245 aa, unidentified
  REGION 1..1245: note = Category: MG75 effectors
  REGION 1..1245: note = Description: MG75-75 effector
  source 1..1245: note = uncultivated organism sequence
METFSGFTNLYPLSKTLRFRLIPVGETLKHFIDSGILEEDQHRAESYVKVKAIIDDYHRAYIENSLSGFELPLESMGKFNSLEEYYLYHNIRNKTEEIQNLSSKVRTNLRKQVVTQLTKNEIFKRIDKKELIQSDLIDFVKNEPDANEKIALISEFRNFTVYFKGFHENRKNMYSDEEKSTSIAFRLIHENLPKFIDNMEVFAKIQNTSISENFDAIQKELCPELVTLCEMFKLGYFNKTLSQKQIDAYNTVIGGKTTSEGKKIKGLNEYINLYNQQHKQEKLPKMKLLFKQILSDRESVSWLPEKFENDSQVVGAMVNFWNTIHDTVLAEGGLKTIIASLGSYGLEGIFLKNDLQLTDISQKATGSWGKISSEIKQKIEVMNPQKKKESYETYQERIDKIFKSYKSFSLAFINECLRGEYKIEDYFLKLGAVNSSSLQKENHFSHILNAYTDVKEAIGFYSESTDTKLIQDNDSIQKIKQFLDAVKDLQAYVKPLLGNGDETGKDERFYGDLIEYWSLLDLITPLYNMVRNYVTQKPYSIDKIKINFQNPTLLNGWDLNKETDNTSVILRRDGKYYLAIMNNKSRKVFLKYPSGTDRNCYEKMEYKLLPGANKMLPKVFFSKSRINEFMPNERLLSNYEKGTHKKSGTCFSLDDCHTLIDFFKKSLDKHEDWKNFGFKFSDTSIYEDMSGFYKEVENQGYKLSFKPIDATYVDQLVDEGKIFLFQIYNKDFSEHSKGTPNMHTLYWKMLFDETNLGDVVYKLNGEAEVFFRKASINVSHPTHPANIPIKKKNLKHKDEERILKYDLIKDKRYTVDQFQFHVPITMNFKADGNGNINQKAIDYLRSASDTHIIGIDRGERNLLYLVVIDGNGKICEQFSLNEIEVEYNGEKYSTNYHDLLNVKENERRQARQSWQSIANIKDLKEGYLSQVIHKISELMVKYNAIVVLEDLNAGFMRGRQKVEKQVYQKFEKKLIEKLNYLVFKKQSFDLPGGLMHAYQLANKFESFNTLGKQSGFLFYIPAWNTSKMDPVTGFVNLFDVKYESVDKAKSFFSKFDSIRYNVERDMFEWKFNYGEFTKKAEGTKTDWTVCSYGNRIITFRNPDKNSQWDNKEINLTENIKLLFERFGIDFSSNLKDEIMQRTEKEFFIELISLFKLVLQMRNSWTGTDIDYLVSPVCNENGEFFDSRNVDETLPQNADANGAYNIARKGMILLDKIKKGNGEKKLALSITNREWLSFAQGCCKNG

SEQ ID NO: 1590 - protein, 1274 aa, unidentified
  REGION 1..1274: note = Category: MG75 effectors
  REGION 1..1274: note = Description: MG75-76 effector
  source 1..1274: note = uncultivated organism sequence
MAKNFEDFKRLYPLSKTLRFEAKPIGATLDNIIKSGLLDEDEHRAASYVKMKKLIDEYHKVFIDRVLDNGCLPLKNEGQNNSLTEYYESYVSKSQNEDAKKAFEENQQNLRSIVAKKLTDDKAYANLFGKNLIESYKDKEDKKKIIDSDLIQFICTAEATQLDSMSQDEAKEIVKEFWDFTTYFVGFFDNRKNMYTAEEKSTGIAYRLINENLPKFIDNMEAFKKAIARPEIQANMEELYSNFSEYLNVESIQEMFLLDYYNMLLTQKQIDVYNAIIGGKTDDEHDVKIKGINEYINLYNQQHKDDKLPKLKDLFKQILSDRNAISWLPEEFNSDQEVLNAIKDCYERLSENVLGDKVLKSLLGSLSDYTLDGIFIRNDLQLTDISQKMFGNWGVIQNAIMQNIKRVAPARKHKESEEDYEKRIAGIFKKADSFSISYINDCLNEADPNNAYFVENYFATFGAVNTPTMQRENLFALVQNAYTEVASLLHSDYPTAKHLAQDKANVAKIKALLDAIKSLQHFVKPLLGKGDESDKDERFYGELASLWAELDTVTPLYNMIRNYITRKPYSQKKIKLNFENPQLLGGWDANKEKDYATIILRRNGLYYLAIMNKESKKLLGKAMPSDGECYEKMVYKLLPGANKMLPKVFFAKSRMEDFKPSKELVEKYNNGTHKKGKNFNIQDCHNLIDYFKQSINKHEDWGKFGFNFSDTSTYEDLSGFYREVEQQGYKLSFARVSVSYINQLVEEGKMYLFQIYNKDFSEYSKGTPNMHTLYWKALFDERNLADVVYKLNGQAEMFYRKKSIEKTHPTHPANHPILNKNKDNKKKESLFDYDLIKDRRYTVDKFMFHVPITMNFKSVGSENINQGVKEYLHHADDMHIIGIDRGERHLLYLVVIDLQGNIKEQYSLNEIVNEYNGNTYHTNYHDLLDAREDERLKARQSWQTIENIKELKEGYLSQVIHKITQLMVKYHAIVVLEDLNMGFMRGRQKVEKQVYQKFEKMLIDKLNYLVDKKADASVSGGWLNAYQLTSKFDSFQKLGKQSGFLFYIPAWNTSKIDPVTGFVNLLDARYQNVEKAKAFFSKFDAIRYNKDKDWFEFNLDYDKFGKKTEGTRTKWTLCTRGMRIDTFRNKEKNSQWDNQEVDLTAEMKSLLEHYYIDIHGNLKDAISAQTDKAFFTGLLHILKLTLQMRNSITGTETDYLVSPVADENGIFYDSRSCGEELPENADANGAYNIARKGLMLIEQIKGAEDLGNLKFDISNKAWLNFAQKKPYKNG

SEQ ID NO: 1591 - protein, 1272 aa, unidentified
  REGION 1..1272: note = Category: MG75 effectors
  REGION 1..1272: note = Description: MG75-77 effector
  source 1..1272: note = uncultivated organism sequence
MEFDDFKRLYPLSKTLRFEAKPIGATLKNIIKSGLLEEDEHRAQSYVKVKKLIDEYHKAFIDRVLNEGCLTIENKGNKDSLEEYYESYMSKSNDENVSKTFKEIQENLRSVIAKRLTDDKAYANLFGKNLIESYKDKEEKNKIIDSDLIQFINTAEPSQIDSMSQDEAKELVKEFWGFTTYFVGFFDNRKNMYTSEEKSTGIAYRLVNENLPKFIDNMEAFKKAIAKPEIQANMEELYSNFAEYLNVESIQEMFQLDYYDMLLTQKQIDVYNAIIGGKTDEDHDVKIKGINEYINLYNQQHKDEKLPKLKALFKQILSDRNAISWLPEEFNSDQEVLDAIKDCYERLSENVLGYKVLKSLLCSLSDYNLNGIFVRNDLQLTDISQKMFGNWSVIQNAIMQNIKNIAPARKRKESEEDYEKRISDIFKKADSFSIQYINDCLNEMDNNNLHAVDGYFATLGAVNTPTMQRENLFALIQNAYTDISDLLDTPYPQNKNLAQDKTNVAKVKVLLDAIKSLQHFVKPLLGMGDESDKDERFYGELASLWTELDTVTPLYNMIRNYMTRKPYSEKKIKLNFENPQLLGGWDANKEKDYATIILRRNGMYYLAIMDKDSKKLLGKTMPSDGECYEKMVYKLLPGANKMLPKVFFAKSRINDFKPSKKIVENYNNGTHKKGKNFNINDCHDLIDYFKQSIDKHEDWSKFGFNFSDTSTYEDLSGFYREVEQQGYKLSFTNISVSFIDKLVDEGKMYLFQIYNKDFSDYSKGTPNMHTLYWKALFDERNLADVVYKLNGQAEMFYRKKSIDYTYPTHPANHPIQNKNKDNKKKESVFEYDLVKDRRYTVDKFLFHVPITINFKSVGSENINQQVREYLQQADDTHIIGIDRGERHLLYLVVIDMQGNIKEQFTLNEIVNEYNGNTYRTNYHDLLDTREEERLTARQSWQTIENIKELKEGYLSQVIHKITQLMVKYHAVVVLEDLNKGFMRGRQKVEKQVYQKFEKMLIDKLNYLVDKKADATQSGGLLNAYQLTSKFDSFQKLGKQSGFLFYIPAWNTSKIDPVTGFVNLLDTRYQNTEKAKAFFSKFDAIRYNADKDWFEFNLDYDKFGTKAEGTRTTWTLCTQGNRICTFRNAEKNSQWDNQEVDLTGELKSLFEHYNINICGNLKEEICSQTDKAFFTGLLHILKLTLQMRNSITGTETDYLVSPVADENGVFYDSRSCGDQLPENADANGAYNIARKGLMLIREIKKAKELGKVKYDISNKAWLNFAQQKPYKNE

SEQ ID NO: 1592 - protein, 1274 aa, unidentified
  REGION 1..1274: note = Category: MG75 effectors
  REGION 1..1274: note = Description: MG75-78 effector
  source 1..1274: note = uncultivated organism sequence
MAKNFEDFKRLYPLSKTLRFEAKPIGVTLDNIVKSGLLDEDEHRAASYVKVKKLIDEYHKVFIDRVLADGCLPLKNEGHNNSLTEYYDNYVSKSQNEDAKKAFEENQQNLRSIIAKKLTEDKAYANLFGKNLIESYKDKTDKTKIIDSDLFNFINTAESTQLDSMSQDAAKEIVKEFWGFTTYFVGFFDNRKNMYTAEEKSTGIAYRLINENLPKFIDNMEAFKKAIARPEIQANMDELYSNFSEYLNVESIQEMFQLDYYNMLLTQKQIDVYNAIIGGKTDDEHDVKIKGINEYINLYNQKHKDDKLPKLKALFKQILSDRNAISWLPEEFNSDQEVLNAIKDCYERLSENVLGDKVLRSLLGSLADYSLDGIFIRNDLQLTDISQKMFGNWGVIQNAIMQNIKRIAPARKHKESEEDYEKRIAGIFKKADSFSISYINDCLNEADPNNAYFVENYFATFGAVNTPTMQRENLFALVQNAYTEVAALLHSDYPTVKNLAQDKANVSKIKVLLDAIKSLQHFVKPLLGKGDESDKDERFYGELASLWAELDTVTPLYNMIRNYMTRKPYSQKKIKLNFENPQLLGGWDANKEKDYATIILRRNGLYYLAIMNKDSKKLLGKAMPSDGECYEKMVYKLLPGANKMLPKVFFAKSRMEDFKPSKELVEKYNNGTHKKGKNFCIQDCHNLIDYFKQSIDKHEDWSKFGFNFSETSTYEDLSGFYREVEQQGYKLSFARVSVSYINQLVEEGKMYLFQIYNKDFSEYSKGTPNMHTLYWKALFDERNLADVVYKLNGQAEMFYRKKSIENTHPTHPANHPILNKNKDNKKKESLFEYDLIKDRRYTVDKFMFHVPITMNFKSSGSENINQDVKAYLRHADDMHIIGIDRGERHLLYLVVIDLQGNIKEQFSLNEIVNDYNGNTYHTNYHDLLDVREDERLKARQSWQTIENIKELKEGYLSQVIHKITQLMVKYHAIVVLEDLNMGFMRGRQKVEKQVYQKFEKMLIEKLNYLVDKKADASASGGLLNAYQLTSKFDSFQKLGKQSGFLFYIPAWNTSKIDPVTGFVNLLDTRYQNVEKAKSFFSKFDAIRYNKDKEWFEFNLDYDKFSKKAEGTRTKWTLCTRGMRIDTFRNKEKNSQWDNQKVDLTAEMKSLLEHYYIDIHGNLKDAISAQTDKAFFTGLLHILKLTLQMRNSITGTETDYLVSPVVDENGIFYDSRSCGDELPENADANGAYNIARKGLMMIEQIKDAKDLDNLKFDISNKAWLNFAQQKPYKNG

SEQ ID NO: 1593 - protein, 1274 aa, unidentified
  REGION 1..1274: note = Category: MG75 effectors
  REGION 1..1274: note = Description: MG75-79 effector
  source 1..1274: note = uncultivated organism sequence
MAKIFEDFKRLYPLSKTLRFEAKPIGATLDNIIKSGLLDEDEHRAASYVRVKKLIDEYHKVFIDRVLDNGCLPLKNEGHNNSLTEYYESYVTKSQNEDAKKVFKEIQQNLRSIIAKKLTEDKAYANLFGKNLIESYKDKTDKTKIIDSDLIKFINTAESTQLDSMSQDEAKELVKEFWGFTTYFVGFYDNRKNMYTAEEKSTGIAYRLVNENLPKFIDNMEAFKKAIARPEIQANMEELYSDFSEYLNVESVQEMFQLDYYNMLLTQKQIDVYNAIIGGKTDDEHDVKIKGINEYINLYNQQHKDDKLPKLKALFKQILSDRNAISWLPEEFNGDQEVLNAIKDCYERLSENVLGDKVLKSLLGSLSDYSLDGIFIRNDLQLTDISQKMFGNWCVIQNAIMQNIKHVAPARKHKESEEDYEKRIAGIFKKVDSFSISFINDCLNEADPNNAYFVENYFATFGAVNTPTMQRENLFALVQNAYTEVAALLHSDYPTAKHLAQDKVNVAKIKALLDAIKSLQHFVKPLLGKGDESDKDERFYGELASLWAELDTVTPLYNMIRNYMTRKPYSQKKIKLNFENPQLLGGWDANKEKDYATIILRRDGLYYLAIMNKESKKLLGKAMPSDGECYEKMVYKLLPGANKMLPKVFFAKSRMEDFKPSKELVEKYNNGTHKKGKNFNIQDCHNLIDYFKQSISKHEDWGKFGFNFSDTSTYEDLSGFYREVEQQGYKLSFTRVSVSYISQLVEEGKMYLFQIYNKDFSEYSKGTPNMHTLYWKALFDERNLADVVYKLNGQAEMFYRKKSIENTHPTHPANHPILNKNKDNKKKESLFDYDLIKDRRYTVDKFMFHVPVTMNFKSSGSENINQDVKAYLRHADDMHIIGIDRGERHLLYLVVIDLQGNIKEQYSLNEIVNEYNGNTYHTNYHDLLDVREEERLKARQSWQTIENIKELKEGYLSQVIHKITQLMVKYHAIVVLEDLNMGFMRGRQKVEKQVYQKFEKMLIDKLNYLVDKKADASVSGGLLNAYQLTSKFDSFQKLGKQSGFLFYIPAWNTSKIDPVTGFVNLLDTRYQNVEKAKVFFSKFDAIRYNKDKDWFEFNLDYDKFGKKAEGTRTKWTLCTRGMRIDTFRNKEKNSQWDNQKVDLTAEMKSLLEHYYIDIHGNLKDAISAQTDKAFFTGLLHILKLTLQMRNSITGTETDYLVSPVADENGIFYDSRSCGDELPENADANGAYNIARKGLMLIEQIKEAKDLDNLKFDISNKSWLNFAQQKPYKNG

SEQ ID NO: 1594 - protein, 1274 aa, unidentified
  REGION 1..1274: note = Category: MG75 effectors
  REGION 1..1274: note = Description: MG75-80 effector
  source 1..1274: note = uncultivated organism sequence
MAKNFEDFKRLYPLSKTLRFEAKPIGATLDNIVKSGLLDEDEHRAASYVKVKKLIDEYHKVFIDRVLADGCLPLENEGHNNSLAEYYDSYVSKSQNEDAKKAFEENQQNLRSIIAKKLTEDKAYANLFGKNLIESYKDKEDKKKIIDSDLIQFICTAEATQLDSMSQDEAKEIVKEFWGFTTYFVGFFDNRKNMYTVEEKSTGIAYRLINENLPKFIDNMEAFKKAIARPEIQANMEELYSNFSEYLNVESIQEMFLLDYYNMLLTQKQIDVYNAIIGGKTDDEHDVKIKGINEYINLYNQQHKDNKLPKFKALFKQILSDRNAISWLPEEFNSDQEVLNAIKDCYERLSENVLGDKVLKSLLGSLSDYTLDGIFIRNDLQLTDISQKMFGNWCVIQNAIMQNIKHVAPARKHKESEEDYEKRIAGIFKKADSFSISYINDCLNEADSNNAYFVENYFATFGAVNTPTMQRENLFSLVQNAYTEVAALLHSDYPTAKHLAQDKANVAKIKALLDAIKALQHFVKPLLGKGDESDKDERFYGELALLWAELDTVTPLYNMIRNYMTRKPYSQKKIKLNFENPQLLGGWDANKEKDYATIILRRDGLYYLAIMNKESKKLLGKAMPSDGECYEKMVYKLLPGANKMLPKVFFAKSRMEDFKPSKELVEKYNNGTHKKGKNFNIQDCHNLIDYFKQSISKHEDWGKFGFNFSDTSTYEDLSVFYREVEQQGYKLSFARVSVSYISQLVEEGKMYLFQIYNKDFSEYSKGTPNMHTLYWKALFDERNLADVVYKLNGQAEMFYRKKSIENTHPTHPANHPILNKNKDNKKKESLFDYDLIKDRRYTVDKFMFHVPITMNFKSSGSENINQDVKAYLRHADDMHIIGIDRGERHLLYLVVIDLQGNIKEQYSLNEIVNEYNGNTYHTNYHDLLDVREEERLKARQSWQTIENIKELKEGYLSQVIHKITQLMVKYHAIVVLEDLNMGFMRGRQKVEKQVYQKFEKMLIDKLNYLVDKKADAFVSGGLLNAYQLTSKFDSFQKLGKQSGFLFYIPAWNTSKIDPVTGFVNLLDTRYQNVEKAKVFFSKFDAIRYNKDKDWFEFNLDYDKFGKKAEGTKTKWTLCTRGMRIDTFRNKEKNSQWDNHEVDLTAEMKSLLEHYYIDIHGNLKDAISAQTDKVFFTGLLHILKLTLQMRNSITGTETDYLISPVADENGIFYDSRSCGDELPENADANGAYNIARKGLMMIEQIKDAKDLDNLKFDISNKSWLNFAQQKPYKNE

SEQ ID NO: 1595 - protein, 1222 aa, unidentified
  REGION 1..1222: note = Category: MG75 effectors
  REGION 1..1222: note = Description: MG75-81 effector
  source 1..1222: note = uncultivated organism sequence
MKKLIDEYHKVFIDRVLNDGCLTIENKGKQDSLEEYFESYISKSNDENANKAFKEIQGNLRSLIANKLTKDKGYANLFGKNLIESYKDKDDTKKIIDSDLIQFINTAEPSKLDSMSQDEAKELVKEFRGFTTYFVGFFDNRKNMYTSEEKSTGIAYRLVNENLPKFIDNMEAFKKAIAKPEIQANMEELYSNFAEYLNVESIQEMFKLDYYNMLLTQKQIDVYNAIIGGKTDEDHDVKIKGINEYINLYNQQHKDEKLPKLKALFKQILSDRNAISWLPEEFNSDQDVLNAIKDCYERLSENVLGDKVLKSLLCSLSDYNLNGIFVRNDLQLTDISQKTFGNWSVIQNAIMQNIKNVAPARKRKESEEDYEKRISDIFKKADSFSIQYINDCLNEMDNNNLHAVDGYFATLGAVNTPTMQRENLFALIQNAYTDISDLLDTPYPENKNLAQDKTNVAKVKALLDAIKSLQHFVKPLLGMGDESDKDERFYGELASLWTELDTVTPLYNMIRNYMTRKPYSEKKIKLNFENPQLLGGWDANKEKDYATIILRRNGMYYLAIMDKDSKKLLGKTMPSDGECYEKMVYKLLPGANKMLPKVFFAKSRINDFKPSKKIVENYNNGTHKKGKNFNINDCHDLIDYFKQSIDKHEDWSKFGFNFSDTSTYEDLSGFYREVEQQGYKLSFTNISVSFIDKLVDEGKMYLFQIYNKDFSDYSKGTPNMHTLYWKALFDERNLADVVYKLNGQAEMFYRKKSIDYTHPTHPANHPIQNKNKDNKKKESVFEYDLVKDRRYTVDKFLFHVPINMNFKSVGSENINQQVREYLQQADDTHIIGIDRGERHLLYLVVIDMQGNIKEQFTLNEIVNEYNGNTYRTNYHDLLDTREEERLTARQSWQTIENIKELKEGYLSQVVHKITQLMVKYHAVVVLEDLNKGFMRGRQKVEKQVYQKFEKMLIDKLNYLVDKKADAAQSGGLLNAYQLTSKFDSFQKLGKQSGFLFYIPAWNTSKIDPVTGFVNLLDTRYQNTEKSKAFFSKFDAIRYNADKDWFEFNLDYDKFGTKAEGTRTKWILCTQGNRICRNADKNPQWDNPKIDLTRELKSLFEHYNINICGNLKEEICSQTDKAFFTGLLHILKLTLQMRNSITGTETDYLVSPVADENGVFYDSRSCGDRLPENADANGAYNIARKGLMLIGQIKETKDLANFKYDISNKAWLNFAQQKPYKNE

SEQ ID NO: 1596 - protein, 1245 aa, unidentified
  REGION 1..1245: note = Category: MG75 effectors
  REGION 1..1245: note = Description: MG75-82 effector
  source 1..1245: note = uncultivated organism sequence
METFSGFTNLYPLSKTLRFRLIPVGETLKYFIGSGILEEDQHRAESYVKVKAIIDDYHRAYIENSLSGFELPLESTGKFNSLEEYYLYHNIRNKTEEIQNLSSKVRTNLRKQVVAQLTKNEIFKRIDKKELIQSDLIDFVKNEPDANEKIALISEFRNFTVYFKGFHENCRNMYSDEEKSTSIAFRLIHENLPKFIDNMEVFAKIQNTSISENFDAIQKELCPELVTLCEMFKLGYFNKTLSQKQIDAYNTVIGGKTTSEGKKIKGLNEYINLYNQQHKQEKLPKMKLLFKQILSDRESASWLPEKFENDSQVVGAIVNFWNTIHDTVLAEGGLKTIIASLGSYGLEGIFLKNDLQLTDISQKATGSWGKISSEIKQKIEVMNPQKKKESYETYQERIDKIFKSYKSFSLAFINECLRGEYKIEDYFLKLGAVNSSSLQKENHFSHILNTYTDVKEVIGLYSESTDTKLIQDNDSIQKIKQFLDAVKDLQAYVKPLLGNGDETGKDERFYGDLIEYWSLLDLITPLYNMVRNYVTQKPYSVDKIKINFQNPTLLNGWDLNKETDNTSVILRRDGKYYLAIMNNKSRKVFLKYPSGTDRNCYEKMEYKLLPGANKMLPKVFFSKSRINEFMPNERLLSNYEKGTHKKSGTCFSLDDCHTLIDFFKKSLDKHEDWKNFGFKFSDTSTYEDMSGFYKEVENQGYKLSFKPIDATYVDQLVDEGKIFLFQIYNKDFSEHSKGTPNMHTLYWKMLFDETNLGDVVYKLNGEAEVFFRKASINVSHPTHPANIPIKKKNLKHKDEERILKYDLIKDKRYTVDQFQFHVPITMNFKADGNGNINQKAIDYLRSASDTHIIGIDRGERNLLYLVVIDGNGKICEQFSLNEIEVEYNGEKYSTNYHDLLNVKENERKQARQSWQSIANIKDLKEGYLSQVIHKISELMVKYNAIVVLEDLNAGFMRGRQKVEKQVYQKFEKKLIEKLNYLVFKKQSSDLPGGLMHAYQLANKFESFNTLGKQSGFLFYIPAWNTSKMDPVTGFVNLFDVKYESVDKAKSFFSKFDSIRYNVERDMFEWKFNYGEFTKKAEGTKTDWTVCSYGNRIITFRNPDKNSQWDNKEINLTENIKLLFERFGIDLSSNLKDEIMQRTEKEFFIELISLFKLVLQMRNSWTGTDIDYLVSPVCNENGEFFDSRNVDETLPQNADANGAYNIARKGMILLDKIKKSNGEKKLALSITNREWLSFAQGCCKNG

SEQ ID NO: 1597 - protein, 1245 aa, unidentified
  REGION 1..1245: note = Category: MG75 effectors
  REGION 1..1245: note = Description: MG75-83 effector
  source 1..1245: note = uncultivated organism sequence
MGIFSDFTNLYPLSKTLRFKLIPVGETLKHFMDSGILEEDQHRAESYVKVKAIIDDYHRAYIESALAGFELPLESTGKYNSLEEYYMYHSIRNKTEEIQNTLSKIRASLRKQIVGQLVKNEKFKRIDKKELIQDDLIDFVRNDADADEKIGLISEFRNFTVYFKGFHENRKNMYSDEEKSTSIAFRLIHENLPKFIDNMEVFAKIANTSISDDFVAVQKELCPESVTLCEMFKLGYFNKTLSQKQIDAYNTIIGGKTTSDGDKIKGLNEYINLYNQQHRQEKLPKMKLLFKQILSDKESASWLPEKFENDSQVARAILDFWNTIRDTVLAEGGLRTVVSSLGSYCLEGVFLKNDLQLADISQKATGDWGKIAAEIKVKIESTNPQKKKESYEVYQERIDKLFKSYKSFSLAFVNDCLRGEYKIEDYFVRLGAVNTDTLQKENHFARIFNAYTDVKEVLESYANSSDTQLIQDNVSIQKLKQFLDAVKELQAYVKPLLGCGDESGKDERFYGDFVEYWNQLDLITPLYNMVRNYVTRKPYSVEKIKINFQNPTLLNGWDLNKETDNTSVILRRGGKYYLAIMNSKFRKVFLEYPSGVNRDCYEKMEYKLLPGANKMLPKVFFSKSRINEFMPDDELLSNYEKGTHKKSGNCFSLDDCHALIDFFKKSLNKHEDWKNFGFKFSDTSTYTDMSGFYKEVEHQGYKLSFKPVDAGYVDGLVDEGKIFLFQIYNKDFSESSKGTPNLHTLYWRMLFDETNLGDVVYKLNGEAELFFRKASIKVSHPTHPANVPIRKKNPMHKDEERTLKYDLIKDKRYTVDQFQFHVPITMNFKSDGSGNINQKVLEYLRAASDTHIIGIDRGERNLLYLVVIDGNGKICEQFSLNEVKVEYNGEVYSTDYHELLDVKEAERKQARQSWQSIANIKELKEGYLSQVIHKIAEMIVKYHAIVVLEDLNAGFMRGRQKVEKQVYQKFEKMLIEKLNYLVFKKQPSDLPGGLMHAYQLTNKFESFSSLGKQCGFLFYIPAWNTSKMDPVTGFVNLFDVKYESVDKAKSFFSKFESIRYNAERDLFEWKFNYGDFTKKAEGSKSDWTACSYGNRIITYRNPDKNAQWDSKEINLTACIKTLFEKFGIDLSSNLKEAIMQRDEKEFFVELISLFKLVLQIRNSLTGKDIDYLMSPVCNANGDFFDSRKVDESLPQNADANGAYNIARKGMILLDKIRECVGDKKLNLAITNKEWLSFAQGYCKNG

SEQ ID NO: 1598 - protein, 1274 aa, unidentified
  REGION 1..1274: note = Category: MG75 effectors
  REGION 1..1274: note = Description: MG75-84 effector
  source 1..1274: note = uncultivated organism sequence
MAKNFEDFKRLYPLSKTLRFEAKPIGATLDNIVKSGLLDEDEHRAASYVKVKKLIDEYHKVFIDRVLDNGCLPLEDKGDNNSLAEYYDSYVSKSQNEDAKKAFKEIQQNLRSIIAKKLTDDKAYANLFGNKLIESYKDKADKTKIIDSDLIQFIHTAESTQLDSMSQDEAKELVKEFWGFTTYFVGFFDNRKNMYTAEEKSTGIAYRLINENLPKFIDNMEAFKKAIARPEIQANMEELYSNFSEYLNVESIQEMFLLDYYNMLLTQKQIDVYNAIIGGKTDDEHDVKIKGINEYINLYNQQHKDDKLPKLKALFKQILSDRNAISWLPEEFNSDQEVLNAIKDCYERLAENVLGDKVLKSLLGSLADYSLDGIFIRNDLQLTDISQKMFGNWGVIQNAIMQNIKHVAPARKHKESEEDYEKRIAGIFKKADSFSISYINDCLNEADPNNAYFVENYFATFGAINTPTMQRENLFALVQNAYTEVAALLHSDYPTVKHLAQDKANVSKIKALLDAIKSLQHFVKPLLGKGDESDKDERFYGELASLWAELDTVTPLYNMIRNYMTRKPYSQKKIKLNFENPQLLGGWDANKEKDYATIILRRNGLYYLAIMNKDSKKLLGKAMPSDGECYEKMVYKLLPGANKMLPKVFFAKSRMEDFKPSKELVEKYNNGTHKKGKNFCIQDCHNLIDYFKQSIDKHEDWSKFGFNFSETSTYEDLSGFYREVEQQGYKLSFARVSVSYINQLVEEGKMYLFQIYNKDFSEYSKGTPNMHTLYWKALFAERNLADVVYKLNGQAEMFYRKKSIENTHPTHPANHPILNKNKDNKKKESLFEYNLIKDRRYTVDKFMFHVPITMNFKSSGSENINQDVKAYLRYADDMHIIGIDRGERHLLYLVVIDLQGNIKEQVSLNEIVNDYNGNTYHTNYHDLLDVREDERLKARQSWQAIENIKELKEGYLSQVIHKITQLMVKYHAIVVLEDLNMGFMRGRQKVEKQVYQKFEKMLIDKLNYLVDKKADVSVSGGLLNAYQLTSKFDSFQKMGKQSGFLFYIPAWNTSKIDPITGFVNLLDTRYQNVEKAKVFFSKFDAIRYNKDKDWFEFNLDYDKFGKKAEGTRTKWALCTRGMRIDTFRNKEKNSQWDNQEVDLTAEMKSLLEHYYIDIHGNLKDAISAQTDKAFFTGLLHILKLTLQMRNSITGTETDYLVSPVADENGIFYDSRSCGDELPENADANGAYNIARKGLMMIEQIKEAKDLDNLKFDISNKSWLNFAQQKPYKNG

SEQ ID NO: 1599 - protein, 1272 aa, unidentified
  REGION 1..1272: note = Category: MG75 effectors
  REGION 1..1272: note = Description: MG75-85 effector
  source 1..1272: note = uncultivated organism sequence
MKFDDFKKLYSLSKTLRFEAKPVGSTLKNIIESGLLEEDEHRAQSYVKVKKLIDEYHKVFIDRVLNDGCLTIENKGKKDSLEEYYESYMSKSNDENVSKTFKEIQENLRSVIAKKLTDNNAYANLFGNKLIESYKDKDEKNKIIDSDLIQFINTAEPSQLDSMSQDEAKELVKEFWGFTTYFVGFFDNRKNMYTSEEKSTGIAYRLVNENLPKFIDNMEAFKKAIAKPEIQTNMEELYSNFAEYLNVESIQEMFQLDYYNMLLTQKQIDVYNAIIGGKTDEEHDIKIKGINEYINLYNQQHKDEKLPKLKALFKQILSDRNAISWLPEEFNSDQEVLNAINDCYKRLSENVLGDKVLKSLLCSLDDYNLDGIFVRNDLQLTDISQKMFGNWSVIQSAIMQNIKNVAPARKRKESEEDYEKRISDIFKKADSFSIQYINDCLNEMDNNNLHAVDGYFATLGAVNTPTMQRENLFALIQNAYTDISNLLETPYPENKNLAQDKTNVAKVKALLDAIKSLQHFVKPLLGKGDESDKDERFYGELASLWTELDTVTPLYNMIRNYMTRKPYSEKKIKLNFENPQLLGGWDANKEKDYATIILRRNGMYYLAIMDKDSKKLLGKTMPSDGECYEKMVYKLLPGANKMLPKVFFAKSRINDFKPSKLIVENYNNGTHKKGKNFNINDCHNLIDYFKQSIDKHEDWSKFGFNFSDTSTYEDLSGFYREVEQQGYKLSFTNVSVSFIDKLVDDGKMYLFQIYNKDFSDFSKGTPNMHTLYWKALFDERNLADVVYKLNGQAEMFYRKKSINNTHPTHPANHPIQNKNKDNKKKESVFEYDLIKDRRYTVDKFLFHVPITMNFKSVGSENINQQVREYLQQADDTHIIGIDRGERHLLYLVVIDMQGNIKEQFTLNEIVNEYNGNTYRTNYHDLLDTREEERLTARQSWQTIENIKELKEGYLSQVIHKITQLMVKYHAVVVLEDLNKGFMRGRQKVEKQVYQKFEKMLIDKLNYLVDKKADAAQSGGLLNAYQLTSKFDSFQKLGKQSGFLFYIPAWNTSKIDPVTGFVNLLDTRYQNTEKAKAFFSRFDAIRYNANKDWFEFYLDYDKFCTKAEGTRTRWTLCTQGSRISTFRNAEKNSQWDNLEVDLTREMKSLFEHYHINICGNLKEEICLQTDKAFFTGLLHMLKLTLQMRNSITGTETDYLISPVADENGTFYDSRSCDATLPKNADANGAYNIARKGLMFIGQIKETKDLANFKYDISNKAWLNFAQQKPYKNE

SEQ ID NO: 1600 - protein, 1319 aa, unidentified
  REGION 1..1319: note = Category: MG75 effectors
  REGION 1..1319: note = Description: MG75-86 effector
  source 1..1319: note = uncultivated organism sequence
MAKIFEDFKRLYPLSKTLRFDAKPVGATLDNIVKSGLLEEDEHRAASYVRVKKLIDEYHKVFIDRVLDNGCLPLENKGENNSLAEYYDSYVSKSQNEDAKKAFEENQQNLRSIIAKKLTGDKAYANLFGKNLIESYKDKKDKKKIIDSDLIQFINTADSTQLDSMTQVEAKELVKEFWGFVTYFYGFFDNRKNMYTAEKKSTGIAYRLINENLPKFIDNMEAFKKVIARPEIQANMEELYSDFSEYLNVESIQEMFQLDYYDMLLTQKQIDVYNAIIGGKTDDEHDVKIKGINEYINLYNQQHKDTRLPKLKALFKQILSDRNAISWLPEEFNSDQEVLNAIKDCYERLSENVLGDKVLKSLLGSLADYSLEGIFIRNDLQLTDVSQKMFGNWGVIQNAIMQNIKHVAPARKHKESEEEYEKRIAGIFKKADSFSISYLNDCLNEADPNNAYFVENYFATFGAVNTPTMQRENLFALVQNKYTEVAALLHSDYPTAKHLAQDKANVAKIKALLDAIKSLQHFVKPLLGKGDESDKDERFYGELASLWAELETVTPLYNMIRNYMTRKPYSQKKIKLNFENPQLLDGWDANKEKDYATIILRRNGLYYLAIMGKDSKNLLGKAMPSDGECYEKMVYKQFDISKQLPKCTTELKHVRKALVEDAKRSCLLSDFNNWNKPLNVTRKLWELNNFVWDKKKEDWVLRKKDNETRPKKFHKKYLELTSDKKGYNQAKNDWIKFIKEFLSSYKKVEAYDIHYKKRYNSVDELYKQLNGDLYAISFTYVSASFIEQLVSEGKMYLFQIYNKDFSEYSKGTPNMHTLYWKALFDERNLADVVYKLNGQAEMFYRKKSIENTHPTHPANHPILNKNKDNKKKESLFDYDLIKDRRYTVDKFMFHVPITMNFKSSGSENINQDVKAYLRHADDMHIIGIDRGERHLLYLVVIDLQGNIKEQYSLNEIVNEYNGNTYHTNYHDLLDVREEERLKARQSWQTIENIKELKEGYLSQVIHKITQLMVKYHAIVVLEDLNMGFMRGRQKVEKQVYQKFEKMLIDKLNYLVDKKADASVSGGLLNAYQLTSKFDSFQKMGKQSGFLFYIPAWNTSKIDPVTGFVNLLDTRYQNVEKAKVFFSKFDAIRYNKDKDWFEFNLDYDKFGKKAEGTRTKWALCTRGMRIDTFRNKEKNSQWDNQEVDLTAEMKSLLEHYYIDIHGNLKDAISAQTDKTFFTGLLHILKLTLQMRNSITGTETDYLVSPVADENGIFYDSRSCGDELPENADANGAYNIARKGLMMIEQIKDAKDLNNLKFDISNKAWLNFAQQKPYKNG

SEQ ID NO: 1601 - protein, 1274 aa, unidentified
  REGION 1..1274: note = Category: MG75 effectors
  REGION 1..1274: note = Description: MG75-87 effector
  source 1..1274: note = uncultivated organism sequence
MAKIFEDFKRLYPLSKTLRFEAKPIGATLDNMVKSGLLDEDEHRAASYVKVKKLIDEYHKVFIDRVLDNGCLPLKNEGHNNSLTEYYESYVTKSQNEDAKKVFKEIQQNLRSIIAKKLTEDKAYANLFGKNLIESYKDKTDKTKIIDSDLIKFINTAESTQLDSMSQDEAKELVKEFWGFTTYFVGFYDNRKNMYTAEEKSTGIAYRLVNENLPKFIDNMEAFKKAIARPEIQANMEELYSDFSEYLNVESVQEMFQLDYYNMLLTQKQIDVYNAIIGGKTDDEHDVKIKGINEYINLYNQQHKDDKLPKLKALFKQILSDRNAISWLPEEFNGDQEVLNAIKDCYERLSENVLGDKVLKSLLGSLADYSLEGIFIRNDLQLTDVSQKMFGNWGVIQNAIIQNIKHVAPARKHKESEEEYEKRIAGIFKKADSFSISYINDCLNEADPNNAYFVENYFATQGAVDTPTMQRENLFALVQNAYTEVAALLHSDYPTAKNLAQDKADVAKIKALLDAIKSLQHFVKPLLGKGDESDKDERFYGELTSLWSELDTVTPLYNMIRNYMTRKPYSQKKIKLNFENPQLLGGWDANKEKDYATIILRRNGLYYLAIMNKDSKKLLGKAMPSDGECYEKMVYKLLPGANKMLPKVFFTKSRMGDFKPSKELIEKYNNGTHKKGKNFNIQDCHNLIDYFKQSISKHEDWGKFGFNFSDTSTYEDLSGFYREVEQQGYKLSFARVSVSYISQLVEEGKMYLFQIYNKDFSEYSKGTPNMHTLYWKALFDECNLADVVYKLNGQAEMFYRKKSIENTHPTHPANHPIQNKNKDNKKKESLFDYDLIKDRRYTVDKFMFHVPITMNFKSSGSENINQDVKAYLRHADDMHIIGIDRGERHLLYLVVIDLQGNIKEQFSLNEIVNEYNGNTYHTNYHDLLDVREEERLKARQSWQTIENIKELKEGYLSQVIHKITQLMVKYHAIVVLEDLNMGFMRGRQKVEKQVYQKFEKMLIDKLNYLVDKKADASVSGGLLNAYQLTSKFDSFQKLGKQSGFLFYIPAWNTSKIDPITGFVNLLDTRYQNVEKAKVFFSKFDAIRYNKDKDWFEFNLDYDKFGKKAEGTRTKWTLCTRGMRIDTFRNKEKNSQWDNQEVDLTAEMKSLLEHYYIDIHGNLKDAISAQTDKAFFTGLLHILKLTLQMRNSITGTETDYLVSPVADENGIFYDSRSCGDELPENADANGAYNIARKGLMMIEQIKDAKDLDNLKFDISNKSWLNFAQQKPYKNE

SEQ ID NO: 1602 - protein, 1274 aa, unidentified
  REGION 1..1274: note = Category: MG75 effectors
  REGION 1..1274: note = Description: MG75-88 effector
  source 1..1274: note = uncultivated organism sequence
MAKIFEDFKRLYPLSKTLRFEAKPIGATLDNMVKSGLLDEDEHRAASYVKVKKLIDEYHKVFIDRVLDNGCLPLKNEGHNNSLTEYYESYVTKSQNEDAKKVFKEIQQNLRSIIAKKLTEDKAYANLFGKNLIESYKDKTDKTKIIDSDLIKFINTAESTQLDSMSQDEAKELVKEFWGFTTYFVGFYDNRKNMYTAEEKSTGIAYRLVNENLPKFIDNMEAFKKAIARPEIQANMEELYSDFSEYLNVESVQEMFQLDYYNMLLTQKQIDVYNAIIGGKTDDEHDVKIKGINEYINLYNQQHKDDKLPKLKALFKQILSDRNAISWLPEEFNGDQEVLNAIKDCYERLSENVLGDKVLKSLLGSLADYSLEGIFIRNDLQLTDVSQKMFGNWGVIQNAIIQNIKHVAPARKHKESEEEYEKRIAGIFKKADSFSISYINDCLNEADPNNAYFVENYFATQGAVDTPTMQRENLFALVQNAYTEVAALLHSDYPTAKNLAQDKADVAKIKALLDAIKSLQHFVKPLLGKGDESDKDERFYGELTSLWSELDTVTPLYNMIRNYMTRKPYSQKKIKLNFENPQLLGGWDANKEKDYATIILRRNGLYYLAIMNKDSKKLLGKAMPSDGECYEKMVYKLLPGANKMLPKVFFAKSRMGDFKPSKELIEKYNNGTHKKGKNFNIQDCHNLIDYFKQSISKHEDWGKFGFNFSDTSTYEDLSGFYREVEQQGYKLSFARVSVSYISQLVEEGKMYLFQIYNKDFSEYSKGTPNMHTLYWKALFDECNLADVVYKLNGQAEMFYRKKSIENTHPTHPANHPIQNKNKDNKKKESLFDYDLIKDRRYTVDKFMFHVPITMNFKSSGSENINQDVKAYLRHADDMHIIGIDRGERHLLYLVVIDLQGNIKEQFSLNEIVNEYNGNTYHTNYHDLLDVREEERLKARQSWQTIENIKELKEGYLSQVIHKITQLMVKYHAIVVLEDLNMGFMRGRQKVEKQVYQKFEKMLIDKLNYLVDKKADASVSGGLLNAYQLTSKFDSFQKLGKQSGFLFYIPAWNTSKIDPITGFVNLLDTRYQNVEKAKVFFSKFDAIRYNKDKDWFEFNLDYDKFGKKAEGTRTKWTLCTRGMRIDTFRNKEKNSQWDNQEVDLTAEMKSLLEHYYIDIHGNLKDAISAQTDKAFFTGLLHILKLTLQMRNSITGTETDYLVSPVADENGIFYDSRSCGDELPENADANGAYNIARKGLMMIEQIKDAKDLDNLKFDISNKSWLNFAQQKPYKNE

SEQ ID NO: 1603 - protein, 1271 aa, unidentified
  REGION 1..1271: note = Category: MG75 effectors
  REGION 1..1271: note = Description: MG75-89 effector
  source 1..1271: note = uncultivated organism sequence
MEFNDFKRLYPLSKTLRFEAKPIGSTLNNIIKSGLLEEDEHRAQSYVKVKKLIDEYHKVFIDRVLDDGCLTIENKDKKNSLEEYYESYMSKSNDENVSKTFKEIQENLRSVIAKKLTDDNAYANLFGNKLIESYKDKDDKKKIIDSDLIQFINTAEPSQLDSMSQDEAKELVKEFWGFTTYFVGFFDNRKNMYTSEEKSTGIAYRLVNENLPKFIDNMEAFKKAIAKPEIQANMGELYSNFAEYLNVESIQEMFQLDYYNMLLTQKQIDVYNAIIGGKTDEDHDVKIKGINEYINLYNQQHKDEKLPKLKALFKQILSDRNAISWLPEEFNSDKEVLNAIKDCYERLSENVLGDKVLKSLLCSLSDYNLNGIFVRNDLQLTDISQKMFGNWSVIQNAIMQNIKNVAPARKRKESEEDYEKRISDIFKKADSFSIQYINDCLNEMDNNNLHAVDGYFATLGAVNTPTMQRENLFALIQNAYTDISDLLDTPYPENKNLAQDKTNVAKVKALLDAIKSLQHFVKPLLGMGDESDKDERFYGELASLWTELDTVTPLYNMIRNYMTRKPYSEKKIKLNFENPQLLGGWDANKEKDYATIILRRNGMYYLAIMDKDSKKLLGKTMPSDGECYEKMVYKLLPGANKMLPKVFFAKSRINDFKPSKKIVENYNNGTHKKGKNFNINDCHDLIDYFKQSIDKHEDWSKFGFNFSDTSTYEDLSGFYREVEQQGYKLSFTNVSASFIDKLVDEGKMYLFQIYNKDFSDYSKGTPNMHTLYWKALFDERNLADVVYKLNGQAEMFYRKKSIDYTHPTHPANHPIQNKNKDNKKKESVFEYDLVKDRRYTVDKFLFHVPITMNFKSVGSENINQQVREYLQQADDTHIIGIDRGERHLLYLVVIDMQGNIKEQFTLNEIVNEYNGNTYRTNYHDLLDTREEERLTARQSWQTIENIKELKEGYLSQVVHKITQLMVKYHAVVVLEDLNKGFMRGRQKVEKQVYQKFEKMLIDKLNYLVDKKADATQSGGLLNAYQLTSKFDSFQKLGKQSGFLFYIPAWNTSKIDPVTGFVNLLDTRYLNTEKAKAFFSKFDAIRYNADKDWFEFNLDYDKFGTKAEGTRTTWTLCTQGNRICTFRNAEKNSQWDNQEIDLTREMKSLFEHYHINICGNLKEEICSQTDKAFFTGLLHILKLTLQMRNSITGTETDYLVSPVADENGVFYDSRSCGDTLPKNADANGAYNIARKGLMLIGQIKETKDLANFKYDISNKAWLNFAQQKPYKK

SEQ ID NO: 1604 - protein, 1264 aa, unidentified
  REGION 1..1264: note = Category: MG75 effectors
  REGION 1..1264: note = Description: MG75-90 effector
  source 1..1264: note = uncultivated organism sequence
MNFEQFTHLYPLSKTLRFELRPVGATLARIKEGGFLENDNHRAESYKKVKKLIDEYHKHFIEQALGDFSLTENETEGSKCLNSYLETYIQLYRSSRIEDAEKKAFEKVQAEMRKLIAKTLKGSEAYKRLFKQELIKEDLTAFLRTHGGTVADEELVEEFKNFTTYFTGFYENRENMYSEEEKSTAISNRLVNENLPKFVDNMAAFAIIAQVPEVRAMLDVMQKDLGAELDGTTIDELFTLPFFNKVLTQKQIAVYNAVIGGKVRDSHSKGESHIKGINQIVNLYNQQHKDARLPKLKMLYKQILSDREALSWLPEKFDKDADLLKAIHDGYERLASDGVLENLRTLLESMADYQAEGIFITNDQQLTRISQKMFGEWSFISEAILCVLKKEVPQKRNECDEKYEERIDKMLKNHGGFSIRFIDDCVAAYVNTLDDEEQKKRFIPTVEAYFATLGAFDTEEEQTVNFFSRIQNARDALQGLLDSAYPEGRALIQDKENGALLKELLDAILALMHFVKPLLGKNENGKDERFYGELMQIWDEFDSFVPLYNMSRNYLTQKPYSEEKYKLNFENSQLLKGWDLNKEADNTSIILRKDGLFYLAIMNKKHNKLFARELPADGDCYDKMDYKLLPGPNKMFPKVFFSKSRIAEFAPSEHIMDVYRKGSFKKGDTFNLQDCHDLIDFFKASILKHEDWRQFEFKFSETEQYDDISGFYREVEAQGYKVTFRQVSVSYIDRLVNEGKLYLFQIYNKDFSSYSKGTPNMHTLYWRALFDERNLSDVVYKLNGEAEVFYRKKSIEAHPTHPANRPIKNKNKLNDKVESLFAYDLIKDRRYSEDKFSLHVPITMNFKSIGGPNINDDVVEFLRTNENLHFIGIDRGERHLLYLTVIDSHGHILEQRTLNDVVNNYQGKDYHTDYHDLLETRERQRQEARSSWKAIENIKDLKEGYLAQVVHQIAQLMVKYHAIVVLEDLNGGFMRGRQKVERSVYQQFEKKLIDKLNYLVDKKTDAHAPGGLMNAYQLANQFKSFKSMGRQSGFIFYIPAWNTSKIDPVTGFTNLFDTRYKNVHDAQQFFSMFKSIRYNETADRFEFRFSYSDFTRKAEGSRTDWTVCTYGTRIKTFRDPQKNNEWTSKEVVLTEEFKKFFASYGVDIHSNLKDSIAAHDEKAFFEQLLALMRLTLQIRNSKSGTDVDYLLSPVADENGVFFDSRSCGNSLPQDADANGAYNIARKGLMLVRQMREAKDLKKFKADMTNRNWLKFAQEKPYLND

SEQ ID NO: 1605 - protein, 1246 aa, unidentified
  REGION 1..1246: note = Category: MG75 effectors
  REGION 1..1246: note = Description: MG75-91 effector
  source 1..1246: note = uncultivated organism sequence
MMETFSDFTNLYPLSKTLRFRLIPVGKTLRHFIDSGILEEDQHRAESYVKVKAIIDDYHRSYIESSLSAFELPVESMGKSNSLEEYYLYHNIRNKTEDIQNALSKVRNNLRKQIVAQLTKNEMFKRIDKKELIQNDLIDFVKNEPDANEKIALISEFRNFTVYFKGFHENRKNMYSDEEKSTSIAFRLIHENLPKFIDNMEVFAKIQNTSISEKFDAIQKELCPDSVAFVDMFKLGYFNRTLSQRQIDAYNTVISGRTTAEGEKIKGLNEYINLYNQQHKQEKLPKMKLLFKQILSDRESASWLPEKLENDKQVVGALVDFWNAIHDTVLAEGGLKTVISSLVSYSLEGIFLKNDLQLTDVSQKATGSWSKIPAAIKQKLEAMNPQKKKESYEGYQERIDKIFKSYKSFSLAFINECLHGEYKIEDYFIKLGAINTDLLQKENHFSHILNTYTDIKEVIESYSESTDTKLIRDNGSIQKIKQFLDAVKDLQSYVKPLLGNGDETGKDERFYGDFVEYWNQLDLITPLYNMVRNYVTQKNYSIEKIKINFQNPTLLNGWDLNKETDNTSVILRRDGKYYLAIMNSKFRKVFLKYPSGSDRNCYEKMEYKLLPGANKMLPKVFFSKSRIQEFMPDERLLSNYEKGTHKKTGNCFSLTDCHALIDFFKKSLNKHEDWKNFGFKFSNTSTYTDMSGFYKEVENQGYKLSFKPVDAVYVDQLVDEGKIFLFQIYNKDFSEHSKGTPNMHTLYWKMLFDETNLGDVVYKLNGEAEVFFRKASIKVSSPTHPANVPIKKKNPKHKDEERLLKYDLIKDKRYTVDQFQFHVPITMNFKSDGNGNINQKVVEYLRSASNIHIIGIDRGERNLLYLVVIDGSGKICEQFSLNEIKVEHNGETYSTNYHDLLDIKENERKQARQSWQSIANIKELKEGYLSQVIHKISELMVKYNAIVVLEDLNTGFMRGRQKVEKQVYQKFEKMLIEKLNYLVFKKQPSDSCGGLMHAYQLTNKFEGFNKLGKQSGFLFYIPAWNTSKMDPMTGFVNLFDLKYESIDKAKSFFSKFDSIRYNVERDMFEWKFNYDEFTKKAEGTKTNWTVCSYGNRIITFRNPNKNSQWDNKEINLTENIKLLFERFGIDLSSNLKDEIMQRTEKEFFIELISLFKLVLQMRNSWTGTDIDYLVSPVCNEKGEFFDSRNVDKALPQNADANGAYNIARKGLILLDRIKESTSDKKLNFSITNKEWLSFVQGCCKNG

SEQ ID NO: 1606 - protein, 1274 aa, unidentified
  REGION 1..1274: note = Category: MG75 effectors
  REGION 1..1274: note = Description: MG75-92 effector
  source 1..1274: note = uncultivated organism sequence
MAKIFEDFKRLYPLSKTLRFEAKPIGATLDNIIKSGLLDEDEHRAASYVRVKKLIDEYHKVFIDRVLDNGCLPLKNEGHNNSLTEYYESYVTKSQNEDAKKVFKEIQQNLRSIIAKKLTEDKAYANLFGKNLIESYKDKTDKTKIIDSDLIKFINTAESTQLDSMSQDEAKELVKEFWGFTTYFVGFYDNRKNMYTAEEKSTGIAYRLVNENLPKFIDNMEAFKKAIARPEIQANMEELYSDFSEYLNVESVQEMFQLDYYNMLLTQKQIDVYNAIIGGKTDDEHDVKIKGINEYINLYNQQHKDDKLPKLKALFKQILSDRNAISWLPEEFNGDQEVLNAIKDCYERLSENVLGDKVLKSLLGSLADYSLDGIFIRNDLQLTDISQKMFGNWGVIQNAIMQNIKHVAPARKHKESEEDYEKRIAGIFKKADSFSISYINDCLNEADPNNAYFVENYFATFGAVNTPTMQRENLFALIQNAYTEVAALLHSDYPIAKHLAQDKANVAKIKALLDAIKSLQHFVKPLLGKGDESDKDERFYGELASLWAELDMVTPLYNMIRNYMTRKPYSQKKIKLNFENPQLLGGWDANKEKDYATIILRRDGLYYLAIMNKESKKLLGKAMPSDGECYEKMVYKLLPGANKMLPKVFFAKSRMEDFKPSKELVEKYNNGTHKKGKNFNIQDCHNLIDYFKQSISKHEDWGKFGFNFSDTSTYEDLSGFYREVEQQGYKLSFARVSVSYISQLVEEGKMYLFQIYNKDFSEYSKGTPNMHTLYWKALFDERNLADVVYKLNGQAEMFYRKKSIENTHPTHPANHPILNKNKDNKKKESLFDYDLIKDRRYTVDKFMFHVPITMNFKSSGSENINQDVKAYLRHTDDMHIIGIDRGERHLLYLVVIDLQGNIKEQYSLNEIVNEYNGNTYHTNYHDLLDVREEERLKARQSWQTIENIKELKEGYLSQVIHKITQLMVKYHAIVVLEDLNMGFMRGRQKVEKQVYQKFEKMLIDKLNYLVDKKADASVSGGLLNAYQLTSKFDSFQKLGKQSGFLFYIPAWNTSKIDPVTGFVNLLDTRYQNVEKAKVFFSKFDAIRYNKDKDWFEFNLDYDKFGKKAEGTRTKWTLCTRGMRIDTFRNKEKNSQWDNQEVDLTAEMKSLLEHYYIDIHGNLKDAISAQTDKAFFTGLLHILKLTLQMRNSITGTETDYLVSPVADENGIFYDSRSCGDELPENADANGAYNIARKGLMLIEQIKEAKDLDNLKFDISNKSWLNFAQQKPYKNE

SEQ ID NO: 1607 - protein, 1264 aa, unidentified
  REGION 1..1264: note = Category: MG75 effectors
  REGION 1..1264: note = Description: MG75-93 effector
  source 1..1264: note = uncultivated organism sequence
MNFEQFTHLYPLSKTLRFELRPVGATLAKIKEGGFLENDNHRAESYKKVKKLIDEYHKHFIEQALGDFSLTENETEGSKCLNSYLETYIQLYRSSRIEDAEKKAFEKVQAEMRKFIAKTLKGSEAYKRLFKQELIKEDLTAFLRTHGGTVADEELVEEFKNFTTYFTGFYENRENMYSEEEKSTAISYRLVNENLPKFVDNMAAFAIIAQVPEVRAMLDVMQKDLGAELDGTTIDELFTLPFFNKVLTQKQIAVYNAVIGGKVSDSHSKGESHIKGINQIVNLYNQQHKDARLPKLKMLYKQILSDREALSWLPEKFDKDADLLKAIHDGYERLASDGVLENLRTLLESMADYQAEGIFITNDQQLTRISQKMFGEWSFISEAILCALKKDVPQKRNECDEKYEERIDKMLKNHGGFSIRFIDDCVAAYVNTLDDEEQKKRFIPTVEAYFATLGAFDTEEEQTVNFFSRIQNARDALQGLLDSAYPEGRALIQDKENGALLKELLDAILALMHFVKPLLGKNENGKDERFYGELMQIWDEFDSFVPLYNMSRNYLTQKPYSEEKYKLNFENSQLLKGWDLNKEADNTSIILRKDGLFYLAIMNKKHNKLFARELPTDGDCYEKMDYKLLPGPNKMFPKVFFSKSRKAEFAPSEHIMDIYKKGSFKKGETFNLQDCHDLIDFFKASILKHEDWRQFEFKFSETEQYDDISGFYREVEAQGYKVTFRQVSVSYIDRLVNEGKLYLFQIYNKDFSSYSKGTPNMHTLYWRALFDERNLSDVVYKLNGEAEVFYRKKSIEAHPTHPANRPIKNKNKLNDKEKSLFAYDLIKDRRYSEDKFSLHVPITMNFKSVGGPNINDDVVEFLRTNENLHFIGIDRGERHLLYLTVIDSHGHILEQRTLNDVVNNYQGKDYHTDYHDLLETRERQRQEARSSWKAIENIKDLKEGYLAQVVHQIAQLMVKYHAIVVLEDLNGGFMRGRQKVERSVYQQFEKKLIDKLNYLVDKKTDAHAPGGLMNAYQLANQFKSFKSMGRQSGFIFYIPAWNTSKIDPVTGFTNLFDTRYKNVHDAQQFFSAFKSIRYNETADRFEFKFSYSDFTRKAEGSRTDWTVCTYGTRIKTFRDPQKNNEWTSKEVVLTEEFKKFFAAYHVDIHSNLKDSIAAHDEKAFFEQLLALMRLTLQIRNSKSGTDVDYLLSPVADENGVFFDSRSCGNSLPQDADANGAYNIARKGLMLVRQMREAKDLKKFKADMTNRNWLKFAQEKPYLND

SEQ ID NO: 1608 - protein, 1321 aa, unidentified
  REGION 1..1321: note = Category: MG75 effectors
  REGION 1..1321: note = Description: MG75-94 effector
  source 1..1321: note = uncultivated organism sequence
MEFDDFKRLYPLSKTLRFEAKPIGATLKNIIKSGLLEEDEHRAQSYVKVKKLIDEYHKAFIDRVLNEGCLTIENKGNKDSLEEYYESYMSKSNDENVSKTFKDIQENLRSVIANKLTKDKGYANLFGNKLIESYKDKDDTKKIIDSDLIQFINTAEPSKLDSMSQDEAKELVKEFWGFTTYFEGFHKNRKNMYTSEEKSTGIAYRLVNENLPKFIDNMEAFKKAIAKPEIQANMEELYSNFAEYLNVESIQEMFQLDYYNMLLTQKQIDVYNAIIGGKTDEENDVNIKGINQYINIYNQHHKDEKLPKLKALFKQILSDRNAISWLPEEFNSDQDVLNAIKDCYERLSENVLGDKVLKSLLCSLSDYNLNGIFVRNDLQLTDISQKMFGNWNVIQNAIMQNFFFKKVAPARKRKESEEDYEKRISDIFKKTDSFSIQYINDCLNEMDDNNLHAVDGYFATLGAVNTPTMQRENLFALIQNAYTDISDLLDTPYPENKNLAQDKTNVAKVKALLDAIKSLQHFVKPLLGKGDESDKDERFYGELASLWTELDTVTLLFNMVHNYMTRKPYSQKKIKLNYKNTQLLAGWDANKEKEHAAIILRRNGMYYLAIMDKDSKNLLDKAMPSDGECYEKMVYKQFDISKQLPKCTTELKRVRKALVEDAKRSCLLSDSKDWNKPLNVTRKLWELNNYVWDKKKADWVLRKKENETRPKKFHKKYLELTSDKKGYNQAKNDWIKFTKEFLSSYKKVEDYDIHYKKRYNSVDELYKQLNSDFYTISFTYVSVSFIDKLVNEGKMYLFKIYNKDFSNYSKGTPNMHTLYWKALFDERNLADVVYKLNGEAEMFYRKKSINNTHPTHPANHPIQNKNKDNKKKESVFEYDLVKDYRYTEDKFLFHVPITMNFKSVGSENINQQVKEYLQQADDTHIIGIDRGERHLLYLVVIDMEGNIKEQFSLNEIVNEYNGNTYRTNYHDLLDVCADKRLKASQSWQTIENIKELKEGYLSQAIHKITQLMVKYHAVVVLEDLNKGFMRGRQKVEKQVYQKFEKMLIDKLNYLVDKKADAAQSGGLLNAYQLTSKFDSFQKLGKQSGFLFYIPAWNTSKIDPVTGFVNLFDTRYTNADKALEFFSKFDAIRYNEEKDWFEFEFDYDKFTQKAHGTRTKWTLCTYGMRLRSFKNPAKQYNWDSEVVALTDEFKRILGEAGIDIHENLKDAICNLEGKRRKYLEPLMQFMKLLLQLRNSRKNPEEDYILSPVADENGVFYDSRSCGDKLPENADANGAYNIARKGLMLIRQIKEAKEFGKVKYDISNKAWLNFAQQKPYKNE

SEQ ID NO: 1609 - protein, 1027 aa, unidentified
  REGION 1..1027: note = Category: MG75 effectors
  REGION 1..1027: note = Description: MG75-95 effector
  source 1..1027: note = uncultivated organism sequence
MAKNFEDFKRLYSLSKTLRFEAKPIGATLDNIVKSGLLDEDEHRAASYVKVKKLIDEYHKVFIDRVLDDGCLPLENKGNNNSLAEYYESYVSRAQDEDAKKKFKEIQQNLRSVIAKKLTEDKAYANLFGNKLIESYKDKEDKKKIIDSDLIQFINTAESTQLDSMSQDEAKELVKEFWGFVTYFYGFFDNRKNMYTAEEKSTGIAYRLVNENLPKFIDNIEAFNRAITRPEIQENMGVLYSDFSEYLNVESIQEMFQLDYYNMLLTQKQIDVYNAIIGGKTDDEHDVKIKGINEYINLYNQKHKDDKLPKLKSLFKQILSDRNAISWLPEEFNSDQEVLNAIKDCYERLSENVLGDKVLKSMLGSLADYSLDGIFIRNDLQLTDISQKMFGNWSVIQNAIMQNIKHVAPARKHKESEEEYENRIAGIFKKADSFSISYIDACLNETDPNNAYFVENYFATLGAVDTPTMQRENLFALVQNAYTEITALLHSDYPTEKTLAQDKANVAKIKALLDAIKSLQHFVKPLLGKGDESDKDERFYGELASLWAELDTMTPLYNMIRNYMTRKPYSQKKIKLNFENPQLLGGWDANKEKDYATIILRRNGLYYLAIMNKDSKKLLGKAMPSDGECYEKMVYKLLPGANKMLPKVFFAKSRMEDFKPSKELVEKYNNGTHKKGKNFNIQDCHNLIDYFKQSIDKHEDWSKFGFKFSDTSTYEDLSGFYREAEQQGYKLSFARVSVSYINQLVEEGKMYLFQIYNKDFSEYSKGTPNMHTLYWKALFDERNLADVVYKLNGQAEMFYRKKSIENTHPTHPANHPILNKNKDNNKKESLFEYDLIKDRRYTVDKFMFHVPITMNFKSSGSENINQDVKAYLCHADDMHIIGIDRGERHLLYLVVIDLQGNIKEQFSLNEIVNDYNGNTYHTNYHDLLDVREDERLKARQSWQTIENIKELKEGYLSQVIHKITQLMVKYHAIVVLEDLNMGFMRGRQKVEKQVYQKFEKMLIEKLNYLVDKKADASVSGGLLNAYQ

SEQ ID NO: 1610 - protein, 1274 aa, unidentified
  REGION 1..1274: note = Category: MG75 effectors
  REGION 1..1274: note = Description: MG75-96 effector
  source 1..1274: note = uncultivated organism sequence
MAKNFEDFKRLYPLSKTLRFEAKPIGATLDNIVKSGLLEEDEHRAASYVKVKKLIDEYHKVFIDRVLADGCLPLENEGHNNSLAEYYDSYVSKSQNEDAKKAFEENQQNLRSIIAKKLTEDKAYANLFGKNLIESYKDKTDKTKIIDSDLIQFINTAESTQLNSMSQDEAKELVKEFWGFTTYFVGFFDNRKNMYTAEEKSTGIAYRLINENLPKFIDNMEAFKKAIARPEIQANMEELYSNFSEYLNVESIQEMFLLDYYNMLLTQKQIDVYNAIIGGKTDDEHDVKIKGINEYINLYNQQHKDDKLPKLKALFKQILSDRNVISWLPEEFNSDQEVLNAIKDCYERLSDNVLGDKVLKSLLGSLADYSLDGIFIRNDLQLTDISQKMFGNWGVIQNAIMQNIKHVAPARKHKESEEDYEKRIAGIFKKADSFSISYINDCLNEADSNNAYFVENYFATFGAVNTPTMQRENLFSLVQNAYTEVAALLHSDYPTAKHLAQDKANVAKIKALLDAIKSLLHFVKPLLGKGDESNKDERFYGELASLWAELDTVTPLYNMIRNYMTRKPYSQKKIKLNFENPQLLGGWDANKEKDYATIILRRDGLYYLAIMNKESKKLLGKAMPSDGECYEKMVYKLLPGANKMLPKVFFAKSRMEDFKPSKELVEKYNNGTHKKGKNFNIQDCHNLIDYFKQSISKHEDWGKFGFNFSDTSTYEDLSGFYREVEQQGYKLSFARVSVSYISQLVEEGKMYLFQIYNKDFSEYSKGTPNMHTLYWKALFDERNLADVVYKLNGQAEMFYRKKSIENTHPTHPANHPILNKNKDNKKKESLFDYDLIKDRRYTVDKFMFHVPITMNFKSSGSENINQDVKAYLRHADDMHIIGIDRGERHLLYLVVIDLQGNIKEQYSLNEIVNEYNGNTYHTNYHDLLDVREDERLKARQSWQTIENIKELKEGYLSQVIHKITQLMVKYHAIVVLEDLNKGFMRGRQKVEKQVYQKFEKMLIDKLNYLVDKKADASVSGGLLNAYQLTSKFDSFQKLGKQSGFLFYIPAWNTSKIDPITGFVNLLDTRYQNVEKAKVFFSKFDAIRYNKDKDWFEFNLDYDKFGKKAEGTRTKWTLCTRGMRIDTFRNKEKNSQWDNHEVDLTAEMKSLLEHYYIDIHGNLKDAISAQTDKAFFTGLLHILKLTLQMRNSITGTETDYLVSPVADENGIFYDSRSCGDELPENADANGAYNIARKGLMMIEQIKEAKDLDNLKFDISNKSWLNFAQQKPYKNG

SEQ ID NO: 1611 - protein, 772 aa, unidentified
  REGION 1..772: note = Category: MG75 effectors
  REGION 1..772: note = Description: MG75-97 effector
  source 1..772: note = uncultivated organism sequence
MEFNDFKRLYPLSKTLRFEAKPIGSTLNNIIKSGLLEEDEHRAQSYVKVKKLIDEYHKVFIDRVLDDGCLTIENKDKKNSLEEYYESYMSKSNDENVSKTFKEIQENLRSVIAKKLTDDNAYANLFGNKLIESYKDKDDKKKIIDSDLIQFINTAEPSQLDSMSQDEAKELVKEFWGFTTYFVGFFDNRKNMYTSEEKSTGIAYRLVNENLPKFIDNMEAFKKAIAKPEIQANMGELYSNFAEYLNVESIQEMFQLDYYNMLLTQKQIDVYNAIIGGKTDEDHDVKIKGINEYINLYNQQHKDEKLPKLKALFKQILSDRNAISWLPEEFNSDKEVLNAIKDCYERLSENVLGDKVLKSLLCSLSDYNLNGIFVRNDLQLTDISQKMFGNWSVIQNAIMQNIKNVAPARKRKESEEDYEKRISDIFKKADSFSIQYINDCLNEMDNNNLHAVDGYFATLGAVNTPTMQRENLFALIQNAYTDISDLLDTPYPENKNLAQDKTNVAKVKALLDAIKSLQHFVKPLLGMGDESDKDERFYGELASLWTELDTVTPLYNMIRNYMTRKPYSEKKIKLNFENPQLLGGWDANKEKDYATIILRRNGMYYLAIMDKDSKKLLGKTMPSDGECYEKMVYKLLPGANKMLPKVFFAKSRINDFKPSKKIVENYNNGTHKKGKNFNINDCHDLIDYFKQSIDKHEDWSKFGFNFSDTSTYEDLSGFYREVEQQGYKLSFTNVSASFIDKLVDEGKMYLFQIYNKDFSDYSKGTPNMHTLY

SEQ ID NO: 1612 - protein, 1272 aa, unidentified
  REGION 1..1272: note = Category: MG75 effectors
  REGION 1..1272: note = Description: MG75-98 effector
  source 1..1272: note = uncultivated organism sequence
MEFNDFKRLYPLSKTLRFEAKPIGSTLNNIIKSGLLEEDEHRAQSYVKVKKLIDEYHKVFIDRVLDDGCLTIENKDKKNSLEEYYESYMSKSNDENVSKTFKEIQENLRSVIAKKLTDDNAYANLFGNKLIESYKDKDDKKKIIDSDLIQFINTAEPSQLDSMSQDEAKELVKEFWGFTTYFVGFFDNRKNMYTSEEKSTGIAYRLVNENLPKFIDNMEAFKKAIAKPEIQANMGELYSNFAEYLNVESIQEMFQLDYYNMLLTQKQIDVYNAIIGGKTDEDHDVKIKGINEYINLYNQQHKDEKLPKLKALFKQILSDRNAISWLPEEFNSDKEVLNAIKDCYERLSENVLGDKVLKSLLCSLSDYNLNGIFVRNDLQLTDISQKMFGNWSVIQNAIMQNIKNVAPARKRKESEEDYEKRISDIFKKADSFSIQYINDCLNEMDNNNLHAVDGYFATLGAVNTPTMQRENLFALIQNAYTDISDLLDTPYPENKNLAQDKTNVAKVKALLDAIKSLQHFVKPLLGMGDESDKDERFYGELASLWTELDTVTPLYNMIRNYMTRKPYSEKKIKLNFENPQLLGGWDANKEKDYATIILRRNGMYYLAIMDKDSKKLLGKTMPSDGECYEKMVYKLLPGANKMLPKVFFAKSRINDFKPSKKIVENYNNGTHKKGKNFNINDCHDLIDYFKQSIDKHEDWSKFGFNFSDTSTYEDLSGFYREVEQQGYKLSFTNVSASFIDKLVDEGKMYLFQIYNKDFSDYSKGTPNMHTLYWKALFDERNLADVVYKLNGQAEMFYRKKSIDYTHPTHPANHPIQNKNKDNKKKESVFEYDLVKDRRYTVDKFLFHVPITMNFKSVGSENINQQVREYLQQADDTHIIGIDRGERHLLYLVVIDMQGNIKEQFTLNEIVNEYNGNTYRTNYHDLLDTREEERLTARQSWQTIENIKELKEGYLSQVVHKITQLMVKYHAVVVLEDLNKGFMRGRQKVEKQVYQKFEKMLIDKLNYLVDKKADATQSGGLLNAYQLTSKFDSFQKLGKQSGFLFYIPAWNTSKIDPVTGFVNLLDTRYLNTEKAKAFFSKFDAIRYNADKDWFEFNLDYDKFGTKAEDTRTTWTLCTQGNRICTFRNAEKNSQWDNQEIDLTREMKSLFEHYHINICGNLKEEICSQTDKAFFTGLLHILKLTLQMRNSITGTETDYLVSPVADENGVFYDSRSCGDMLPKNADANGAYNIARKGLMLIGQIKETKDLANFKYDISNKAWLNFAQQKPYKNE

SEQ ID NO: 1613 - protein, 1211 aa, unidentified
  REGION 1..1211: note = Category: MG75 effectors
  REGION 1..1211: note = Description: MG75-99 effector
  source 1..1211: note = uncultivated organism sequence
MLICLVSRCSKLFYTISRCYFHIESTFSGASISFVLSHIARYAPSPEENSCIPITHFQCKNNFEHLLNKLIESYKDKEDKKKIIDSDLIQFINCANSSQLNGMSEDEAKELVKEFWGFTTYFEGFHTNRKNMYTAEEESTAIAHRLVNENLPKFIDNMDVFKKAVAKPEIQANIEELYANFAAYLNVESIQEMFQLDYYNMLLTQKQIDVYNAIIGGKTDEDHDVKIKGINEYINLYNQQHKNEKLPKLKVLFKQILSDRNAISWLPEEFNDDQEVLNAIKHCYERLSENVLGDKVLKSLLCSLGDYNLDGIFVRNDAQLTDISQKMFGDWGVIQNAIIQNIKNVAPARKRKESEEDYEKRISDIFKKADSFSLRYINDCLNEMDEKNPYTVQWYFSTLGAVNTPTMQRENLFALIQNAYTDISDLLNSQYPTDKNLSQDKTNVAKVKALLDAIKSLQHFVKPLLGRGDESDKDERFYGELASLWTELDTVTPLYNMVRNYMTRKPYSEKKIKLNFENPQLLGGWDANKEKDYASIILRRNGLYYLAIMNKESKKLLGKTMPSDGECYEKMVYKLLPGANKMLPKVFFSKSKIDYFKPSKQIVENYNNDTHKKGKNFNINDCHDLIDFFKQSIDIHEDWSKFGFKFSDTSTYKDLSGFYREVEQQGYKLSFTKVSVSFIDKLVDDGKMYLFQIYNKDFSKYSKGTPNMHTLYWKALFDERNLADVVYKLNGQAEMFYRKKSIVYTHPTHPANHPILNKNKENKKKESVFEYDLVKDRRYTVDKFLLHVPITMNFKSVGSENINQQVREYLQQAEDTHIIGIDRGERHLLYLVVIDMQGNIKEQYTLNEIVNEYNGNTYRTNYYDLLNTREEERLTARQSWQTIENIKELKEGYLSQVIHKITQLMVKYHAVVVLEDLNKGFMRGRQKVEKQVYQKFEKMLIDKLNYLVDKKADAAQLGGLLNAYQLTSKFDSFQKLGKQSGFLFYIPAWNTSKIDPVTGFVNLLDTRYQNTEKAKAFFSKFDAIRYNADKDWFEFYLDYDKFGTKAEGTRTKWTLCTQGYRIRTFRNADKNSQWDNQDVDLTKELKALFEIYHINIGGNLKEGICSQTDKAFFTGLLHILKLTLQMRNSITGTETDYLVSPVADENGVFYDSRSCGDTLPKNADANGAYNIARKGLMLIEQIKETKDLANFKYDISNKAWLNFAQQKPYEK

SEQ ID NO: 1614 - protein, 1254 aa, unidentified
  REGION 1..1254: note = Category: MG75 effectors
  REGION 1..1254: note = Description: MG75-100 effector
  source 1..1254: note = uncultivated organism sequence
MKKNMKRKFDDFIHLYSLSKTLRFEARPIGDTLRNFKKNGLLERDKHRAESYVKVKKLIDEYHKAFIDRVLNGSVLNYVNKGKYDSLTEYYDLYSVPRKDEASQKHFKAIQQHLRQQIVKKLTDDKDYKHLFGKELLESYKDKGDKKKLNEADLVQFINAANPKQLHTLSKKEAIDLVQEFSGFTTYFNEFHKNRKNMYSAEEKSTGIAYRLINENLPKFIDNMKSFKKIVDIPEMKDNLKQIHEYFVDYLNVENIHEMFQLDYYNQLLTQKQIDVYNAIIGGKTDNEHKEKIKGINEYVNLYNQTHKDAKLPKLKVLFKQILSDRNAISWLPEEFKDDQEVLNAIKDCYARLSKNVLGDNILKELLCSLAEYDTKGIFLRNDLQLTDISQKMFGNWSVIPSAIKNDKDVAFKKQDSFSIDYIDACLDKFVDNNTHTIEGYFATLGAVDTQTTQLENIFAQIKNAYTGIESLLNSAYPEDKNLSQDKDNVAKIKLFLDALMSLMHFVKPLLGKGDESNKDEKFYGDFTLLWTELETVVPLYNMVRNYMTRKPYSKSKIKLNFDNSQLLGGWDANKESDYASILLRRDGKYYLAIVDKDSKKLLGKSMPSDGECYEKMVYKLLPGANKMLPKVFFATSRIKDFKPSEQLLENYNKGTHKKGVNFSISDCHALIDYFKQSINKHEDWKNFNFNFSETSTYEDLSAFYREVEQQGYKITFTNVSVAFIDKLVKEGKMYLFQIYNKDFSEYSKGTPNMHTLYWKALFDDRNLKDVVYKLNGQAEMFFREKSIKVSTIHPANCPIQNKNKDNKKKESIFEYSLIKDRRYTVDKFMFHVPITMNFKSADTENINLPVREYLQTSDDTHIIGIDRGERHLIYLVVIDLQGNIVEQYTLNDIVNEYNGNTYRTNYHDLLDAREHDQLKARQNWQTIENIKELKEGYLSQVIHKITQLMIKYHAIVVLEDLNKGFMRGRQKVGKQVYQKFEKMLIDKLNFLVDKKADIESVGGLLNAYQLTNKLESFKNLGKQSGFLFYIPACNTSNIDPVTGFVNLLDTRSQNAKAFFDKFDSIRYNKEKDWFEFALDYNNFGNKAEGTRTKWTLCTQGKRIKTFRNAEKNSNWDYQIIDLTIELKQLFAHYNIDINGNLKKAISNQTEKTFFVELMQLLKLTLQMRNSITNTETDYLVSPVADENGNFYDSRKCGSSLPENADANGAFNIARKGLMIIEQIKASDDLSKLKFDISNKSWLNFAQQKPYKHE

SEQ ID NO: 1615 - protein, 1250 aa, unidentified
  REGION 1..1250: note = Category: MG75 effectors
  REGION 1..1250: note = Description: MG75-101 effector
  source 1..1250: note = uncultivated organism sequence
MKRKFDDFIHLYSLSKTLRFEARPIGDTLRNFKKNGLLERDKHRAESYVKVKKLIDEYHKVFIDRVLNGSVLNYVNKGKYDSLTEYYDLYSVPRKDEASQKHFKAIQQHLRQQIVKKLTDDKDYKHLFGKELLESYKDKGDKKKLNEADLVQFINAANPKQLHTLSKKEAIDLVQEFSGFTTYFNEFHKNRKNMYSAEEKSTGIAYRLINENLPKFIDNMKSFKKIVDIPEMKDNLKQIHEYFVDYLNVENIHEMFQLDYYNQLLTQKQIDVYNAIIGGKTDNEHKEKIKGINEYVNLYNQTHKDAKLPKLKVLFKQILSDRNAISWLPEEFKDDQEVLNAIKDCYARLSKNVLGDNILKELLCSLAEYDTKGIFLRNDLQLTDISQKMFGNWSVIPSAIKNDKDVAFKKQDSFSIDYIDACLDKFVDNNTHTIEGYFATLGAVDTQTTQLENIFAQIKNAYTGIESLLNSAYPEDKNLSQDKDNVAKIKLFLDALMSLMHFVKPLLGKGDESNKDEKFYGDFTLLWTELETVVPLYNMVRNYMTRKPYSKSKIKLNFDNSQLLGGWDANKESDYASILLRRDGKYYLAIVDKDSKKLLGKSMPSDGECYEKMVYKLLPGANKMLPKVFFATSRIKDFKPSEQLLENYNKGTHKKGVNFSISDCHALIDYFKQSINKHEDWKNFNFNFSETSTYEDLSAFYREVEQQGYKITFTNVSVAFIDKLVKEGKMYLFQIYNKDFSEYSKGTPNMHTLYWKALFDDRNLKDVVYKLNGQAEMFFREKSIKVSTIHPANCPIQNKNKDNKKKESIFEYSLIKDRRYTVDKFMFHVPITMNFKSADTENINLPVREYLQTSDDTHIIGIDRGERHLIYLVVIDLQGNIVEQYTLNDIVNEYNGNTYRTNYHDLLDAREHDQLKARQNWQTIENIKEVKEGYLSQVIHKITQLMIKYHAIVVLEDLNKGFMRGRQKVGKQVYQKFEKMLIDKLNFLVDKKADIESVGGLLNAYQLTNKLESFKNLGKQSGFLFYIPAWKTSNIDPVTGFVNLLDTRSQNAKAFFDKFDSIRYNKEKDWFEFALDYNNFGNKAEGTRTKWTLCTQGKRIKTFRNAEKNSNWDYQIIDLTIELKQLFAHYNIDINGNLKKAISNQTEKTFFVELMQLLKLTLQMRNSITNTETDYLVSPVADENGNFYDSRKCGSSLPENADANGAFNIARKGLMIIEQIKASDDLSKLKFDISNKSWLNFAQQKPYKHE

SEQ ID NO: 1616 - protein, 1274 aa, unidentified
  REGION 1..1274: note = Category: MG75 effectors
  REGION 1..1274: note = Description: MG75-102 effector
  source 1..1274: note = uncultivated organism sequence
MAKNFEDFKRLYPLSKTLRFEAKPIGATLDNIVKSGLLEEDEHRAASYVKVKKLIDEYHKVFIDRVLADGCLPLENEGHNNSLAEYYDSYVSKSQNEDAKKAFEENQQNLRSIIAKKLTEDKAYANLFGKNLIESYKDKTDKTKIIDSDLIQFINTAESTQLNSMSQDEAKELVKEFWGFTTYFVGFFDNRKNMYTAEEKSTSIAYRLINENLPKFIDNMEAFKKAIARPEIQANMGELYSNFSEYLNVESVPEMFQLDYYNMLLTQKQIDVYNAIIGGKTDDEHDVKIKGINEYINLYNQQHKDDKLPKLKALFKQILSDRNAISWLPEEFNSDQEVLNAIKDCYERLSENVLGDKVLKSLLDSLADYSLDGIFIRNDLQLTDISQKMFGNWGVIQNAIMQNIKHVAPARKHKESEEDYEKRIAGIFKKADSFSISYINDCLNEADSNNAYFVENYFATFGAVNTPTMQRENLFSLVQNAYTEVAALLHSDYPTAKHLAQDKANVAKIKALLDAIKSLLHFVKPLLGKGDESNKDERFYGELASLWAELDTVTPLYNMIRNYMTRKPYSQKKIKLNFENPQLLGGWDANKEKDYATIILRRDGLYYLAIMNKESKKLLGKAMPSDGECYEKMVYKLLPGANKMLPKVFFAKSRMEDFKPSKELVEKYNNGTHKKGKNFNIQDCHNLIDYFKQSISKHEDWGKFGFNFSDTSTYEDLSGFYREVEQQGYKLSFARVSVSYISQLVEEGKMYLFQIYNKDFSEYSKGTPNMHTLYWKALFDERNLADVVYKLNGQAEMFYRKKSIENTHPTHPANHPILNKNKDNKKKESLFDYDLIKDRRYTVDKFMFHVPITMNFKSSGSENINQDVKAYLRHADDMHIIGIDRGERHLLYLVVIDLQGNIKEQYSLNEIVNEYNGNTYHTNYHDLLDVREDERLKARQSWQTIENIKELKEGYLSQVIHKITQLMVKYHAIVVLEDLNKGFMRGRQKVEKQVYQKFEKMLIDKLNYLVDKKADASVSGGLLNAYQLTSKFDSFQKLGKQSGFLFYIPAWNTSKIDPITGFVNLLDTRYQNVEKAKVFFSKFDAIRYNKDKDWFEFNLDYDKFGKKAEGTRTKWTLCTRGMRIDTFRNKEKNSQWDNHEVDLTAEMKSLLEHYYIDIHGNLKDAISAQTDKAFFTGLLHILKLTLQMRNSITGTETDYLVSPVADENGIFYDSRSCGDELPENADANGAYNIARKGLMMIEQIKEAKDLDNLKFDISNKSWLNFAQQKPYKNG

SEQ ID NO: 1617 - protein, 1254 aa, unidentified
  REGION 1..1254: note = Category: MG75 effectors
  REGION 1..1254: note = Description: MG75-103 effector
  source 1..1254: note = uncultivated organism sequence
MKFEDFTGLYPVSKTLRFEARPVGDTLKNIIKRGILEQDTHRAESYQKVKKLMDEYHKAFIDSVMSNFRFSCEDLEEYFVLYANKSDNDESKNKYTELQKKMRESVSKALKGDERFKKINKKELIKEDLYAFIREAGESQLVGLTREQAEELLLEFKDFSTYFGGFYQNRANMYVPDEKSTSIAYRLVNENLPRFVDNIDVFNKITSIPELRDNVKTIYDAFKEYLNVVELSNIFDVTFYSEVLTQKHIDLYNSIIGGRTDNESSKKIHGLNEYINLYNQTHKDEKLPKFKVLYKQILSDRVAVSWLPEAFSNDKETLCAIRDCYSGLEEHILGEKDLKILLESLDKFDLCGVFISNNKQLLSEISQKLYGNWKTIENAVRRHFEETSPQNVKKENEEKYRERISKIIKRYESFSIADLNEWVKKSDPDESRRIEDYFASLGVVNSENEQKEDLFSRVANVYIDVADLLFSDYPDGKRLAQDSKDVEKIKNLLDAIKELQWFVKPLNGSGDENNKDERFYGEFSMLWAELESFSLLYDKVRNYMTKKTYSQDKIKLNFANATLLKGWDRNKEVDNACVILRRNGLYYLGIMDKKYRRSFEGNYLCEGDVYEKMVYKLLPDPKKMLPKVFFSKSREKDFNPSDSILRIHKGETYKAGPQFKIEDCRELIDFYKKSISLHEDWKNFGFEFSDTSTYDDLNGFYREVEQQGYKITFKNVSVSYVEKLVGEGKLYLFQLYNKDFSSYSKGTPNIHTLYWKALFDEKNLLNVVYKLNGEAELFFRKKSINITNPTHPANVSVANKNKLNQKRESLFDYDLIKDRRYTIDKFLFHVPITMNFKSKGRPQIEQLVRGYLHSAENTHIIGIDRGERHLLYVSVIDSHGNIKEQFSLNEIINENAGNVYVTDYHALLDTKETERKEARQSWQTIENIKELKEGYLSQAVHKVTQLMIKYNAVIVLEDLNMGFMRGRQKVEKQVYQKFEKMLIDKLNYLVDKKVCVDAPGGVFHAYQLTSKFESFAKLGKQSGFLFYIPAWNTSKIDPITGFVNLFELKCDSIDRTKLFFSKFKSIRYNQRSDWFEFAFDYNDFTSKAAGTKTEWIITTHGTRIINFRNPQKNNQWDSNEVVLTDEFKSLFARYSIDFSGNLKEGITMQTDKSFFEGLLNYFKLTLQMRNSVTGTDVDYLISPVADGNGMFYDSRNCADSLPKNADANGAYNIARKGLMLIKQIKMSNDFKTVKLDITNKAWLEFAQKKPYLND

SEQ ID NO: 1618 - protein, 1274 aa, unidentified
  REGION 1..1274: note = Category: MG75 effectors
  REGION 1..1274: note = Description: MG75-104 effector
  source 1..1274: note = uncultivated organism sequence
MAKNFEDFKRLYPLSKTLRFEAKPIGATLDNIVKSGLLDEDEHRAESYVKVKKLIDEYHKVFIDRVLDNGCLPLKNEGHNNSLTEYYDSYVSKSQNEDAKKAFEENQQNLRSIIAKKLAEDKAYANLFGKNLIESYKDKTDKTKIIDSDLIQFINTAESTQLNSMSQDEAKELVKEFWGFTTYFVGFFDNRKNMYTAEEKSTGIAYRLINENLPKFIDNMEAFKKAIARPEIQANMEELYSNFSEYLNVESIQEMFLLDYYNMLLTQKQIDVYNAIIGGKTDDEHDVKIKGINEYINLYNQQHKDDKLPKLKALFKQILSDRNAISWLPEEFNSDQEVLNAIKDCYERLSENVLGDKVLKSLLGSLADYSLDGIFIRNDLQLTDISQKMFGNWGVIQNAIMQNIKRVAPARKHKESEEDYEKRIAGIFKKADSFSISYINDCLNEADPNNAYFVENYFATFGAVNTPTMQRENLFALVQNAYTEVASLLHSYYPAEKKLAQDKANVAKIKALLDAIKSLQHFVKPLLGKGDESDKDERFYGELASLWAELDTVTPLYNMIRNYITRKPYSQKKIKLNFENPQLLGGWDANKEKDYATIILRRNGLYYLAIMDKDSRKLLGKAMPSDGECYEKMVYKLLPGANKMLPKVFFAKSRMDDFKPSKELIEKYNNGTHKKGKNFDIQDCHNLIDYFKQSIDKHEDWSKFGFNFSDTSTYEDLSGFYREVEQQGYKLSFARVSVSYINQLVEEGKMYLFQIYNKDFSEYSKGTPNMHTLYWKALFDERNLADVVYKLNGQAEMFYRKKSIENTHPTHPANHPILNKNKDNKKKESLFEYDLIKDRRYTVDKFMFHVPITMNFKSVGSENINQGVKEYLHHADDMHIIGIDRGERHLLYLVVIDLQGNIKEQYSLNEIVNEYNGNTYHTNYHDLLDAREDERLKARQSWQTIENIKELKEGYLSQVIHKITQLMVKYHAIVVLEDLNMGFMRGRQKVEKQVYQKFEKMLIDKLNYLVDKKADASVSGGLLNAYQLTSKFDSFQKLGKQSGFLFYIPAWNTSKIDPVTGFVNLLDARYQNVEKAKAFFSKFDAIRYNKDKDWFEFNLDYDKFGKKAEGTRTKWTLCTRGMRIDTFRNKEKNSQWDNQEVDLTAELKSLLEHYYIDIHGNLKEAISAQTDKAFFTGLLHILKLTLQMRNSITGTETDYLVSPVADENGIFYDSRSCGDELPENADANGAYNIARKGLMMIEQIKNAEDLGNLKFDISNKAWLNFAQQKPYKNG

SEQ ID NO: 1619 - protein, 1257 aa, unidentified
  REGION 1..1257: note = Category: MG75 effectors
  REGION 1..1257: note = Description: MG75-105 effector
  source 1..1257: note = uncultivated organism sequence
MKYTDFTGIYSVSKTLRFELIPQGSTVENMKREGILNNDMHRADSYKEMKKLIDEYHKAFIERCLSDFSLKYDDTGKHDSLEEYFFYYEQKRNDKTKKIFEDIQVALRKQISKRFTGDTAFKRLFKKELIKEDLPSFVKNDPVKTELIKEFSDFTTYFQEFHKNRKNMYTSDAKSTAIAYRIINENLPKFIDNINAFDIVAKVPEMQEHFKTIADELRSHLQVGNDIDKMFNLQFFNKVLTQSQLDVYNAVIGGKSEGNKKIQGINEYINLYNQQHKKARLPMLKLLYKQILSDRVAISWLQDEFDNDQDMLDTIEAFYNKLNSNETGVLGEGKLKQILMGLDGYNLDGVFMRNDLQLSEVSQRLCGGWNIIKDAMTSDLKRSVQKKKKETDADFEERVSKLFSAQNSFSIAYINQCLGQAGIRCKIQDYFACLGAKEGENEAETTPDIFDQIAEAYHGAAPILNARPSSHNLAQDIEKVKAIKALLDALKRLQRFVKPLLGRGDEGDKDNFFYGDFMPIWEVLDQLTPLYNKVRNRMTRKPYSQEKIKLNFENSTLLNGWDLNKEHDNTSVILRREGLYYLGIMNKNYNKIFDANNVETIGDCYEKMIYKLLPGPNKMLPKVFFSKSRVQEFSPSKKILEIWESKSFKKGDNFNLDDCHALIDFYKDSIAKHPDWNKFNFKFSDTQSYTNISDFYRDVNQQGYSLSFTKVSVDYVNRMVDEGKLYLFQIYNKDFSPQSKGTPNMHTLYWRMLFDERNLHNVIYKLNGEAEVFYRKASLRCDRPTHPAHQPITCKNENDSKRVCVFDYDIIKNRRYTVDKFMFHVPITINYKCTGSDNINQQVCDYLRSAGDDTHIIGIDRGERNLLYLVIIDQHGTIKEQFSLNEIVNEYKGNTYCTNYHSLLEEKEAGNKKARQDWQTIESIKELKEGYLSQVIHKISMLMQRYHAIVVLEDLNGSFMRSRQKVEKQVYQKFEHMLINKLNYLVNKQYDATEPGGLLHALQLTSRMDSFKKLGKQSGFLFYIPAWNTSKIDPVTGFVNLFDTRYCNEAKAKEFFEKFDDISYNDERDWFEFSFDYRHFTNKPTGTRTQWTLCTQGTRVRTFRNPEKSNHWDNEEFDLTQAFKDLFNKYGIDIASGLKARIVNGQLTKETSAVKDFYESLLKLLKLTLQMRNSVTGTDIDYLVSPVADKDGIFFDSRTCGSLLPANADANGAFNIARKGLMLLRQIQQSSIDAEKIQLAPIKNEDWLEFAQEKPYL

SEQ ID NO: 1620 - protein, 1142 aa, unidentified
  REGION 1..1142: note = Category: MG75 effectors
  REGION 1..1142: note = Description: MG75-106 effector
  source 1..1142: note = uncultivated organism sequence
MARIFEDFKRLYPLSKTLRFEAKPIGATLDNIVKSGLLDEDEHRAESYVKVKKLIDEYHKVFIDRVLDNGCLPLKNEGHNNSLTEYYDSYVSKSQNEDAKKAFEENQQNLRSIIAKKLTEDKAYANLFGKNLIESYKDKTDKTKIIDSDLIQFINTAESTQLNSMSQDEAKELVKEFWGFTTYFVGFFDNCKNMYTAEEKSTGIAYRLINENLPKFIDNMEAFKKAIARPEIQANMEELYSNFSEYLNVESIQEMFLLDYYNMLLTQKQIDVYNAIIGGKTDDEHDVKIKGINEYINLYNQQHKDDKLPKLKALFKQILSDRNAISWLPEEFNSDQEVLNAIKDCYERLSENVLGDKVLKSLLGSLADYSLDGIFIRNDLQLTDISQKMFGNWGVIQNAIMQNIKRVAPARKHKESEEDYEKRIAGIFKKADSFSISYINDCLNEADPNNAYFVENYFATFGAVNTPTMQRENLFALVQNAYTEVASLLHSYYPAEKKLAQDKANVAKIKALLDAIKSLQHFVKPLLGKGDESDKDERFYGELASLWAELDTVTPLYNMIRNYITRKPYSQKKIKLNFENPQLLGGWDANKEKDYATIILRRNGLYYLAIMDKDSRKLLGKAMPSDGECYEKMVYKLLPGANKMLPKVFFAKSRMDDFKPSKELIEKYNNGTHKKGKNFDIQDCHNLIDYFKQSIDKHEDWSKFGFNFSDTSTYEDLSGFYREVEQQGYKLSFARVSVSYINQLVEEGKMYLFQIYNKDFSEYSKGTPNMHTLYWKALFDERNLADVVYKLNGQAEMFYRKKSIENTHPTHPANHPILNKNKDNKKKESLFEYDLIKDRRYTVDKFMFHVPITMNFKSVGSENINQGVKEYLHHADDMHIIGIDRGERHLLYLVVIDLQGNIKEQYSLNEIVNEYNGNTYHTNYHDLLDAREDERLKARQSWQTIENIKELKEGYLSQVIHKITQLMVKYHAIVVLEDLNMGFMRGRQKVEKQVYQKFEKMLIDKLNYLVDKKADASVSGGLLNAYQLTSKFDSFQKLGKQSGFLFYIPAWNTSKIDPVTGFVNLLDARYQNVEKAKAFFSKFDAIRYKRIRTGLSLISTMTSLVKKQKVQGLSGFYAPEECVLILSEIKKKTHNGIIRKLT

SEQ ID NO: 1621 - protein, 506 aa, unidentified
  REGION 1..506: note = Category: MG75 effectors
  REGION 1..506: note = Description: MG75-107 effector
  source 1..506: note = uncultivated organism sequence
MHTLYWRMLFDERNLEDVVYSLNGGAEVFFRKASINVSHPTHPANIPIKKKNLKHKDEERILKYDLIKDKRYTIDQFQFHVPITMNFKVAGNGNININQKAIDYLRSASDTHIIGIDRGERNLLYLVVIDGNGKICEQFSLNEIEVEYNGEKYSTNYHDLLNVKENERKQARQSWQSIANIKDLKEGYLSQVIYKISELIVKYNAIVVLEDLNAGFMRGRQKVEKQVYQKFEKKLIEKLNYLVFKKQSSDLPGGLMHAYQLANKFESFNTLGKQSGFLFYIPAWNTSKMDPVTGFVNLFDVKYESVDKAKSFFSKFDSIRYNVERDMFEWKFNYGEFTKKAEGAKTDWTVCSYGNRIITFRNPDKNSQWDNKEINLTENVKLLFERFGIDLSSNLKDEIMERTEKEFFIELISLFKLVLQMRNSWTGTDIDYLVSPVCNENGEFFDSRNVDETLPQNADANGAYNIARKGMILLDKIKKNNGEKKLALSITNREWLSFAQGCCKNG

SEQ ID NO: 1622 - protein, 1274 aa, unidentified
  REGION 1..1274: note = Category: MG75 effectors
  REGION 1..1274: note = Description: MG75-108 effector
  source 1..1274: note = uncultivated organism sequence
MAKIFEDFKRLYPLSKTLRFDAKPVGATLDNIVKSGLLEEDEHRAASYVRVKKLIDEYHKVFIDRVLDNGCLPLENKGENNSLAEYYDSYVSKSQNEDAKKAFEENQQNLRSIIAKKLTGDKAYANLFGKNLIESYKDKKDKKKIIDSDLIQFICTAEATQLDSMSQDEAKEIVKEFWGFTTYFVGFFDNRKNMYTAEEKSTGIAYRLINENLPKFIDNMEAFKKAIARPEIQANMGELYSNFSEYLNVESVPEMFQLDYYNMLLTQKQIDVYNAIIGGKTDDEHDVKIKGINEYINLYNQQHKDDKLPKLKALFKQILSDRNVISWLPEEFNSDQEVLNAIKDCYERLSENVLGDKVLKSLLGSLADYSLDGIFIRNDLQLTDISQKMFGNWGVIQNAIMQNIKHVAPARKHKESEEDYEKRIADIFKKADSFSISYINDCLNEADPNNAYFVENYFATLGAVDTPTMQRENLFALVQNAYTEVAALLHSDYPTAKNLAQDKANVSKIKALLDAIKSLQHFVKPLLGKGDESDKDERFYGELASLWAELDTVTPLYNMIRNYMTRKPYSQKKIKLNFENPQLLGGWDANKEKDYATIILRRDGLYYLAIMNKESKKLLGKAMPSDGECYEKMVYKLLPGANKMLPKVFFAKSRMEDFKPSKELVEKYNNGTHKKGKNFNIQDCHNLIDYFKQSISKHEDWGKFGFNFSDTSTYEDLSGFYREVEQQGYKLSFARVSVSYISQLVEEGKMYLFQIYNKDFSEYSKGTPNMHTLYWKALFDERNLADVVYKLNGQAEMFYRKKSIENTHPTHPANHPILNKNKDNKKKESLFDYDLIKDRRYTVDKFMFHVPITMNFKSSGSENINQDVKAYLRHADDMHIIGIDRGERHLLYLVVIDLQGNIKEQYSLNEIVNEYNGNTYHTNYHDLLDVREEERLKARQSWQTIENIKELKEGYLSQVIHKITQLMVKYHAIVVLENLNMGFMRGRQKVEKQVYQKFEKMLIDKLNYLVDKKADASVSGGLLNAYQLTSKFDSFQKLGKQSGFLFYIPAWNTSKIDPVTGFVNLLDTRYQNVEKAKVFFSKFDAIRYNKDKDWFEFNLDYDKFGKKAEGTKTKWTLCTRGMRIDTFRNKEKNSQWDNHEVDLTAEMKSLLEHYYIDIHGNLKDAISAQTDKVFFTGLLHILKLTLQMRNSITGTETDYLISPVADENGIFYDSRSCGDELPENADANGAYNIARKGLMLVEQIKGAENLDNVKFDISNKAWLNFAQQKPYKNG

SEQ ID NO: 1623 - protein, 1319 aa, unidentified
  REGION 1..1319: note = Category: MG75 effectors
  REGION 1..1319: note = Description: MG75-109 effector
  source 1..1319: note = uncultivated organism sequence
MAKIFEDFKRLYPLSKTLRFDAKPVGATLDNIVKSGLLEEDEHRAASYVRVKKLIDEYHKVFIDRVLDNGCLPLENKGENNSLAEYYDSYVSKSQNEDAKKAFEENQQNLRSIIAKKLTGDKAYANLFGKNLIESYKDKKDKKKIIDSDLIQFINTADSTQLDSMTQVEAKELVKEFWGFVTYFYGFFDNRKNMYTAEKKSTGIAYRLINENLPKFIDNMEAFKKVIARPEIQANMEELYSDFSEYLNVESIQEMFQLDYYDMLLTQKQIDVYNAIIGGKTDDEHDVKIKGINEYINLYNQQHKDTRLPKLKALFKQILSDRNAISWLPEEFNSDQEVLNAIKDCYERLSENVLGDKVLKSLLGSLADYSLEGIFIRNDLQLTDVSQKMFGNWGVIQNAIMQNIKHVAPARKHKESEEEYEKRIAGIFKKADSFSISYLNDCLNEADPNNAYFVENYFATFGAVNTPTMQRENLFALVQNKYTEVAALLHSDYPTAKHLAQDKANVAKIKALLDAIKSLQHFVKPLLGKGDESDKDERFYGELASLWAELETVTPLYNMIRNYMTRKPYSQKKIKLNFENPQLLDGWDANKEKDYATIILRRNGLYYLAIMGKDSKNLLGKAMPSDGECYEKMVYKQFDISKQLPKCTTELKHVRKALVEDAKRSCLLSDFNNWNKPLNVTRKLWELNNFVWDKKKEDWVLRKKDNETRPKKFHKKYLELTSDKKGYNQAKNDWIKFIKEFLSSYKKVEAYDIHYKKRYNSVDELYKQLNGDLYAISFTYVSASFIEQLVSEGKMYLFQIYNKDFSEYSKGTPNMHTLYWKALFDERNLADVVYKLNGQAEMFYRKKSLENTHPTHPANHPILNKNKDNKKKESLFDYDLIKDRRYTVDKFMFHVPITMNFKSSGSENINQDVKAYLRHADDMHIIGIDRGERHLLYLVVIDLQGNIKEQYSLNEIVNEYNGNTYHTNYHDLLDVREEERLKARQSWQTIENIKELKEGYLSQVIHKITQLMVKYHAIVVLEDLNMGFMRGRQKVEKQVYQKFEKMLIDKLNYLVDKKADASVSGGLLNAYQLTSKFDSFQKMGKQSGFLFYIPAWNTSKIDPVTGFVNLLDTRYQNVEKAKVFFSKFDAIRYNKDKDWFEFNLDYDKFGKKAEGTRTKWALCTRGMRIDTFRNKEKNSQWDNQEVDLTAEMKSLLEHYYIDIHGNLKDAISAQTDKTFFTGLLHILKLTLQMRNSITGTETDYLVSPVADENGIFYDSRSCGDELPENADANGAYNIARKGLMMIEQIKDAKDLNNLKFDISNKAWLNFAQQKPYKNG

SEQ ID NO: 1624 - protein, 807 aa, unidentified
  REGION 1..807: note = Category: MG75 effectors
  REGION 1..807: note = Description: MG75-110 effector
  source 1..807: note = uncultivated organism sequence
METFSGFTNLYPLSKTLRFRLIPVGETLKHFIDSGILEEDQHRAESYVKVKAIIDDYHRAYIENSLSGFELPLESTGKFNSLEEYYLYHNIRNKTEEIQNLSSKVRTNLRKQVVVQLTKNEIFKRIDKKELIQSDLIDFVKNEPDANEKIALISEFRNFTVYFKGFHENRRNMYSDEEKSTSIAFRLIHENLPKFIDNMEVFAKIQNTSISENFDAIQKELCPELVTLCEMFKLGYFNKTLSQKQIDAYNTVIGGKTTSEGKKIKGLNEYINLYNQQHKQEKLPKMKLLFKQILSDRESASWLPEKFENDSQVVGAMVNFWNTIHDTVLAEGGLKTIIASLGSYGLEGIFLKNDLQLTDISQKATGSWSKISSEIKQKIEVMNPQKKKESYESYQERIDKLFKSYKSFSLAFINECLRGEYKIEDYFLKLGAVNSSSLQKENHFSHILNAYTDVKEAIGFYSESTDTKLIQDNDSIQKIKQFLDAVKDLQAYVKPLLGNGDETGKDERFYGDLIEYWSLLDLITPLYNMVRNYVTQKPYSVDKIKINFQNPTLLNGWDLNKETDNTSVILRRDGKYYLAIMNNKSRKVFLKYPSGTDGNCYEKMEYKLLPGANKMLPKVFFSKSRINEFMPNERLLSNYEKGTHKKSGICFSLDDCHTLIDFFKKSLDKHEDWKNFGFKFSDTSTYEDMSGFYKEVENQGYKLSFKPIDATYVDQLVDEGKIFLFQIYNKDFSEHSKGTPNMHTLYWKMLFDETNLGDVVYKLNGEAEVFFRKASINVSHPTHPANIPIKKKNLKHKEMKKEFLNMT

SEQ ID NO: 1625 - protein, 347 aa, unidentified
  REGION 1..347: note = Category: MG75 effectors
  REGION 1..347: note = Description: MG75-111 effector
  source 1..347: note = uncultivated organism sequence
MLNVKENERKQARQSWQSIANIKDLKEGYLSQVIHKISELMVKYNAIVVLEDLNAGFMRGRQKVEKQVYQKFEKKLIEKLNYLVFKKQSSDLPGGLMHAYQLANKFESFNTLGKQSGFLFYIPAWNTSKMDPVTGFVNLFDVKYESVDKAKSFFSKFDSIRYNVERDMFEWKFNYGEFTKKAEGTKTDWTVCSYGNRIITFRNPDKNSQWDNKEINLTENIKLLFERFGIDLSSNLKDEIMQRTEKEFFIELISLFKLVLQMRNSWTGTDIDYLVSPVCNENGEFFDSRNVDETLPQNADANGAYNIARKGMILLDKIKKSNGEKKLALSITNREWLSFAQGCCKNG

SEQ ID NO: 1626 - protein, 1125 aa, unidentified
  REGION 1..1125: note = Category: MG75 effectors
  REGION 1..1125: note = Description: MG75-112 effector
  source 1..1125: note = uncultivated organism sequence
MIQFINTAEPSQLDSMSQDEAKELVKEFWGFTTYFVGFFDNRKNMYTSEEKSTGIAYRLVNENLPKFIDNMEAFKKAIAKPEIQANMEELYSNFAEYLNVESIQEMFQLDYYNMLLTQKQIDVYNAIIGGKTDEEHDVKIKGINEYINLYNQQHKDEKLPKLKALFKQILSDRNAISWLPEEFNSDQEVLNAIDDCYKRLSENVLGDKVLKSLLCSLDDYNLDGIFVRNDLQLTDISQKMFGNWSVIQNAIMQNIKNVAPARKRKESEEDYEKRISDIFKKADSFSIQYINDCLNEMDNNNLHAVDGYFATLGAVNTPTMQRENLFALIQNAYTDISNLLETPYPENKNLAQDKTNVAKVKALLDAIKSLQHFVKPLLGKGDESDKDERFYGELASLWTELDTVTPLYNMIRNYMTRKPYSEKKIKLNFENPQLLGGWDANKEKDYATIILRRNGMYYLAIMDKDSKKLLGKTMPSDGECYEKMVYKLLPGANKMLPKVFFAKSRINDFKPSKLIVENYNNGTHKKGKNFNINDCHNLIDYFKQSIDKHEDWSKFGFNFSDTSTYEDLSGFYREVEQQGYKLSFTNVSVSFIDKLVDEGKMYLFQIYNKDFSDFSKGTPNMHTLYWKALFDERNLADVVYKLNGQAEMFYRKKSINNTHPTHPANNPIQNKNKDNKKKESVFEYDLIKDRRYTVDKFLFHVPITMNFKSVGSENINQQVREYLQQADDTHIIGIDRGERHLLYLVVIDMQGNIKEQFTLNEIVNEYNGNTYRTNYHDLLDTREEERLTARQSWQTIENIKELKEGYLSQVVHKITQLMVKYHAVVVLEDLNKGFMRGRQKVEKQVYQKFEKMLIDKLNYLVDKKADAAQSGGLLNAYQLTSKFDSFQKLGKQSGFLFYIPAWNTSKIDPVTGFVNLLDTRYQNTEKAKAFFSRFDAIRYNANKDWFEFYLDYDKFCTKAEGTRTRWTLCTQGSRISTFRNAEKNSQWDNLEVDLTREMKSLFEHYHINICGNLKEEICLQTDKAFFTGLLHMLKLTLQMRNSITGTETDYLISPVADENGTFYDSRSCGDTLPKNADANGAYNIARKGLMFIGQIKETKDLANFKYDISNKAWLNFAQQKPYKNE

SEQ ID NO: 1627 - protein, 1254 aa, unidentified
  REGION 1..1254: note = Category: MG75 effectors
  REGION 1..1254: note = Description: MG75-113 effector
  source 1..1254: note = uncultivated organism sequence
MKFEDFTGLYPVSKTLRFEAKPVGATLENIIKSGVLEDDAHRARSYKKVKKLIDEYHKVFIDSVMSKFKFKEEILEDICSLYAAKSMDDKSKDRFVKLQGEMRKDVSVAFASDDRYKTINKKELVKEDLFEFVSHADNGQLAGLTKEEAEELILEFKDFTTYFSGFHKNRSNMYVADEKTTSVAYRLVNENLPRFLYNVSVFQKVVSVPEFENKIRAIYDSFREYLCVDNLASMFETPYYNDVLSQMQIDIYNSVIGGKTDKDSSTKIQGLNECINLYNQTHRNDKLPKFKILYKQILSDRVAMSWLPDEFSDDKETLEAIRNCYDSLTDHILGERDLKTLLESLGQYDMSGVFIANGPYLADISQKLYGDWRAIEKAIRKQEAVNSPKKAKETEEEYFNRITKHIHNYDSFSIEYLNFCITESYPNDGRRVEDYFATLGAVNTDTSQRENLFSRIDNAYTNVSGLLSSEYPETKKLSQDTENVEKIKDLLDSIKELQRFVKPLMGNGNESDNDNDKRFYGELSPLWDELETFSLLYDKVRNYVTRKPYSQNKIKLNFNNATLFAGWDQNKEKDNACIILRRGGMYYLGIMNKSYRIVFENNFPCDGDCYEKMVYKLLPGANKMLPKVFFSKSRIREFNPSDRILKNYEEGTHKKGPKFKLEDCHELIDFFKASINLHEDWKKFKFKFSDTSSYEDISDFYKEVEQQGYKITFVNVSVSYIDSLVNDGKLYLFQLYNKDFSQYSKGVPNMHTLYWKALFDKANLADVVYKLNGEAELFFRKKSIDMERPTHRANISVANKNIHNIKKESIFKYDLTKDRRYTVDKFLFHVPITMNFRSEGNIAIEQQVRSYLQSAEDTHVIGIDRGERHLLYVSVIDRRGLIKEQFSLNEIINEHNGSTYATNYHDLLDAKESERRKARQSWQTIENIKDLKEGYLSQAVHKIAQLMVKYHAVVVLEDLNVGFMRGRQKVEKQVYQKFEKMLTDKLNYLVDKKLNANDPGGVFHAYQLSSVFKSAEKRGKQSGFIFYIPAWNTSKIDPVTGFVNLFDLKYENIDKAKSFFSKFQIIRYNSERDWFEFIFDYDSFNSKASGTKVGWTLTTHGDRILSFRNSEKNNQWDSRAVILTDEYKALFDKYGIDYNDNLKEAITNQTEKAFFEDLLKCLRLTLQMRNSVIGTDTDFLISPVADNNGVFYDSRICADSLPKNADANGAYNIARKGLMLIDQIKKASDVRNIKFDIANKSWLDFAQKKPYLDE

SEQ ID NO: 1628 - protein, 1269 aa, unidentified
  REGION 1..1269: note = Category: MG75 effectors
  REGION 1..1269: note = Description: MG75-114 effector
  source 1..1269: note = uncultivated organism sequence
MYFDDFKKLYPLSKTLRFEAKPVGPTFKHIKERGLLEEDEHRAISYVKVKKLIDEYHKAFVGKALNNGCLLYESCGNKNSLIEYYETYKSKEGEARKTMKEIQKNLREMIVGAFEKEEDYANLFKGGLIEPYKSGGKHKEPDILRLINTAGFSQLAGMSQEEAKSLIKEFWRFTTYFVGFFDNRGNMYTSEEKSTGIAYRLINENLPRFIDNMEIFNKIIGKSEIQARVTELYSDFEGYLNVGSIQEMFKLDYYNALLTQKQIDVYNAIISGRTTTGPESKKIKGLNEYINLYNQQHKDGKLPKFKPLFKQILSDREALSWLPDEFVNDQEMLNAIKNCYEKLTGNILGESALKVLLGSLADYDLGGIFVRNDSQLTNISQRMFGRWDAIQNAILQDIRKTAPMRKRRESEEDYENRIDKMFKKADSFSIKYINDCIREIAVDDTLFVEDYFATLGAVNTPTIQRENLFLLVQNAFTDVADLLNSEYSAEKSLAQDSVNVSKIKALLDAIKSLQQFVRPLLGNGDENEKDERFYGEFTSLWAELDEVTLLYDMVRNRMTRKPYSQKKIKLNFANPKLLNGWDENKEKDNSCIILRRDGKYYLAVMDKKSKNLLGKPMPSDGECYEKMVYKLLPGAQKMFPKVFFAKSRIDEFKPSEHILNIYSNGTHKKGNKNFNIEDCHDLIDFFKESIRRHKDWNKFGFEFSDTSTYENVNEFYREADEQGYKLSFVNVSVAYIDKLVNEGEMYLFQIYNKDFSEYSKGTPNMHTLYWKALFDDRNLVDMVYKLNGQAELFYRKKSLDSIRPTHPANQPIKNKNKNNKKKESLFEYDLVKDRRYTVDKFMFHVPITMNFKNAGLEKINQQVREYLQQADDTHIIGIDRGERHLLYLVVIDMHGNIKEQFSLNEIVNECSGNTYHTNYHALLDAREEERLNARRSWQTIESIKELKEGYLSQVIHRITQLMVKYHAIVVLEDLSMGFMRGRQKVEKQVYQKFEKMLIDKLNYLVDKKVDVSQPGGLLNAYQLTNKFESFQSSEKQSGFVFYIPAWNTSKIDPVTGFVNLLDTRYQNVEKARAFFSKFDAIRYNKDKDWFEFGVDYDNFNKKAEGTMTKWTLCTQGVRICTFRNVEKNSQWDTQEVDLTTEMKSLFGQSQIDVNGNLKEAICSQSDKTFFMRLLHLLKLMLQMRNSITGTEIDYLVSPVADGNGNFYDSRKCDSTLPKNADANGAYNIARKGLMLLRQMKTADNLTDVKFDMTNRTWLKFAQQKPYKDE

SEQ ID NO: 1629 - protein, 1252 aa, unidentified
  REGION 1..1252: note = Category: MG75 effectors
  REGION 1..1252: note = Description: MG75-115 effector
  source 1..1252: note = uncultivated organism sequence
MKFEDFTGLYPVSKTLRFEAKPVGATLENVIKSGVLEDDAHRARSYKKVKKLIDEYHKVFIDSVMSKFKFKEEILEDICSLYAAKSMDDKSKDRFVKLQGEMRKDVSVAFASDDRYKTINKKELVKEDLFEFVSHADNGQLAGLTKEEAEELILEFKDFTTYFSGFHKNRSNMYVADEKTTSVAYRLVNENLPRFLYNVSVFQKVVSVPEFENKIRAIYDSFREYLCVDNLASMFETSYYNDVLSQMQIDIYNSVIGGKTDKDSSTKIQGLNECINLYNQTHRNDKLPKFKILYKQILSDRVAMSWLPDEFSDDKETLEAIRNCYDSLTDHILGERDLKTLLESLGQYDMSGVFIANGPYLADISQKLYGDWRAIEKAIRKQEAVNSPKKAKETEEEYFNRITKHIHNYDSFSIEYLNFCITESYPNDGRRVEDYFATLGAVNTDTSQRENLFSRIDNAYTNVSGLLSSEYPETKKLSQDTENVEKIKDLLDSIKELQRFVKPLMGNGDESDNDKRFYGELSPLWDELETFSLLYDKVRNYVTRKPYSQNKIKLNFNNATLFAGWDQNKEKDNACIILRRGGMYYLGIMNKSYRIVFENNFPCDGDCYEKMVYKLLPGANKMLPKVFFSKSRIREFNPSDRILKNYEEGTHKKGPKFKLEDCHELIDFFKASINLHEDWKKFKFKFSDTSSYEDISDFYKEVEQQGYKITFVNVSVSYIDSLVNDGKLYLFQLYNKDFSQYSKGVPNMHTLYWKALFDKANLADVVYKLNGEAELFFRKKSIDMERPTHRANISVANKNIHNIKKESIFKYDLTKDRRYTVDKFLFHVPITMNFKSEGNIAIEQQVRSYLQSAEDTHVIGIDRGERHLLYVSVIDRRGLIKEQFSLNEIINEHNGSTYATNYHDLLDAKESERRKARQSWQTIENIKDLKEGYLSQAVHKIAQLMVKYHAVVVLEDLNVGFMRGRQKVEKQVYQKFEKMLTDKLNYLVDKKLNANDPGGVFHAYQLSSVFKSAEKRGKQSGFIFYIPAWNTSKIDPVTGFVNLFDLKYENIDKAKSFFSKFQIIRYNSERDWFEFIFDYDSFNSKASGTKVGWTLTTHGDRILSFRNSEKNNQWDSRAVILTDEYKALFDKYGIDYNDNLKEAITNQTEKAFFEDLLKCLRLTLQMRNSVIGTDTDFLISPVADNNGVFYDSRICADSLPKNADANGAYNIARKGLMLIDQIKKASDVRNIKFDIANKSWLDFAQKKPYLDE

SEQ ID NO: 1630 - protein, 762 aa, unidentified
  REGION 1..762: note = Category: MG75 effectors
  REGION 1..762: note = Description: MG75-116 effector
  source 1..762: note = uncultivated organism sequence
METFSGFTNLYPLSKTLRFRLIPVGETLKHFIGSGILEEDQHRAESYVKVKAIIDDYHRAYIENSLSGFELPLESTGKFNSLEEYYLYHNIRNKTEEIQNLSSKVRTNLRKQVVTQLTKNEIFKRIDKKELIQSDLIDFVKNEPDANEKIALISEFRNFTVYFKGFHENRRNMYSDEEKSTSIAFRLIHENLPKFIDNMEVFAKIQNTSISENFDAIQKELCPELVTLCEMFKLGYFNKTLSQKQIDAYNTVIGGKTTSEGKKIKGLNEYINLYNQQHKQEKLPKMKLLFKQILSDRESASWLPEKFENDSQVVGAMVNFWNTIHDTVLAEGGLKTIIASLGSYGLEGIFLKNDLQLTDISQKATGSWSKISSEIKQKIEVMNPQKKKESYESYQERIDKLFKFYKSFSLAFINECLRGEYKIEDYFLKLGAVNSSSLQKENHFSHILNTYTDVKEVIGFYSESTDTKLIRDNGSIQKIKLFLDAVKDLQAYVKPLLGNGDETGKDERFYGDLIEYWSLLDLITPLYNMVRNYVTQKPYSIDKIKINFQNPTLLNGWDLNKETDNTSVILRRDGKYYLAIMNNKSRKVFLKYPSGTDRNCYEKMEYKLLPGANKMLPKVFFSKSRINEFMPNERLLSNYEKGTHKKSGTCFSLDDCHTLIDFFKKSLDKHEDWKNFGFKFSDTSTYEDMSGFYKEVENQGYKLSFKPIDATYVDQLVDEGNIFYFRFITRIFLSIAKVRLICIPCIGKCYLMKQILGMWYIN

SEQ ID NO: 1631 - protein, 1274 aa, unidentified
  REGION 1..1274: note = Category: MG75 effectors
  REGION 1..1274: note = Description: MG75-117 effector
  source 1..1274: note = uncultivated organism sequence
MAKNFEDFKRLYPLSKTLRFEAKPIGATLDNIIKSGLLDEDEHRAASYVKMKKLIDEYHKVFIDRVLDNGCLPLEDKGDNNSLAEYYESYVSKAQDEDAIKKFKEIQQNLCSIIAKKLTDDKAYANLFGNKLIESYKDKADKTKIIDSDLIQFINTAESTQLVSMSQDEAKELVKEFWGFTTYFEGFFKNRKNMYTPEEKSTGIAYRLINENLPKFIDNMEAFKKAITRPEIQANMEELYSDFSEYLNVESIQEMFQLDYYNMLLTQKQIDVYNAIIGGKTDDEHDVKIKGINEYINLYNQQHKDDKLPKLKALFKQILSDRNAISWLPEEFNSDQEVLNAIKDCYERLAENVLGDKVLKSLLCSLSDYTLDGIFIRNDLQLTDISQKMFGNWGVIQNAIMQNIKRVAPARKHKESEEDYEKRIAGIFKKADSFSISYINDCLNEADSNNAYFVENYFATFGAVNTPTMQRENLFALVQNAYTEVASLLHSDYPTAKHLAQDKANVAKIKALLDAIKSLQHFVKPLLGKGDESDKDERFYGELASLWAELDTVTPLYNMIRNYITRKPYSQKKIKLNFENPQLLGGWDANKEKDYATIILRRNGLYYLAIMNKESKKLLGKAMPSDGECYEKMVYKLLPGANKMLPKVFFAKSRMEDFKPSKELVEKYNNGTHKKGKNFNIQDCHNLIDYFKQSISKHEDWGKFGFNFSDTSTYEDLSGFYREVEQQGYKLSFARVSVSYINQLVEEGKMYLFQIYNKDFSEYSKGTPNMHTLYWKALFDERNLADVVYKLNGQAEMFYRKKSIENTHPTHPANHPILNKNKDNKKKESLFEYDLIKDRRYTVDKFMFHVPITMNFKSVGSENINQGVKEYLHHADDMHIIGIDRGERHLLYLVVIDLQGNIKEQYSLNEIVNEYNGNTYHTNYHDLLDAREDERLKARQSWQTIENIKELKEGYLSQVIHKITQLMVKYHAIVVLEDLNMGFMRGRQKVEKQVYQKFEKMLIDKLNYLVDKKADASVSGGWLNAYQLTSKFDSFQKLGKQSGFLFYIPAWNTSKIDPVTGFVNLLDARYQNVEKAKAFFSKFDAIRYNKDKDWFEFNLDYDKFGKKAEGTRTKWTLCTRGMRFDTFRNKEKNSQWDNQEVDLTAEMKSLLEHYYIDIHGNLKDAISAQTDKAFFTGLLHILKLTLQMRNSITGTETDYLVSPVADENGIFYDSRSCGEELPENADANGAYNIARKGLMLIEQIKGAEDLGNLKFDISNKAWLNFAQKKPYKNG

SEQ ID NO: 1632 - protein, 1271 aa, unidentified
  REGION 1..1271: note = Category: MG75 effectors
  REGION 1..1271: note = Description: MG75-118 effector
  source 1..1271: note = uncultivated organism sequence
MEFDDFKRLYPLSKTLRFEAKPIGATLKNIIKSGVLEEDEHRAQSYVKVKKLIDEYHKVFIDRVLNEGCLTIENKGNKDSLEEYYESYMSKSNDENVSKTFKEIQENLRSVIAKKLTDDKAYANLFGKNLIESYKDKEDKNKIIDSDLIQFINTAEPSQIDSMSQDEAKELVKEFWGFTTYFVGFFDNRKNMYTSEEKSTGIAYRLVNENLPKFIDNMEAFKKAIAKPEIQANMEELYSNFAEYLNIESIQEMFQLDYYDMLLTQKQIDVYNAIIGGKTDEDHDVKIKGINEYINLYNQQHKDEKLPKLKALFKQILSDRNAISWLPEEFNSDQEVLDAIKDCYERLSENVLGDKVLKSLLCSLSDYNLNGIFVRNDLQLTDISQKTFGNWSVIQNAIMQNIKNVAPARKRKESEEDYEKRISDIFKKADSFSIQYINDCLNEMDDNNLHAVDGYFATLGAVNTPTMQRENLFALIQNAYTDISDLLDTPYPQNKNLAQDKTNVAKVKVLLDAIKSLQHFVKPLLGMGDESDKDERFYGELASLWTELDTVTPLYNMIRNYMTRKPYSEKKIKLNFENPQLLGGWDANKEKDYATIILRRNGMYYLAIMDKDSKKLLGKTMPSDGECYEKMVYKLLPGANKMLPKVFFAKSRINDFKPSKKIVENYNNGTHKKGKNFNINDCHDLIDYFKQSIDKHEDWSKFGFNFSDTSTYEDLSGFYREVEQQGYKLSFTNISVSFIDKLVDEGKMYLFQIYNKDFSDYSKGTPNMHTLYWKALFDERNLADVVYKLNGQAEMFYRKKSIDYTYPTHPANHPIQNKNKDNKKKESVFEYDLVKDRRYTVDKFLFHVPITINFKSVGSENINQQVREYLQQADDTHIIGIDRGERHLLYLVVIDMQGNIKEQFTLNEIVNEYNGNTYRTNYHDLLDTREEERLTARQSWQTIENIKELKEGYLSQVVHKITQLMVKYHAVVVLEDLNKGFMRGRQKVEKQVYQKFEKMLIDKLNYLVDKKADATQSGGLLNAYQLTSKFDSFQKLGKQSGFLFYIPAWNTSKIDPVTGFVNLLDTRYQNTEKAKAFFSKFDAIRYNADKDWFEFNLDYDKFGTKAEGTRTTWTLCTQGNRICTFRNAEKNSQWDNQEVDLTGELKSLFEHYNINISGNLKEEICSQTDKAFFTGLLHILKLTLQMRNSITGTETDYLVSPVADENGVFYDSRSCGDRLPENADANGAYNIARKGLMLIGQIKGTKDLANFKYDISNKSWLNFAQQKPYKK

SEQ ID NO: 1633 - protein, 1272 aa, unidentified
  REGION 1..1272: note = Category: MG75 effectors
  REGION 1..1272: note = Description: MG75-119 effector
  source 1..1272: note = uncultivated organism sequence
MKFDDFKKLYSLSKTLRFEAKPVGSTLKNIIESGLLEEDEHRAQSYVKVKKLIDEYHKVFIDRVLNEGCLTIENKGKKDSLEEYYESYMSKSNDENVSKTFKEIQENLRSVIAKKLTDNNAYANLFGNKLIESYKDKDEKNKIIDSDLIQFINTAEPSQLDSMSQDEAKELVKEFWGFTTYFVGFFDNRKNMYTSEEKSTGIAYRLVNENLPKFIDNMEAFKKAIAKPEIQANMEELYSNFAEYLNVESIQEMFQLDYYNMLLTQKQIDVYNAIIGGKTDEEHDVKIKGINEYINLYNQQHKDEKLPKLKALFKQILSDRNAISWLPEEFNSDQEVLNAINDCYKRLSENVLGDKVLKSLLCSLDDYNLDGIFVRNDLQLTDISQKMFGNWSVIQNAIMQNIKNVAPARKRKESEEDYEKRISDIFKKADSFSIQYINDCLNEMDDNNLYAVDGYFATLGAVNTPTMQRENLFALIQNAYTDISNLLETPYPENKNLAQDKTNVAKVKALLDAIKSLQHFVKPLLGKGDESNKDERFYGELASLWTELDTVTPLYNMIRNYMTRKPYSEKKIKLNFENPQLLGGWDANKEKDYATIILRRNGMYYLAIMDKDSKKLLGKTMPSDGECYEKMVYKLLPGANKMLPKVFFAKSRINDFKPSKQIVENYNNGTHKKGKNFNINDCHNLIDYFKQSIDKHEDWSKFGFNFSDTSTYEDLSGFYREVEQQGYKLSFTNVSVSFIDKLVDEGKMYLFQIYNKDFSDFSKGTPNMHTLYWKALFDERNLADVVYKLNGQAEMFYRKKSINNTHPTHPANHPIQNKNKDNKKKESVFEYDLIKDRRYTVDKFLFHVPITMNFKSVGSENINQQVREYLQKADDTHIIGIDRGERHLLYLVVIDMQGNIKEQFTLNEIVNEYNGNTYHTNYHDLLDTREEERLTARQSWQTIENIKELKEGYLSQVIHKITQLMVKYHAVVVLEDLNKGFMRGRQKVEKQVYQKFEKMLIDKLNYLVDKKADAAQSGGLLNAYQLTSKFDSFQKLGKQSGFLFYIPAWNTSKIDPVTGFVNLLDTRYQNTEKAKAFFSRFDAIRYNANKDWFEFYLDYDKFCTKAEGTRTRWTLCTQGSRISTFRNAEKNSQWDNLEVDLTREMKSLFEHYHINICGNLKEEICLQTDKAFFTGLLHMLKLTLQMRNSITGTETDYLISPVADENGTFYDSRSCGDTLPKNADANGAYNIARKGLMFIGQIKETKDLANFKYDISNKAWLNFAQQKPYKNE

SEQ ID NO: 1634 - protein, 880 aa, unidentified
  REGION 1..880: note = Category: MG75 effectors
  REGION 1..880: note = Description: MG75-120 effector
  source 1..880: note = uncultivated organism sequence
MIQNAIMQNIKRVAPARKHKESEEDYEKRIAGIFKKADSFSISYINDCLNEADPNNAYFVENYFATFGAVNTPTMQRENLFALVQNAYTEVASLLHSYYPAEKKLAQDKANVAKIKALLDAIKSLQHFVKPLLGKGDESDKDERFYGELASLWAELDTVTPLYNMIRNYITRKPYSQKKIKLNFENPQLLGGWDANKEKDYATIILRRNGLYYLAIMDKDSRKLLGKAMPSDGECYEKMVYKLLPGANKMLPKVFFAKSRMDDFKPSKELIEKYNNGTHKKGKNFDIQDCHNLIDYFKQSIDKHEDWSKFGFNFSDTSTYEDLSGFYREVEQQGYKLSFARVSVSYINQLVEEGKMYLFQIYNKDFSEYSKGTPNMHTLYWKALFDERNLADVVYKLNGQAEMFYRKKSIENSHPTHPANHPILNKNKDNKKKESLFDYDLIKDRRYTVDKFMFHVPITMNFKSSSSENINQDVKAYLRHADDMHIIGIDRGERHLLYLVVIDLQGNIKEQYSLNEIVNEYNGNTYHTNYHDLLDVREEERLKARQSWQTIENIKELKEGYLSQVIHKITQLMVKYHAIVVLEDLNMGFMRGRQKVEKQVYQKFEKMLIDKLNYLVDKKADASVSGGLLNAYQLTSKFDSFQKLGKQSGFLFYIPAWNTSKIDPITGFVNLLDTRYQNVEKAKVFFSKFDAIRYNKDKDWFEFNLDYDKFGKKAEGTRTKWILCTRGMRIDTFRNKEKNSQWDNQEVDLTAELKSLLEHYYIDIHGNLKEAISAQTDKAFFTGLLHILKLTLQMRNSITGTETDYLVSPVADENGIFYDSRSCGEQLPENADANGAYNIARKGLMMIEQIKNAEDLGNLKFDISNKAWLNFAQQKPYKNG

SEQ ID NO: 1635 - protein, 1276 aa, unidentified
  REGION 1..1276: note = Category: MG75 effectors
  REGION 1..1276: note = Description: MG75-121 effector
  source 1..1276: note = uncultivated organism sequence
MAKKFEDFTKLYPLSKTLCFEARPIGATKSNIIKNGLLDEDKHRAESYVKVKKLIDEYHKAFIDRVLADGCLCYKNEGNEDSLEEYYEFYSLSSKDKSDDTRKHFATIQQNLRSKIAETLTKDKAYANLFGNKLIESHKDKEDKNNIIDSDLIQFVSTATPDQLDSQSKDDATKLIKEFWGFTTYFTGFFENRKNMYTSEEKSTGIAYRLINENLPKFIDNMESFKKIMEKPEMSANMEELRANLEEYLNVESISEMFELNYYNMLLTQKQIDVYNAVIGGKTDEEQDIKTKGINEYVNLYNQQHKDAKLPKLKTLFKQILSDRNAISWLPEEFDKDQNVLNAIKDCYVRLTANVLGNNVLNSLLSTLSEYNTESIFIRNDIQLTNISQKMAGSWNYIQDAIKQDIKNVAPARKRKESEEDYEERISKNFKKADSYSIKYIDDCLNRAYKNNTYTVEGYFATLGATNTPSLQRENLFAQIANAYTNISSLLSSDYSAEKNLAQDKENVAKIKTLLDCIKSLQHFVKPLLGKGDESDKDERFYGELSMLWKELDTVTPLYNMVRNYMTRKPYSQKKIKLNFENPQLLGGWDANKEKDYASILLRRDGKYYLGIMDKESKKLLGKSMPSDGACYQKMVYKLLPGANKMLPKVFFAKSRLADFNPSKEIIENYNNGTHKKGKNFNLKDCHALIDYFKESIKKHEDWSKFGFKFSESTTYEDLSGFYHEVEQQGYKLSFTNVSASYIDKMVDEGKMYLFQIYNKDFSEYSKGTPNMHTLYWKALFDERNLADVVYKLNGQAELFYREKSIDCTHPTHPANHPILNKNKDNEKKESIFEYDLIKDRRYTVDKFMFHVPITMNFKSTGADNINQLVREHLKDADAPHIIGIDRGERHLLYLVVIDMHGNIKEQFTLNDIVNEYNGNTYRTNYHDLLDAREDVRLKARQSWQTIENIKELKEGYLSQVIHKITQLMVKYHAIVVLEDLNMGFMRGRQKVEKQVYQKFEKMLIDKLNYYVDKKANAEQAGGLLNAYQLTSKFDSFQKLGKQSGFLLYIPAWNTSKIDPVTGFVNLLDTRYQNVEKAKAFFCKFEAIRYNSNKNWFEFTIDYNNFGQKAEGTRTKWTLCTQGKRIRTFRNPEKNSEWDNQEIDLTAALKNLFAHYHIDINGNIKEAISAQSDKTFFTELLHLLKLTLQMRNSITGTETDYLISPVADDNGYFYDSRTCNDTLPKNADANGAYNIARKGLMLIEQIKKAKDIANIKFDISNKSWLNFAQQKPYKDE

SEQ ID NO: 1636 - protein, 1274 aa, unidentified
  REGION 1..1274: note = Category: MG75 effectors
  REGION 1..1274: note = Description: MG75-122 effector
  source 1..1274: note = uncultivated organism sequence
MAKNFEDFKRLYPLSKTLRFEAKPIGATLDNIVKSGLLDEDEHRAASYVKVKKLIDEYHKVFIDRVLADGCLPLKNEGHNNSLTEYYDNYVSKSQNEDAKKAFEENQQNLRSIIAKKLTEDKAYANLFGKNLIESYKDKTDKTKIIDSDLIKFINTAESTQLDSMSQDEAKEIVKEFWGFTTYFVGFFDNRKNMYTAEEKSTGIAYRLINENLPKFIDNMEAFKKAIARPEIQANMEELYSNFSEYLNVESIQEMFLLDYYNMLLTQKQIDVYNAIIGGKTDDEHDVKIKGINEYINLYNQQHKDDKLPKLKALFKQILSDRNAISWLPEEFNSDQEVLNAIKDCYERLSENVLGDKVLKSLLGSLADYSLDGIFIRNDLQLTDISQKMFGNWGVIQNAIMQNIKHVAPARKHKESEEDYEKRIAGIFKKADSFSISYINDCLNEADPNNAYFVENYFATFGAVNTPTMQRENLFALVQNAYTEVAALLHSDYPTVKHLAQDKANVAKIKALLDAIKSLQHFVKPLLGKGDESDKDERFYGELASLWAELDTVTPLYNMIRNYMTRKPYSQKKIKLNFENPQLLGGWDANKEKDYATIILRRNGLYYLAIMDKDSRKLLGKAMPSDGECYEKMVYKLLPGANKMLPKVFFAKSRMEDFKPSKELVEKYNNGTHKKGKNFCIQDCHNLIDYFKQSIDKHEDWSKFGFNFSETSTYEDLSGFYREVEQQGYKLSFARVSVSYINQLVEEGKMYLFQIYNKDFSEYSKGTPNMHTLYWKALFDERNLADVVYKLNGQAEMFYRKKSIENTHPTHPANHPILNKNKDNKKKESLFKYDLIKDRRYTVDKFMFHVPITMNFKSSGSENINQDVKAYLRYADDMHIIGIDRGERHLLYLVVIDLQGNIKEQFSLNEIVNDYNGNTYHTNYHDLLDVREDERLKARQSWQTIENIKELKEGYLSQVIHKITQLMVKYHAIVVLEDLNMGFMRGRQKVEKQVYQKFEKMLIEKLNYLVDKKADASVSGGLLNAYQLTSKFDSFQKLGKQSGFLFYIPAWNTSKIDPVTGFVNLLDTRYQNVEKAKSFFSKFDAIRYNKDKDWFEFNLDYDKFGKKAEGTRTKWTLCTRGMRIDTFRNKEKNSQWDNQEVDLTAEMKSLLEHYYIDIHGNLKDAISAQTDKAFFTGLLHILKLTLQMRNSITGTETDYLVSPVVDENGIFYDSRSCGDTLPENADANGAYNIARKGLMMIEQLKDAKDLDNLKFDISNKAWLNFAQQKPYKNG

SEQ ID NO: 1637 - protein, 1252 aa, unidentified
  REGION 1..1252: note = Category: MG75 effectors
  REGION 1..1252: note = Description: MG75-123 effector
  source 1..1252: note = uncultivated organism sequence
MKFEDFTGLYPVSKTLRFEAKPVGATLENVIKSGVLEDDAHRARSYKKVKKLIDEYHKVFIDSVMSKFKFKEEILEEICSLYAAKSMDDKSKDRFVKLQGEMRKDVSVAFASDDRYKTINKKELVKEDLFEFVSHADNGQLAGLTKEEAEELILEFKDFTTYFSGFHKNRSNMYVADEKTTSVAYRLVNENLPRFLYNVSVFQKVVSVPEFENKIRAIYDSFREYLCVDNLASMFETSYYNDVLSQMQIDIYNSVIGGKTDKDSSTKIQGLNECINLYNQTHRNDKLPKFKILYKQILSDRVAMSWLPDEFSDDKETLEAIRNCYDSLTDHILGERDLKTLLESLGQYDMSGVFIANGPYLADISQKLYGDWRAIEKAIRKQEAVNSPKKAKETEEEYFNRITKHIHNYDSFSIEYLNFCITESYPNDGRRVEDYFATLGAVNTDTSQRENLFSRIDNAYTNVSGLLSSEYPETKKLSQDTENVEKIKDLLDSIKELQRFVKPLMGNGDESDNDKRFYGELSPLWDELETFSLLYDKVRNYVTRKPYSQNKIKLNFNNATLFAGWDQNKEKDNACIILRRGGMYYLGIMNKSYRIVFENNFPCDGDCYEKMVYKLLPGANKMLPKVFFSKSRIREFNPSDRILKNYEEGTHKKGPKFKLEDCHELIDFFKASINLHEDWKKFKFKFSDTSSYEDISDFYKEVEQQGYKITFVNVSVSYIDSLVNDGKLYLFQLYNKDFSQYSKGVPNMHTLYWKALFDKANLADVVYKLNGEAELFFRKKSIDMERPTHRANISVANKNIHNIKKESIFKYDLTKDRRYTVDKFLFHVPITMNFKSEGNIAIEQQVRSYLQSAEDTHVIGIDRGERHLLYVSVIDRRGLIKEQFSLNEIINEHNGSTYATNYHDLLDAKESERRKARQSWQTIENIKDLKEGYLSQAVHKIAQLMVKYHAVVVLEDLNVGFMRGRQKVEKQVYQKFEKMLTDKLNYLVDKKLNANDPGGVFHAYQLSSVFKSAEKRGKQSGFIFYIPAWNTSKIDPVTGFVNLFDLKYENIDKAKSFFSKFQIIRYNSERDWFEFIFDYDSFNSKASGTKVGWTLTTHGDRILSFRNSEKNNQWDSRAVILTDEYKALFDKYGIDYNDNLKEAITNQTEKAFFEDLLKCLRLTLQMRNSVIGTDTDFLISPVADNNGVFYDSRICADSLPKNADANGAYNIARKGLMLIDQIKKASDVRNIKFDIANKSWLDFAQKKPYLDE

SEQ ID NO: 1638 - protein, 1271 aa, unidentified
  REGION 1..1271: note = Category: MG75 effectors
  REGION 1..1271: note = Description: MG75-124 effector
  source 1..1271: note = uncultivated organism sequence
MEYENFKKIYPLSKTLRFEAKPVGSTLKNFIESGLLEEDEHRAQSYVKVKKLIDEYHKVFIDRVLNDGCLPLENKGNKNSLEEYYESYLSKNRDENANNTFKEIQQNLRSVIAKKLTDDKAYANLFGNKLIESYKDKEDKKKIIDSDLIQFINCANSSQLNGMSEDEAKELVKEFWGFTTYFEGFHTNRKNMYTAEEESTAIAHRLINENLPKFIDNMDVFKKAVAKPEIQANIEELYANFAAYLNVESIQEMFQLDYYNMLLTQKQIDVYNAIIGGKTDEDHDVKIKGINEYINLYNQQHKNEKLPKLKVLFKQILSDRNAISWLPEEFNDDQEVLNAIKDCYERLSENVLGDKVLKSLLCSLGDYNLDGIFVRNDAQLTDISQKMFGDWGVIQNAIIQNIKNVAPARKRKESEEDYEKRISDIFKKADSFSLRYINDCLNEMDEKNPYTVQWYFSTLGAVNTPTMQRENLFALIQNAYTDISDLLNSQYPTDKNLSQDKTNVAKVKALLDAIKSLQHFVKPLLGRGDESDKDERFYGELASLWTELDTVTPLYNMVRNYMTRKPYSEKKIKLNFENPQLLGGWDANKEKDYASIILRRNGLYYLAIMNKESKKLLGKTMPSDGECYEKMVYKLLPGANKMLPKVFFSKSKIDYFKPSKQIVENYNNDTHKKGKNFNINDCHDLIDFFKQSIDIHEDWSKFGFKFSDTSTYKDLSGFYREVEQQGYKLSFTKVSVSFIDKLVDDGKMYLFQIYNKDFSKYSKGTPNMHTLYWKALFDERNLADVVYKLNGQAEMFYRKKSIVYTHPTHPANHPILNKNKENKKKESVFEYDLVKDRRYTVDKFLLHVPITMNFKSVGSENINQQVREYLQQAEDTHIIGIDRGERHLLYLVVIDMQGNIKEQYTLNEIVNEYNGNTYRTNYHDLLNTREEERLTARQSWQTIENIKELKEGYLSQVIHKITQLMVKYHAVVVLEDLNKGFMRGRQKVEKQVYQKFEKMLIDKLNYLVDKKADAAQLGGLLNAYQLTSKFDSFQKLGKQSGFLFYIPAWNTSKIDPVTGFVNLLDTRYQNTEKAKAFFSKFDAIRYNTDKDWFEFYLDYDKFGTKAEGTRTKWTLCTQGCRIRIFRNADKNSQWDNQDVDLTKELKALFEIYHINIGGNLKEGICSQTDKAFFTGLLHILKLTLQMRNSITGTETDYLVSPVADENGVFYDSRSCGDTLPKNADANGAYNIARKGLMLIEQIKETKDLANFKYDISNKAWLNFAQQKPYEK

SEQ ID NO: 1639 - protein, 1080 aa, unidentified
  REGION 1..1080: note = Category: MG75 effectors
  REGION 1..1080: note = Description: MG75-125 effector
  source 1..1080: note = uncultivated organism sequence
MYTSEEKSTGIAYRLINENLPKFIDNMEAFKKAIAIPEIQANIGELYSDFSEYLNVESIQEMFQLDYYNMLLTQKQIDVYNAIIGGKTDEDHDVNIKGINQYINIYNQHHKDEKLPKLKALFKQILSDRNAISWLPEEFNSDQEVLNAIDDCYKRLSENVLGDKVLKSLLCSLSDYNLNGIFVRNDLQLTDISQKMFGNWSVIQNAIMQNIKNVAPARKRKESEEDYEKRISDIFKKADSFSIQYINDCLNEMDDNNLHTVDGYFAKLGAVNTPTMQRENLFALIQNAYTDISDLLDTPYPENKNLAQDKTNVAKVKALLDAIKSLQHFVKPLLGKGDESDKDERFYGELASLWTELDTVTPLYNMIRNYMTRKPYSEKKIKLNFENPQLLGGWDANKEKDYATIILRRNGMYYLAIMDKDSKKLLGKTMPYDGECYEKMVYKLLPGANKMLPKVFFAKSRINDFKPSKKIVENYNNGTHKKGKNFNINDCHDLIDYFKQSIDKHEDWSKFGFNFSDTSTYEDLSGFYREVEQQGYKLSFTNISVSFIDKLVDEGKMYLFQIYNKDFSDYSKGTPNMHTLYWKALFDERNLADVVYKLNGQAEMFYRKKSIDYTHPTHPANHPIQNKNKDNKKKESVFEYDLVKDRRYTVDKFLFHVPITMNFKSVGSENINQQVREYLQQADDTHIIGIDRGERHLLYLVVIDMQGNIKEQFTLNEIVNEYNGNTYRTNYHDLLDTREEERLTARQSWQTIENIKELKEGYLSQVIHKITQLMVKYHAVVVLEDLNKGFMRGRQKVEKQVYQKFEKMLIDKLNYLVDKKVDATQSGGLLNAYQLTSKFDSFQKLGKQSGFLFYIPAWNTSKIDPVTGFVNLLDTRYQNTEKAKAFFSKFDAIRYNADKDWFEFNLDYDKFGTKAEDTRTTWTLCTQGNRICTFRNAEKNSQWDNQEVDLTRELKSLFEHYNINICGNLKEEICSQTDKAFFTGLLHILKLTLQMRNSITGTETDYLVSPVADENGVFYDSRSCGDTLPKNADANGAYNIARKGLMLIGQIKETKDLANFKYDISNKAWLNFAQQKPYKK

SEQ ID NO: 1640 - protein, 1236 aa, unidentified
  REGION 1..1236: note = Category: MG75 effectors
  REGION 1..1236: note = Description: MG75-126 effector
  source 1..1236: note = uncultivated organism sequence
MEEYYESYMSKSNDENVSKTFKEIQENLRSVIAKKLTDNNAYANLFGNKLIESYKDKDEKNKIIDSDLIQFINTAEPSQLDSMSQDEAKELVKEFWGFTTYFVGFFDNRKNMYTSEEKSTGIAYRLINENLPKFIDNMEAFKKAVAKPEIQANIEELYSNFAEYLNVESIQEMFQLDYYNMLLTQKQIDVYNAIIGGKTDEEHDVKIKGINEYINLYNQQHKDEKLPKLKALFKQILSDRNAISWLPEEFNSDQEVLNAIKDCYERLSENVLGDKVLKSLLCSLSDYNLNGIFVRNDLQLTDISQKMFGNWSVVQDAIMQNIKNVAPARKRKESEEDYEKRISDIFKKADSFSIQYINDCLNEMDDNNLHAVDGYFATLGAVNTPTMQRENLFALIQNAYTDISNLLETPYPENKNLAQDKTNVAKVKALLDAIKSLQHFVKPLLGKGDESDKDERFYGELASLWTELDTVTPLYNMVRNYMTRKPYSEKKIKLNFENPQLLGGWDANKEKDYATIILRRNGMYYLVIMDKDSKKLLGKTMPSDGECYEKMVYKQFDISKQLPKCTTELKRVRKALVEDAKRSCLLSDSKDWNKPLNVTRKLWELNNYVWDKKKADWVLRKKENETRPKKFHKKYLELTSDKKGYNQAKNDWIKFTKEFLSSYKKVEAYDIHYKKRYNSVDELYKQLNGDFYTISFSYVSVSFIEKLVDEGKMYLFQIYNKDFSDYSKGTPNMHTLYWKALFDERNLADVVYKLNGQAEMFYRKKSINNTPPTHPANHPIQNKNKDNKKKESVFEYNLIKDRRYTVDKFLFHVPITMNFKSVGSENINQQVREYLQQADDTHIIGIDRGERHLLYLVVIDMQGEIKEQFTLNEIVNEYNGNTYRTNYHDLLDTREEERLKARQSWQTIENIKELKEGYLSQVIHKITQLMVKYHAVVVLEDLNKGFIRGRQKVEKQVYQKFEKMLIDKLNYLVDKKADAVQSGGLLNAYQLTSKFDSFQKLGKQSGFLFYIPAWNTSKIDPVTGFVNLLDTRQNTEKAKAFFSKFDVIRYNANKDWFEFNLDYDKFGTKAEGTRTKWILCTQGNRICTFRNTEKNSQWDNQEVDLTREMKSLFNYYHINICGNLKEEICSQTDKAFFTGLLHMLKLTLQMRNSITGTETDYLVSPVADENGVFYDSRSCGDTLPKNADANGAYNIARKGLMLIRQIKETKDLANFKYDISNKAWLNFAQQKPYKNE

SEQ ID NO: 1641 - protein, 1274 aa, unidentified
  REGION 1..1274: note = Category: MG75 effectors
  REGION 1..1274: note = Description: MG75-127 effector
  source 1..1274: note = uncultivated organism sequence
MAKIFEDFKRLYPLSKTLRFEAKPIGATLDNIIKSGLLDEDEHRAASYVRVKKLIDEYHKVFIDRVLDNGCLPLKNEGHNNSLTEYYESYVTKSQNEDAKKVFKEIQQNLRSIIAKKLTEDKAYANLFGKNLIESYKDKTDKTKIIDSDLIKFINTAESTQLDSMSQDEAKELVKEFWGFTTYFVGFYDNRKNMYTAEEKSTGIAYRLVNENLPKFIDNMEAFKKAIARPEIQANMEELYSDFSEYLNVESVQEMFQLDYYNMLLTQKQIDVYNAIIGGKTDDEHDVKIKGINEYINLYNQQHKDDKLPKLKALFKQILSDRNAISWLPEEFNGDQEVLNAIKDCYERLSENVLGDKVLKSLLGSLSDYSLDGIFIRNDLQLTDISQKMFGNWCVIQNAIMQNIKHVAPARKHKESEEDYEKRIAGIFKKVDSFSISFINDCLNEADPNNAYFVENYFATFGAVNTPTMQRENLFALVQNAYTEVAALLHSDYPTAKHLAQDKVNVAKIKALLDAIKSLQHFVKPLLGKGDESDKDERFYGELASLWAELDTVTPLYNMIRNYMTRKPYSQKKIKLNFENPQLLGGWDANKEKDYATIILRRDGLYYLAIMNKESKKLLGKAMPSDGECYEKMVYKLLPGANKMLPKVFFAKSRMEDFKPSKELVEKYNNGTHKKGKNFNIQDCHNLIDYFKQSISKHEDWGKFGFNFSDTSTYEDLSGFYREVEQQGYKLSFVRVSVSYINQLVEEGKMYLFQIYNKDFSEYSKGTPNMHTLYWKALFDERNLADVVYKLNGQAEMFYRKKSIENTYPTHPANHPILNKNKDNKKKESLFDYDLIKDRRYTVGKFMFHVPITMNFKSSGSENINQDVKAYLRHADDMHIIGIDRGERHLLYLVVIDLQGNIKEQYSLNEIVNEYNGNTYHTNYHDLLDVREEERLKARQSWQTIENIKELKEGYLSQVIHKITQLMVKYHAIVVLEDLNMGFMRGRQKVEKQVYQKFEKMLIDKLNYLVDKKADASVSGGLLNAYQLTSKFDSFQKLGKQSGFLFYIPAWNTSKIDPVTGFVNLLDTRYQNVEKAKVFFSKFDAIRYNKDKDWFEFNLDYDKFGKKAEGTRTKWALCTRGMRIDTFRNKEKNSQWDNQEVDLTAEMKSLLEHYYIDIHGNLKDAISAQTDKAFFTGLLHILKLTLQMRNSITGTETDYLVSPVADENGIFYDSRSCGDELPENADANGAYNIARKGLMMIEQIKDAKDLDNLKFDISNKSWLNFAQQKPYKNE

SEQ ID NO: 1642 - protein, 1272 aa, unidentified
  REGION 1..1272: note = Category: MG75 effectors
  REGION 1..1272: note = Description: MG75-128 effector
  source 1..1272: note = uncultivated organism sequence
MKFDDFKKLYSLSKTLRFEAKPVGSTLKNIIESGLLEEDEHRAQSYVKVKKLIDEYHKVFIDRVLNDGCLTIENKGKKDSLEEYYESYMSKSNDENVSKTFKEIQENLRSVIAKKLTDDNAYANLFGNKLIESYKDKDEKNKIIDSDLIQFINTAEPSQLDSMSQDEANELVKEFWGFTTYFVGFFDNRKNMYTSEEKSTGIAYRLINENLPKFIDNMEAFKKAVAKPEIQANIEELYSNFAEYLNVESIQEMFQLDYYNMLLTQKQIDVYNAIIGGKTDEEHDVKIKGINEYINLYNQQHKDEKLPKLKALFKQILSDRNAISWLPEEFNSDQKVLNAIDDCYKRLSENVLGDKVLKSLLCSLDDYNLDGIFVRNDLQLTDISQKMFGNWSVIQNAIMQNIKNVAPARKRKESEEDYEKRISDIFKKADSFSIQYINDCLNEMDDNNLHAVDGYFATLGAVNTPAMQRENLFALIQNAYTDISNLLETPYPENKNLAQDKTNVAKVKALLDAIKSLQHFVKPLLGKGDESDKDERFYGELASLWTELDTVTPLYNMIRNYMTRKPYSEKKIKLNFENPQLLGGWDANKEKDYATIILRRNGMYYLAIMDKDSKKLLGKTMPSDGECYEKMVYKLLPGANKMLPKVFFAKSRINDFKPSKLIVENYNNGTHKKGKNFNINDCHNLIDYFKQSIDKHEDWSKFGFNFSDTSTYEDLSGFYREVEQQGYKLSFTNVSVSFIDKLVDEGKMYLFQIYNKDFSDFSKGTPNMHTLYWKALFDERNLADVVYKLNGQAEMFYRKKSINNTHPTHPANHPIQNKNKDNKKKESVFEYDLIKDRRYTVDKFLFHVPITMNFKSVGSENINQQVREYLQQADDTHIIGIDRGERHLLYLVVIDMQGNIKEQFTLNEIVNEYNGNTYHTNYHDLLDTREEERLTARQSWQTIENIKELKEGYLSQVIHKITQLMVKYHAVVVLEDLNKGFMRGRQKVEKQVYQKFEKMLIDKLNYLVDKKADAAQSGGLLNAYQLTSKFDSFQKLGKQSGFLFYIPAWNTSKIDPVTGFVNLLDTRYQNTEKAKAFFSRFDAIRYNANKDWFEFYLDYDKFCTKAEGTRTRWTLCTQGSRISTFRNAEKNSQWDNLEVDLTREMKSLFEHYHINICGNLKEEICLQTDKAFFTGLLHMLKLTLQMRNSITGTETDYLISPVADENGTFYDSRSCGDTLPKNADANGAYNIARKGLMFIGQIKETKDLANFKYDISNKAWLNFAQQKPYKNE

SEQ ID NO: 1643 - protein, 1245 aa, unidentified
  REGION 1..1245: note = Category: MG75 effectors
  REGION 1..1245: note = Description: MG75-129 effector
  source 1..1245: note = uncultivated organism sequence
METFSDFTNLYPLSKTLRFRLIPVGETLRHFIDSGILEEDQHRAESYVKVKAIIDDYHRAYIESSLSGFELPVESMGKSNSLEEYYQYHNIRNKTEDIQNTLSKVRDNLRKQIVNQLIKSEMFKRIDKKELIQTDLIDFVKNDPDENEKITLISEFRNFTVYFKGFHENRKNMYSDEEKSTSIAFRLIHENLPKFIDNMEVFAKIQNTSISEEFDAIQKELCPDSVAFADMFKLGYFNRTLSQKQIDAYNTVISGRMTAEGGKIKGLNEYINLYNQQHKQEKLPKMKLLFKQILSDRESASWLPEKLENDKQVVGALVDFWNTIHDTVLAEGGLKTVISSLVSYSLEGIFLKNDLQLTDVSQKATGSWSKIPAAIKQNLEAMNPQKKKESYEGYQERIDKIFKSYKSFSLAFINECLHGEYKIEDYFIELGAINTDSLQKENHFSHIFNTYTDIKEVIEFYSESIDTKLIRDNDSIQKIKQFLDAVKDLQAYVKPLLGNGDETGKDERFYGDFVEYWNQLDLITPLYNMVRNYVTQKPYSIEKIKINFQNPTLLNGWDLNKETDNTSVILRRDGKYYLAIMNNKCRKVFLKYPSGSDRSCYEKMEYKLLPGANKMLPKVFLSKSRINEFMPDERLLSNYEKGTHKKTGNSFSLTDCHALIDFFKKSLNKHEDWKNFGFKFSDTSTYTDMSGFYKEVENQGYKLSFKPIDAVYVDQLVDEGKIFLFQIYNKDFSEHSKGTPNLHTLYWKMLFDETNLGDVVYKLNGEAEVFFRKASIKVSSPTHPANVPIKKKNPKHKDEERILKYDLIKDKRYTVDQFQFHVPITMNFKSDGNGNINQRVIEYLRSVSDIHIIGIDRGERNLLYLVVIDGSGKICEQFSLNEIKVEYNGETYSTNYHDLLDIKEDERKQARQSWQSIANIKDLKEGYLSQVIHKISELMVKYNAIVVLEDLNTGFMRGRQKVEKQVYQKFEKMLIEKLNYLVFKKQPSNLCGGLMHAYQLTNKFEGFNKLGKQSGFLFYIPAWNTSKMDPVTGFVNLFDLKYESIDKAKSFFSKFDSIRYNVERDMFEWKFNYDEFTKKAEGTKTNWTVCSYGNRIITFRNPNKNSQWDNKEINLTENIKLLFERFGIDLSSNLKDEIMQRTEKEFFIELISLFKLVLQMRSSWTGTDIDYLISPVCNENGEFFDSRNVDETLPQNADANGAYNIARKGMILLDKIKKSNGEKKLVLSITNREWLSFAQGCCKNG

SEQ ID NO: 1644 - protein, 1058 aa, unidentified
  REGION 1..1058: note = Category: MG75 effectors
  REGION 1..1058: note = Description: MG75-130 effector
  source 1..1058: note = uncultivated organism sequence
MAKNFEDFKRLYSLSKTLRFEAKPIGATLDNIVKSGLLDEDEHRAASYVKVKKLIDEYHKVFIDRVLDDGCLPLENKGNNNSLAEYYESYVSRAQDEDAKKKFKEIQQNLRSVIAKKLTEDKAYANLFGNKLIESYKDKEDKKKIIDSDLIQFINTAESTQLDSMSQDEAKELVKEFWGFVTYFYGFFDNRKNMYTAEEKSTGIAYRLVNENLPKFIDNIEAFNRAITRPEIQENMGVLYSDFSEYLNVESIQEMFQLDYYNMLLTQKQIDVYNAIIGGKTDDEHDVKIKGINEYINLYNQKHKDDKLPKLKALFKQILSDRNAISWLPEEFNSDQEVLNAIKDCYERLSENVLGDKVLKSMLGSLADYSLDGIFIRNDLQLTDISQKMFGNWSVIQNAIMQNIKHVAPARKHKESEEEYENRIAGIFKKADSFSISYIDACLNETDPNNAYFVENYFATLGAVDTPTMQRENLFALVQNAYTEITALLHSDYPTEKNLAQDKANVAKIKALLDAIKSLQHFVKPLLGKGDESDKDERFYGELASLWAELDTMTPLYNMIRNYMTRKPYSQKKIKLNFENPQLLGGWDANKEKDYATIILRRNGLYYLAIMNKDSKKLLGKAMPSDGECYEKMVYKLLPGANKMLPKVFFAKSRMEDFKPSKELVEKYNNGTHKKGKNFNIQDCHNLIDYFKQSIDKHEDWSKFGFKFSDTSTYEDLSGFYREVEQQGYKLSFARVSVSYINQLVEEGKMYLFQIYNKDFSEYSKGTPNMHTLYWKALFDERNLADVVYKLNGQAEMFYRKKSIENTHPTHPANHPILNKNKDNNKKESLFEYDLIKDRRYTVDKFMFHVPITMNFKSSGSENINQDVKAYLCHADDMHIIGIDRGERHLLYLVVIDLQGNIKEQFSLNEIVNDYNGNTYHTNYHDLLDVREDERLKARQSWQTIENIKELKDGYLSQVIHKITQLMVKYHAIVVLEDLNMGFMRGRQKVEKQVYQKFEKMLIEKLNYLVDKKADASVSGGLLNAYQLTSKFDSFQKLGKQSGFLFYRECKLNCVKLQ

SEQ ID NO: 1645 - protein, 897 aa, unidentified
  REGION 1..897: note = Category: MG75 effectors
  REGION 1..897: note = Description: MG75-131 effector
  source 1..897: note = uncultivated organism sequence
MAKIFEDFKRLYPLSKTLRFEAKPIGATLDNIIKSGLLDEDEHRAASYVRVKKLIDEYHKVFIDRVLDNGCLPLKNEGHNNSLTEYYESYVTKSQNEDAKKVFKEIQQNLRSIIAKKLTEDKAYANLFGKNLIESYKDKTDKTKIIDSDLIKFINTAESTQLDSMSQDEAKELVKEFWGFTTYFVGFYDNRKNMYTAEEKSTGIAYRLVNENLPKFIDNMEAFKKAIARPEIQANMEELYSDFSEYLNVESVQEMFQLDYYNMLLTQKQIDVYNAIIGGKTDDEHDVKIKGINEYINLYNQQHKDDKLPKLKALFKQILSDRNAISWLPEEFNGDQEVLNAIKDCYERLSENVLGDKVLKSLLGSLSDYSLDGIFIRNDLQLTDISQKMFGNWCVIQNAIMQNIKHVAPARKHKESEEDYEKRIAGIFKKVDSFSISFINDCLNEADPNNAYFVENYFATFGAVNTPTMQRENLFALVQNAYTEVAALLHSDYLTAKHLAQDKVNVAKIKALLDAIKSLQHFVKPLLGKGDESDKDERFYGELASLWAELDTVTPLYNMIRNYMTRKPYSQKKIKLNFENPQLLGGWDANKEKDYATIILRRDGLYYLAIMNKDSKKLLGKAMPSDGECYEKMVYKLLPGANKMLPKVFFAKSRMEDFKPSKELVEKYNNGTHKKGKNFNIQDCHNLIDYFKQSISKHEDWGKFGFNFSDTSTYEDLSGFYREVEQQGYKLSFTRVSVSYISQLVEEGKMYLFQIYNKDFSEYSKGTPNMHTLYWKALFDERNLADVVYKLNGQAEMFYRKKSIENTHPTHPATHPILNKNKDNKKKESLFDYDLIKDRRYTVDKFMFHVPITMNFKSSGSENINQDVKAYLRHADDMHIIGIDRGERHLLYLVVID

SEQ ID NO: 1646 - protein, 910 aa, unidentified
  REGION 1..910: note = Category: MG75 effectors
  REGION 1..910: note = Description: MG75-132 effector
  source 1..910: note = uncultivated organism sequence
MYFDDFKKLYPLSKTLRFEAKPVGPTFKHIKERGLLEEDEHRAISYVKVKKLIDEYHKAFVGKALNNGCLLYESCGNKNSLIEYYETYKSKEGEARKTMKEIQKNLREMIVGAFEKEEDYANLFKGGLIEPYKSGGKHKEPDILRLINTAGFSQLAGMSQEEAKSLIKEFWRFTTYFVGFFDNRGNMYTSEEKSTGIAYRLINENLPRFIDNMEIFNKIIGKSEIQARVTELYSDFEGYLNVGSIQEMFKLDYYNALLTQKQIDVYNAIISGRTTTGPESKKIKGLNEYINLYNQQHKDGKLPKFKPLFKQILSDREALSWLPDEFVNDQEMLNAIKNCYEKLTGNILGESALKVLLGSLADYDLGGIFVRNDSQLTNISQRMFGRWDAIQNAILQDIRKTAPMRKRRESEEDYENRIDKMFKKADSFSIKYINDCIREIAVDDTLFVEDYFATLGAVNTPTIQRENLFLLVQNAFTDVADLLNSEYSAEKSLAQDSVNVSKIKALLDAIKSLQQFVRPLLGNGDENEKDERFYGEFTSLWAELDEVTLLYDMVRNRMTRKPYSQKKIKLNFANPKLLNGWDENKEKDNSCIILRRDGKYYLAVMDKKSKNLLGKPMPSDGECYEKMVYKLLPGAQKMFPKVFFAKSRIDEFKPSEHILNIYSNGTHKKGNKNFNIEDCHDLIDFFKESIRRHKDWNKFGFEFSDTSTYENVNEFYREADEQGYKLSFVNVSVAYIDKLVNEGEMYLFQIYNKDFSEYSKGTPNMHTLYWKALFDDRNLVDMVYKLNGQAELFYRKKSLDSIRPTHPANQPIKNKNKNNKKKESLFEYDLVKDRRYTVDKFMFHVPITMNFKNAGLEKINQQVREYLQQADDTHIIGIDRGERHLLYLVVIDMHGNIKEQFSLNEIVNEC

SEQ ID NO: 1647 - protein, 1269 aa, unidentified
  REGION 1..1269: note = Category: MG75 effectors
  REGION 1..1269: note = Description: MG75-133 effector
  source 1..1269: note = uncultivated organism sequence
MYFDDFKKLYPLSKTLRFEAKPVGPTFKHIKERGLLEEDEHRAISYVKVKKLIDEYHKAFVGKALNNGCLLYESCGNKNSLIEYYETYKSKEGEARKTMKEIQKNLREMIVGAFEKEEDYANLFKGGLIEPYKSGGKHKEPDILRLINTAGFSQLAGMSQEEAKSLIKEFWRFTTYFVGFFDNRGNMYTSEEKSTGIAYRLINENLPRFIDNMEIFNKIIGKSEIQARVTELYSDFEGYLNVGSIQEMFKLDYYNALLTQKQIDVYNAIISGRTTTGPESKKIKGLNEYINLYNQQHKDGKLPKFKPLFKQILSDREALSWLPDEFVNDQEMLNAIKNCYEKLTGNILGESALKVLLGSLADYDLGGIFVRNDSQLTNISQRMFGRWDAIQNAILQDIRKTAPMRKRRESEEDYENRIDKMFKKADSFSIKYINDCIREIAVDDTLFVEDYFATLGAVNTPTIQRENLFLLVQNAFTDVADLLNSEYSAEKSLAQDSVNVSKIKALLDAIKSLQQFVRPLLGNGDENEKDERFYGEFTSLWAELDEVTLLYDMVRNRMTRKPYSQKKIKLNFANPKLLNGWDENKEKDNSCIILRRDGKYYLAVMDKKSKNLLGKPMPSDGECYEKMVYKLLPGAQKMFPKVFFAKSRIDEFKPSEHILNIYSNGTHKKGNKNFNIEDCHDLIDFFKESIRRHKDWNKFGFEFSDTSTYENVNEFYREADEQGYKLSFVNVSVAYIDKLVNEGEMYLFQIYNKDFSEYSKGTPNMHTLYWKALFDDRNLVDMVYKLNGQAELFYRKKSLDSIRPTHPANQPIKNKNKNNKKKESLFEYDLVKDRRYTVDKFMFHVPITMNFKNAGLEKINQQVREYLQQADDTHIIGIDRGERHLLYLVVIDMHGNIKEQFSLNEIVNECSGNTYHTNYHALLDAREEERLNARRSWQTIESIKELKEGYLSQVIHRITQLMVKYHAIVVLEDLSMGFMRGRQKVEKQVYQKFEKMLIDKLNYLVDKKVDVSQPGGLLNAYQLTNKFESFQSSEKQSGFVFYIPAWNTSKIDPVTGFVNLLDTRYQNVEKARAFFSKFDAIRYNKDKDWFEFGVDYDNFNKKAEGTMTKWTLCTQGVRICTFRNAEKNSQWDTQEVDLTTEMKSLFGQSQIDVNGNLKEAICSQSDKTFFMRLLHLLKLMLQMRNSITGTEIDYLVSPVADGNGNFYDSRKCDSTLPKNADANGAYNIARKGLMLLRQMKTADNLTDVKFDMTNRTWLKFAQQKPYKDE

SEQ ID NO: 1648 - protein, 848 aa, unidentified
  REGION 1..848: note = Category: MG75 effectors
  REGION 1..848: note = Description: MG75-134 effector
  source 1..848: note = uncultivated organism sequence
MAKIFEDFKRLYPLSKTLRFDAKPVGATLDNIVKSGLLEEDEHRAASYVRVKKLIDEYHKVFIDRVLDNGCLPLENKGENNSLAEYYDSYVSKSQNEDAKKAFEENQQNLRSIIAKKLTGDKAYANLFGKNLIESYKDKKDKKKIIDSDLIQFINTADSTQLDSMTQVEAKELVKEFWGFVTYFYGFFDNRKNMYTAEKKSTGIAYRLINENLPKFIDNMEAFKKVIARPEIQANMEELYSDFSEYLNVESIQEMFQLDYYDMLLTQKQIDVYNAIIGGKTDDEHDVKIKGINEYINLYNQQHKDTRLPKLKALFKQILSDRNAISWLPEEFNSDQEVLNAIKDCYERLSENVLGDKVLKSLLGSLADYSLEGIFIRNDLQLTDVSQKMFGNWGVIQNAIMQNIKHVAPARKHKESEENYEKRIAGIFKKADSFSISYINDCLNEADPNNAYFVENYFATFGAVNTPTMQRENLFALVQNAYTEVAALLHSDYPTVKHLAQDKANVSKIKALLDAIKSLQHFVKPLLGNGDESGKDDRFYGELASLWAELDTVTPLYNMIRNYMTRKPYSQKKIKLNFENPQLLGGWDANKEKDYATIILRRNGLYYLAIMGKDSKNLLGKAMPSDGECYEKMVYKQFDISKQLPKCTTELKHVKKALVENAKRSCLLSDINNWNKPLNVTRKLWELNNFVWDKKKEDWVLRKKDNETRPKKFHKKYLELTSDKKGYNQAINDWIKFTKEFLSSYKKVEAYEIHYKKRYNSVDELYKQLNGDLYAISFTYVSVSFIEQLVSEGKMYLFQIYNKDFSKYSKGTPNMHTLYWKALFDERNLADVVYKLNGQAEMFYRKGV

SEQ ID NO: 1649 - protein, 1304 aa, unidentified
  REGION 1..1304: note = Category: MG75 effectors
  REGION 1..1304: note = Description: MG75-135 effector
  source 1..1304: note = uncultivated organism sequence
MFPACFQEQRTGHPNNIVKSGLLEEDEHRAASYVRVKKLIDEYHKVFIDRVLDNGCLPLENKGENNSLAEYYDSYVSKSQNEDAKKAFEENQQNLRSIIAKKLTGDKAYANLFGKNLIESYKDKKDKKKIIDSDLILFINTADSTQLDSMTQVEAKELVKEFWGFVTYFYGFFDNRKNMYTAEKKSTGIAYRLINENLPKFIDNMEAFKKVIARPEIQANMEELYSDFSEYLNVESIQEMFQLDYYDMLLTQKQIDVYNAIIGGKTDDEHDVKIKGINEYINLYNQQHKDTRLPKLKALFKQILSDRNAISWLPEEFNSDQEVLNAIKDCYERLSENVLGDKVLKSLLGSLADYSLEGIFIRNDLQLTDVSQKMFGNWGVIQNAIMQNIKHVAPARKHKESEEEYEKRIAGIFKKADSFSISYLNDCLNEADPNNAYFVENYFATFGAVNTPTMQRENLFALVQNKYTEVAALLHSDYPTAKHLAQDKANVAKIKALLDAIKSLQHFVKPLLGKGDESDKDERFYGELASLWAELETVTPLYNMIRNYMTRKPYSQKKIKLNFENPQLLDGWDANKEKDYATIILRRNGLYYLAIMGKDSKNLLGKAMPSDGECYEKMVYKQFDISKQLPKCTTELKHVRKALVEDAKRSCLLSDFNNWNKPLNVTRKLWELNNFVWDKKKEDWVLRKKDNETRPKKFHKKYLELTSDKKGYNQAKNDWIKFIKEFLSSYKKVEAYDIHYKKRYNSVDELYKQLNGDLYAISFTYVSASFIEQLVSEGKMYLFQIYNKDFSEYSKGTPNMHTLYWKALFDERNLADVVYKLNGQAEMFYRKKSLENTHPTHPANHPILNKNKDNKKKESLFDYDLIKDRRYTVDKFMFHVPITMNFKSSGSENINQDVKAYLRHADDMHIIGIDRGERHLLYLVVIDLQGNIKEQYSLNEIVNEYNGNTYHTNYHDLLDVREEERLKARQSWQTIENIKELKEGYLSQVIHKITQLMVKYHAIVVLEDLNMGFMRGRQKVEKQVYQKFEKMLIDKLNYLVDKKADASVSGGLLNAYQLTSKFDSFQKMGKQSGFLFYIPAWNTSKIDPVTGFVNLLDTRYQNVEKAKVFFSKFDAIRYNKDKDWFEFNLDYDKFGKKAEGTRTKWALCTRGMRIDTFRNKEKNSQWDNQEVDLTAEMKSLLEHYYIDIHGNLKDAISAQTDKTFFTGLLHILKLTLQMRNSITGTETDYLVSPVADENGIFYDSRSCGDELPENADANGAYNIARKGLMMIEQIKDAKDLNNLKFDISNKAWLNFAQQKPYKNG

SEQ ID NO: 1650 - protein, 870 aa, unidentified
  REGION 1..870: note = Category: MG75 effectors
  REGION 1..870: note = Description: MG75-136 effector
  source 1..870: note = uncultivated organism sequence
MAKIFEDFKRLYPLSKTLRFEAKPIGATLDNIIKSGLLDEDEHRAASYVRVKKLIDEYHKVFIDRVLDNGCLPLKNEGHNNSLTEYYESYVTKSQNEDAKKVFKEIQQNLRSIIAKKLTEDKAYANLFGKNLIESYKDKTDKTKIIDSDLIKFINTAESTQLDSMSQDEAKELVKEFWGFTTYFVGFYDNRKNMYTAEEKSTGIAYRLVNENLPKFIDNMEAFKKAIARPEIQANMEELYSDFSEYLNVESVQEMFQLDYYNMLLTQKQIDVYNAIIGGKTDDEHDVKIKGINEYINLYNQQHKDDKLPKLKALFKQILSDRNAISWLPEEFNGDQEVLNAIKDCYERLSENVLGDKVLKSLLGSLSDYSLDGIFIRNDLQLTDISQKMFGNWCVIQNAIMQNIKHVAPARKHKESEEDYEKRIAGIFKKVDSFSISFINDCLNEADPNNAYFVENYFATFGAVNTPTMQRENLFALVQNAYTEVAALLHSDYPTAKHLAQDKVNVAKIKALLDAIKSLQHFVKPLLGKGDESDKDERFYGELASLWAELDTVTPLYNMIRNYMTRKPYSQKKIKLNFENPQLLGGWDANKEKDYATIILRRDGLYYLAIMNKESKKLLGKAMPSDGECYEKMVYKLLPGANKMLPKVFFAKSRMEDFKPSKELVEKYNNGTHKKGKNFNIQDCHNLIDYFKQSISKHEDWGKFGFNFSDTSTYEDLSGFYREVEQQGYKLSFTRVSVSYISQLVEEGKMYLFQIYNKDFSEYSKGTPNMHTLYWKALFDERNLADVVYKLNGQAEMFYRKKSIENTHPTHPANHPILNKNKDNKKKESLFDYDLIKDRRYTVDKFMFHVPVTMNFKSSGSENINQDVKA

SEQ ID NO: 1651 - protein, 1304 aa, unidentified
  REGION 1..1304: note = Category: MG75 effectors
  REGION 1..1304: note = Description: MG75-137 effector
  source 1..1304: note = uncultivated organism sequence
MFPASFQEQRTGHPNNIVKSGLLEEDEHRAASYVRVKKLIDEYHKVFIDRVLDNGCLPLENKGENNSLAEYYDSYVSKSQNEDAKKAFEENQQNLRSIIAKKLTGDKAYANLFGKNLIESYKDKKDKKKIIDSDLIQFINTADSTQLDSMTQVEAKELVKEFWGFVTYFYGFFDNRKNMYTAEKKSTGIAYRLINENLPKFIDNMEAFKKVIARPEIQANMEELYSDFSEYLNVESIQEMFQLDYYDMLLTQKQIDVYNAIIGGKTDDEHDVKIKGINEYINLYNQQHKDTRLPKLKALFKQILSDRNAISWLPEEFNSDQEVLNAIKDCYERLSENVLGDKVLKSLLGSLADYSLEGIFIRNDLQLTDVSQKMFGNWGVIQNAIMQNIKHVAPARKHKESEEEYEKRIAGIFKKADSFSISYLNDCLNEADPNNAYFVENYFATFGAVNTPTMQRENLFALVQNKYTEVAALLHSDYPTAKHLAQDKANVAKIKALLDAIKSLQHFVKPLLGKGDESDKDERFYGELASLWAELETVTPLYNMIRNYMTRKPYSQKKIKLNFENPQLLDGWDANKEKDYATIILRRNGLYYLAIMGKDSKNLLGKAMPSDGECYEKMVYKQFDISKQLPKCTTELKHVRKALVEDAKRSCLLSDFNNWNKPLNVTRKLWELNNFVWDKKKEDWVLRKKDNETRPKKFHKKYLELTSDKKGYNQAKNDWIKFIKEFLSSYKKVEAYDIHYKKRYNSVDELYKQLNGDLYAISFTYVSASFIEQLVSEGKMYLFQIYNKDFSEYSKGTPNMHTLYWKALFDERNLADVVYKLNGQAEMFYRKKSIENTHPTHPANHPILNKNKDNKKKESLFDYDLIKDRRYTVDKFMFHVPITMNFKSSGSENINQDVKAYLRHADDMHIIGIDRGERHLLYLVVIDLQGNIKEQYSLNEIVNEYNGNTYHTNYHDLLDVREEERLKARQSWQTIENIKELKEGYLSQVIHKITQLMVKYHAIVVLEDLNMGFMRGRQKVEKQVYQKFEKMLIDKLNYLVDKKADASVSGGLLNAYQLTSKFDSFQKMGKQSGFLFYIPAWNTSKIDPVTGFVNLLDTRYQNVEKAKVFFSKFDAIRYNKDKDWFEFNLDYDKFGKKAEGTRTKWALCTRGMRIDTFRNKEKNSQWDNQEVDLTAEMKSLLEHYYIDIHGNLKDAISAQTDKTFFTGLLHILKLTLQMRNSITGTETDYLVSPVADENGIFYDSRSCGDELPENADANGAYNIARKGLMMIEQIKDAKDLNNLKFDISNKAWLNFAQQKPYKNG

SEQ ID NO: 1652 - protein, 886 aa, unidentified
  REGION 1..886: note = Category: MG75 effectors
  REGION 1..886: note = Description: MG75-138 effector
  source 1..886: note = uncultivated organism sequence
METFSGFTNLYPLSKTLRFRLIPVGETLKYFIGSGILEEDQHRAESYVKVKAIIDDYHRAYIENSLSGFELPLESTGKFNSLEEYYLYHNIRNKTEEIQNLSSKVRTNLRKQVVAQLTKNEIFKRIDKKELIQSDLIDFVKNEPDANEKIALISEFRNFTVYFKGFHENRRNMYSDEEKSTSIAFRLIHENLPKFIDNMEVFAKIQNTSISENFDAIQKELCPELVTLCEMFKLGYFNKTLSQKQIDAYNTVIGGKTTSEGKKIKGLNEYINLYNQQHKQEKLPKMKLLFKQILSDRESASWLPEKFENDSQVVGAIVNFWNTIHDTVLAEGGLKTIIASLGSYGLEGIFLKNDLQLTDISQKATGSWGKISSEIKQKIEVMNPQKKKESYETYQERIDKIFKSYKSFSLAFINECLRGEYKIEDYFLKLGAVNSSSLQKENHFSHILNTYTDVKEVIGLYSESTDTKLIQDNDSIQKIKQFLDAVKDLQAYVKPLLGNGDETGKDERFYGDLIEYWSLLDLITPLYNMVRNYVTQKPYSVDKIKINFQNPTLLNGWDLNKETDNTSVILRRDGKYYLAIMNNKSRKVFLKYPSGTDRNCYEKMEYKLLPGANKMLPKVFFSKSRINEFMPNERLLSNYEKGTHKKSGTCFSLDDCHTLIDFFKKSLDKHEDWKNFGFKFSDTSTYEDMSGFYKEVENQGYKLSFKPIDATYVDQLVDEGKIFLFQIYNKDFSEHSKGTPNMHTLYWKMLFDETNLGDVVYKLNGEAEVFFRKASINVSHPTHPANIPIKKKNLKHKDEERILKYDLIKDKRYTVDQFQFHVPITMNFKADGNGNINQKAIDYLRSASDTHIIGIDRGERNLLYLVVIDGNGKICEQFSLNEIPMR

SEQ ID NO: 1653 - protein, 886 aa, unidentified
  REGION 1..886: note = Category: MG75 effectors
  REGION 1..886: note = Description: MG75-139 effector
  source 1..886: note = uncultivated organism sequence
METFSGFTNLYPLSKTLRFRLIPVGETLKHFIGSGILEEDQHRAESYVKVKAIIDDYHRTYIENSLSGFELPLESTGKFNSLEEYYLYHNIRNKTEEIQNLSSKVRTNLRKQVVTQLTKNEIFKRIDKKELIQSDLIDFVKNEPDANEKIALISEFRNFTVYFKGFHENRRNMYSDEEKSTSIAFRLIHENLPKFIDNMEVFAKIQNTSISENFDAIQKELCPELVTLCEMFKLGYFNKTLSQKQIDAYNTVIGGKTTSEGKKIKGLNEYINLYNQQHKQEKLPKMKLLFKQILSDRESASWLLEKFENDSQVVGAMVNFWNTIHDTVLAEGGLKTIIASLGSYGLEGIFLKNDLQLTDISQKATGSWSKISSEIKQKIEAMNPQKKKESYESYQERIDKLFKSYKSFSLAFVNECLRGEYKIEDYFLKLGAVNSSLLQKENHFSHILNTYTDVKEVIGFYSESTDTKLIQDNDSIQKIKQFLDAVKDLQAYVKPLLGNSDETGKDERFYGDLIEYWSLLDLITPLYNMVRNYVTQKPYSVDKIKINFQNPTLLNGWDLNKEMDNTSVILRRDGKYYLAIMNNKSRKVFLKYPSGTDRNCYEKMEYKLLPGANKMLPKVFFSKSRINEFMPNERLLSNYEKGTHKKSGTCFSLDDCHTLIDFFKKSLNKHEDWKNFGFKFSDTSTYEDMSGFYKEVENQGYKLSFKPIDATYVDQLVDEGKIFLFQIYNKDFSEHSKGTPNMHTLYWKMLFDETNLGDVVYKLNGEAEVFFRKASINVSHPTHPANIPIKKKNLKHKDEERILKYDLIKDKRYTVDQFQFHVPITMNFKANGNGNINQKAIDYLRSASDTHIIGIDRGERNLLYLVVIDGNGKICEQFSLNEIPMR

SEQ ID NO: 1654 - protein, 1012 aa, unidentified
  REGION 1..1012: note = Category: MG75 effectors
  REGION 1..1012: note = Description: MG75-140 effector
  source 1..1012: note = uncultivated organism sequence
METFSGFTNLYPLSKTLRFRLIPVGETLKYFIGSGILEEDQHRAESYVKVKAIIDDYHRAYIENSLSGFELPLESTGKFNSLEEYYLYHNIRNKTEEIQNLSSKVRTNLRKQVVAQLTKNEIFKRIDKKELIQSDLIDFVKNEPDANEKIALISEFRNFTVYFKGFHENRRNMYSDEEKSTSIAFRLIHENLPKFIDNMEVFAKIQNTSISENFDAIQKELCPELVTLCEMFKLGYFNKTLSQKQIDAYNTVIGGKTTSEGKKIKGLNEYINLYNQQHKQEKLPKMKLLFKQILSDRESASWLPEKFENDSQVVGAIVNFWNTIHDTVLAEGGLKTIIASLGSYGLEGIFLKNDLQLTDISQKATGSWGKISSEIKQKIEVMNPQKKKESYETYQERIDKIFKSYKSFSLAFINECLRGEYKIEDYFLKLGAVNSSSLQKENHFSHILNTYTDVKEVIGLYSESTDTKLIQDNDSIQKIKQFLDAVKDLQAYVKPLLGNGDETGKDERFYGDLIEYWSLLDLITPLYNMVRNYVTQKPYSVDKIKINFQNPTLLNGWDLNKETDNTSVILRRDGKYYLAIMNNKSRKVFLKYPSGTDRNCYEKMEYKLLPGANKMLPKVFFSKSRINEFMPNERLLSNYEKGTHKKSGTCFSLDDCHTLIDFFKKSLDKHEDWKNFGFKFSDTSTYEDMSGFYKEVENQGYKLSFKPIDATYVDQLVDEGKIFLFQIYNKDFSEHSKGTPNMHTLYWKMLFDETNLGDVVYKLNGEAEVFFRKASINVSHPTHPANIPIKKKNLKHKDEERILKYDLIKDKRYTVDQFQFHVPITMNFKADGNGNINQKAIDYLRSASDTHIIGIDRGERNLLYLVVIDGNGKICEQFSLNEIEVEYNGEKYSTNYHDLLNVKENERKQARQSWQSIANIKDLKEGYLSQVIHKISELMVKYNAIVVLEDLNAGFMRGRQKVEKQVYQKFEKKLIEKLNYLVFKKQSSDLPGGLMHAYQLANKFESLVDDKI

SEQ ID NO: 1655 - protein, 982 aa, unidentified
  REGION 1..982: note = Category: MG75 effectors
  REGION 1..982: note = Description: MG75-141 effector
  source 1..982: note = uncultivated organism sequence
MIKEFEDFKRLYPIQKTLRFEAKPIGSTLEHLVKSGILDEDEHRAASYVRVKKLIDEYHKAFIDRVLNDGCLPFKNKGEKNSIEEYYESYTSKDKEEDSKKRFKEIQQNLRSIIVNKLTKDKAYANLFGNYLIESHKDKEDKKTMIDSDLIQFIKDADSLELGSMSKDEAIELVKEFWSFTTYFVGFYDNRKNMYSAEEKSTAIAYRLINENLPKFIDNMEAFKKIISRPEIQANTEQLYSDFAEYLNVESIQEMFQLDYYDILLTQKQIDVYNAIIGGKTDEKHDIKTKGINEYINLYNQQHKEDKLPKLKVLFKQILSDRNAISWLPEEFNSDQEMLISIKDCYEKLCVNVLGDKVLKSLLSSLDDYELEGIFLQNDQQLTNISQKIFGSWSVIQEAIIRNIKNTAPARKHKETEEDYEKRIFSIFKQAGSFSIKYIDDCLYDLDKNNINTIENYFATLGAENTPEIQRENLFALIKNAYTDVAGLLCSEYPTEKNLSQDENHVAKIKALLDAIKSLQHFVKPLLGNGDEHDKDERFYGELVSLWTELDTVTPLYNMVRNRITQKPYSQKKIKLNFENPQLLGGWDANKEKDYSCIILRREGMYYLAIMDKDSRKLLGKEMPSDGECYEKMVYKLLPGANKMLPKVFFAKSRIEEFMPSEQIIEKYNNGTHKKGKDFNITDCHNLIDYFKQSINKHEDWSKFGFTFSETSTYEDLSGFYREVEQQGYKLSFTNVSASYINSLVDEGKMYLFQIYNKDFSEYSKGTPNMHTLYWKALFDEQNLADVVYKLNGQAEIFYRKKSIDATHPTHPANRPVQNKNKDNKKKESLFEYDLIKDRRYSVDKFMFHVPITMNFKSNGSENINQQVKEYLQLANDTHIIGIDRGERHLLYLVVIDMHGNIKEQFSLNEIVNTYKGNIYHTNYHDLLEAREEERLKARQSWQTIENIKELKEGYLSQVVHKITQLMVKYHAIVVLEDLRVT

SEQ ID NO: 1656 - protein, 1228 aa, unidentified
  REGION 1..1228: note = Category: MG75 effectors
  REGION 1..1228: note = Description: MG75-142 effector
  source 1..1228: note = uncultivated organism sequence
MSNLYSKCHKLYSLSKTLRFELKPIGKTNENFENYILTSDKEKSEKFKKVKLYCDEYHKKFINDCLENFQNEKFVEVLNKYYELYVKNNRSDKENNEFEKIQELLRKIIAETFTKNKKYNGLFGKELFKNYLPEYYKNDEEKLSEIKLFSEFTTYFAGYNKNRENMYSAEEKTTAISYRLINQNLPTYIKNIQNYNKIKEYIPTINETISHKLQVDIEKYFNLEYFENILTQDAIDKYNYIIGGKALGDGTKIQGINEFINLYNQTNPDKKLPKLKVLYKQILSDKTNVSFKIDKIENDNELISLINNYYNILSPLLYSNDNNDTEFIKTIKDINQFDTNKIWVMTDNLTYLSQQVYKDWNYINHLIEEKYNQENLKNNKKINEKFLEKRDKELKKIKEYSLHDIEQLIIQNDKNLKIKNQGKLYKYITEKTIEIINNIKLSHSECEYILNTNYEPNSKQLLNDADKITKIKTLLDNVKLLQTTIKFLIPKSVGIQVDDTFYNAINYDILSEIIPIYNKTRNYVTQKPYSIEKFPLTFNCPTLLDGWDLNKEESNLSILLEKDGYYYLGIMNKKDNKIFRKLSEPQSNEQIYKKYEYKLLPGPNKMLPKVFFSNSRIDEFNPSEELLRKYQEGCHKKGNNFDIIFCRELIDFYKKSLFIHNDWKQFNFKFNNTNSYEDISQFYKQVEEQGYKISTQNISVQYIDELVENGKLFLFKIYNKDFSTYSKGTPNLHTMYWKALFDEDNLKDVVYKLNGGAEIFYRKKSIEYKITHPKNQAIKNKNELNHKKESLFQYDLIKDKRFTMDKFLFHVPITLNFKNQRLEYINELINSEIQRKTDINIIGVDRGERNLIYITVIDSNGKLLEQLSLNEIINEYKNETYKTDYHSLLDKKEKERNEARKSWGTIKNIKELKEGYMSQVIHKITDLMLKYNAIIVLEDLNSGFKNSRKKVEKQVYDKFETMLTNKLSYLINKKLDKNNDGGILNAYQLVNKETKGRQSGVLFYIPAWNTSKIDPVTGFVNLFYIKNMSIDKSKEFFNKFEDIRYNTKEDFFEFDIDYSKFTDKVYGIRKNWTICTYGERIRTFKNKDKNNEWDNEEINLTEKFKNLFNQYSINLSNIQEDIQKQTDRNFFNEIIYLFKLTLQMRNSVTNSDIDYILSPIKDKNGNFYDSRNKIDTLPKDADANGAYNIARKGLMLVNQIKQANDITKFKCKPITNAEWLEFVQKKDT

SEQ ID NO: 1657 - protein, 1238 aa, unidentified
  REGION 1..1238: note = Category: MG75 effectors
  REGION 1..1238: note = Description: MG75-143 effector
  source 1..1238: note = uncultivated organism sequence
MSNLYSNLHNLYQVQKTLRFELKPQGKTKENMEKVGILKADEHRAEIYSKVKKYCDEYHKLFIDKSLSNIELNGIDRYYELYSINNRDDKQKEELDQLEASLRKQISDAFKKSAEYKGLFQKDIITSYLVTMYKENQEKMQDIGEFNRFTTYFTGYNKNRENMYSEEDKSTAISYRLINENLPTFIDNIKIYKKIVSLMPEDIEKIYKDLEEYIQVDSIDEIFNISYYNDVLTQRGIECYNILISGRTKNDGDKIKGLNEYINEFNQTHNEKIPKLQELYKQILSDAESASFKIDVIKNDKELMNLIEVYYANILPILNKIEDLFTRISNYNLELILVNNDGTLSTLSNMVFNEWSYIKGAISEKYDEEYSGKEKYGTEKYAQKKQEYLKKQKIYSLKFLNDCIGNNAICEYLKNYIIQNKNIETIKEDYNEVQNIKVEDDTKELIKDEKSIEKIKKFLDDVKSLQEFVKLVIPKDRTVEKDAKFYSELTPYYEKIKEIIPLYNKVRNYVTQKPYSTEKIKLNFECPTLLKGWDANKEEANLGVILLKEGKYYLGIINPYCKKIFEVDEKDSNEQNNYKKMEYKLLPGPNKMLPKVFFSNSRIEEFNPSKELQEKYNKGYHKKGKDFDINFCHELIDFYKQSVNKHEDWKKFNFKFKDTSEYNDISEFYREVEKQGYKIEYTEYSEKYINELVDRGELYLFQIYNKDFSEYSKGKENLHTLYWKAVFDPDNIMNPVYKLNGNAEVFYRKKSLEMKVTHPANQPIANKNISTIEAGRSTSTFKYDLIKDKRYTMDKFQFHVPITMNFKSERLFNINQIVNKYLKYNDDIHVIGIDRGERNLLYVCVIDKNEKIVYQKSLNEIVSEYNNNRYTTDYHGLLDRKEKEREIAREDWKNIENIKELKEGYMSQVIHILVELMKKYNAIIVIEDLNKGFKNSRIKVEKQVYQKFEKMFIDKLNYLVFKDEDKMNEGGVLNAYQLTNKFESFTKLGKQSGILYYIPAWCTSKIDPTTGFINRFYLKYENFDKSKEFVNRIDDIRYNEKENLFEFDIDYSKFTDRLNDTKNKWTLCSYGERILTQKNANGEWLDRRIQLSIEFKKLFEKYGINLNNIKDSILKLDKDNLEFYKGNGESLGFIQLFKLMVQMRNSLTGKEEDNLISPVKNQHGKFFNTSEKIEGLPIDADANGAYNIARKGFMLVEQMKNVEDEKLNKIKYNITEKEWLNYVQNRGMWWKRQYLYHI

SEQ ID NO: 1658 - protein, 1286 aa, unidentified
  REGION 1..1286: note = Category: MG75 effectors
  REGION 1..1286: note = Description: MG75-144 effector
  source 1..1286: note = uncultivated organism sequence
MKQKKTQNPFNQFIGLYPLSKTLRFELRPYNEKTKNNIISAGILAEDNHRAESYKKVKKIIDEYHKAFIERVLKDLVLEEKPLQAFYECYKKSSKEEALQEIGNNLRTQISNAFEKDPKYSTLTSKDLINKELPSIVTTEEERTLLEEFHGFSTYFVGFHQNRENMYSDEEKATSIAYRLINENLPKFIDNIRSFQKIADSPIADKLESIYDEYAKEGYMNVNTLNEMFEISFYNRVLTQTQIDLYNAIIGGKTEKDGHKTQGINEYINLYNQRGEVQKKDRLPLLKPLFKQILSDREHISWFEEGFADDQAMLNAIKDFYLELTETGPTTTESILDRTKSLLRTIADYDLTKIYLGYNSLSKISQQIFGEWDRIQRALEAEYDQREKTKTYEEKEKHFKSLKSVSIGFIDDCLKAFETDKQLSLSIKEYIAQLGKKNDDPDLIDRITASYKAVKAILTTEWPKERNIAQEKDIVALIKDLLDRIKDLQSFIKPLLGSGKESDKDNLFYGELASIWETINTVTPLYDKVRNRMTRKPYSTQKFKVNFRNSQLLKGWDLNKEKDYMGIILRKKDLYFLAIMNKKNTKVFSSKVPSQGECFEKMIYKQFDATKQVPKCSTELKRVKEAIEIDDKPYYELFDKQKFSKPLTITREIWQLNNLVWDKKTNSFVRRKKDETRPKKFQQEYLDITEDREGYCEALRKWIDFVKDFLASYKSTSIYNIKYKDSSEYASIKEFYNFLDQELYHIEFSNVSVDYINELIEEGKIYLFQIYNKDFSPHSKGTPNMHTLYWKTLFDERNLANVAYKLNGEAEIFFRKASLERKVTHPAHDPIKTKNPKTSIKEKAFAYDLIKDKRYTEDKFQLHVPITMNFKSPMEKKGINSRVNNYIKTAEDLHFIGIDRGERNLLYVCVIDSQGNIKDQYSLNEIVNQYNRTDYKYLLEKREEERDKERKSWQTIENIKDLKQGYLSQVVHKIAQLMVQYHAIVVLEDLNSGFKRSRQKVEKSVYQQFEKSLIDKLNYLIDKRLPIDEEGGVLRAYQLTNKFESFKTMKMQNGFLFYIPAWNTSKMDPTTGFVNLFDTRYTNIDKSKEFFDKFEAIRYNEGKDWFELEFDYEHFTTKAEGTQTQWTLCTWGERINTFRNKSKNSSWDYKKINLTEEYKTLFEQFSINYRGNLKKEILEQNSKDFFERLLSLLHLTLQMRNSIPNTDTDYLISPVADANGHFYYSEQCGDNLPKNADANGAYNIARKGMWMAEQIRRSNEGEELKLAISNKEWLRFAQEKPYLEDK

SEQ ID NO: 1659 - protein, 1228 aa, unidentified
  REGION 1..1228: note = Category: MG75 effectors
  REGION 1..1228: note = Description: MG75-145 effector
  source 1..1228: note = uncultivated organism sequence
MSNLYSKCHKLYSLSKTLRFELKPIGKTKENFENYILTSDEEKSEKFKKVKLYCDEYHKKFINDCLENFQNDKFIEVLNKYYELYIKNNRSDKENNEFEKTQELLRKIIAETFTKNKKYSGLFGKELFKNYLPEYYKNDKEKLSEIKLFSEFTTYFAGYNKNRENMYSAEEKTTAISYRLINQNLPTYIKNIQNYNKIKEHIPTINETISHKLQVDIEKYFNLEYFENILTQDAIDKYNYIIGGKSLDDGTKIQGINEFINLYNQTNPDKKLPKLKILYKQILSDKTNISFKIDKIENDSELIYLINNYYNILSPLIYSNDNKDTGFIKTIKDITQFDTNKIWVMTDNLTYLSQQVYKDWNYINHLIEEKYNQENLKNNKKINEKFLEKRDKELKKIKEYSLHDIEQLIIQNDKNLKIKNQGKLYKYITEKTIEIINNIKLSHSECEYILNTNYEPNSKQLLNDTDKITKIKTLLDNIKLLQTTIKFLIPKSVGIQIDDTFYNAINYDILSEIIPIYNKTRNYVTQKPYSIEKFPLTFNCPTLLDGWDLNKEESNLSILLEKDGYYYLGIMNKKDNKIFRKLPEPQSNEQIYKKYEYKLLPGPNKMLPKVFFSNSRIDEFNPSEELLRKYQEGRHKKGNNFDIIFCRELIDFYKKSLFIHNDWKLFNFKFNDTNSYEDISQFYKQVEEQGYKISTQNISTRYIDELVENGKLFLFQIYNKDFSTYSKGTPNLHTMYWKELFDEDNLKDVVYKLNGGAEIFYRKKSIEDKITHPKNQTIKNKNELNHKKESLFQYDLIKDKRFTMDKFLFHVPITLNFKNQKLEYINELINSEIQRKTDINIIGVDRGERNLIYITVIDSNGKLLEQLSLNEIINEYKNETYKTDYHSLLDKKEKERNEARKSWGTIKNIKELKEGYMSQVIHKITDLMIKYNAIIVLEDLNSGFKNSRKKVEKQVYDKFETMLTNKLSYLIDKKLDKNNDGGILNAYQLVNKETKGRQSGVLFYIPAWNTSKIDPVTGFVNLFYIKNMSIDKSKEFFNKFEDIRYNTKEDFFEFDIDYSKFTDKVYGIRKNWTICTYGERIRTFRNKDKNNEWDNEEINLTEKFKNLFNQYSINLSNIQEDIQKQTDRNFFNEIIYLFKLTLQMRNSVTNSEIDYILSPIKDKNGNFYDSRNRIDTLPKDADANGAYNIARKGLMLVNQIKQANDITKFKCKPITNAEWLEFVQKKDI

SEQ ID NO: 1660 - protein, 1250 aa, unidentified
  REGION 1..1250: note = Category: MG75 effectors
  REGION 1..1250: note = Description: MG75-146 effector
  source 1..1250: note = uncultivated organism sequence
MQFQDFTNQYAVSKTLSFELIPQGRTLEHVEAKGLLSEDEHRSESYKTVKTVIDRYHKQFIEEALSGFELDELETYQTLYNIANKTSEDQKCFIAIQDTMRKSIVKHIKQHPKFSILDKKELIRDELFTYCENDAEKAMVLEFYKFTTYFSGFNDNRKNMYSDEEKSTAIAYRIVHQNLPKFIDNLKTFSLISNVLSENIKTLNTELQNVLGNMIINDIFALNFFNQTLTQKGIDRYNTLLGGFTDQNNPKKKIKGLNEYINQYNQTLPKTGKIGKLKPLYKQILSDRESISFLPETLQTGQDVLTALRCYYESNLADVINEYGNDGKTLKEVFENLSNYDLSGVFIRNDASIADVSQKIFGNWNIIQQAFDLRYDQTYTGKKSKKPEKYEDERKKYFKNIQSFSIESINEALTYLNDKTKHKQIEKFFSGLGIRENKNNLITIINKAYEDLEKVLGIPYPTDKELSQDTRTVEKIKTFLDSVKALQWFTKLILGKGTEPNKDSLFYGDLLPLWNEIDKITPLYNSIRNYMTKKPYSTEKIKLNFQNATLLAGWDVNQERANTSLIFLKNGLYYLGIMDQEYNKSFIDLPVLPMTTADDVYQKMEYKQLPGPEKMLPKVFFSKARIDEFAPSERVLEIYKNGTFKKGDDFKLEDCHELIEFYKRAIAQHPAWNQFNHQFSKTSAYQNIGEFYNDVKQQGYKITYRDVPVEYMNQLINDGQLYLFQIYNKDFSPHSKGTPNMHTLYWKMIFDEQNLNDVVYKLDGGAEVFYRKASPGIKKTPTHPKNQAVANKNPLNPKKESIFDYDLIKNKRFTMDKFLLHVPIKMNFKANPMTNLNMSVRSYLKTQRKTNIIGIHRGERNLLYVAVINEKGEILEQQSLNTIMNKNNDISHTTDYHDLLDRKEKERDTARKNWQTIENIKELKEGYLSQVIHKITQLMVKYQAIVVVEDLDMGFMQGRQKVEKQVYQKFEKMLISKLQYLVDKKAPIKQPGGLLKALQLTKNETAGQGKNSYEKQNGFLFYVPAWNTSSIDPTTGFVNLFKSSDLRYESINKSKTFINLIDKMQYSTSAQHFEFNIDYDKFTEKAQGTRTDWMICTHGKRIRSFRNAETNNQWCTEEIDLTQAFRQLLDDNEIDYQSQTLKEDILQMNTRAFFVAFLDIFRLILQLRNRKENGDYLISPVKNSTGEFFDSRDKRNGLPENEDANGAYNIARKGAWIIDAIKDADDDKLNRVKMTMSNKDWLTYAQAHLI

SEQ ID NO: 1661 - protein, 1255 aa, unidentified
  REGION 1..1255: note = Category: MG75 effectors
  REGION 1..1255: note = Description: MG75-147 effector
  source 1..1255: note = uncultivated organism sequence
MTLIIKYKESKNKREVYMSNLYSNLHNLYQVQKTLRFELKPQGKTKENMEKVGILEADEHRAEIYSKVKKYCDEYHKLFIDKSLSNIELNGIDRYYELYSINNRDDKQKEELDQLETGLRKQISDAFKKSAEYKGLFQKDMITSYLVTMYKENQEKMQDIGEFNRFTTYFTGYNKNRENMYSEEDKSTAISYRLINENLPTFIDNIKIYKKIVSLMPEDIEKIYKDLEEYIQVDSIDEIFNISYYNDVLTQRGIECYNILISGRTKNDGDKIKGLNEYINEFNQTHNEKIPKLQELYKQILSDAESASFKIDVIKNDKELMNLIEVYYANILPILNKIEDLFTRISNYNLELILVNNDGTLSTLSNMVFNEWSYIKGAISEKYDEKYSGKEKYGTEKYAQKKQEYLKKQKIYSLKFLNDCIGNNAICEYLKNYIIQNKNIETIKEDYNEVQNIKVEDDTKELIKDEKSIEKIKKFLDDVKSLQEFVKLVIPKDRTVEKDAKFYSELTPYYEKIKEIIPLYNKVRNYVTQKPYSTEKIKLNFECPTLLNGWDANKEEANLGVILIKEGKYYLGIINPYCKKIFEIDEKDSNEQKNYKKMEYKLLPGPNKMLPKVFFSNSRIEEFNPSKELQEKYNKGYHKKGKDFDINFCHELIDFYKMSLNKHEDWKKFNFKFKDTSEYNDISEFYREVEKQGYKIEYTEYSEKYINELVDRGELYLFQIYNKDFSEYSKGKENLHTLYWKAVFDPDNIMNPVYKLNGNAEVFYRKKSLEMKVIHPANQPIANKNISTIEAGRSTSTFKYDLIKDKRYTMDKFQFHVPITVNFKSERLFNINQIVNKYLKYNDDIHVIGIDRGERNLLYVCVIDKNEKIVYQKSLNEIVSEYNNNRYTTDYHGLLDRKEKEREIAREDWKNIENIKELKEGYMSQVIHILVELMKKYNAIIVIEDLNKGFKNSRIKVEKQVYQKFEKMFIDKLNYLVFKDEDKMNEGGVLNAYQLTNKFESFTKLGKQSGILYYIPAWCTSKIDPTTGFINRFYLKYENFDKSKEFVNRIDDIRYNEKENLFEFDIDYSKFTDRLNDTKNKWTLCSYGERILTQKNANGEWFDRRIQLSIEFKKLFEKYGINLNNIKDSILKLDKDNLEFYKGNGESLGFIQLFKLMVQMRNSLTGKEEDNLISPVKNRHGKFFNTSEKIEGLPIDADANGAYNIARKGFMLVEQMKNVEDEKLNKIKYNITEKEWLNYVQNRGMWWKRQYLYHI

SEQ ID NO: 1662 - protein, 1236 aa, unidentified
  REGION 1..1236: note = Category: MG75 effectors
  REGION 1..1236: note = Description: MG75-148 effector
  source 1..1236: note = uncultivated organism sequence
MKQLSELTGLYSLSKTLRFELKPIGKTLEHIESKGLIAQDEQRAEEYKKVKDIIDRYHKKFITMCLSDFKFEQNSLETYVALAEDTNRDEKAFDEIKKTLRKQIVETFKKGGAYSDLFKKKLIQKHLPEFVSDEEEKKMIANFSKFTTYFNGFNENRKNMYSDEDKSTAIAYRLIHENLPMFVNNMKSFSRIADSDVHQHFTEIESSFSEYLGVEHLEEMFQLDYFSETLTQEQIAVYNHIIGGRALEDGTKLKGINEYVNLYNQQHKNSRLPLLKPLYKMILSDRVALPWFPSEEFASDEEMIRAINETYNTLKEVLSIDGDSSLRSLLLNISSYDIKHIYIANDLGLTDISQQMFGQYDVYTSAIKQELREKNAPTAKERRNPELYDERINKLFKSAKSFSIEHLNSLVDSEHTIQNYYKHLGAYDRNGEQRVNLFTQIEMAYVAAKEILSGKHGNISQSDAETAIIKGLLDAFKSLQRFIKPLLGNGEEADKDNEFDAKLREAWNTLDIVTPLYNKVRNWLTRKPYSTEKIKLNFENAQLLGGWDVNKEPDCTSILLRKNGLYYLAIMNKKYNHAFDIDNLPNDGKCYEKIDYKLLPGANKMLPKVFFSKSRIKEFAPSEIIVNAYKKGSHKKGANFSISDCRRLIDFFKASISKHEDWKNFPFSFSSTETYEDISGFYREVEQQGYMLGFRNVSESFIKQLVDEGKLYLFQIWNKDFSDFSKGTPNMHTLYWKMLFDEHNLANVVYKLNGQAEVFYRKSSLDVANTTIHKAHQPIMNKNQENKKRQSTFDYDIIKNRRYTVDKFQFHVPISINFKATGRDNVNDNVLDIIRNGGIKHIIGIDRGERHLLYLSLIDLKGNIVKQMTLNDIVNEYNGNTYATNYKNLLAEREGNRTEARKNWKKIENIKDIKKGYLSQVVHIISKMMVEYNAIVVLEDLNMGFMRGRQKIERSVYEQFEKMLIDKLNYYVDKQKNSDEAGGLLHALQLTSKFESFKKLGKQSGCLFYIPAWNTSKIDPVTGFVNLFDTRYTNADQARKFFSQFDSIRYNADKDWFEFAFDYNKFTAKAKGTRTKWTLCTYGTRIRTFRNSERLNQWDNEEVVLTDEFKKAFANADINIHGNLKEAICSLQDKKYLEPLMHLMKLLLQMRNSITNSEVDYLLSPVADENGTFYDSRICSASLPKDADANGAYNIARKGLWAIHQIQETPAGDRPNLAIKNKDWLNFAQQKPYMNE

SEQ ID NO: 1663 - protein, 1245 aa, unidentified
  REGION 1..1245: note = Category: MG75 effectors
  REGION 1..1245: note = Description: MG75-149 effector
  source 1..1245: note = uncultivated organism sequence
MTLIIKYKESKNKREVYMSNLYSNLHNLYQVQKTLRFELKPQGKTKENMEKVGILEADEHRAEIYSKVKKYCDEYHKLFIDKSLSNIELNGIDRYYELYSINNRDDKQKEELDQLEASLRKQISDAFKKSAEYKGLFQKDIITSYLVTMYKENQEKMQDIGEFNRFTTYFTGYNKNRENMYSEEDKSTAISYRLINENLPTFIDNIKIYKKIVSLMPEDIEKIYKDLEEYIQVDSIDEIFNISYYNDVLTQRGIECYNILISGRTKNDGDKIKGLNEYINEFNQTHNEKIPKLQELYKQILSDAESASFKIDVIKNDKELMNLIEVYYANILPILNKIEDLFTRISNYNLELILVNNDGTLSTLSNMVFNEWSYIKGAISEKYDEEYSGKEKYGTEKYAQKKQEYLKKQKIYSLKFLNDCIGNNAICEYLKNYIIQNKNIETIKEDYNEVQNIKVEDDTKELIKDEKSIEKIKKFLDDVKSLQEFVKLVIPKDRTVEKDAKFYSELTPYYEKIKEIIPLYNKVRNYVTQKPYSTEKIKLNFECPTLLNGWDANKEEANLGVILLKEGKYYLGIINPYCKKIFEVDEKDSNEQNNYKKMEYKLLPGPNKMLPKVFFSNSRIEEFNPSKELQEKYNKGYHKKGKDFDINFCHELIDFYKQSLNKHEDWKKFNFKFKDTSEYNDISEFYREVEKQGYKIEYTEYSEKYINELVDRGELYLFQIYNKDFSEYSKGKENLHTLYWKAVFDPDNIMNPVYKLNGNAEVFYRKKSLEMKVTHPANQPIANKNISTIEAGRSTSTFKYDLIKDKRYTMDKFQFHVPITMNFKSERLLNINQIVNKYLKYNDDIHVIGIDRGERNLLYVCVIDKNEKIVYQKSLNEIVSEYNNNRYTTDYHGLLDRKEKEREIAREDWKNIENIKELKEGYMSQVIHILVELMKKYNAIIVIEDLNKGFKNSRIKVEKQVYQKFEKMFIDKLNYLVFKDEDKMDEGGVLNAYQLTNKFESFTKLGKQSGILYYIPAWCTSKIDPTTGFINRFYLKYENFDKSKEFVNRIDDIRYNEKENLFEFDIDYSKFTDRLNDTKNKWTLCSYGERILTQKNANGEWFDRRIQLSIEFKKLFEKYGINLNNIKDSILKLDKDNLEFYKGNGESLGFIQLFKLMVQMRNSLTGKEEDNLISPVKNQHGKFFNTSEKIEGLPIDADANGAYNIARKGFMLVEQMKNVEDEKLNKIKYNITEKEWLNYVQNRGM

SEQ ID NO: 1664 - protein, 1245 aa, unidentified
  REGION 1..1245: note = Category: MG75 effectors
  REGION 1..1245: note = Description: MG75-150 effector
  source 1..1245: note = uncultivated organism sequence
MTLTIKYKESKNKREVYMSNLYSNLHNLYQVQKTLRFELKPQGKTKENMEKVGILEADEHRAEIYSKVKKYCDEYHKLFIDKSLGNIELNGIDRYYELYSINNRDDKQKEELDQLEASLRKQISDAFKKSAEYKGLFQKDIITSYLVTMYKENQEKMQDIGEFNRFTTYFTGYNKNRENMYSEEDKSTAISYRLINENLPTFIDNIKIYKKIVSLMPEDIEKIYKDLEEYIQVDSIDEIFNISYYNDVLTQRGIECYNILISGRTKNDGDKIKGLNEYINEFNQTHNEKIPKLQELSKQILSDAESASFKIDVIKNDKELMNLIEVYYANILPILNKIEDLFTRISNYNLELILVNNDGTLSTLSNMVFNEWSYIKGAISEKYDEKYSGKEKYGTEKYAQKKQEYLKKQKIYSLKFLNDCIGNNAICEYLKNYIIQNKNIETIKEDYNEVQNIKVEDDTKELIKDEKSIEKIKKFLDDVKSLQEFVKLVIPKDRTVEKDAKFYSELTPYYEKIKEIIPLYNKVRNYVTQKPYSTEKIKLNFECPTLLNGWDANKEEANLGVILIKEGKYYLGIINPYCKKIFEVDEKDSNEQNNYKKMEYKLLPGPNKMLPKVFFSNSRIEEFNPSKELQEKYNKGYHKKGKDFDINFCHELIDFYKQSLNKHEDWKKFNFKFKDTSEYNDISEFYREVEKQGYKIEYTEYSEKYINELVDRGELYLFQIYNKDFSEYSKGKENLHTLYWKAVFDPDNIMNPVYKLNGNAEVFYRKKSLEMKVIHPANQPIANKNISTIEAGRSTSTFKYDLIKDKRYTMDKFQFHVPITVNFKSERLFNINQIVNKYLKYNDDIHVIGIDRGERNLLYVCVIDKNEKIVYQKSLNEIVSEYNNNRYTTDYHGLLDRKEKEREIAREDWKNIENIKELKEGYMSQVIHILVELMKKYNAIIVIEDLNKGFKNSRIKVEKQVYQKFEKMFIDKLNYLVFKDEDKMNEGGVLNAYQLTNKFESFTKLGKQSGILYYIPAWCTSKIDPTTGFINRFYLKYENFDKSKEFVNRIDDIRYNEKENLFEFDIDYSKFTDRLNDTKNKWTLCSYGERILTQKNANGEWLDRRIQLSIEFKKLFEKYGINLNNIKDSILKLDKDNLEFYKGNGESLGFIQLFKLMVQMRNSLTGKEEDNLISPVKNRHGKFFNTSEKIEGLPIDADANGAYNIARKGFMLVEQMKNVEDEKLNKIKYNITEKEWLNYVQNRGM

SEQ ID NO: 1665 - protein, 1255 aa, unidentified
  REGION 1..1255: note = Category: MG75 effectors
  REGION 1..1255: note = Description: MG75-151 effector
  source 1..1255: note = uncultivated organism sequence
MTLTIKYKESKNKREVYMSNLYSNLHNLYQVQKTLRFELKPQGKTKENMEKVGILEADEHRAEIYSKVKKYCDEYHKLFIDKSLGNIELNGIDRYYELYSINNRDDKQKEELDQLEASLRKQISDAFKKSAEYKGLFQKDIITSYLVTMYKENQEKMQDIGEFNRFTTYFTGYNKNRENMYSEEDKSTAISYRLINENLPTFIDNIKIYKKIVSLMPEDIEKIYKDLEEYIQVDSIDEIFNISYYNDVLTQRGIECYNILISGRTKNDGDKIKGLNEYINEFNQTHNEKIPKLQELSKQILSDAESASFKIDVIKNDKELMNLIEVYYANILPILNKIEDLFTRISNYNLELILVNNDGTLSTLSNMVFNEWSYIKGAISEKYDEKYSGKEKYGTEKYAQKKQEYLKKQKIYSLKFLNDCIGNNAICEYLKNYIIQNKNIETIKEDYNEVQNIKVEDDTKELIKDEKSIEKIKKFLDDVKSLQEFVKLVIPKDRTVEKDAKFYSELTPYYEKIKEIIPLYNKVRNYVTQKPYSTEKIKLNFECPTLLNGWDANKEEANLGVILIKEGKYYLGIINPYCKKIFEVDEKDSNEQNNYKKMEYKLLPGPNKMLPKVFFSNSRIEEFNPSKELQEKYNKGYHKKGKDFDINFCHELIDFYKQSLNKHEDWKKFNFKFKDTSEYNDISEFYREVEKQGYKIEYTEYSEKYINELVDRGELYLFQIYNKDFSEYSKGKENLHTLYWKAVFDPDNIMNPVYKLNGNAEVFYRKKSLEMKVIHPANQPIANKNISTIEAGRSTSTFKYDLIKDKRYTMDKFQFHVPITVNFKSERLFNINQIVNKYLKYNDDIHVIGIDRGERNLLYVCVIDKNEKIVYQKSLNEIVSEYNNNRYTTDYHGLLDRKEKEREIAREDWKNIENIKELKEGYMSQVIHILVELMKKYNAIIVIEDLNKGFKNSRIKVEKQVYQKFEKMFIDKLNYLVFKDEDKMNEGGVLNAYQLTNKFESFTKLGKQSGILYYIPAWCTSKIDPTTGFINRFYLKYENFDKSKEFVNRIDDIRYNEKENLFEFDIDYSKFTDRLNDTKNKWTLCSYGERILTQKNANGEWLDRRIQLSIEFKKLFEKYGINLNNIKDSILKLDKDNLEFYKGNGESLGFIQLFKLMVQMRNSLTGKEEDNLISPVKNRHGKFFNTSEKIEGLPIDADANGAYNIARKGFMLVEQMKNVEDEKLNKIKYNITEKEWLNYVQNRGMWWKRQYLYHI

SEQ ID NO: 1666 - protein, 1236 aa, unidentified
  REGION 1..1236: note = Category: MG75 effectors
  REGION 1..1236: note = Description: MG75-152 effector
  source 1..1236: note = uncultivated organism sequence
MKQLSELTGLYSLSKTLRFELKPIGKTLEHIESKGLIAQDEQRAEEYKKVKDIIDRYHKKFITMCLSDFKFEQNSLETYVALAEDTNRDEKAFDEIKKTLRKQIVETFKKGGSYSDLFKKELIQKHLPEFVSDEEEKKMIANFSKFTTYFNGFNENRKNMYSDEDKSTAIAYRLIHENLPMFVNNMKSFSRIADSDVHQHFTEIESSFSEYLGVEHLEEMFQLDYFSETLTQEQIAVYNHIIGGMALEDGTILKGINEYVNLYNQQHKNSRLPLLKPLYKMILSDRVALPWFPSEEFASDEEMIRAINETYNTLKEVLSIDGDSSLRSLLLNISSYDIKHIYIANDLGLTDISQQMFGQYDVYTSAIKQELRKKNAPTAKERRNPELYDERINKLFKSAKSFSIEHLNSLVDSEHTIQNYYKHLGAYDRNGEQRVNLFTQIEMAYVAAKEILSGKHGNISQSDAETAIIKGLLDAFKSLQRFIKPLLGNGEEADKDNEFDAKLREAWNTLDIVTPLYNKVRNWLTRKPYSTEKIKLNFENAQLLGGWDVNKEPDCTSILLRKDGLYYLAIMNKKYNHAFDIDNLPNDGKCYEKIDYKLLPGANKMLPKVFFSKSRIKEFAPSEIIVNAYKKGSHKKGANFSISDCRRLIDFFKASISKHEDWKNFPFSFSSTETYEDISGFYREVEQQGYMLGFRNVSESFIKQLVDEGKLYLFQIWNKDFSDFSKGTPNMHTLYWKMLFDEHNLANVVYKLNGQAEVFYRKSSLDVANTTIHKAHQPIMNKNQENKKRQSTFDYDIIKNRRYTVDKFQFHVPISINFKATGRDNVNDNVLDIIRNGGIKHIIGIDRGERHLLYLSLIDLKGNIVKQMTLNDIVNEYNGNTYATNYKNLLAEREGNRTEARKNWKKIENIKDIKKGYLSQVVHIISKMMVEYNAIVVLEDLNMGFMRGRQKIERSVYEQFEKMLIDKLNYYVDKQKDSDEAGGLLHALQLTSKFESFKKLGKQSGCLFYIPAWNTSKIDPVTGFVNLFDTRYTNADQARKFFSQFDSIRYNADKDWFEFAFDYNKFTAKAKDTRTKWTLCTYGTRIRTFRNPERLNQWDNEEVVLTDEFKKAFANADVNIHGNLKEAICSLQDKKYLEPLMHLMKLLLQMRNSITNSEIDYLLSPVADENGTFYDSRVCSASLPKDADANGAYNIARKGLWAIHQIQESPAGDRLNLAIKNKDWLNFAQQKPYMNE

SEQ ID NO: 1667 - protein, 1267 aa, unidentified
  REGION 1..1267: note = Category: MG75 effectors
  REGION 1..1267: note = Description: MG75-153 effector
  source 1..1267: note = uncultivated organism sequence
MKNFIAKYSVSKTLRFELKPIGKTLENIQKNGLISKDEMLAENYKEMKKTIDEFHKEFIHKTLSNASLDKENLKEIAELYTAPAEKRKEDNYKNQLKAYQKALRKEIVDHFKNDELFKNLFAEKLIKNHLQGFAQQKGLRFYSEFNNFTTYFVGFHENRKNIYTDEDKRTSIAYRLIHENLPKFIHNIAVFEKIQEKKIPLTILENQFMSKLGNDTLADVFRLEYYNCLLTQNSIDFINQLIGGYVNENQEKIQGLNEYINLYNQQQKDKKDRLPKMKMLYKQILSDRESISFLPQSFKESQEVLDAIRDYYLSNLLEYRAEDKEEPENVLEKIQERLSHIADYDLSKIYIRNDKAITDISQTIFGHWGLIHSALEFDFRQKNVGKKTTQKQEEDVEKYLKSDYYSIAEIENALISYKESTQNEKLVEVFNKTSHPIADYFKTYFKAKEKSKEGKEYTLIANIQAKYTCVEGLLNTDYPKDKKLHTDKDNLRNLKAFLDAILELLHFVKPLIISKNDFLEKDENFYSSIEPYYKQLELLIPLYNKVRNFATQKPYSTEKIKLNFENSTLLNGWDKNKESDNTCVLFRKGEDFYLGIMNKKYNKIFENVPKPKSDTTFLKMEYKLLPGANKMLPKVFFSKKNIAYYAPDSEILRIRNHSTHTKDGEPQKGYEKQAFKLEDCHKMIDFFKSSIEKHPEWKNFNFTFSNTQSYQSIDEFYREVEEQGYSISFVEVDEEYINQCVNEGKLYLFQIYNKDFSKNKKSKGKPNLHTLYWKALFDPENLKDVIYKLNGEAEVFYRKKSISAENIIVHKAQKPIENKNPLNLTKYSIFQYDIIKDRHYTEDKFLFHVPITLNFKSKKGKENINQEVLDYLKENPDVNIIGIDRGERHLLYLTVINSKGQILHQESLNTLKNETYNIQTDYHALLHEKEKDRDKARKEWGVIENIKELKEGYLSAIIHNIAKLMVQYNAIVVMEDLNSGFKRGRIKVEKQVYQKFEKMLIEKLNYLVFKDVPNYEPGGLYNALQLTSKFESFEKLGKQSGFLFYIPAWNTSKIDPTTGFVNLFGGIKYESIHQAVNFFEKFQSIRYNTKEAYFEFAFDYNDFTTKAEGTKTQWTVCTHGERIINFRNTEKNSEWDSKTVQLTQQIKNLLNEYHIAYEQGQDIKPAITAQNDKKFFEELLKQFKNTLQMRNSVINSDVDYLISPVMNAKGEFFDTRKTDSTLPQNADANGAYHIAKKGLLHVQQIIDGVKKTDLTNKKWLKFVQNNL

SEQ ID NO: 1668 - protein, 1275 aa, unidentified
  REGION 1..1275: note = Category: MG75 effectors
  REGION 1..1275: note = Description: MG75-154 effector
  source 1..1275: note = uncultivated organism sequence
MRKFNEFVGLYPISKTLRFELKPIGKTLEHIQRNKLLEYDAVRADDYVKVKKIIDTYHKYLIDEALSGFTFETEADGRRNNSLSEYYWYYNLRKRNEQEQKTFKTIQNNLRKQIVDKLTQSEKYKRIDKKELITTDLPDFLTNESEKELVEKFKNFTTYFTEFHKNRKNMYSKEEKSTAIAFRLINENLPKFVDNIAAFEKVASSPLAEKINALYEDFKEYLNVEKISSVFRLEYYNELLTQKQIDLYNAIVGGRTEEDNRTQIKGLNQYINEYNQQQTDRSNRLPKLKPLYKQILSDRESVSWLPPKFDSDKELLTKIKECYDALSEKEKVFDKLESILKSLSTYDLSKIYISNDSQLSYISQKMFGRWDIIGKAIREDCAKRNPQKNRESLEKFAERIDKKLKAIDSISIGDVDECLAQLGEPYVKRVEDYFAAMGASEIGEEQIGQEFFKKNIEEAYESVKELLNNADNITDNNLMQDKGNVEKIKNLLDAIKDLQRFIKPLLGKGDEADKDGVFYGEFTSLWTKLDTVTPLYNMVRNYLTSKPYSTKKIKLNFENSHFLRGWAKDYNKKAGLIYEKAGLYYLAIVDKKISNDDKKLLHKNVDEDVASRIIFDFQKPDEKNTPRLFIYSKKNPITIAPAVDIYNLPIDSILDVWNKEKYKVEYRQQDQLGYEQALYSLIDYFKEGFSKHESYKHYDFKWKETNKYKDISEFYHDVEISCYEVKYDKVNWKTLLKFVDEGKLYLFQIYNKDFSDHSKGTPNMHTLYWKMLFDEENLKDVVYKLNGEAEVFFRKSSITVQSPTHPANSPIKNKNKDNKKKESKFEYDLIKDRRYTVDKFLLHVPITMNFKSVGGSNINQLVKRYIRSATDLHIIGIDRGERHLLYLTVIDSRGNIKEQFSLNEIVNEYNGNTYRTDYHELLDTREGELTEARRNWQTIQNIRELKEGYLSQVIHKISELAIKYNAVIVLEDLNFGFMRSRQKVEKQVYQKFEKMLIYKLNYLVDKKKPVTETGGLLKAYQLTGEFESFKTLGKQSGILFYVPAWNTSKIDPVTGFVNLFDTHYENIEKAKGFFDKFKSIRYNSDKDWSEFVVDDYTRFSPKAEGTRRDWTICTQGKRIQIYRNPQRNNEWEGREIDLTKAFEEHFEAYGIDISKDLREQINIQNKKEFFEELLRLLRLTLQMRNSMPSSDIDYLISPIADDTGRFFDSRKQAELKGNAVLPMNADANGAYNIARKGLLAIRKMKQEENDSAKISLAISNKEWLKFAQTKPYLED

SEQ ID NO: 1669 - protein, 1236 aa, unidentified
  REGION 1..1236: note = Category: MG75 effectors
  REGION 1..1236: note = Description: MG75-155 effector
  source 1..1236: note = uncultivated organism sequence
MKQLSELTGLYSLSKTLRFELKPIGKTLEHIESKGLIAQDEQRAEEYKKVKDIIDRYHKKFITMCLSDFKFEQNSLETYVALAEDTNRDEKAFDEIKKTLRKQIVETFKKGGSYSDLFKKELIQKHLPEFVSDEEEKKMIANFSKFTTYFNGFNENRKNMYSDEDKSTAIAYRLIHENLPMFVNNMKSFSRIADSDVHQHFTEIESSFSEYLGVEHLEEMFQLDYFSETLTQEQIAVYNHIIGGRALEDGTKLKGINEYVNLYNQQHKNSRLPLLKPLYKMILSDRVALPWFPSEEFASDEEMIRAINETYNTLKEVLSIDGDSSLRSLLLNISSYDIKHIYIANDLGLTDISQQMFGQYDVYTSAIKQELREKNAPTAKERRNPELYDERINKLFKSAKSFSIEHLNSLVDSEHTIQNYYKHLGAYDRNGEQRVNLFTQIEMAYVAAKEILSGKHGNISQSDAETAIIKGLLDAFKSLQRFIKPLLGNGEEADKDNEFDAKLREAWNTLDIVTPLYNKVRNWLTRKPYSTEKIKLNFENAQLLGGWDVNKEPDCTSILLRKNGLYYLAIMNKKYNHAFDIDNLPNDGKCYEKIDYKLLPGANKMLPKVFFSKSRIKEFAPSEIIVNAYKKGSHKKGANFSISDCRRLIDFFKASISKHEDWKNFPFSFSSTEKYEDISGFYREVEQQGYMLGFRNVSESFIKQLVDEGKLYLFQIWNKDFSDFSKGTPNMHTLYWKMLFDEHNLANVVYKLNGQAEVFYRKSSLDVANTTIHKAHQPIMNKNQENKKRQSTFDYDIIKNRRYTVDKFQFHVPISINFKATGRDNVNDNVLDIIRNGGIKHIIGIDRGERHLLYLSLIDLKGNIVKQMTLNDIVNEYNGNTYATNYKNLLAEREGNRTEARKNWKKIENIKDIKKGYLSQVVHIISKMMVEYNAIVVLEDLNMGFMRGRQKIERSVYEQFEKMLIDKLNYYVDKQKNSDEAGGLLHALQLTSKFESFKKLGKQSGCLFYIPAWNTSKIDPVTGFVNLFDTRYTNADQARKFFSQFDSIRYNADKDWFEFAFDYNKFTAKAKDTRTKWTLCTYGTRIRTFRNPARLNQWDNEEVVLTDEFKKAFANADINIHGNLKEAICSLQDKKYLEPLMHLMKLLLQMRNSITNSEVDYLLSPVADENGTFYDSRICSASLPKDADANGAYNIARKGLWAIHQIQESPAGDRLNLAIKNKDWLNFAQQKPYMNE

SEQ ID NO: 1670 - protein, 1236 aa, unidentified
  REGION 1..1236: note = Category: MG75 effectors
  REGION 1..1236: note = Description: MG75-156 effector
  source 1..1236: note = uncultivated organism sequence
MKQLSELTGLYSLSKTLRFELKPIGKTLEHIESKGLIAQDEQRAEEYKKVKDIIDRYHKKFITMCLSDFKFEQNSLETYVALAEDTNRDEKSFDEIKKTLRKQIVETFKKGGSYSDLFKKELIQKHLPEIVTDEEEKKMIANFSKFTTYFNGFNENRKNMYSDEDKSTAIAYRLIHENLPMFVDNMKSFSRIADSDVHQHFTEIESSFSEYLGVEHLEGMFQLDYFSETLTQEQIAVYNHIIGGRVLEDGTKLKGINEYVNLYNQQHKDSRLPLLKPLYKMILSDRVALPWFPSEEFASDEEMIGAINATYNTLKDVLSIDGDSSLRCLLLNISSYDIKHIYIANDLGLTDISQQMFGQYDVYTSAIKQELRTTNAPTAKERRTPELYDERINKLFKSAKSFSIEYLNSLVDSEHTIQNYYKHLGAYDRNGEQRVNLFTQIEMAYVAAKEILSGKHGNISQSDAETAIIKGLLDAFKSLQRFIKPLLGNGEEADKDNEFDAKLREAWNTLDIVTPLYNKVRNWLTRKPYSTEKIKLNFENAQLLGGWDVNKEPDCTSILLRKNGLYYLAIMNKKYNHAFDIDNLPNDGECYEKIDYKLLPGANKMLPKVFFSKSRIKEFAPSEIIVNAYKKGSHKKGANFSISDCRRLIDFFKASISKHEDWKNFPFSFSSTETYEDISGFYREVEQQGYMLGFRNVSESFIKQLVDEGKLYLFQIWNKDFSDFSKGTPNMHTLYWKMLFDEHNLANVVYKLNGQAEVFYRKRSLDVANTTIHKAHQPIMNKNQENKKRQSTFDYDIIKNRRYTVDKFQFHVPISINFKATGRDNVNDNVLDIIRNGGIKHIIGIDRGERHLLYLSLIDLKGNIVKQMTLNDIVNEYNGNTYATNYKNLLAEREGNRTEARKNWKKIENIKDIKKGYLSQVVHIISKMMVEYNAIVVLEDLNMGFMRGRQKIERSVYEQFEKMQIDKLNYYVDKQKNSDEAGGLLHALQLTSKFESFKKLGKQSGCLFYIPAWNTSKIDPVTGFVNLFDTRYTNADQARKFFFQFDSIRYNADKDWFEFAFDYNKFTAKAKDTRTKWTLCTYGTRIRTFRNPARLNQWDNEEVVLTDEFKKAFANADINIHGNLKEAICSLQDKKYLEPLMHLMKLLLQMRNSITNSEVDYLLSPVADENGTFYDSRVCSASLPKDADANGAYNIARKGLWAIHQIQESPAGDRPNLAIKNKDWLNFAQQKPYMNE

SEQ ID NO: 1671 - protein, 1236 aa, unidentified
  REGION 1..1236: note = Category: MG75 effectors
  REGION 1..1236: note = Description: MG75-157 effector
  source 1..1236: note = uncultivated organism sequence
MKQLSELTGLYSLSKTLRFELKPIGKTLEYIESKGLIAQDEQRAEEYKKVKDIIDRYHKKFITMCLSDFKFEQNSLETYVALAEDTNRDEKAFDEIKKTLRKQIVETFKKGGSYSDLFKKELIQKHLPEFVSDEEEKKMIANFSKFTTYFNGFNENRKNMYSDEDKSTAIAYRLIHENLPMFVNNMKSFSRIADSDVHQHFTEIESSFSEYLGVEHLEEMFQLDYFSETLTQEQIAVYNHIIGGRALEDGTKLKGINEYVNLYNQQHKNSRLPLLKPLYKMILSDRVALPWFPSEEFASDEEMIRAINETYNTLKEVLSIDGDSSLRSLLLNISSYDIKHIYIANDLGLTDISQQMFGQYDVYTSAIKQELREKNAPTAKERRNPELYDERINKLFKSAKSFSIEHLNSLVDSEHTIQNYYKHLGAYDRNGEQRVNLFTQIEMAYVAAKEILSGKHGNISQSDAETAIIKGLLDAFKSLQRFIKPLLGNGEEADKDNEFDAKLREAWNTLDIVTPLYNKVRNWLTRKPYSTEKIKLNFENAQLLGGWDVNKEPDCTSILLRKNGLYYLAIMNKKYNHAFDIDNLPNDGKCYEKIDYKLLPGANKMLPKVFFSKSRIKEFAPSEIIVNAYKKGSHKKGANFSISDCRRLIDFFKASISKHEDWKNFPFSFSSTETYEDISGFYREVEQQGYMLGFRNVSESFIKQLVDEGKLYLFQIWNKDFSDFSKGTPNMHTLYWKMLFDEHNLANVVYKLNGQAEVFYRKSSLDVANTTIHKAHQPIMNKNQENKKRQSTFDYDIIKNRRYTVDKFQFHVPISINFKATGRDNVNDNVLDIIRNGGIKHIIGIDRGERHLLYLSLIDLKGNIVKQMTLNDIVNEYNGNTYATNYKNLLAEREGNRTEARKNWKKIENIKDIKKGYLSQVVHIISKMMVEYNAIVVLEDLNMGFMRGRQKIERSVYEQFEKMLIDKLNYYVDKQKNSDEAGGLLHALQLTSKFESFKKLGKQSGCLFYIPAWNTSKIDPVTGFVNLFDTRYTNADQARKFFSQFDSIRYNADKDWFEFAFDYNKFTTKAKDTRTKWTLCTYGTRIRTFRNPARLNQWDNEEVVLTDEFKKAFANADINIHVNLKEAICSLQDKKYLEPLMHLMKLLLQMRNSITNSEVDYLLSPVADENGTFYDSRVCSASLPKDADANGAYNIARKGLWAIHQIQETPAGDRPNLAIKNKDWLNFAQQKPYMNE

SEQ ID NO: 1672 - protein, 1236 aa, unidentified
  REGION 1..1236: note = Category: MG75 effectors
  REGION 1..1236: note = Description: MG75-158 effector
  source 1..1236: note = uncultivated organism sequence
MKQLSELTGLYSLSKTLRFELKPIGKTLEHIESKGLIAQDEQRAEEYKKVKDIIDRYHKKFITMCLSDFKFEQNSLETYVALAEDTNRDEKAFDEIKKTLRKQIVETFKKGGSYSDLFKKELIQKHLPEFVSDEEEKKMIANFSKFTTYFNGFNENRKNMYSDEDKSTAIAYRLIHENLPMFVNNMKSFSRIADSDVHQYFTEIESSFSEYLGVEQLEEMFQLDYFSETLTQEQIAVYNHIIGGRALEDGTKLKGINEYVNLYNQQHKDSRLPLLKPLYKMILSDRVALPWFPSEEFASDEEMIRAINETYNTLKEVLSIDGDSSLRSLLLNISSYDIKHIYIANDLGLTDISQQMFGQYDVYTSAIKQELREKNAPTAKERRNPELYDERINKLFKSAKSFSIEHLNSLVDSEHTIQNYYKHLGAYDRNGEQRVNLFTQIKMAYVAAKEILSGKHGNISQSDAETAIIKGLLDAFKSMQRFIKPLLGNGEEADKDNEFDAKLREAWNTLDIVTPLYNKVRNWLTRKPYSTEKIKLNFENAQLLGGWDVNKEPDCTSILLRKNGLYYLAIMNKKYNHAFDIDNLPNDGKCYEKIDYKLLPGANKMLPKVFFSKSRIKEFAPSEIIVNAYKKGSHKKGANFSISDCRRLIDFFKASISKHEDWKNFPFSFSSTETYEDISGFYREVEQQGYMLGFRNVSESFIKQLVDEGKLYLFQIWNKDFSDFSKGTPNMHTLYWKMLFDEHNLANVVYKLNGQAEVFYRKSSLDVANTTIHKAHQPIMNKNQENKKRQSTFDYDIIKNRRYTVDKFQFHVPISINFKATGRDNVNDNVLDIIRNGGIKHIIGIDRGERHLLYISLIDLKGNIVKQMTLNDIVNEYNGNTYATNYKDLLAEREGNRTEARKNWKKIENIKDIKKGYLSQVVHIISKMMVEYNAIVVLEDLNMGFMRGRQKIERSVYEQFEKMLIDKLNYYVDKQKDSDEAGGLLHALQLTSKFESFKKLGKQSGCLFYIPAWNTSKIDPVTGFVNLFDTRYTNADQARKFFSQFDSIRYNADKDWFEFAFDYNKFTAKAKGTRTKWTLCTYGTRIRTFRNPERLNQWDNEEVVLTDEFKKAFANADINIHGNLKEAICSLQDKKYLEPLMHLMKLLLQMRNSITNSEIDYLLSPVADENGTFYDSRVCSASLPKDADANGAYNIARKGLWAIHQIQESPADDRLNLAIKNKDWLNFAQQKPYMNE

SEQ ID NO: 1673 - protein, 1284 aa, unidentified
  REGION 1..1284: note = Category: MG75 effectors
  REGION 1..1284: note = Description: MG75-159 effector
  source 1..1284: note = uncultivated organism sequence
MNTSNLSRFTNLYSISKTLRFELQPLGKTKDYIEKNGILMRDEKRAEDYKTVKGIIDEYHKKYIKGRLWDFKLPLASEGKHDSLEEYKALYEVSKRSEADEAAFKEVKDNLRSIIAKRLTSGKAYETIFKKELIREDLINSLEDEVEREIVSQFADFTTYFGGFHENRKNMYDAGEKSTAIAYRLIHQNLPKFMDNMKAFAKIAETSIAEHFADIYEGSKEMLNVGSIEEIFRLDYFSETLTQPHIEVYNSIIGKRVLEDGTEVKGINEYVNLYNQQQKDKRLPLLVPLYKQILSDREKLSWLAEEFDSDEKMLAAVNETYTHLHDLLMGNENESLRSLLLHLRDNDLEQINIANDLSLTDISQHLFGRYDVFTNGIKEELRVITPRKRKETDEQLEDRISKIFKTQKSFSIAFLNSLPQPAMEDGKARCIEDYFMALGAVNNETTQKENLFAQIENAYENAKSVLQMKETGDMLSQNKPAVSKIKALLDALKDLQHFIKPLLGSGEENEKDELFYGSFQMMWDELDAVTPLYNKVRNWLTRKPYSTEKIKLNFDNAQLLDGWDENKETTNASILLYKDGNYYLGIIKKEDRKILGSPMPTDGECYDKVVYKFFKDITTMVPKCTTQKKDVIAHFMHSDDDYILYDKKTFDAPVTITKEIYNLNNVLYNGIKKFQIEYLRSTGDKRGYEHAVFIWKSFCMHFLKAYKSTSIYNLALVEQQINSYYDLSSFYNAVNLLLYNLSYRKVSVNYIHSLVDEGKLYLFRIWNKDFSEYSKGTPNLHTLYWKMLFDERNLADVVYKLNGQAEVFYRKSSIQPEHRIVHPAGKPIANKNEHSKEPTSTFKYDIVKDRRYTVDKFQFHVPITINFKAAGQENINPVVLDAIRRGGFTHIIGIDRGERHLLYLSLIDLQGNIVEQMTLNEIINEYKGLKHKTNYHDLLAKREGERTEARRSWDTIENIKEMKEGYLSQVVHIISKMMVEYNAIVVLEDLNTGFMRSRQKIERQVYEKFEKMLIDKLNCYIDKQVGASDIAGLLHPLQLACEAKKWKRSHQCGCLFYIPAWNTSKIDPVTGFVNLFDTRYENAAKAKAFFGKFGSIRYNAEKDWFEFAFDYNDFTTKAEGTRTEWTLCTYRERIRTFRNPQKNHQWDDEEIVLTDAFKQLFDKYDIDMKGNLKEAICAQNDAQFFKDMMELMKLLLQMRNSITNSETDYLLSPVADEKGQFFDSRRGITTLPDNADANGAYNIARKGLWVIRKIQETAENEKPSLAITNKEWLQFAQTKPYLND

SEQ ID NO: 1674 - protein, 1274 aa, unidentified
  REGION 1..1274: note = Category: MG75 effectors
  REGION 1..1274: note = Description: MG75-160 effector
  source 1..1274: note = uncultivated organism sequence
MKKNLEKFIGLYHMDKTLRFELKPMGKTLENINNNGFIENDNHRADSYKKVKKLIDRYHKHYIESVLGDFKLNSIQLEAYYNLYTQQSKTEKEIKEFEAIQDKLRKSIADALKKDDRFKRIDKKELINEDLNVVLENDDERILVSEFQGFTSYFTGFHENRKNMYSDEAKSTAIAYRLIHENLPKFIDNIAIFKKVAETSVADKFSKLYKDFEEYLNVYNINEMFDLDYYSIVLTQKQIEVYNGIIGGKTLEDGTKVQGLNEYINLYNQQQNDKRASLPKLKPLFKQILSDREQLSWLQEEFKTGGDVLDAVKEYCEAYFMNVDEMIKVLLTSIANYDLSKIYIPNDLSLTDISQKMLGNWNVIPNAIEQDFRNRYIKKPEENEEKYSERISKLVKQEKSFSLAYINSCLSELDNADISTYFASLGAVNIPDKQTSSITTEISMYYNQLKPLFDIEYPKEKNLSQDKLTVMQLKNLLDAFKALQRFVKPLLGKGNEAEKDEKFYGELMQLWGIIDEITPLYNKVRNYATRKPYSTDKIKVNFENAQLLDGWDENKEENNAAIILLKDGLYYLGIVKKEHRNILKVDKPMPSNGECYDKVVYKFFKDITTMVPKCTTQMKAVKQHFENSSESYTLFDKKSFNAPVEITKEIFELNNVLYNGVKKFQIEYLRSTNDRAGYEHAVNLWKEFCMQFLKAYKSTAIYDLSSIEKDWAKYTDLSSFYGAVNLLLYNLSYKKVSVEYIDKLVEEDKMYLFQIYNKDFSEYSKGTPNMHTLYWKMLFDERNLKDVVYKLNGQAEIFFRKKSISMAKPTHPANKPIDNKNVLNKRKQSTFKYDLIKDKRYTLDKFQFHVPITINFKSGGDGKINIDVCKHIKDSNDMHFIGIDRGERHLLYLCVINSKGEIVEQYSLNEIVNEYKGNKYHTDYHHLLQERDKKRQEERTSWQTIEGIKELKQGYLSQVIHKISQLIVKYNALVILEDLNMGFKRSRQKVESSVYQQFEKALIDKLNYYVDKKTEPTEDGGLLRAYQLASKFDSFQKMGKQSGFIFYVPAWNTSKIDPVTGFVNLLDTRYESVAKSQKFFDDFDSIRYNGEKDWFELKFDYNKFTKKAEGTKTDWTLCTYGTRVETFRNSEKNANWDSREINLTDEWKALFDKYNIPLNCNLKDAIAQQTSKDFHNILLHLLKLTLQMRNSETGTDIDYMVSPIANEDGKFYDSRLCDKSLPENADANGAYNIARKGLWIAQQIKEAEDLKKVKLAITNKEWLQFAQQKPYLND

SEQ ID NO: 1675 - protein, 1284 aa, unidentified
  REGION 1..1284: note = Category: MG75 effectors
  REGION 1..1284: note = Description: MG75-161 effector
  source 1..1284: note = uncultivated organism sequence
MNTSNLSRFTNLYSISKTLRFELQPLGKTKDYIEKNGILMRDEKRAEDYKTVKGIIDEYHKKYIKGRLWDFKLPLASEGKHDSLEEYKALYEVSKRSEADEAAFKEVKDNLRSIIAKRLTSGKAYETIFKKELIREDLINSLEDEVEREIVSQFADFTTYFGGFHENRKNMYDAGEKSTAIAYRLIHQNLPKFMDNMKAFAKIAETSIAEHFADIYEGSKEMLNVGSIEEIFRLDYFSETLTQPHIEVYNSIIGKRVLEDGTEVKGINEYVNLYNQQQKDKRLPLLVPLYKQILSDREKLSWLAEEFDSDEKMLAAVNETYTHLHDLLMGNENESLRSLLLHLRDNDLEQINIANDLSLTDISQHLFGRYDVFTNGIKEELRVITPRKRKETDEQLEDRISKIFKTQKSFSIAFLNSLPQPAMEDGKARCIEDYFMALGAVNNETTQKENLFAQIENAYENAKSVLQMKETGDMLSQNKPAVSKIKALLDALKDLQHFIKPLLGSGEENEKDELFYGSFQMIWDELDAVTPLYNKVRNWLTRKPYSTEKIKLNFDNAQLLDGWDENKETTNASILLYKDGNYYLGIIKKEDRKILGSPMPTDGECYDKVVYKFFKDITTMVPKCTTQKKDVIAHFMHSDDDYILYDKKTFDAPVTITKEIYNLNNVLYNGVKKFQIEYLRSTGDKRGYEHAVFIWKSFCMHFLKAYKSTSIYNLALVEQQINSYYDLSSFYNAVNLLLYNLSYRKVSVNYIHSLVDEGKLYLFRIWNKDFSEYSKGTPNLHTLYWKMLFDERNLADVVYKLNGQAEVFYRKSSIQPEHRIVHPAGKPIANKNENSKEPTSTFKYDIVKDRRYTVEKFQFHVPITINFKAAGQENINPVVLDAIRRGGFTHIIGIDRGERHLLYLSLIDLQGNIVEQMTLNEIINEYKGLKHKTNYHDLLAKREGERTEARRSWDTIENIKEMKEGYLSQVVHIISKMMVEYNAIVVLEDLNTGFMRSRQKIERQVYEKFEKMLIDKLNCYIDKQVGASDIAGLLHPLQLACEAKKWKRSHQCGCLFYIPAWNTSKIDPVTGFVNLFDTRYENAAKAKAFFGKFGSIRYNAEKDWFEFAFDYNDFTTKAEGTRTEWTLCTYRERIRTFRNPQKNHQWDDEEIVLTDAFKQLFDKYDIDMKGNLKEAICAQNDAQFFKDMMELMKLLLQMRNSITNSETDYLLSPVADEKGQFFDSRRGITTLPDNADANGAYNIARKGLWVIRKIQETAENEKPSLAITNKEWLQFAQTKPYLND

SEQ ID NO: 1676 - protein, 1279 aa, unidentified
  REGION 1..1279: note = Category: MG75 effectors
  REGION 1..1279: note = Description: MG75-162 effector
  source 1..1279: note = uncultivated organism sequence
MSNFNEFTHLYQLSKTLRFELKPIGETLKHFNESGILDQDEHRAESYKKVKKLIDRYHKEFMEEALRDFVFQMDDEGKNNSLSEYFFLYSLGKRTEAQDNDFKDVKKNLREQIAKYFKASPKYKNLFKQELIKEDLCNNMQCNEEEQKLVEEFHNFTTYFTGFHENRKNMYSDEEKSTAIAFRLVHQNLPKFIDNIGVFDRVRNIDEIKAGIENLQKHFETEGLFKQGEKIEDFFTLDYYSRLAVQSRIEIYNAILGGKTTEKGEKIQGLNELINLYNQQHKETHLPKMKALFKQILSDRQAVSWIEESFKSDNEVLSSVNDFYENLKQNEIFERTKELLTSVGSYDLSKVYITNDQQLTSISQQLYGSWAVIENAILAEMQNETPRKKKEDAEKYNERLKKAYSNRSSFSIAYIDQCLEAVFGENRIPVEQHFANLGKAEIETEAECGKIKIPDVFTQIEQTYSAAKSLLCNPYPKDKHLSQSDEDIEKVKNLLDALKRFQHFIKPLTGSGDEAEKDEMFYGDLAELWTEIDQLNSLYNKVRNHLTGKPYSEEKLKLNFENATLLNGWDKNKEPDNTAIILRKDGLYYLAIMNKEHNRIFASDKLPNNGECYEKVIYKLLPGANKMLPKVFLSKKGIEVFKPSQEILAIYNNGTHKKGDTFNINDCHKLIDFFKESISKHNDWKNFDFHFSDTNSYEDLSGFYREVENQGYKITFQNISSDYIDNLVNEGKLYLFQIYNKDFSTKRDLSKHKEGTPNMHTLYWQMLFDERNLNDGVYQLNGHAEVFFRKKSLNYTKPTHPANQPIAKKNPHSKNETSQFTYDLIKDKRFTMDKFLFHVPITLNFKSGETDNINAKVRQWLQKADDVHIIGIDRGERHLLYLTVIDSKGNIKEQMSLNTIENKYNGNTYAFDYHNRLDEKEKERDKAKKSWKTVENIKELKEGYLSQAIHKITQLMLKYNAIIVLEDLNIGFMRGRQKVEKQVYQKFEKMLIDKLNYLADKKKDPSEVGGVLNAYQLTSKFESFTKLGRQSGFLFYIPAWNTSKIDPVTGFVNLFDTQYKSDGKAKMFFSKFKSISYNKDKNWFEFSFDYNDFTSKADGTKTEWTVCTNGERIENFRNGETSNQWGGRTINLSQKFKSLFDEYGIDFTKDLQNSICSQSKKGFFKQLLHLFKLTVQMRNSNTETEEEKGKKDFIISPVCVDDKYYNSDIEAEKGKDEEGNWKSELPVNADANGAYNIARKGLMILNHIKQSSDPSKKQEYDLTNKAWLNFVQKGSVEGK

SEQ ID NO: 1677 - protein, 1017 aa, unidentified
  REGION 1..1017: note = Category: MG75 effectors
  REGION 1..1017: note = Description: MG75-163 effector
  source 1..1017: note = uncultivated organism sequence
MFQLDYFSETLTQEQIAVYNHIIGGRALEDGTKLKGINEYVNLYNQQHKDSRLPLLKPLYKMILSDRVALPWFPSEEFASDEEMIRAINETYNTLKEVLSIDGDSSLRSLLLNISSYDIKHIYIANDLGLTDISQQMFGQYDVYTSAIKQELREKNAPTAKERRNPELYDERINKLFKSAKSFSIEHLNSLVDSELTIQNYYKHLGAYDRNGEQRVNLFTQIEMAYVAAKEILSGKHGNISQSDAETAIIKGLLDAFKSLQRFIKPLLGNGEEADKDNEFDAKLREAWNTLDIVTPLYNKVRNWLTRKPYSTEKIKLNFENAQLLGGWDVNKEPDCTSILLRKNGLYYLAIMNKKYNHAFDIDNLPNDGKCYEKIDYKLLPGANKMLPKVFFSKSRIKEFAPSEIIVNAYKKGSHKKGSNFSISDCRRLIDFFKASISKHEDWKNFPFSFSSTETYEDISGFYREVEQQGYMLGFRNVSESFIKQFVDEGKLYLFQIWNKDFSDFSKGTPNMHTLYWKMLFDEHNLANVVYKLNGQAEVFYRKSSLDVANTTIHKAHQPIMNKNQENKKRQSTFDYDIIKNRRYTVDKFQFHVPISINFKATGRDNVNDNVLDIIRNGGIKHIIGIDRGERHLLYLSLIDLKGNIVKQMTLNDIVNEYNGNTYATNYKDLLAEREGNRTEARKNWKKIENIKDIKKGYLSQVVHIISKMMVEYNAIVVLEDLNMGFMRGRQKIERSVYEQFEKMLIDKLNYYVDKQKNSDEAGGLLHALQLTSKFESFKKLGKQSGCLFYIPAWNTSKIDPVTGFVNLFDTRYTNADQARKFFSQFDSIRYNAYKDWFEFAFDYNKFTAKAKDTRTKWTLCTYGTRIRTFRNPARLNQWDNEEVVLTDEFKKAFANADINIHGNLKEAICSLQDKKYLEPLMHLMKLLLQMRNSITNSEVDYLLSPVADENGTFYDSRICSASLPKDADANGAYNIARKGLWAIHQIQETPAGDRPNLAIKNKDWLNFAQQKPYMNE

SEQ ID NO: 1678 - protein, 1286 aa, unidentified
  REGION 1..1286: note = Category: MG75 effectors
  REGION 1..1286: note = Description: MG75-164 effector
  source 1..1286: note = uncultivated organism sequence
MKQKKTQNPFNQFIGLYPLSKTLRFELRPYNEKTKNNIISAGILAEDNHRAESYKKVKKIIDEYHKAFIERVLKDLVLEEKPLQAFYECYKKSSKEEALQEIGNNLRTQISNAFEKDPKYSTLTSKDLINKELPSIVTTEEERTLLEEFHGFSTYFVGFHQNRENMYSDEEKATSIAYRLINENLPKFIDNIRSFQKIADSPIADKLESIYDEYAKEGYMNVNTLNEMFEISFYNRVLTQTQIDLYNAIIGGKTEKDGHKTQGINEYINLYNQRGEVQKKDRLPLLKPLFKQILSDREHISWFEEGFADDQAMLNAIKDFYLELTETGPTTTESILDRTKSLLRTIADYDLTKIYLGYNSLSKISQQIFGEWDRIQRALEAEYDQREKTKTYEEKEKHFKSLKSVSIGFIDDCLKAFETDKQLSLSIKEYIAQLGKKNDDPDLIDRITASYKAVKAILTTEWPKERNIAQEKDIVALIKDLLDRIKDLQSFIKPLLGSGKESDKDNLFYGELASIWETINTVTPLYDKVRNRMTRKPYSTQKFKVNFRNSQLLKGWDLNKEKDYMGIILRKKDLYFLAIMNKKNTKVFSSKVPSQGECFEKMIYKQFDATKQVPKCSTELKRVKEAIEIDDKPYYELFDKQKFSKPLTITREIWQLNNLVWDKKTNSFVRRKKDETRPKKFQQEYLDITEDREGYCEALRKWIDFVKDFLASYKSTSIYNIKYKDSSEYASIKEFYNFLDQELYHIEFSNVSVDYINELIEEGKIYLFQIYNKDFSPHSKGTPNMHTLYWKTLFDERNLANVAYKLNGEAEIFFRKASLERKVTHPAHDPIKTKNPKTSIKEKAFAYDLIKDKRYTEDKFQLHVPITMNFKSPMEKKGINSRVNNYIKTAEDLHFIGIDRGERNLLYVCVIDSQGNIKDQYSLNEIVNQYNRTDYKYLLEKREEERDKERKSWQTIENIKDLKQGYLSQVVHKIAQLMVQYHAIVVLEDLNSGFKRSRQKVEKSVYQQFEKSLIDKLNYLIDKRLPIDEEGGVLRAYQLTNKFESFKTMKMQNGFLFYIPAWNTSKMDPTTGFVNLFDTRYTNIDKSKEFFDKFEAIRYNEGKDWFELEFDYEHFTTKAEGTQTQWTLCTWGERINTFRNKSKNSSWDYKKINLTEEYKTLFEQFSINYRRNLKKEILEQNSKDFFERLLSLLHLTLQMRNSIPNTDTDYLISPVADANGHFYYSEQCGDNLPKNADANGAYNIARKGMWMAEQIRRSNEGEELKLAISNKEWLRFAQEKPYLEDK

SEQ ID NO: 1679 - protein, 1236 aa, unidentified
  REGION 1..1236: note = Category: MG75 effectors
  REGION 1..1236: note = Description: MG75-165 effector
  source 1..1236: note = uncultivated organism sequence
MKQLSELTGLYSLSKTLRFELKPIGKTLEHIESKGLIAQDEQRAEEYKKVKDIIDRYHKKFITMCLSDFKFEQNSLETYVALAENTNRDEKAFDEIKKTLRKQIVETFKKGGSYSDLFKKELIQKHLPEFVSDEEEKKMIANFSKFTTYFNGFNENRKNMYSDEDKSTAIAYRLIHENLPMFVNNMKSFSRIADSDVHQHFTEIESSFSEYLGVEHLEEMFQLDYFSETLTQEQIAVYNHIIGGRALEDGTKLKGINEYVNLYNQQHKNSRLPLLKPLYKMILSDRVALPWFPSEEFASDEEMIRAINETYNTLKEVLSIDGDSSLRSLLLNISSYDIKHIYIANDLGLTDISQQMFGQYDVYTSAIKQELREKNAPTAKERRNPELYDERINKLFKSAKSFSIEHLNSLVDSEHTIQNYYKHLGAYDRNGEQRVNLFTQIEMAYVAAKEILSGKHGNISQSDAETAIIKGLLDAFKSLQRFIKPLLGNGEEADKDNEFDAKLREAWNTLDIVTPLYNKVRNWLTRKPYSTEKIKLNFENAQLLGGWDVNKEPDCTSILLRKNGLYYLAIMNKKYNHAFDIDNLPNDGKCYEKIDYKLLPGANKMLPKVFFSKSRIKEFAPSEIIVNAYKKGSHKKGANFSISDCRRLIDFFKASISKHEDWKNFPFSFSSTETYEDISGFYREVEQQGYMLGFRNVSESFIKQLVDEGKLYLFQICNKDFSDFSKGTPNMHTLYWKMLFDEHNLANVVYKLNGQAEVFYRKSSLDVANTTIHKAHQPIMNKNQENKKRQSTFDYDIIKNRRYTVDKFQFHVPISINFKATGRDNVNDNVLDIIRNGGIKHIIGIDRGERHLLYLSLIDLKGNIVKQMTLNDIVNEYNGNTYATNYKNLLAEREGNRTEARKNWKKIENIKDIKKGYLSQVVHIISKMMVEYNAIVVLEDLNMGFMRGRQKIERSVYEQFEKMLIDKLNYYVDKQKNSDEAGGLLHALQLTSKFESFKKLGKQSGCLFYIPAWNTSKIDPVTGFVNLFDTRYTNADQARKFFSQFDSIRYNADKDWFEFAFDYNKFTAKAKGTRTKWTLCTYGTRIRTFRNSERLNQWDNEEVVLTDEFKKAFANADINIHGNLKEAICSLQDKKYLEPLMHLMKLLLQMRNSITNSEVDYLLSPVADENGTFYDSRICSASLPKDADANGAYNIARKGLWAIHQIQETPAGDRPNLAIKNKDWLNFAQQKPYMNE

SEQ ID NO: 1680 - protein, 956 aa, unidentified
  REGION 1..956: note = Category: MG75 effectors
  REGION 1..956: note = Description: MG75-166 effector
  source 1..956: note = uncultivated organism sequence
MILSDRVALPWFPSEEFASDEEMIRAINETYNTLKEVLSIDGDSSLRSLLLNISSYDIKHIYIANDLGLTDISQQMFGQYDVYTSAIKQELREKNAPTAKERRNPELYDERINKLFKSAKSFSIEHLNSLVDSEHTIQNYYKHLGAYDRNGEQRVNLFTQIEMAYVAAKEILSGKHGNISQSDAETAIIKGLLDAFKSLQRFIKPLLGNGEEADKDNEFDAKLREAWNTLDIVTPLYNKVRNWLTRKPYSTEKIKLNFENAQLLGGWDVNKEPDCTSILLRKNGLYYLAIMNKKYNHAFDIDNLPNDGKCYEKIDYKLLPGANKMLPKVFFSKSRIKEFAPSEIIVNAYKKGSHKKGANFSISDCRRLIDFFKASISKHEDWKNFPFSFSSTETYEDISGFYREVEQQGYMLGFRNVSESFIKQLVDEGKLYLFQIWNKDFSDFSKGTPNMHTLYWKMLFDEHNLANVVYKLNGQAEVFYRKSSLDVANTTIHKAHQPIMNKNQENKKRQSTFDYDIIKNRRYTVDKFQFHVPISINFKATGRDNVNDNVLDIIRNGGIKHIIGIDRGERHLLYLSLIDLKGNIVKQMTLNDIVNEYNGNTYATNYKNLLAEREGNRTEARKNWKKIENIKDIKKGYLSQVVHIISKMMVEYNAIVVLEDLNMGFMRGRQKIERSVYEQFEKMLIDKLNYYVDKQKNSDEAGGLLHALQLTSKFESFKKLGKQSGCLFYIPAWNTSKIDPVTGFVNLFDTRYTNADQARKFFSQFDSIRYNADKDWFEFAFDYNKFTAKAKDTRTKWTLCTYGTRIRTFRNSERLNQWDNEEVVLTDEFKKAFANADINIQGNLKEAICSLQDKKYLEPLMHLMKLLLQMRNSITNSEVDYLLSPVADENGTFYDSRVCSASLPKDADANGAYNIARKGLWAIHQIQETPAGDRPNLAIKNKDWLNFAQQKPYMNE

SEQ ID NO: 1681 - protein, 1236 aa, unidentified
  REGION 1..1236: note = Category: MG75 effectors
  REGION 1..1236: note = Description: MG75-167 effector
  source 1..1236: note = uncultivated organism sequence
MKQLSELTGLYSLSKTLRFELKPIGKTLEHIESKGLIAQDEQRAEEYKKVKDIIDRYHKKFITMCLSNFKFEQNSLETYVALAEDTNRDEKVFDEIKKTLRKQIVETFKKGGSYSDLFKKELIQKHLPEFVSDEEEKKMIANFSKFTTYFNGFNENRKNMYSDEDKSTAIAYRLIHENLPMFVNNMKSFSRIADSDVHQHFTEIESSFSEYLGVEHLEEMFQLDYFSETLTQEQIAVYNHIIGGRALEDGTKLKGINEYVNLYNQQYKDSRLPLLKPLYKMILSDRVALPWFPSEEFASDEEMIRAINETYNTLKEVLSIDGDSSLRSLLLNISSYDIKHIYIANDLGLTDISQQMFGQYDVYTSAIKQELREKNAPTAKERRNPELYDERINKLLKSAKSFSIEHLNSLVDSEHTIQNYYKHLGAYDRNGEQRVNLFTQIEMAYVAAKEILSGKHGNISQSDAETAIIKGLLDAFKSLQRFIKPLLGNGEEADKDNEFDAKLREAWNTLDIVTPLYNKVRNWLTRKPYSTEKIKLNFENAQLLGGWDVNKEPDCTSILLRKNGLYYLAIMNKKYNHAFDIDNLPNDGKCYEKIDYKLLPGANKMLPKVFFSKSRIKEFAPSEIIVNAYKNGSHKKGANFSISDCRRLIDFFKASISKHEDWKNFPFSFSSTETYEDISGFYREVEQQGYMLGFRNVSESFIKQLVDEGKLYLFQIWNKDFSDFSKGTPNMHTLYWKMLFDEHNLANVVYKLNGQAEVFYRKSSLDVANTTIHKAHQPIMNKNQENKKRQSTFDYDIIKNRRYTVDKFQFHVPISINFKATGRDNVNDNVLDIIRNGGIKHIIGIDRGERHLLYLSLIDLKGNIVKQMTLNDIVNEYNGNTYATNYKNLLAEREGNRTEARKNWKKIENIKDIKKGYLSQVVHIISKMMVEYNAIVVLEDLNMGFMRGRQKIERSVYEQFEKMLIDKLNYYVDKQKNSDEAGGLLHALQLTSKFESFKKLGKQSGCLFYIPAWNTSKIDPVTGFVNLFDTRYTNADQARKFFSQFDSIRYNADKDWFEFAFDYNKFTAKAKDTRTKWTLCTYGTRIRTFRNPAKLNQWDNEEVVLTDEFKKAFANADINIHGNLKEAICSLQDKKYLEPLMHLMKLLLQMRNSVTNSEVDYLLSPVADENGTFYDSRVCSAYLPKDADANGAYNIARKGLWAIHQIQESPAGNRPNLAIKNKDWLNFAQQKPYMNE

SEQ ID NO: 1682 - protein, 1271 aa, unidentified
  REGION 1..1271: note = Category: MG75 effectors
  REGION 1..1271: note = Description: MG75-168 effector
  source 1..1271: note = uncultivated organism sequence
MNNNLNKFTGLYQLSRTLRFELKPIRKTRDNIERNGFLANDEHRAESYKKVKKLIDRYHKAYIDSVLGRFCLNEDVLANYYDLYMRSSKTEKEAKEFEAIQDYLRKSISAALKKDDRFKRIDKKELIREDMIAYLTDDEEKALVEEFHDFTTYFTGFHENRQNMYSAEAKSTAIAYRLIHDNLPKFIDNIAVFRQIAETSVADNFLKIYMENEEYLNVNSIEEMFDISYYSMVLTQTQIEVYNSIIGGRTLEDGTKLQGINEYINLYNQNLTDKKKRLPKLKPLFKQILSDRAQLSWLQEEFNTGADVIDAVKEYCKDYYDNIEKSIKALLKSLNDYDISKIYVPNDLQLTDISQRMFGNWSIIPNAIEHDIMYNNPRKANETEEKYAERIAKLKKQQKSFSLAYINDCLRELKDADLSTYFASLGAQNTAEKQTTSITSEIDIYYKQLRPLFNVEYPREKNLSQDKLTVMQLKDLLDAFKTLQRFVKPLLGNGDEAEKDEKFYGELMQLWEIINNLTPLYNKVRNYVTRKPFSTEKIKVNFENAQLLDGWDENKEKDNASIILRKDGIYYLGVMKKEQRKLLAKPMPSSGECYEKVVYKFFKDITTMVPKCTTQTKPVKEHFENSTEDYILFDKKSFDAPVVITKEIFDLNNVLYNGVKKFQIEYLRSTNDKKGYEHAVNTWKAFCIQFLKSYKSTSIYNLSSIEEDIEKYKDLNSFYSAVNLLLYSLTFRKVSVDYIDQLVEEDKMYLFQIYNKDFSQYSKGTPNMHTMYWKMLFDEENLKDVVYKLNGQAEVFFRKKSINVSSPTHPANKPIDNKNALNKKKQSTFEYDLIKDRRYSVDKFQFHVPLTLNFKSRGTGNINIDVREYIKESNDIHFIGIDRGERHLLYLCVIDGKGNIVEQYSLNEIVNEYKGNKYSTDYHNLLQERDKKRLEERSSWQTIEGIKELKQGYLSQVVHKISQLVVKYNAIVILEDLNMGFKRGRQKVESSIYQQFEKALIDKLNYLVDKSKAPSEEGGLLRAYQLTSKFDSFQKMGKQSGFLFYIPAWNTSKIDPVTGFVNLFDTRYDNVAKSQAFFNKFDSIRYNEKKDWFEISFDYNNFTAKAEGTKTQWTLCTYGTRIETFRNVDKNSNWDSKEVNLTEKWKSLFDDYSIKYDSNLKDAIIQQSSKEFYVRLLHLLKLTLQMRNSITGTEVDYMISPVADANGKFFDSRKSDSSLPENADANGAYNIARKGLWIAQQIREAEDLKKVKLAITNKEWLQFAQTKPYLG

SEQ ID NO: 1683 - protein, 1236 aa, unidentified
  REGION 1..1236: note = Category: MG75 effectors
  REGION 1..1236: note = Description: MG75-169 effector
  source 1..1236: note = uncultivated organism sequence
MKQLSELTGLYSLSKTLRFELKPIGKTLEHIESKGLIAQDEQRAEEYKKVKDIIDRYHKKFITMCLSDFKFEQNSLETYVALAEDTNRDEKAFDEIKKTLRKQIVETFKKGGSYSDLFKKELILKHLPEFVSDEEEKKMIANFSKFTTYFNGFNENRKNMYSDEDKSTAIAYRLIHENLPMFVNNMKSFSRIADSDVHQHFTEIESSFSEYLGVEHLEEMFQLDYFSETLTQEQIAVYNHIIGGRALEDGTKLKGINEYVNLYNQQHKDSRLPLLKPLYKMILSDRVALPWFPSEEFASDEEMIRAINETYNTLKEVLSIDGDSSLRSLLLNISSYDIKHIYIANDLGLTDISQQMFGQYDVYTSAIKQELREKNAPTAKERRNPELYDERINKLFKSARSFSIEHLNSLVDSEHTIQNYYKHLGAYDRNGEQRVNLFTQIEMAYVAAKEILSGKHGNINQSDAETAIIKGLLDAFKSMQRFIKPLLGNGEEADKDNEFDAKLREAWNTLDIVTPLYNKVRNWLTRKPYSTEKIKLNFENAQLLGGWDVNKEPDCTSILLRKNGLYYLAIMNKKYNHAFDIDNLPNDGKCYEKIDYKLLPGANKMLPKVFFSKSRIKEFAPSEIIVNAYKKGSHKKGANFSISDCRRLIDFFKASISKHEDWKNFPFSFSSTETYEDISGFYREVEQQGYMLGFRNVSESFIKQLVDEGKLYLFQIWNKDFSDFSKGTPNMHTLYWKMLFDEHNLANVVYKLNGQAEVFYRKSSLDVANTTIHKAHQPIMNKNQENKKRQSTFDYDIIKNRRYTVDKFQFHVPISINFKATGRDNVNDNVLDIIRNGGIKHIIGIDRGERHLLYISLIDLKGNIVKQMTLNDIVNEYNGNTYATNYKNLLAEREGNRTEARKNWKKIENIKDIKKGYLSQVVHIISKMMVEYNAIVVLEDLNMGFMRGRQKIERSVYEQFEKMLIDKLNYYVDKQKNSDEAGGLLHALQLTSKFESFKKLGKQSGCLFYIPAWNTSKIDPVTGFVNLFDTRYTNADQARKFFSQFDSIRYNADKDWFEFAFDYNKFTAKAKDTRTKWTLCTYGTRIRTFRNPARLNQWDNEEVVLTDEFKKAFANADVNIHGNLKEAICSLQDKKYLEPLMHLMKLLLQMRNSITNSEVDYLLSPVADENGTFYDSRVCSASLPKDADANGAYNIARKGLWAIHQIQETPAGDRPNLAIKNKDWLNFAQQKPYMNE

SEQ ID NO: 1684 - protein, 1236 aa, unidentified
  REGION 1..1236: note = Category: MG75 effectors
  REGION 1..1236: note = Description: MG75-170 effector
  source 1..1236: note = uncultivated organism sequence
MKQLSELTGLYSLSKTLRFELKPIGKTLEHIESKGLIAQDEQRAEEYKKVKDIIDRYHKKFITMCLSDFKFEQNSLETYVALAEDTNRDEKVFDEIKKTLRKQIVETFKKGGSYSDLFKKELIQKHLPEFVSDEEEKKMIANFSKFTTYFNGFNENRKNMYSDEDKSTAIAYRLIHENLPMFVNNMKSFSRIADSDVHQHFTEIESSFSEYLGVEHLEEMFQLDYFSETLTQEQIAVYNHIIGGRALEDGTKLKGINEYVNLYNQQHKDSRLPLLKPLYKMILSDRVALPWFPSEEFASDEEMIRAINETYNTLKEVLSIDGDSSLRSLLLNISSYDIKHIYIANDLGLTDISQQMFGQYDVYTSAIKQELREKNAPTAKERRNPELYDERINKLFKSAKSFSIEHLNSLVDSEHTIQNYYKHLGAYDRNGEQRVNLFTQIEMAYVAAKEILSGKHGNISQSDAETAIIKGLLDAFKSLQRFIKPLLGNGEEADKDNEFDAKLREAWNTLDIVTPLYNKVRNWLTRKPYSTEKIKLNFENAQLLGGWDVNKEPDCTSILLKKNGLYYLAIMNKKYNHAFDIDNLPNDGKCYEKIDYKLLPGANKMLPKVFFSKSRIKEFAPSEIIVNAYKKGSHKKGANFSISDCRRLIDFFKASISKHEDWKNFPFSFSSTETYEDISGFYREVEQQGYMLGFRNVSESFIKQLVDEGKLYLFQIWNKDFSDFSKGTPNMHTLYWKMLFDEHNLANVVYKLNGQAEVFYRKSSLDAANTTIHKAHQPIMNKNQENKKRQSTFDYDIIKNRRYTVDKFQFHVPISINFKATGRDNVNDNVLDIIRNGGIKHIIGIDRGERHLLYLSLIDLKGNIVKQMTLNDIVNEYNGNTYATNYKDLLAEREGNRTEARKNWKKIENIKDIKKGYLSQVVHIISKMMVEYNAIVVLEDLNMGFMRGRQKIERSVYEQFEKMLIDKLNYYVDKQKDSDEAGGLLHALQLTSKFESFKKLGKQSGCLFYIPAWNTSKIDPVTGFVNLFDTRYTNADQARKFFSQFDSIRYNADKDWFEFAFDYNKFTAKAKDTRTKWTLCTYGTRIRTFRNSERLNQWDNEEVVLTDEFKKAFANADINIHGNLKEAICSLQDKKYLEPLMHLMKLLLQMRNSITNSEVDYLLSPVADENGTFYDSRVCSASLPKDADANGAYNIARKGLWAIHQIQESPAGDRLNLAIKNKDWLNFAQQKPYMNE

SEQ ID NO: 1685 - protein, 1235 aa, unidentified
  REGION 1..1235: note = Category: MG75 effectors
  REGION 1..1235: note = Description: MG75-171 effector
  source 1..1235: note = uncultivated organism sequence
MKQLNELTGLYSLSKTLRFELKPIGKTLEHIESKGLIAQDEQRAEEYKKVKDIIDRYHKAFITMCLRDFNFDQNSLETYVALAEDSNRDEKDFDEIKKALRKQIVEAFKKGGSYSDLFKKELIQKHLPEFVKDEEEKKMVENFSKFTTYFSGFNENRKNMYSDEDKSTAIAYRLIHENLPMFIDNMKSFGKIAVSDVSQHFSEIESSFSEYLNVEHLADMFQLDYFSETLTQEQIAVYNHIVGGRTLEDGTKLQGVNEYVNLYNQQHKDNRLPLLKPLYKMILSDRVALSWLPEEFASDEEMINAINETYNTLKDVLMGNGDNSLRNLLLNIDKYDVEHIYIGNDLGLTDISQQLFGQYDVYTSAIKQELRNSVSPTAKERREPELYAERINKLFKSAKSFSILYLNSLVDSEHTIQSYYKQLGAYDRGGEQRINLFSQIEMAYVAAKDILSGKHGNISQSDADTAIIKNLLDAYKSLQRFIKPLLGDGEEADKDNEFDAKLREAWDALDIVTPLYNKVRNWLTRKPYSTEKIKLNFENAQLLGGWDVNKEPDCTSVLLRKNGFYYLAIMNKKYNHAFDIDNLPHNGKCYEKIDYKLLPGANKMLPKVFFSNSRIKEFAPSDAIVSAYRKGTHKKGSNFNISDCRRLIDFFKASIMKHEDWKKFPFSFSPTETYEDISGFYREVEQQGYMLGFRNVSESFINQLIDEGKLYLFQIWNKDFSEFSKGTPNMHTLYWKMLFDERNLANVVYKLNGQAEVFYRKRSLDVANTTIHKAHQPIVNKNQENKKLQSTFEYDIIKNRRYTVDKFQFHVPISINFKAIGRDNVNDNVLDIIRNGGIKHIIGVDRGERHLLYLSLIDLNGNIVKQMTLNDIVNEYNGNTYATNYRDLLAEREGNRTEARKNWKEIENIKDIKQGYLSQVVHIISKMMVEYDAIVVLEDLNMGFMRGRQKIERSVYEQFEKMLIDKLNYYVDKQKSVNEAGGLLHALQMTSKFESFKKLGKQSGCLFYIPAWNTSKIDPVTGFVNLFDTRYTNADQARRFFSQFDVIRYNADKDWFEFAFDYNNFTAKAEGTRTKWILCTYGTRIRTFRNPAKLNQWDNEEVVLTDEFKKAFANADIDIHGNLKEAICSLQDKKYLEPLMHLMKLLLQMRNSITNSEVDYLLSPVADENGKFYDSRTCSDSLPKDADANGAYNIARKGLWAIRQIQETPAGERSNLAIKNKEWLNFAQQKPYENE

SEQ ID NO: 1686 - protein, 967 aa, unidentified
  REGION 1..967: note = Category: MG75 effectors
  REGION 1..967: note = Description: MG75-172 effector
  source 1..967: note = uncultivated organism sequence
MSDRESVSWLPPKFDSDKDLLIKIKECYYALSEREKVFDKLESILKSLSTYDLSKIYISNDSQLSYISQKMFGRWDIISKAIREDCAKRNPQKSRESLEKFAERIDKKLKTIDSISIGDVDECLAQLGETYVKRVEDYFVAMGELEIDDEQTDTTSFKKNIEGAYESVKELLNNADNITDNNLMQNKGNVEKIKTLLDAIKDLQRFIKPLLGKGDEADKDGVFYGEFTSLWTKLDTVTPLYNMVRNYLTSKPYSTKKIKLNFENSSLMKGWDLNKEPDNTTVIFRKDGLYYLGIMGKKYNRVFVDREDLPHDGECYDKMEYKLLPGANKMLPKVFFSETGIQRFRPSEELLGKYERGTHTKGAGFDLGYCRALIDFFKKSIERHDDWKKFDFKFSDTSTYQDISEFYREVEQQGYKMSFRKVSVDYIKSLVEEGKLYLFQIYNKDFSAHSKGTPNMHTLYWKMLFDEENLKDVVYKLNGEAEVFFRKSSITVQSPTHPANSPIKNKNKDNQKKESKFEYDLIKDRRYTVDKFLFHVPITMNFKSVGVSNINQLVKRHIRSATDLHIIGIDRGERHLLYLTVIDSRGNIKEQFSLNEIVNEYNGNTYRTDYHELLDTREGERTEARRNWQTIQNIRELKEGYLSQVIHKISELAIKYNAVIVLEDLNFGFMRSRQKVEKQVYQKFEKMLIDKLNYLVDKKKPVAETGGLLRAYQLTGEFESFKTLGKQSGILFYVPAWNTSKIDPVTGFVNLFDTHYENIEKAKGFFDKFKSIRYNSDKDWFEFVVDDYTRFSPKAEGTRRDWTICTQGKRIQIYRNPQRNNEWEGREIDLTKAFKEHFEAYGVDISKDLREQINTQNKKEFFEELLRLLRLTLQMRNSMPSSDIDYLISPVADDTGCFFDSRKQAELKENAVLPMNADANGAYNIARKGLLAIRKMKQEENDSAKISLAISNKEWLKFAQTKPYLED

SEQ ID NO: 1687 - protein, 1236 aa, unidentified
  REGION 1..1236: note = Category: MG75 effectors
  REGION 1..1236: note = Description: MG75-173 effector
  source 1..1236: note = uncultivated organism sequence
MKQLSELTGLYSLSKTLRFELKPIGKTLEHIESKGLIAQDEQRAEEYKKVKDIIDRYHKKFITMCLSDFKFEQNSLETYVALAEDTNRDEKSFDEIKKTLRKQIVETFKKGGSYSDLFKKELIQKHLPEIVTDEEEKKMIANFSKFTTYFNGFNENRKNMYSDEDKSTAIAYRLIHENLPMFVDNMKSFSRIADSDVHQHFTEIESSFSEYLGVEHLEGMFQLDYFSETLTQEQIAVYNHIIGGRVLEDGTKLKGINEYVNLYNQQHKDSRLPLLKPLYKMILSDRVALPWFPSEEFASDEEMIGAINETYNTLKDVLSIDGDSSLRCLLLNISSYDIKHIYIANDLGLTDISQQMFGQYDVYTSAIKQELRTTNAPTAKERRTPELYDERINKLFKSAKSFSIEYLNSLVDSEHTIQNYYKHLGAYDRNGEQRVNLFTQIEMAYVAAKEILSGKHGNISQSDAETAIIKGLLDAFKSLQRFIKPLLGNGEEADKDNEFDAKLREAWNTLDIVTPLYNKVRNWLTRKPYSTEKIKLNFENAQLLGGWDVNKEPDCTSILLRKNGLYYLAIMNKKYNHAFDIDNLPNDGECYEKIDYKLLPGANKMLPKVFFSKSRIKEFAPSEIIVNAYKKGSHKKGANFSISDCRRLIDFFKASISKHEDWKNFPFSFSSTETYEDISGFYREVEQQGYMLGFRNVSESFIKQLVDEGKLYLFQIWNKDFSDFSKGTPNMHTLYWKMLFDEHNLANVVYKLNGQAEVFYRKRSLDVANTTIHKAHQPIMNKNQENKKRQSTFDYDIIKNRRYTVDKFQFHVPISINFKATGRDNVNDNVLDIIRNGGIKHIIGIDRGERHLLYLSLIDLKGNIVKQMTLNDIVNEYNGNTYATNYKNLLAEREGNRTEARKNWKKIENIKDIKKGYLSQVVHIISKMMVEYNAIVVLEDLNMGFMRGRQKIERSVYEQFEKMLIDKLNYYVDKQKNSDEAGGLLHALQLTSKFESFKKLGKQSGCLFYIPAWNTSKIDPVTGFVNLFDTRYTNADQARKFFFQFDSIRYNADKDWFEFAFDYNKFTAKAKDTRTKWTLCTYGTRIRTFRNPARLNQWDNEEVVLTDEFKKAFANADINIHGNLKEAICSLQDKKYLEPLMHLMKLLLQMRNSITNSEVDYLLSPVADENGTFYDSRVCSASLPKDADANGAYNIARKGLWAIHQIQESPAGDRPNLAIKNKDWLNFAQQKPYMNE

SEQ ID NO: 1688 - protein, 1237 aa, unidentified
  REGION 1..1237: note = Category: MG75 effectors
  REGION 1..1237: note = Description: MG75-174 effector
  source 1..1237: note = uncultivated organism sequence
MHTMKKINELTALYPLSKTLRFELKPIGKTLDHIEQKGLIVQDEQRAEEYKQVKNIIDSYHKEFITMCLKGLKLNMIYLERYESLARDVHRDEAEFDKVKAALRKQIVEAFKQGGSYNDLFKKELIQKHLPEFVESEEEKKMVANFSKFTTYFTGFYENRKNMYSDEEKSTAIAYRLIHENLPLFLDNMRSFRKIAESEVGEHFANIEVCFEEYLNVEHLAEMFELDYFSDTLTQEQIAVYNSVIGGRTLDDGTKIQGINEYVNLYNQQHKEARLPLLKPLYKMILSDRVALSWLPENPFESDEEMVEAIKEMCQSLKEVLMGNDGLRNLLLNIDLYDIEHIYIANDLGLTDISQQMFGQYDVYASAIKQELRQGVKQSPKERREPELFEERINRLYKSAKSFSIAYLNSHTDANHTIESYFKQLGAYDREGEQRINLFTQIEMAQIEATDIFAGKHGNISQSDKEIAILKGLLDAYKSLQHFVKPLLGHGDEADKDNEFDAKLREAWNALDIVTPLYNKVRNWLTRKPYSVEKIKLNFENAQLLGGWDVNKEPDCTSVLLRKDGFYYLAIMDKKSNHAFDSDELPCDGKCYEKIDYKLLPGANKMLPKVFFSKSRIDEFAPSKEIVEAYKNGTHKKGKDFNLAHCRRLIDFFKRSITKHEDWKNFPFVFSPTESYEDISGFYREVEQQGYMLSFRKVSESFINQLVDEGKLYLFKIWNKDFSEYSKGMPNMHTLYWKMLFNEQNLADTVYKLNGQAEVFYRKRSLDVADTTVHRASQPLVNKNALNKKRHSTFDYDIVKDRRYTVDKFQFHVPMTMNFKAVGRDNINSEVLNIIRNDGIKHIIGIDRGERHLLYLSLIDLKGNIVKQMTLNDIVNEYNGNTYATNYRDLLAEREGNRTEARRNWKKIENIKEIKQGYLSQVVHIISKMMVEYDAIVVLEDLNMGFMRGRQKIERSVYEQFEKMLIDKLNYYVDKQKRIDEAGGLLHALQLTSKFESFKKLGKQSGCLFYIPAWNTSKIDPVTGFVNLFDTRYVNADKAREFFSKFDSIRYNDAKNWFEFAFDYNKFTEKAKGTRTRWTLCTWGTRIRTFRNPAKLNQWDNEEVVLTDVFKKAFDEAGIDIHSNLKEAICTLTEKKHLESLMHLMKLLLQMRNSITNSEIDYLLSPVADENGHFYDSRTCDDTLPKDADANGAYNIARKGLWAIRTIQENSETERPNLALKNQDWLRFAQQKPYLND

SEQ ID NO: 1689 - protein, 1142 aa, unidentified
  REGION 1..1142: note = Category: MG75 effectors
  REGION 1..1142: note = Description: MG75-175 effector
  source 1..1142: note = uncultivated organism sequence
MKKFLDNDDDKALLDEFYEFTTYFTGFHENRKNMYSDEAKSTAIAYRLIHDNLPKFIDNMAVFRKIASTSVAEKFSTIYKAFEEYLNVNSIDEMFSLDYYNIVLTQSQIEVYNSIIGGRTLEDGTKIQGINEYINLYNQQKTNKKERLPKLKPLFKQILSDRVQLSWLQEEFNTGTDVLNAVKEYCTSYFDNVEEAVKVLLTGIGDYDLSKIYITNDLAITDVSQRMFGEWCIIPNAIEQRLRNDNPQKAKETEEKYSDRISKLKKLPKSFSLGYINECISELKGVDIADYYAALGAINTESKQEPSIPTKIQVHYNALKQILDTDYPREKNLSQDKLTVMQLKDLLDDFKALQRFIKPLLGNGDEADKDEKFYGELMQLWEVIDSITPLYNKVRNYSTRKPFSTEKIKVNFENAQLLDGWDENKESTNASIILRKDGMYYLGIMKKEHRNILNQPMPSDGDCYDKVVYKFFKDITTMVPKCTTQMKSVKEHFTNSNDDYTLFDKDKFLAPVVITKEIFDLNNVLYDGVKKFQVGYLNNTGDSQGYNHAVAIWKSFCLQFLKTYKSTSIYNFSSIEKNFDRYTDLNSFYGAVNLLLYSLTYRKVSVDYIQQLVDDDKMYLFRIYNKDFSPYSKGTPNMHTLYWKMLFDDCNLSDVVYKLNGQAEVFFRKKSINYQRPTHPANKPIDNKNVNNPKKQSTFDYDLIKDRRYTLDKFMFHVPITLNFKGMGSGDINMQVREYIKATDDLHFIGIDRGERHLLYICVINCKGDIVEQYSLNEIVNNYKGIDYSTDYHALLSDRDKKRKEERSSWQTIEGIKELKAGYLSQVIHKITQLMVKYNAIVLLEDLNMGFKRGRQKVESSVYQQFEKALIEKLNYLVDKNKDVNEIGGLLHAYQLTNDTKLQNKNGKQDGFLFYVPAWNTSKIDPVTGFVNLLDTRYENVATAQAFFNKFDSIRYNKEFDRFEFKFDYANFTAKAEDTRTQWTLCTCGTRVETFRNAEKNSNWDSREIDLTSEWKSLFAKHNISLDTNLKEAILLQSNKTFYTDILHLMKLTLQMRNSVTGTDIDYMVSPVSNECGEFFDSRYAKDGLPVNADANGAYNIARKGLWLAQQIKNASNLSEVKLAITNKEWLRFAQSKPYLND

SEQ ID NO: 1690 - protein, 1227 aa, unidentified
  REGION 1..1227: note = Category: MG75 effectors
  REGION 1..1227: note = Description: MG75-176 effector
  source 1..1227: note = uncultivated organism sequence
MKNLYSDLHNLYGLSKTLRFELQPVGRTKENFENYILDSDEEKSEKFKKVKAYCDEVHKNFIKNCLEKIDLADIKPLLKRYYELFLINNRSEQEDKEFEKIQENLCKKISGNFKNNDLYKGLFEKDMIKKYLPEYFKNDKEKLKEISLFFDFTTYFTGYHKNRQNMYSEENKSTAISFRLIKQNLPTFIKNMQNFKKIQNVIPTIGKTLTSKLGINIEYLFSNVEVYAECLTQKAIDMYNCAIGGKTLDNGEKIQGINEFINLYNQQNPNKKLPKLKFLYKQILSDNTSVSFKIDKIEDDKELIDLINSYYEKLKPVIESIDKVSGETELVLAIKNLSNYDLSRIWINQDDLTNVSQQVYGDWSYITHLLEEEYNSQNPKGAKQSIEKYNEKRSKDLKKIKEYSFAHLNSLVAQNDDCAKNKLYTYFVENLLKIITDIKSSQLQCNEILTRNHEENNKTLLGDFSSISLIKDFLENMKKLQNLVKTFMPKTIGIETDDLFYNALNYEILSEIIPVYNKVRNYVTQKSYSVEKFPLTFHCPTLLDGWDLNKEESNLSILFEKDGFYYLGIMNKKDNKIFKNIQPTKENEEVYRKIEYKLLPGPNKMLPKVFFSESRITEFNPTNELLSKYKKGCHKKGIDFDINFCRDLIDFYKKSLSIHQDWSQFNFKFDDTNKYQDISKFYRQVEEQGYRISTTNISEKYIDSLVEDGKLFLFKIYNKDFSEYSKGTPNLHTLYWKALFDEDNLKNVVYKLNGGAEIFYRKKSIEYKITHPKNQLIKNKNELNDKKESIFDYDLIKNKRFTMDKFLFHVPITLNFKSKNLEYINELVNLKIKENNNINVIGIDRGERNLIYLTVVNSKGELLEQLSLNEIVNEYNDKTYRTNYHDLLNKKEQERNEARKSWGAIKNIKELKEGYMSQVIHKITDLMIKYNAIIVLEDLNSGFKNSRKKVEKQVYDKFETMVINKLSYFVDKKQGKFDEGGLLNAYQLVNKDSKGKQSGVLFYIPAWNTSKIDPVTGFVNLFCIKNMSIEKAKEFFNKFENIKYNKEENFFEFDFDYSKFSDKACGIRKDWTICTYGERIKTFRNPSKNNQWDNEEIKLTEKFKELFEKYSINLLNIKNGIQNQTEKKFFDSLIGLFKLTLQMRNSVTNTDIDYILSPIKDKNGNFYDSRKNIKTLPKDADANGAYNIARKGLMLIEQIKETENLSKLKLKSITNEQWLTYVQEKNR

SEQ ID NO: 1691 - protein, 1245 aa, unidentified
  REGION 1..1245: note = Category: MG75 effectors
  REGION 1..1245: note = Description: MG75-177 effector
  source 1..1245: note = uncultivated organism sequence
MAENRKIDNLQNLYPNTKTIVNKLIPQGATLRNFENNHLLENDTERKDNYQIVKKLIDEYHKFFIEQSLSNVTYIDGLDEYIDVYFNSSDDKNELDSLEDKLRKNIANLFTKSSKYSDMFKKEMITKLLPEFLEATNNLEYLDIVNSFAEFTTYFKGFFDNRKNMYTSEAQSTGIAYRCINDNLPKFLDNVKSFNRAKDKLSEKNLTDLNNDFEGLCGTTTENVFSADYYVFVLAQSGIDRYNEIIGGYTTSDGTKIKGVNEYINLYNQRCQNKSDRIPNMKPLFKQILSDRQTVSFIPDSFSDDNEVLKAVYSAYNDNDTELEYKSIKETVDKIKNLFIDFEEPQLNGIYIKNGLPVTDLSNGIFKNWSMIRNLWNDDYDSKHKPAKVKDIEKYEDKRSSQYRSNKSLSLGFLQELVNKSENDEIGSKSISEYYREKTLELTENIQRTYFKAESLLESKYDIKKKNLKSDEESIALIKDFLDSIKELEKLLKPLCGTGKEQDKNEVFYGEFIPLFNYLCNIDSLYNKVRNYVTQKPYSTEKIKLNFENPQFLKGWDRNKEKDYRSVLLIKDQEYYLGVMNKGDSKIFENLSFDGEKECYTKVVCKLLPGPNKMLPKVFFAKSNIDFFAPSDEIQTLYKAGTFTKGKSFNIDDCHKLIDFYKQSLYKHPDWSTFNFEFRETSLYNDISEFYNDIHNQGYKISFDSVPESYINELVNKGKLYLFKIYNKDFSKYSKGTPNLHTLYFKMLFDERNLKDVVYKLNGRAEMFYRPASIMENDIISHPANQPIKNKNPHSEKTHSTFEYDLIKDKRYTKAQFSLHIPITLNFKASGAGSINDKVNELLKNCDDNYVIGIDRGERHLLYLTVINGRGEVVEQYSLNTIINEYNNKTHKVDYHNLLSEKETKRKEARQNWTAIENIKELKEGYISQVVHKICELVVKYDAVICMEDLNAGFKQGRTKFEKQVYQKFEKMLIDKLNYFVDKKKAPEENGGLLKAYQLTNKFDSFKKMGRQNGIVFYVPAWLTSKIDPSTGFVDLLKPKYKSVEDSKNFFSRFDSIRYNSDEDWFEFEFDYDNFPRGSASFRKRWTVCTFGKRIRTYRNPEKNSEWDNEEIDITASFKELFNNYSIDYIRNNLKTEIQNQTQKDFFQKLIKLFALTVQMRNSITNTDIDYLISPVMDKNGNFYDSRNYDNDSKLPANADANGAYNIARKGLWAIEQIKNTDDGKRPKLAISNKEWLKLAQSADM

SEQ ID NO: 1692 - protein, 1274 aa, unidentified
  REGION 1..1274: note = Category: MG75 effectors
  REGION 1..1274: note = Description: MG75-178 effector
  source 1..1274: note = uncultivated organism sequence
MNNNLNKFTGLYQLSKTLRFELKPIGKTLDNIQNNGFIANDEHRAESYKLVKKLIDNYHKDYIESVLDNFELNKEVLYSLYELYTCTNKTEKETKQYEAAQDSLRKAISSALKKDERFKHIDKKELIREDMLNYLDNEQDKALVNEFHDFTTYFTGFNENRQNMYAAEAKSTAIAYRLIHENLPKFIDNIAIFKKIAETSVADNFPALYQHYEEYLNVNDIGEIFELDYYNIVLTQKQIEVYNNIIGGRTLSDDTKIKGINEYVNEYNQKQKDKKDRLPKLKPLFKQILSDRVQLSWLQEEFQTGADVLNAIKNYCDTYFADIHESIKALLTSLKEYDLSKIYIPNDLQLTDISQQMFGNWSIIPNAIEQDIKNNNPRKAKEDEEKYSQRIDKIKKQAKSYSLAYINACIKELNNADVATHFASLGAIDNNEKQKASITADIVVHYNQLKPLFGVEYPKEKNLSQDKLTVMQIKDLLDDFKSLQRFVKPLLGNGDEAEKDEKFYGELMQLWEVINNITHLYNKVRNYSTRKPYSTDKIKINFENAQLLDGWDENKEKTNASIILRKNGLYYLGIMKKEHRKLLDKPMPSSGECYEKVVYKFFKDITTMVPKCTTQTKAVATHFKDSGEDYILFDKKNFNEPIVITKEIYELNNVLYDGVKKFQIEYLRTTNDKKGYEHAVNIWKNFCMQFLKAYKSTSIYDLSSIEKNIGNYGDLNSFYSAVNLLLYSLTFRSVSVDYINMLVDEDKMYLFQIYNKDFSTFSKGTPNMHTLYWKMLFDPQNLANVVYKLNGQAEVFFRKKSITIAKPTHPANKPIDNKNPANGKKQSIFDYDLIKDRRYTVDKFQFHVPITINFKSNGSDNINMMVKEHIKTSDDMHYIGIDRGERHLLYLCVIDNKGNIVEQYSLNNIKNEHNGNNYDTDYRNLLQERDKKRQEERSSWQTIEGIKELKQGYLSQVIHKITQLMVKYNAIVVLEDLNMGFKRGRQKVESSVYQQFEKALIDKLNYLVDKKKAPTEPGGLLHAYQLTSKFDSFQKMGKQSGFLFYIPAWNTSKIDPVTGFANLFDSRDTRYENIAKAQAFFNKFDSIRYNEKKDWFELSFDYNNFTSKAEGTKSKWTICTQGTRIETFRNTEKNSNWDSKEIQLTDEWKKLFTEYSIPFKSNLKDAIAQQSNKDFYTKLLSLLKLTLQMRNSITGTDVDYMISPVANVKGEFFDSRNSNATLPENADANGAYNIARKGLWIAKQIKEAEDLSKVKLAMSNKDWLQFAQTKPYLV

SEQ ID NO: 1693 - protein, 1286 aa, unidentified
  REGION 1..1286: note = Category: MG75 effectors
  REGION 1..1286: note = Description: MG75-179 effector
  source 1..1286: note = uncultivated organism sequence
MNKSILSRFTNLYQVSKTLRFELQPVGKTKENIEENGILLRDEKRAADCKIVKEIIDEYHKQYIENRLKDFKLPLNSEGKHDSLEEYQALYEMSKRSEADEATFKEVKDNLRSIIAERLTNAPTYKCIFGKELIRKELVDFLEDENAKEIVSQFADFTTYFGGFHKNRENMYSGEEKSTAIAYRLIHQNLPRFMDNMKAFERIAATSVAEHFVDIFEGWEEYLNVGSIEEIFRLDYFSDALTQQHIEVYNYIIGKKVLEDGSEIKGINEYVNLYNQQQKDKKLRLPLLVPLYKQILSDREKLSWIAEEFDSDDKMLAAITETYSHLHDLLMGEENESLRSLLVHLKDFDLSRINITNDLSLTDISQHLFGRYDVFTSGIKDELRAITPRKRNETDEQLGDRISKIFKTQQSFSIAFLNTLSQPALEGGNPRKIEDYFMALGAVNTETTQKENLFAQIEYAYEDVRAVLQMKETDNMLSQNKQAVAKIKAFLDALKGLQHFVKPLLGSGEEEEKDELFYGSFQMMWDELDAITPLYNKVRNWLTRKPFSTEKIKLNFDNAQLLEGWDENKETTNASIILRKDGFYYLGIIRKDCRKLLGAPMPSDGECYDKVVYKFFKDITTMVPKCTTQKKDVVAHFAHSKEDYILFDKKTFNAPVTITKEVYDLNNVLYNGIKKFQIEYLRSTGDKVGYEHAVSTWKSFCMSFLKAYKSTSIYNLALVEQHINSYNDLSSFYNAVNLLLYSLTYRKVSVNFIHSLVDEGKLYLFRIWNKDFSEFSKGTPNLHTLYWKMLFDERNLADVVYKLNGQAEVFYRKSSIKPENRIIHLANKPIANKNELNRKHESTFKYDIIKDRRYTFDKFQFHVPITINFKANGREDINPAVQDCIRRGGFTHVIGIDRGERHLLYLSLIDMQGNIVKQMTLNEIINEYKGNTYKSNYHDLLAKREGERTEARRSWDTIENIKEMKEGYLSQVVHIISKMMVEYNAIVVLEDLNTGFMRSRQKIERQVYEKFEKMLIDKLNCYIDKRADMSDIAGLLHPLQLTCEAKKWKRSHQCGCLFYIPAWNTSKIDPVTGFVNLFDTRYDNMAKAKAFFGKFKSIRYNVSKDWFEFAFDYNNFTTMAEGTRTDWTVCTYGERILTFRNPDKNLQWDDKEVVLTGAFKQLFEKHDIDILDNLKEAICMQTDAQFFKDLLGLMKLLLQMRNSKTGSEVDYLLSPVADEQGNFFDSRKGNATLPDNADANGAYNIARKGLWAIHKIQETAENKKPSLAISNKEWLQFAQTKPYLAD

SEQ ID NO: 1694 - protein, 1236 aa, unidentified
  REGION 1..1236: note = Category: MG75 effectors
  REGION 1..1236: note = Description: MG75-180 effector
  source 1..1236: note = uncultivated organism sequence
MKQLSELTGLYSLSKTLRFELKPIGKTLEHIESKGLIAQDEQRAEEYKKVKDIIDRYHKKFITMCLSDFKFEQNSLETYVALAEDTNRDEKSFDEIKKTLRKQIVETFKKGGSYSDLFKKELIQKHLPEIVTDEEEKKMIANFSKFTTYFNGFNENRKNMYSDEDKSTAIAYRLIHENLPMFVDNMKSFSRIADSDVHQHFTEIESSFSEYLGVEHLEGMFQLDYFSETLTQEQIAVYNHIIGGRVLEDGTKLKGINEYVNLYNQQHKDSRLPLLKPLYKMILSDRVALPWFPSEEFASDEEMIGAINETYNTLKEVLSIDGDSSLRCLLLNISSYDIKHIYIANDLGLTDISQQMFGQYDVYTSAIKQELRTTNAPTAKERRTPELYDERINKLFKSAKSFSIEYLNSLVDSEHTIQNYYKHLGAYDRNGEQRVNLFTQIEMAYVAAKEILSGKHGNISQSDAETAIIKGLLDAFKSLQRFIKPLLGNGEEADKDNEFDAKLREAWNTLDIVTPLYNKVRNWLTRKPYSTEKIKLNFENAQLLGGWDVNKEPDCTSILLRKNGLYYLAIMNKKYNHAFDIDNLPNDGKCYEKIDYKLLPGANKMLPKVFFSKSRIKEFAPSEIIVNAYKKGSHKKGANFSISDCRRLIDFFKASISKHEDWKNFPFSFSSTETYEDISGFYREVEQQGYMLGFRNVSESFIKQLVDEGKLYLFQIWNKDFSDFSKGTPNMHTLYWKMLFDEHNLANVVYKLNGQAEVFYRKRSLDVANTTIHKAHQPIMNKNQENKKRQSTFDYDIIKNRRYTVDKFQFHVPISINFKATGRDNVNDNVLDIIRNGGIKHIIGIDRGERHLLYLSLIDLKGNIVKQMTLNDIVNEYNGNTYATNYKNLLAEREGNRTEARKNWKKIENIKDIKKGYLSQVVHIISKMMVEYNAIVVLEDLNMGFMRGRQKIERSVYEQFEKMLIDKLNYYVDKQKNSDEAGGLLHALQLTSKFESFKKLGKQSGCLFYIPAWNTSKIDPVTGFVNLFDTRYTNADQARKFFSQFDSIRYNADKDWFEFAFDYNKITAKAKDTRTKWTLCTYGTRIRTFRNPARLNQWDNEEVVLTDEFKKAFANADINIHGNLKEAICSLQDKKYLEPLMHLMKLLLQMRNSITNSEVDYLLSPVADENGTFYDSRVCSVSLPKDADANGAYNIARKGLWAIHQIQESPAGDRPNLAIKNKDWLNFAQQKPYMNE

SEQ ID NO: 1695 - protein, 1283 aa, unidentified
  REGION 1..1283: note = Category: MG75 effectors
  REGION 1..1283: note = Description: MG75-181 effector
  source 1..1283: note = uncultivated organism sequence
MKQFTNLYQVTKTPRFELQPIGRTKEHIERNGILQRDEQRAEDYKKVKQLIDDYHKQFIKDRLWNFQLPLANEGQRNSLEEYQELYELSKRDDAQEKIFTEIKDNLRSIIAKRLTERGSAYDRIFKKELIREDLIDFLEKEEDKDVVRQFADFTTYFTGFNENRMNMYSDEEKSTAIAYRLIHQNLPKFMDNMKSFAKILQTPVAEHFMDIYKGWEEYLNVENLEDVFKLSYFSETLTQPHIEVYNYIIGKKVLEDGTEIKGINEYVNLYNQQLKDKEQRLPLLVPLYKQILSDREKLSWMAEEFDSDEKMLAAINESYDHLHDLLVGDENESLRSLLIHLKDFDLTQINISNDLSITDISQHLFGQYDVFTKGIKEELKLITRRKKGETEEELDERVSKIFKTQKSFSIDLLNHLPQPVMDDGRPRKVEDYFMSLGAIDTETTQKENLFAQIENAYEAVRPILQLTGTSETLSQNKSAVAKIKTLLDAFKDLQHFIKPLLGSGEENEKDELFYGAFQMIWDELDTITPLYNKVRNWLTRKPYSIEKIKLNFDNAQLLDGWDENKETANAAIILRKDAMFYLGIMNKEDRKLLANPMPTDGDCYDKVVYKFFKDITTMVPKCTTQMKAVSEHFKQSSVDYILFDKKKYHEPVIITKEIYELNNVLYKGAKKFQIEYLRTTRDTAGYEHAVATWKKFCIQFLKAYISTSIYDLSSVEQNIDNYHDLNSFYGAVNLLLYNLSYKKVSVNYINKLVDEGKLFLFRIWNKDFSEYSKGTPNLHTLYWRMLFDKRNLADVVYKLNGQAEVFYRKSSIKDENRIVHPAHKAIDNKNALNKKQTSTFEYDIIKDRRYTVDKFQFHVPITINFKAMGRTNINPIVQETIRRGGFTHVIGIDRGERHLLYLSLIDLHGNIVKQMTLNEIINEYNGQEHKTNYHSLLVRREGERTAARRSWDTIESIKELKEGYLSQVIHIISKLMVEYNAIVVLEDLNMGFMRGRQKIERQVYEKFEKMLIDKLNCYIDKQADPQSIGGLLHPIQLANKFESFRKLGKQCGCLFYIPAWNTSKIDPVTGFVNLFDTRYETREKARLFFSRFQRIKFNKDKDWFEFTFDYNDFTTKAEGTCTLWTLCSYGTRIRNFRNPLLNNQWDDEEIVLTDEFKQLFDKYGLDLQGNLKESINAQTDAQFFKELMGLMKLLLQMRNSKTNSEVDYLLSPVADGNNHFFDSRDGKLNLPDNADANGAYNIARKGLWVIRRIQETPEGEKLSLAISNKEWLQFAQTKPYLRD

SEQ ID NO: 1696 - protein, 1239 aa, unidentified
  REGION 1..1239: note = Category: MG75 effectors
  REGION 1..1239: note = Description: MG75-182 effector
  source 1..1239: note = uncultivated organism sequence
MEEFNQFTGLYPLSKTLRFELKPVGKTLENIVKHGLLEEDKHRADSYEKVKKIIDEYHKVFIDNALTDFKLKNGESKKNETLDQYFALYNKREKDENDKKDFSEIQKSLRKQIVDSLTGNEKYKNIFKKELIKQDLLEFCNEDDRKYVEEFKDFTTYFNGFNENRANMYSAEEQSTAIAYRLIHDNLPKFVDNINTFSKVLAVPEINEKLPKLYKDFESYLNVESISEMFQLDYFNMVLTQKQIDVYNAIIGGKDDGNEKIQGLNEFINLYNQKHKDTRLPKLKVLYKQILSDRNAISWLPEEFKDDNEVLIAINSCYKDLYEHVLGEKNLKILLENISQYQLDGIFIKNDLQLPNISQKLLGNWSVIQNAIIEDSKSFIKKKGKESENEYESRLNEIYKKQNSFSVAYINECLKNAGKEIGVENYFSALGAVNTETEQRENLFARISNAYSIVSDLLNAQYPEGRNLSQDKQNVAKIKDLLDALKALQHFIKPLLGNGDESGKDEKFYGEFTALWDELNKITSLYNMVRNYMTRKPYSEEKIKLNFQNSTLMDGWDYNKERDNTAVILRKDGLYYLGIMNKKYNKIFEPENVKHDGECFEKMIYKLLPGANKMLPKVFFSKSRIDEFKPSKEIVENYKNDTHKKGEKFNIEDCHRLIDFFKSSIEKHSDWSKFNFKFSDTSKYADLSGFYREVEHQGYKVTFVNISKDYVNSLVDEGKLYLFQIYNKDFSPYSKGTPNMHTLYWKMLFDERNLENVVYKLNGQAEIFYRKKSINYDRPTHPAHQPINNKNIQNKKKESLFSYDLIKNRRYTVDKFFFHVPITINFKGVDSENINDQVRRYLQKAKDTHVIGIDRGERNLLYLVVVDNKGNIVEQYSLNNIVNEYKGNTYSTDYHALLDAKEKERELARESWQTIENIKELKEGYLSQVIHKITELMIKYHAIVVLEDLNMGFKRGRQKVEKQVYQKFEKQLIDKLNYVVDKHKAPEADGGLLHAYQLTSKFDSFQKLGKQSGFLFYIPAWNTSKIDPVTGFVNLFDTRYVNIEKAKAFFCKFDIIRYNQDKGWFEFDFDYKNFTSKADESRTKWTLCTFGTRVETFRNKEKNSQWDNRNVDLTKAFKELFSKYNIDLSSNIKEAICIQTEKDFFESLLHLLKLTLQMRNSVTGTEIDYIISPVANENGEFFDSRACSDKLPKDADANGAYNIARKGLMLIEQIKKAKDLQKLKFDISNKSWLQYVQNN

SEQ ID NO: 1697 - protein, 1274 aa, unidentified
  REGION 1..1274: note = Category: MG75 effectors
  REGION 1..1274: note = Description: MG75-183 effector
  source 1..1274: note = uncultivated organism sequence
MNNNLNKFTGLYQLSKTLRFELKPIGKTLDNIQNNGFIANDEHRAESYKQVKKLIDNYHKDYIESVLDNFELNKEVLYSLYELYTCTNKTEKETKQYEAAQDSLRKAISSALKKDERFKRIDKKELIREDMLNYLDNEQDKALVNEFHDFTTYFTGFNENRQNMYAAEAKSTAIAYRLIHENLPKFIDNIAIFKKIAETSVADNFPALYQHYEEYLNVNDIGEIFELDYYNIVLTQKQIEVYNNIIGGRTLSDDTKIKGINEYVNEYNQKQKDKKDRLPKLKPLFKQILSDRVQLSWLQEEFQTGADVLNAIKNYCDTYFADIHESIKALLTSLKEYDLSKIYIPNDLQLTDISQQMFGNWSIIPNAIEQDIKNNNPRKAKEDEEKYSQRIDKIKKQAKSYSLAYINACIKELNNADVATHFASLGAIDNNEKQKASITADIVVHYNQLKPLFGVEYPKEKNLSQDKLTIMQIKDLLDDFKSLQRFVKPLLGNGDEAEKDEKFYGELMQLWEVINNITHLYNKVRNYSTRKPYSTDKIKVNFENAQLLDGWDENKENTNASIILRKNGLYYLGIMKKEHRKLLDKPMPSSGECYEKVVYKFFKDITTMVPKCTTQTKAVATHFKDSGEDYILFDKKNFNEPIVITKEIYELNNVLYDGVKKFQIEYLRTTNDKKGYEHAVNIWKNFCMQFLKAYKSTSIYDLSSIEKNIGNYGDLNSFYSAVNLLLYSLTFRSVSVDYINMLVDEDKMYLFQIYNKDFSTFSKCTPNMHTLYWKMLFDPQNLANVVYKLNGQAEVFFRKKSITIAKPTHPANKPIDNKNPANGKKQSLFDYDLIKDRRYTVDKFQFHVPITINFKSNGSDNINMMVKEHIKTSDDMHYIGIDRGERHLLYLCVIDSKGNIVEQYSLNNIKNEHNGNNYDTDYRNLLQERDKKRKEERSSWQTIEGIKELKQGYLSQVIHKITQLMVKYNAIVVLEDLNMGFKRGRQKVESSVYQQFEKALIDKLNYLVDKKKAPTEPGGLLHAYQLTSKFDSFQKMGKQSGFLFYIPAWNTSKIDPVTGFANLFDSRDTRYENIAKAQAFFNKFDSIRYNEKKDWFELSFDYNNFTSKAEGTQTKWTICTQGTRIETFRNTEKNSNWDSKEVQLTDEWKKLFTEYSIPFKSNLKDAIAQQSNKDFYTKLLSLLKLTLQMRNSITGTDVDYMISPVANVKGEFFDSRNSNATLPENADANGAYNIARKGLWISKQIKEAEDLSKVKLAMSNKDWLQFAQTKPYLE

SEQ ID NO: 1698 - protein, 1274 aa, unidentified
  REGION 1..1274: note = Category: MG75 effectors
  REGION 1..1274: note = Description: MG75-184 effector
  source 1..1274: note = uncultivated organism sequence
MNNNLNKFTGLYQLSKTLRFELKPIGKTLDNIQNNGFIANDEHRAESYKQVKKLIDNYHKDYIESVLDNFELNKEVLYSLYELYTCTNKTEKETKQYEAAQDSLRKAISSALKKDERFKRIDKKELIREDMLNYLDNEQDKALVNEFHDFTTYFTGFNENRQNMYAAEAKSTAIAYRLIHENLPKFIDNIAIFKKIAETSVADNFPALYQHYEEYLNVNDIGEIFELDYYNIVLTQKQIEVYNNIIGGRTLSDDTKIKGINEYVNEYNQKQKDKKDRLPKLKPLFKQILSDRVQLSWLQEEFQTGADVLNAIKNYCDTYFADIHESIKALLTSLKEYDLSKIYIPNDLQLTDISQQMFGNWSIIPNAIEQDIKNNNPRKAKEDEEKYSQRIDKIKKQAKSYSLTYINACIKELNNADVATHFASLGAIDNSEKQKASITADIVVHYNQLKPLFSVDYPKEKNLSQDKLTVMQIKDLLDDFKSLQRFVKPLLGNGDEAEKDEKFYGELMQLWEVINNITHLYNKVRNYSTRKPYSTDKIKVNFENAQLLDGWDENKENTNASIILRKNGLYYLGIMKKEHRKLLDKPMPSSGECYEKVVYKFFKDITTMVPKCTTQTKAVATHFRDSDEDYILFDKKNFNEPIVITKEIYELNNVLYDGVKKFQIEYLRTTNDKKGYEHAVNIWKNFCMQFLKAYKSTSIYDLSSIEKNIGNYGDLNSFYSAVNLLLYSLTFRSVSVDYINMLVDEDKMYLFQIYNKDFSTFSKGTPNMHTLYWKMLFDPQNLANVVYKLNGQAEVFFRKKSITIAKPTHPANKPIDNKNPANGKKQSLFDYDLIKDRRYTVDKFQFHVPITINFKSNGSDNINMMVKEHIKTSDDMHYIGIDRGERHLLYLCVIDSKGNIVEQYSLNNIKNEHNGNNYDTDYRNLLQERDKKRQEERSSWQTIEGIKELKQGYLSQVIHKITQLMVKYNAIVVLEDLNMGFKRGRQKVESSVYQQFEKALIDKLNYLVDKKKAPTEPGGLLHAYQLTSKFDSFQKMGKQSGFLFYIPAWNTSKIDPVTGFANLFDSRDTRYENIAKAQAFFNKFDSIRYNEKKDWFELSFDFNNFTSKAEGTKTKWTICTQGTRIETFRNAEKNSNWDSKEVQLTDEWKKLFTEYSIPFKSNLKDAIAQQSNKDFYTKLLSLLKLTLQMRNSIIGTDVDYMISPVANAKGEFFDSRNSNATLPENADANGAYNIARKGLWIAKQIKESEDISKVKLAMSNKEWLQFAQTKSYLE

SEQ ID NO: 1699 - protein, 1298 aa, unidentified
  REGION 1..1298: note = Category: MG75 effectors
  REGION 1..1298: note = Description: MG75-185 effector
  source 1..1298: note = uncultivated organism sequence
MNKSILSRFTNLYQVSKTLRFELQPVGKTKENIEENGILLRDEKRAADCKIVKEIIDEYHKQYIENRLKDFKLPLNSEGKHDSLEEYQALYEMSKRSEADEAAFKEVKDNLRSIIAERLTNAPTYKCIFGKELIRKELVDFLENENTKEIVEFLENEKAKEIVSQFADFTTYFGGFHKNRENMYSGEEKSTAIAYRLIHQNLPRFMDNMKAFERIAATSVAEHFVDIFEGWEEYLNVGSIAEIFRLDYFSDALTQQHIEVYNYIIGKKVLEDGSEIKGINEYVNLYNQQQKDKKLRLPLLVPLYKQILSDREKLSWIAEEFDSDDKMLAAITETYSHLHDLLMGEENESLRSLLVHLKDFDLSRINITNDLSLTDISQHLFGRYDVFTSGIKDELRAITPRKRNETDEQLGDRISKIFKTQQSFSIAFLNTLSQPALEGGNPRKIEDYFMALGAVNTETTQKENLFAQIENAYEDVRAVLQMKETDNMLSQNKQAVAKIKAFLDALKELQHFVKPLLGSGEEDEKDELFYGSFQMMWDELDAITPLYNKVRNWLTRKPFSTEKIKLNFDNAQLLEGWDENKETTNASIILRKDGFYYLGIIRKDCRKLLGAPMPSDGECYDKVVYKFFKDITTMVPKCTTQKKDVVAHFAHSKEDYILFDKKTFNAPVTITKEVYDLNNVLYNGIKKFQIEYLRSTGDKVGYEHAVSTWKSFCMSFLKAYKSTSIYNLALVEQHINSYNDLSSFYNAVNLLLYSLTYRKVSVNFIHSLVDEGKLYLFRIWNKDFSEFSKGTPNLHTLYWKMLFDERNLADVVYKLNGQAEVFYRKSSIKPENRIIHLANKPIANKNELNRKHESTFKYDIIKDRRYTFDKFQFHVPITINFKANGREDINPAVQDCIRRGGFTHVIGIDRGERHLLYLSLIDMQGNIVKQMTLNEIINEYKGNTYKSNYHDLLAKREGERTEARRSWDTIENIKEMKEGYLSQVVHIISKMMVEYNAIVVLEDLNTGFMRSRQKIERQVYEKFEKMLIDKLNCYIDKRADMSDIAGLLHPLQLTCEAKKWKRSHQCGCLFYIPAWNTSKIDPVTGFVNLFDTRYDNMAKAKAFFGKFKSIRYNVSKDWFEFAFDYNNFTTMAEGTRTDWTVCTYGERILTFRNPDKNLQWDDKEVVLTGAFKQLFEKHDIDILDNLKEAICMQTDAQFFKDLLGLMKLLLQMRNSKTGSEVDYLLSPVADEQGNFFDSRKGNATLPDNADANGAYNIARKGLWAIHKIQETAENKKPSLAISNKEWLQFAQTKPYLAD

SEQ ID NO: 1700 - protein, 1064 aa, unidentified
  REGION 1..1064: note = Category: MG75 effectors
  REGION 1..1064: note = Description: MG75-186 effector
  source 1..1064: note = uncultivated organism sequence
MYSEEEKPTGIAYRLINENLPTFIENFKIYNKVIKFMPEIINKIHTDLMEYIQVEDIDEIFDINYYNEVLTQKGIECYNIIISGKSKSNGEKIKGLNEYINEFNQKHNEKIPKLQELYKQILSDTDTASFKFDTIESDEELLNNIESYYTKLLPVFNKINQLFAKFNKYNLDLIFINNDGTLNTISNEIYKDWSYIRNRIGERYDIEYTGKLKKDTEQYSKQKQEYMKKQKQYSLKFLNDSLRDNYLIEYISNYIEQSKIMERMKTDFTEVQKIESRGDTKQLIKDENSIVKIKNLLDDIKFLQEFVKILVLKDRTIEKDAEFYSELMPYYNELKDIIPLYNKTRNYLTQKPYSTEKIKLNFECPTLLNGWDLNKEEANLGVILLKNEKYYLGIINPYCKKIFKIQEKDSNSENNYKKMEYKLLPGPNKMLPKVFFSKSKIDEFMPSDELLEKYNKGCHKKGKDFDINFCHELIDFYKTSLNKHKDWKKFDFKFKSTSEYNDISEFYKDVEEQGYKIEYSEYSEKYINELVDRGELYLFQIYNKDFSEYSKGRPNLHTMYWKAVFDIENIKNPVYKLNGEAEIFYRKKSLERKITHSANEPVANKNENTIKSGKPTSLFKYDLIKDKRYTVDKFQFHVPITMNFKSEKMFNINQVVNKYLKYNDDINVIGIDRGERNLLYVCVIDKNEKIVYQKSLNEIVNEYKSIKYSTNYHALLNKKEKEREIAREDWKNIENIKELKEGYMSQVIHILVELMRKYNAIIVIEDLNKGFKNSRIKVEKQVYQKFEKMFIDKLNYLVFKDEPKESEGGVLNAYQLTNKFETFNKIGKQSGVLYYIPAWCTSKIDPTTGFINRFYIKYENLDKSKEFINKIDDIRYNSSENLFEFDIDYSKFTDRLNETRNKWTLYTNGERIYTYRNDKGEWIDKKIQLTNEFKKLFEKYSINLDNIKNEILEKANIEFFKGNNETLGFIQLFKLMVQMRNSLTGKEEDNLISPVKNSNGKFFNTNEQIEGLPKDADANGAYNIARKGLMLIEQVRNTEDDKLNKIKYNITEKEWLDYVQNRGM

SEQ ID NO: 1701 - protein, 1287 aa, unidentified
  REGION 1..1287: note = Category: MG75 effectors
  REGION 1..1287: note = Description: MG75-187 effector
  source 1..1287: note = uncultivated organism sequence
MEKGMKQFTGLYSLSKSLRFELQPIGKTQENIEKHGILERDSQRAEDYKVVKEFIDEYHKQFIKSRLWNYKLPLKNEGQLNSLEEYQEMYEISKRDAAQEASFAQIKYNLRSIIVKRLTESSSSYSRIFKKELIREDLINFLEKEEDQEIVRQFADFTTYFTGFHENRRNMYTAEEKSTAIAYRLIHQNLPKFMDNMKSFAKIAETSVAEHFADIYEGWKEYLNVDSIEEIFQLDYFSETMTQPHIEVYNYIIGKKILEDGTEIKGINEYVNLYNQQQKDKNKRLPFLVPLYKQILSDREKLSWLTEEFDSDEKMLSAINESYSHLHDLLMGEENESLRSLLSHIKNFNLCQINISNDLSLTDISQHLFNRYDVFTNGIKDKLRVITPRKKKESDEDFEDRISKIFKTQKSFSISFLDNLPQPVMDDGKPQSIEDYFMSLGAVNTETTQKENLFAQIENAYEDARTILQMKDTGDTLSQNKSAVVKIKALLDALKDLQHFIKPLLGSGEENEKDELFYGSFQIMWDELDTVTPLYNKVRNWLTRKPYSTEKIKLNFDNAQLLDGWDENKETTNASIILCKNGGYYLGIFNKDYRKLLGTPMPSDGDCYDKVVYKFFKDITTMVPKCTTQKKDVVAHFAQSTENYILFDPKTFKASVTITKEIFDLNNVLYNGVKKFQIEYLRSTGDQSGYEHAVTTWKSFCMQFLKAYKSTSIYNLALVEQQIDSYRDLNSFYNAVNLLLYNLSYKKVSVAYINQLVEEGKLYLFRIWNKDFSEYSKGTPNLHTLYWKMLFDERNLADVVYKLNGQAEVFYRKASIKPENRILHPAQCPIANKNELNEKRSSIFEYDIIKDKRYTVDKFQFHVPITINFKATGQTNINPIVQDTIRRGGFSHIIGIDRGERHLLYLSLIDLKGNIVKQMTLNDIVNEYKGTIHKTNYHDLLVKREGERTDARRSWDTIENIKELKEGYLSQVVHIISKMMVEYNAIIVLEDLNMGFMRGRQKIERQVYEKFEKLLIDKLNCYVDKQIDPSSAGGLLHPFQLTNKFESFRKLGKQSGCLFYIPAWNTSKIDPVTGFVNLFDTRYDTPKKARSFFSKFQRISFNDKKGWFEFSYDYDDFTSKAEGTRTQWTLCTFGDRIRTFRNPKKNHQWDNESVVLTEEFKQLFEKYGIDIHSNLKESISMQSDAQFFKDLLGLMKLLLQMRNSKTNSEEDYLLSPVADETGHFFDSRENIRTLPNNADANGAYNIARKGLWAIRKIKETTQDDKVSLAISNKEWLQFAQTRPYLND

SEQ ID NO: 1702 - protein, 1235 aa, unidentified
  REGION 1..1235: note = Category: MG75 effectors
  REGION 1..1235: note = Description: MG75-188 effector
  source 1..1235: note = uncultivated organism sequence
MKQLNELTGLYSLSKTLRFELKPIGKTLEHIESKGLIAQDEQRAEEYKKVKDIIDRYHKAFITMCLRDFNFDQNSLETYVALAEDSNRDEKDFDEIKKALRKQIVEAFKKGGSYSDLFKKELIQKHLPEFVKDEEEKKMVENFSKFTTYFSGFNENRKNMYSDEDKSTAIAYRLIHENLPMFIDNMKSFGKIAVSDVSQHFSEIESSFSEYLNVEHLADMFQLDYFSETLTQEQIAVYNHIVGGRTLEDGTKLQGVNEYVNLYNQQHKDNRLPLLKPLYKMILSDRVALSWLPEEFASDEEMINAINETYNTLKDVLMGNGDNSLRNLLLNIDKYDVEHIYIGNDLGLTDISQQLFGQYDVYTSAIKQELRNSVSPTAKERREPELYAERINKLFKSAKSFSILYLNSLVDSEHTIQSYYKQLGAYDRGGEQRINLFSQIEMAYVAAKDILSGKHGNISQSDADTAIIKNLLDAYKSLQRFIKPLLGDGEEADKDNEFDAKLREAWDALDIVTPLYNKVRNWLTRKPYSTEKIKLNFENAQLLGGWDVNKEPDCTSVLLRKNGFYYLAIMNKKYNHAFDIDNLPHNGKCYEKIDYKLLPGANKMLPKVFFSNSRIKEFAPSDAIVSAYRKGTHKKGSNFNISDCRRLIDFFKASIMKHEDWKKFPFSFSPTETYEDISGFYREVEQQGYMLGFRNVSESFINQLIDEGKLYLFQIWNKDFSEFSKGTPNMHTLYWKMLFDERNLANVVYKLNGQAEVFYRKRSLDVANTTIHKAHQPIVNKNQENKKLQSTFEYDIIKNRRYTVDKFQFHVPISINFKAIGRDNVNDNVLDIIRNGGIKHIIGVDRGERHLLYLSLIDLNGNIVKQMTLNDIVNEYNGNTYATNYRDLLAEREGNRTEARKNWKEIENIKDIKQGYLSQVVHIISKMMVEYDAIVVLEDLNMGFMRGRQKIERSVYEQFEKMLIDKLNYYVDKQKSVNEAGGLLHALQMTSKFESFKKLGKQSGCLFYIPAWNTSKIDPVTGFVNLFDTRYTNADQARRFFSQFDVIRYNADKDWFEFAFDYNNFTAKAEGTRTKWTLCSYGTRIRTFRNPAKLNQWDNEEVVLTDEFKKAFANAGIDIHGNLKEAISSLQDKKYLEPLMHLMKLLLQMRNSITNSEVDYLLSPVADENGKFYDSRTCSDSLPKDADANGAYNIARKGLWAIRQIQETPAGERPNLAIKNKEWLNFAQQKPYKDE

SEQ ID NO: 1703 - protein, 1245 aa, unidentified
  REGION 1..1245: note = Category: MG75 effectors
  REGION 1..1245: note = Description: MG75-189 effector
  source 1..1245: note = uncultivated organism sequence
MTLIIKYKESKNKREVYMSNLYSNLHNLYQVQKTLRFELKPQGKTKENMEKVGILEADEHRAEIYSKVKKYCDEYHKLFIDKSLSNIELNGIDRYYELYSINNRDDKQKEELDQLETGLRKQISDAFKKSAEYKGLFQKDMITSYLVTMYKENQEKMQDIGEFNRFTTYFTGYNKNRENMYSEEDKSTAISYRLINENLPTFIDNIKIYKKIVSLMPEDIEKIYKDLEEYIQVDSIDEIFNISYYNDVLTQRGIECYNILISGRTKNDGDKIKGLNEYINEFNQTHNEKIPKLQELYKQILSDAESASFKIDVIKNDKELMNLIEVYYANILPILNKIEDLFTRISNYNLELILVNNDGTLSTLSNMVFNEWSYIKGAISEKYDEKYSGKEKYGTEKYAQKKQEYLKKQKIYSLKFLNDCIGNNAICEYLKNYIIQNKNIETIKEDYNEVQNIKVEDDTKELIKDEKSIEKIKKFLDDVKSLQEFVKLVIPKDRTVEKDAKFYSELTPYYEKIKEIIPLYNKVRNYVTQKPYSTEKIKLNFECPTLLNGWDANKEEANLGVILIKEGKYYLGIINPYCKKIFEIDEKDSNEQKNYKKMEYKLLPGPNKMLPKVFFSNSRIEEFNPSKELQEKYNKGYHKKGKDFDINFCHELIDFYKMSLNKHEDWKKFNFKFKDTSEYNDISEFYREVEKQGYKIEYTEYSEKYINELVDRGELYLFQIYNKDFSEYSKGKENLHTLYWKAVFDPDNIMNPVYKLNGNAEVFYRKKSLEMKVIHPANQPIANKNISTIEAGRSTSTFKYDLIKDKRYTMDKFQFHVPITVNFKSERLFNINQIVNKYLKYNDDIHVIGIDRGERNLLYVCVIDKNEKIVYQKSLNEIVSEYNNNRYTTDYHGLLDRKEKEREIAREDWKNIENIKELKEGYMSQVIHILVELMKKYNAIIVIEDLNKGFKNSRIKVEKQVYQKFEKMFIDKLNYLVFKDEDKMNEGGVLNAYQLTNKFESFTKLGKQSGILYYIPAWCTSKIDPTTGFINRFYLKYENFDKSKEFVNRIDDIRYNEKENLFEFDIDYSKFTDRLNDTKNKWTLCSYGERILTQKNANGEWFDRRIQLSIEFKKLFERYGINLNNIKDSILKLDKDNLEFYKGNGESLGFIQLFKLMVQMRNSLTGKEEDNLISPVKNRHGKFFNTSEKIEGLPIDADANGAYNIARKGFMLVEQMKNVEDEKLNKIKYNITEKEWLNYVQNRGM

SEQ ID NO: 1704 - protein, 1239 aa, unidentified
  REGION 1..1239: note = Category: MG75 effectors
  REGION 1..1239: note = Description: MG75-190 effector
  source 1..1239: note = uncultivated organism sequence
MEEFNQFTGLYPLSKTLRFELKPVGKTLENIVKHGLLEEDKHRADSYEKVKKIIDEYHKVFIDNALSDFKLKNGESKKNETLDQYFALYNKREKDENDKKDFSEIQKSLRKQIVDRLTGNEKYKNIFKKELIKQDLLEFCNEDDRKYVEEFKDFTTYFNGFNENRANMYSAEEQSTAIAYRLIHDNLPKFVDNINSFNKVLAVPEINEKLPKLYKDFESYLNVESISEMFQLDYFNMVLTQKQIDVYNAIIGGKDDGNEKIQGLNEFINLYNQKHKDTRLPKLKVLYKQILSDRNAISWLPEEFKDDNEVLIAINSCYKDLSEHVLGEKNLKILLENISQYQLDGIFIKNDFQLPYISQKLLGNWSVIQNAIIEDSKSFIKKKGKESENEYESRLNEKYKKQNSFSVAYINECLKNAGKEIGVENYFSALGAVHTETEQRENLFARISNAYSIVSDLLNAQYPEGRNLSQDKQNVSKIKDLLDALKALQHFIKPLLGNGDESGKDEKFYGEFTALWDELNKITSLYNMVRNYVTRKPYSEEKIKLNFQNSTLMDGWDYNKERDNTAVILRKDGLYYLGIMNKKYNKIFEPENVKHDGECFEKMIYKLLPGANKMLPKVFFSKSRIDEFKPSKEIVENYKNDTHKKGEKFNIEDCHRLIDFFKSSIEKHSDWSKFDFKFSDTSKYADLSGFYREVEHQGYKVTFVNISKDYVNSLVDEGKLYLFQIYNKDFSPYSKGTPNMHTLYWKMLFDERNLENVVYKLNGQAEIFYRKKSINYDRPTHPAHQPINNKNIQNKKKESLFSYDLIKNRRYTVDKFFFHVPITINFKGVDSENINDQVRRYLQKAKDTHVIGIDRGERNLLYLVVVDNKGNIVEQYSLNNIVNEYKGNTYSTDYHALLDAKEKERELARESWQTIENIKELKEGYLSQVIHKITELMIKYHAIVVLEDLNMGFKRGRQKVEKQVYQKFEKQLIDKLNYVVDKHKAPEADGGLLHAYQLTSKFDSFQKLGKQSGFLFYIPAWNTSKIDPVTGFVNLFDTRYVNIEKAKAFFCKFDIIRYNQDKEWFEFGFDYKNFTSKADESRTKWTLCTFGTRVETFRNKEKNSQWDNRNVDLTKAFKELFSKYNIDLSSNIKEAICIQTEKDFFESLLHLLKLTLQMRNSVTGTEIDYIISPVANGNGEFFDSRTCSDKLPKDADANGAYNIARKGLMLIEQIKKSKDLKKLKFDISNKSWLQYVQNN

SEQ ID NO: 1705 - protein, 1150 aa, unidentified
  REGION 1..1150: note = Category: MG75 effectors
  REGION 1..1150: note = Description: MG75-191 effector
  source 1..1150: note = uncultivated organism sequence
MLNFLVKKEDRDIVQQFADFTTYFTGFHENRRNMYSSEEKSTAIAYRLIHQNLPKFMENMKAFATIAQTSIAEHFADIYAGWEEYLNVGSIEEMFNLDYFSHTLTQTGIEVYNYIIGKKILEDGTEIKGINEYVNLYNQQQKDKKQRLPLLIPLYKQILSDREKLSWISEEFDSDEKMLAAINGLYIHLHDLLMGKENESLRSLLIYLKDFNLEHIYITNDQSLTNISQHLFKQYDVYTQGILNHLRVNTPRKKKETDEDFEKRISQILKSKKSFSIAFLDHLPHPITEEGKPKSIEDYFQALGAVDSETIQKENIFAQIENAYENVYEVLQLKETGNSLSQDKSAVAKIKVLLDAFKELQHFIKPLLGSGEENEKDELFYGTFQMMWDELEAITPLYNKVRNWMTRKPYSTEKIKLNFDNAQLLDGWDENKETTNASIILRKGSYFFLGIMNKNYRQLLDKPMPSDGDCFDKVVYKFFKDITTMVPKCTTQMKSVAEHFKHSSEDYILFDKKKYNTPVVITKEIYELNNVTYNGTKKFQIEYLRSTGDSEGYQHALTVWKAFCLKFLKAYISTSVYDLTLIEQNINSYKNLSTFYNAVNLLLYNISYKRVSTEYINTLVDEGKLYLFRIWNKDFSEFSKGTPNLHTLYWRMLFDERNLADVVYKLNGQAEVFYRKASIKPENLIIHPANQAIANKNILNRKKTSTFEYDIIKNRRYTVDKFQFHVPITINFKAIGQKNINPIVQETIRNNGFTHVIGIDRGERHLLYLSLIDLKGNIIKQMTLNEIINEYNGQCFVTNYHNLLVAREGDRTKSRKSWDTIETIKELKEGYLSQVVHIISKMMIEYKAIVVLEDLNVGFMRGRQKIERQVYEKFEKMLIEKLNCYVDKQADPASEGGLLHPLQLVNESKSFQKHGKQCGCLFYVRAWNTSKIDPTTGFVNLFDTRYETREKARVFFSKFKRISFNKEKDWFEFSFDYNDFTTKADGTRTQWTLCTNGTRIRTFRNPLKNNQWDDEEIILTDQFKELFSKYQIEITGNLKDSINRQSEAAFYKDLMSLMKLLLQMRNSKTNSEVDYLFSPVADEQGVFYDSRNCGANLPNNADANGAYNIARKGLWVIRKIQSTSIDEKISLAITDKDWLNFVQNKSYLID

SEQ ID NO: 1706 - protein, 1239 aa, unidentified
  REGION 1..1239: note = Category: MG75 effectors
  REGION 1..1239: note = Description: MG75-192 effector
  source 1..1239: note = uncultivated organism sequence
MEEFNQFTGLYPLSKTLRFELKPVGKTLENIVKHGLLEEDKHRADSYDKVKRIIDEYHKAFIDNALSDFKLKNGESKKYETLDQYFALYNKREKDENDKKDFSEIQKSLRKQIVDRLTGSEKYKNIFKKELIKHDLLKFCNEDDRKYVEEFKDFTTYFNGFNENRANMYSAEEQSTAIAYRLIHDNLPKFVDNINSFNKVLAVPEINEKLPKLYKDFESYLNVESISEMFQLDYFNMVLTQKQIDVYNAIIGGKDDGNEKIQGLNEFINLYNQKHKDTRLPKLKVLYKQILSDRNAISWLPEEFKDDNEVLIAINSCYKDLSEHVLGEKNLKILLENISQYQLDGIFIKNDFQLPYISQKLLGNWSVIQNAIIEDSKSFIKKKGKESENEYESRLNEIYKKQNSFSVAYINECLKNAGKEIGVENYFSALGAVHTETEQRENLFARISNAYSIVSDLLNVQYPEGRNLSQDKQNVSKIKDLLDALKALQHFIKPLLGNGDESGKDEKFYGEFTALWDELNKITSLYNMVRNYMTRKPYSEEKIKLNFQNSTLMDGWDYNKERDNTAVILRKDGLYYLGIMNKKYNKIFEPENVKHDGECFEKMIYKLLPGANKMLPKVFFSKSRIDEFKPSKEIVENYKNDTHKKGEKFNIEDCHRLIDFFKSSIEKHSDWSKFNFKFSDTSKYADLSGFYREVEHQGYKVTFVNISKDYVNSLVDEGKLYLFQIYNKDFSPYSKGTPNMHTLYWKMLFDERNLENVVYKLNGQAEIFYRKKSINYDRPTHPAHQPINNKNIQNKKKESLFSYDLIKNRRYTVDKFFFHVPITINFKGVDSENINDQVRRYLQKAKDTHVIGIDRGERNLLYLVVVDNKGNIVEQYSLNNIVNEYKGNTYSTDYHALLDAKEKERELARESWQTIENIKELKEGYLSQVIHKITELMIKYHAIVVLEDLNMGFKRGRQKVEKQVYQKFEKQLIDKLNYVVDKHKAPESDGGLLHAYQLTSKFDSFQKLGKQSGFLFYIPAWNTSKIDPVTGFVNLFDTRYVNIEKAKAFFCKFDIIRYNQDKGWFEFGFDYKNFTSKADESRTKWTLCTFGTRVETFRNKEKNSQWDNRNVDLTRAFKELFSKYNIDLTSNIKEAICIQTEKDFFESLLHLLKLTLQMRNSVTGTEIDYIISPVANENGEFFDSRTCSEKLPKDADANGAYNIARKGLMLIEQIKKAKDLQKLKFDISNKSWLQYVQNN

SEQ ID NO: 1707 - protein, 1236 aa, unidentified
  REGION 1..1236: note = Category: MG75 effectors
  REGION 1..1236: note = Description: MG75-193 effector
  source 1..1236: note = uncultivated organism sequence
MKQLSELTGLYSLSKTLRFELKPIGKTLEHIESKGLIAQDEQRAEEYKKVKDIIDRYHKKFITMCLSDFKFEQNSLETYVALAEDTNRDEKAFDEIKKTLRKQIVETFKKGGSYSDLFKKELIQKHLPEFVSDEEEKKMIANFSKFTTYFNGFNENRKNMYSDEDKSTAIAYRLIHENLPMFVNNMKSFSRIADSDVHQHFTEIESSFSEYLGVEHLEEMFQLDYFSETLTQEQIAVYNHIIGGRALEDGTKLKGINEYVNLYNQQHKNSRLPLLKPLYKMILSDRVALPWFPSEEFASDEEMIRAINETYNTLKEVLSIDGDSSLRSLLLNISSYDIKHIYIANDLGLTDISQQMFGQYDVYTSAIKQELREKNAPTAKERRNPELYDERINKLFKSAKSFSIEHLNSLVDSEHTIQNYYKHLGAYDRNGEQRVNLFTQIEMAYVAAKEILSGKHGNISQSDAETAIIKGLLDAFKSLQRFIKPLLGNGEEADKDNEFDAKLREAWNTLDIVTPLYNKVRNWLTRKPYSTEKIKLNFENAQLLGGWDVNKEPDCTSILLRKNGLYYLAIMNKKYNHAFDIDNLPNDGKCYEKIDYKLLPGANKMLPKVFFSKSRIKEFAPSEIIVNAYKKGSHKKGANFSISDCRRLIDFFKASISKHEDWKNFPFSFSSTEKYEDISGFYREVEQQGYMLGFRNVSESFIKQLVDEGKLYLFQIWNKDFSDFSKGTPNMHTLYWKMLFDEHNLANVVYKLNGQAEVFYRKSSLDVANTTIHKAHQPIMNKNQEYKKRQSTFDYDIIKNRRYTVDKFQFHVPISINFKATGRDNVNDNVLDIIRNGGIKHIIGIDRGERHLLYLSLIDLKGNIVKQMTLNDIVNEYNGNTYATNYKNLLAEREGNRTEARKNWKKIENIKDIKKGYLSQVVHIISKMMVEYNAIVVLEDLNMGFMRGRQKIERSVYEQFEKMLIDKLNYYVDKQKNSDEAGGLLHALQLTSKFESFKKLGKQSGCLFYIPAWNTSKIDPVTGFVNLFDTRYTNADQARKFFSQFDSIRYNADKDWFEFAFDYNKFTAKAKDTRTKWTLCTYGTRIRTFRNPARLNQWDNEEVVLTDEFKKAFANADINIHGNLKEAICSLQDKKYLEPLMHLMKLLLQMRNSITNSEVDYLLSPVADENGTFYDSRICSASLPKDADANGAYNIARKGLWAIHQIQESPAGDRLNLAIKNKDWLNFAQQKPYMNE

SEQ ID NO: 1708 - protein, 700 aa, unidentified
  REGION 1..700: note = Category: MG75 effectors
  REGION 1..700: note = Description: MG75-194 effector
  source 1..700: note = uncultivated organism sequence
METFSGFTNLYPLSKTLRFRLIPVGETLKHFIGSGILEEDQHRAESYVKVKAIIDDYHRTYIENSLSGFELPLESTGKFNSLEEYYLYHNIRNKTEEIQNLSSKVRTNLRKQVVTQLTKNEIFKRIDKKELIQSDLIDFVKNEPDANEKIALISEFRNFTVYFKGFHENRRNMYSDEEKSTSIAFRLIHENLPKFIDNMEVFAKIQNTSISENFDAIQKELCPELVTLCEMFKLGYFNKTLSQKQIDAYNTVIGGKTTSEGKKIKGLNEYINLYNQQHKQEKLPKMKLLFKQILSDRESASWLLEKFENDSQVVGAMVNFWNTIHDTVLAEGGLKTIIASLGSYGLEGIFLKNDLQLTDISQKATGSWSKISSEIKQKIEAMNPQKKKESYESYQERIDKLFKSYKSFSLAFVNECLRGEYKIEDYFLKLGAVNSSLLQKENHFSHILNTYTDVKEVIGFYSESTDTKLIQDNDSIQKIKQFLDAVKDLQAYVKPLLGNSDETGKDERFYGDLIEYWSLLDLITPLYNMVRNYVTQKPYSVDKIKINFQNPTLLNGWDLNKEMDNTSVILRRDGKYYLAIMNNKSRKVFLKYPSGTDRNCYEKMEYKLLPGANKMLPKVFFSKSRINEFMPNERLLSNYEKGTHKKSGTCFSLDDCHTLIDFFKKSLNKHEDWKNFGFKFSDTSTYEDMKCTENSCQFED

SEQ ID NO: 1709 - protein, 1283 aa, unidentified
  REGION 1..1283: note = Category: MG75 effectors
  REGION 1..1283: note = Description: MG75-195 effector
  source 1..1283: note = uncultivated organism sequence
MKQFSNLYQVSKTLRFELQPIGKTKENIESGGILQKDEQRAVNYKIVKGFIDEYHKQHIKNCLWNFELPLFNEGKHDSLEEYKILYETPQRNAVQEAAFTEVKDNLRAIIVKQLTKKGTAFDRIDKKELIREDLLNFLVKKEDRDIVQQFADFTTYFTGFHENRRNMYSSEEKSTAIAYRLIHQNLPKFMENMKAFATIAQTSIAEHFADIYAGWEEYLNVGSIEEMFNLDYFSHTLTQTGIEVYNYIIGKKILEDGTEIKGINEYVNLYNQQQKDKKQRLPLLIPLYKQILSDREKLSWISEEFDSDEKMLAAINGLYIHLHDLLMGKENESLRSLLIYLKDFNLEHIYITNDQSLTNISQHLFKQYDVYTQGILNHLRVNTPRKKKETDEDFEKRISQILKSKKSFSIAFLDHLPHPITEEGKPKSIEDYFQALGAVDSETIQKENIFAQIENAYENVYEVLQLKETGNSLSQDKSAVAKIKVLLDAFKELQHFIKPLLGSGEENEKDELFYGTFQMMWDELEAITPLYNKVRNWMTRKPYSTEKIKLNFDNAQLLDGWDENKETTNASIILRKGSYFFLGIMNKNYRQLLDKPMPSDGDCFDKVVYKFFKDITTMVPKCTTQMKSVAEHFKHSSEDYILFDKKKYNTPVVITKEIYELNNVTYNGTKKFQIEYLRSTGDSEGYQHALTVWKAFCLKFLKAYISTSVYDLTLIEQNINSYKNLSTFYNAVNLLLYNISYKRVSTEYINTLVDEGKLYLFRIWNKDFSEFSKGTPNLHTLYWRMLFDERNLADVVYKLNGQAEVFYRKASIKPENLIIHPANQAIANKNILNRKKTSTFEYDIIKNRRYTVDKFQFHVPITINFKAIAQKNINPIVQETIRNNGFTHVIGIDRGERHLLYLSLIDLKGNIIKQMTLNEIINEYNGQCFVTNYHDLLVAREGDRTKSRKSWDTIETIKELKEGYLSQVVHIISKMMIEYKAIVVLEDLNVGFMRGRQKIERQVYEKFEKMLIEKLNCYVDKQADPASEGGLLHPLQLVNESKSFQKHGKQCGCLFYVRAWNTSKIDPTTGFVNLFDTRYETREKARVFFSKFKRISFNKEKDWFEFSFDYNDFTTKADGTRTQWTLCTNGTRIRTFRNPLKNNQWDDEEIILTDQFKELFSKYQIEITGNLKDSINRQSEAAFYKDLMSLMKLLLQMRNSKTNSEVDYLFSPVADEQGVFYDSRNCGANLPNNADANGAYNIARKGLWVIRKIQSTSIDEKISLAITDKDWLNFVQNKSYLID

SEQ ID NO: 1710 - protein, 663 aa, unidentified
  REGION 1..663: note = Category: MG75 effectors
  REGION 1..663: note = Description: MG75-196 effector
  source 1..663: note = uncultivated organism sequence
MIPKCSTQLNKVKEHFAKSSTDITVFDSKTFTSPITITKEIFDLNNVTYDGKKKFLKEYLEKTGDQKGFSDALSTWKHFCLQFLKAYKSTANYDFSEIERNIDSYSDLPLFYQELNNILYKITFERVSADFIHQLVNEGCLYLFQIYSKDFSPYSKGKPNLHTIYWRMLFDEENLSNVVYKLNGEAEIFFRPSSIKCTGPTHLANRPIENKSEYNKKNKPSSTFGYDLFKDRRYTKDQFEFHVPITLNFKQPKPSMFNDEVRTFLKENGVRHIIGIDRGERNLLYLVMVDLDGNIIKQYSLNRIASNANNSNFEQDFRDILHKREGDRQEARRNWSTIQNIKELKEGYMSLVVHEIVKLMLKEDAIVVLESLNRSFMQIRGGIEKSVYQKFEKMLIDKLGYIVDKDKAPTENGGALHAIQLADTFENYNKYQSGIVRQCGFIFYVPAWCTSKIDPTTGFVPMLKCKYENIDSSQTFFSKFDSIRFNEAEEYFEFKTNYANFYTSSKGGKQQWNICTFGERILTQRAKDGHFESKTIALAPAFKELFAQAGINIQGNIKAQIVKQNDASFFKELHHLLRLTLQMRNSNSTTGDDYIISPVKNKDGEFFDSRRSGEKLPQDADANGAYNIARKGLMLLQQLNATKADSKFKPEISNEKWLEFAQK

SEQ ID NO: 1711 - protein, 1376 aa, unidentified
  REGION 1..1376: note = Category: MG77 effectors
  REGION 1..1376: note = Description: MG77-1 effector
  source 1..1376: note = uncultivated organism sequence
MTVDNSAYYDSYTGRYPIRRTVQFSLIPQGETQKWIDQYGFVSADEKRDEDYKELKKIIDNYHRDFIARALDSFKKAIDWNNLIEALEQFQQSNETDKPKARKELEKVQANYQSEIAEAFRKQDDFNSLFKKDLITKILPDSINDEDKNELLARFRQFTSYFTGFNENRRNLYSDEAKATAISHRIVNENFPRFYANCKDWERLNKLYHGFGLQVQDSIEKLDQDIDIAQYFEPKNYSLVLTQEGIDVYNMILGGGFDSSRKKVSGLNNLANECWQKARSNERNGSQSEGIEEQRAPHKIILQQLHRQILSENVSSWSQLFEQYKNDGEVYDALKTLNKELLQPRNEEVSFLDQVVDLFRKLKEFDPAVIQVRSNRFFSFSRTCFGDGFYLENAIASCVDEKLAPVQGLSASVRNKWAKKEQRTLREIAQIVYAAEKSLKAKDADAIDLPNEQVWEILHVDNLIEDFYETRDEIVVREERLEEDLTGAKPDARKLMQKGELVQKIKAFLDSLLNYQRALQVFSLDANEERNPEFYAYYDSLRENWSIVPQIYDRVRNYVTQKPYSKEKFKLTFENPSFLNGWSLDKQDENYGALFLQDGKYYLGILNPNNKIKFESLHDAVEDKTEGVFQKVDYNLFPGATKMIPKCSIARNDVKNHFRKSKSDCSLDNEKFIKPLRIPYRIMELNYDMTADQPEKLKLKKYQVEYKRSTGDEAGFTEALADWIDFCLDFLESYRNTAGYDFSFCYGKEYKSLDQFYNDVDRITYSLSLRDVSKRQIDQLISDGKLFFFQLYNKDFAEKATGKKNLHTLYFEALFSKQNLNETVFKLDGEAEMFYRPASIDSPFTHNVGEYVVNRTYTEVIDGKEERKSLKDYVHRELYEFANGKKAKSKLSKDAIRAIELGHYTPKEVTHAITRDKRFSQPQYSLHIPLTINFGTKPIGGRDNNSDILKSIKRDKDIAIIGIDRGERNLLYYSVIDQAGKILDQGSLNAINGVDYHEKLDLRERERNEQRQSWKSIDKIKDLKKGYLSVAVHEIVSLMLKHNAVIVMEDLNAGFKRSRTKFEKQIYQNFEKQLIDKLNYCVIKPKTQGTSDEASNRGEHRDLDAPGGVLCGYQLANQFESFQKLGKQCGSIFYVPAWNTSRIDPTTGFVNLFRAAELRYKNLQQVQSFFQRFDGIRFNKDEDWFEFTFSYSNFNTSGTSLIDEWTVCARDVELPIVVKDDNEGRWNRQNTKNETINIKNKLEGLFAEYGIDYKSGEDLIEAITFINHSGFYKELLKYFKTLIALRHSTKAGTTPAVDCIVSPVMNEAGYFFDSREASPAFPQDADANGAYNIALKGLQIAKEFIDEATDAPWRVTYKNSNNEWLRFVQERAWKNQ

(The sequence listing continues in the following parts.)

What is claimed is:

1. A method of disrupting a CD38 locus in a cell, comprising introducing to said cell:
(a) a class 2, type V Cas endonuclease; and
(b) an engineered guide RNA, wherein said engineered guide RNA is configured to form a complex with said endonuclease and said engineered guide RNA comprises a spacer sequence configured to hybridize to a region of said CD38 locus,
wherein said engineered guide RNA is configured to hybridize to a sequence having at least 20-22 consecutive nucleotides having at least about 80%, at least about 85%, at least about 90%, at least about 91%, at least about 92%, at least about 93%, at least about 94%, at least about 95%, at least about 96%, at least about 97%, at least about 98%, or at least about 99% sequence identity to any one of SEQ ID NOs: 4466-4503 and 5686; or
wherein said engineered guide RNA comprises a nucleotide sequence having at least about 80%, at least about 85%, at least about 90%, at least about 91%, at least about 92%, at least about 93%, at least about 94%, at least about 95%, at least about 96%, at least about 97%, at least about 98%, or at least about 99% sequence identity to any one of SEQ ID NOS:
4428-4465 and 5685.

2. The method of claim 1, wherein said class 2, type V Cas endonuclease comprises an endonuclease having at least 75% sequence identity to any one of SEQ ID NOs: 1-3470 or a variant thereof.

3. The method of claim 1, wherein said class 2, type V Cas endonuclease comprises an endonuclease having at least 75% sequence identity to any one of SEQ ID NOs: 141, 215, 229, 261, or 1711-1722 or a variant thereof.

4. The method of any one of claims 1-3, wherein said engineered guide RNA comprises a sequence with at least about 80%, at least about 85%, at least about 90%, at least about 91%, at least about 92%, at least about 93%, at least about 94%, at least about 95%, at least about 96%, at least about 97%, at least about 98%, or at least about 99% sequence identity to the non-degenerate nucleotides of any one of SEQ ID NOs: 3471, 3539, 3551-3559, 3608-3609, 3612, 3636-3637, 3640-3641, 3644-3645, 3648-3649, 3652-3653, 3656-3657, 3660-3661, 3664-3667, 3671-3672, 3678, 3695-3696, 3729-3730, 3734-3735, 3851-3857, and 6033-6036.

5. The method of any one of claims 1-4, wherein said guide RNA comprises a sequence with at least 80% sequence identity to the non-degenerate nucleotides of SEQ ID NO: 3609.

6. The method of any one of claims 1-5, wherein said engineered guide RNA is configured to hybridize to a sequence having at least 20-22 consecutive nucleotides having at least 80% identity to any one of SEQ ID NOs: 4466, 4467, 4468, 4479, 4484, 4490, 4492, 4493, 4495, 4498.

7. The method of any one of claims 1-6, wherein said engineered guide RNA comprises a nucleotide sequence having at least 80% identity to any one of SEQ ID NOs: 4428, 4429, 4430, 4436, 4441, 4446, 4452, 4454, 4455, 4460, or 4461.

8. The method of any one of claims 1-7, wherein said cell is a eukaryotic cell, T-cell, hematopoietic stem cell, or precursor thereof.

9. A method of disrupting a TIGIT locus in a cell, comprising introducing to said cell:
(a) a class 2, type V Cas endonuclease; and
(b) an engineered guide RNA, wherein said engineered guide RNA is configured to form a complex with said endonuclease and said engineered guide RNA comprises a spacer sequence configured to hybridize to a region of said TIGIT locus,
wherein said engineered guide RNA is configured to hybridize to a sequence having at least 20-22 consecutive nucleotides having at least about 80%, at least about 85%, at least about 90%, at least about 91%, at least about 92%, at least about 93%, at least about 94%, at least about 95%, at least about 96%, at least about 97%, at least about 98%, or at least about 99% sequence identity to any one of SEQ ID NOs: 4521-4537; or
wherein said engineered guide RNA comprises a nucleotide sequence having at least about 80%, at least about 85%, at least about 90%, at least about 91%, at least about 92%, at least about 93%, at least about 94%, at least about 95%, at least about 96%, at least about 97%, at least about 98%, or at least about 99% sequence identity to any one of SEQ ID NOs: 4504-4520.

10. The method of claim 9, wherein said class 2, type V Cas endonuclease comprises an endonuclease having at least 75% sequence identity to any one of SEQ ID NOs: 1-3470 or a variant thereof.

11. The method of claim 9, wherein said class 2, type V Cas endonuclease comprises an endonuclease having at least 75% sequence identity to any one of SEQ ID NOs: 141, 215, 229, 261, or 1711-1722 or a variant thereof.

12. The method of any one of claims 9-11, wherein said engineered guide RNA comprises a sequence with at least about 80%, at least about 85%, at least about 90%, at least about 91%, at least about 92%, at least about 93%, at least about 94%, at least about 95%, at least about 96%, at least about 97%, at least about 98%, or at least about 99% sequence identity to the non-degenerate nucleotides of any one of SEQ ID NOs: 3471, 3539, 3551-3559, 3608-3609, 3612, 3636-3637, 3640-3641, 3644-3645, 3648-3649, 3652-3653, 3656-3657, 3660-3661, 3664-3667, 3671-3672, 3678, 3695-3696, 3729-3730, 3734-3735, 3851-3857, and 6033-6036.

13. The method of any one of claims 9-12, wherein said guide RNA comprises a sequence with at least 80% sequence identity to the non-degenerate nucleotides of SEQ ID NO: 3609.

14. The method of any one of claims 9-13, wherein said engineered guide RNA is configured to hybridize to a sequence having at least 20-22 consecutive nucleotides having at least 80% identity to any one of SEQ ID NOs: 4521, 4527, 4528, 4535, or 4536.

15. The method of any one of claims 9-13, wherein said engineered guide RNA comprises a nucleotide sequence having at least 80% identity to any one of SEQ ID NOs: 4504, 4510, 4511, 4518, or 4519.

16. The method of any one of claims 9-15, wherein said cell is a eukaryotic cell, T-cell, hematopoietic stem cell, or precursor thereof.

17. A method of disrupting an AAVS1 locus in a cell, comprising introducing to said cell:
(a) a class 2, type V Cas endonuclease; and
(b) an engineered guide RNA, wherein said engineered guide RNA is configured to form a complex with said endonuclease and said engineered guide RNA comprises a spacer sequence configured to hybridize to a region of said AAVS1 locus,
wherein said engineered guide RNA is configured to hybridize to a sequence having at least 20-22 consecutive nucleotides complementary to a sequence having at least about 80%, at least about 85%, at least about 90%, at least about 91%, at least about 92%, at least about 93%, at least about 94%, at least about 95%, at least about 96%, at least about 97%, at least about 98%, or at least about 99% sequence identity to any one of SEQ ID NOs: 4569-4599; or
wherein said engineered guide RNA comprises a nucleotide sequence having at least about 80%, at least about 85%, at least about 90%, at least about 91%, at least about 92%, at least about 93%, at least about 94%, at least about 95%, at least about 96%, at least about 97%, at least about 98%, or at least about 99% sequence identity to any one of SEQ ID NOs: 4538-4568.

18. The method of claim 17, wherein said class 2, type V Cas endonuclease comprises an endonuclease having at least 75% sequence identity to any one of SEQ ID NOs: 1-3470 or a variant thereof.

19. The method of claim 18, wherein said class 2, type V Cas endonuclease comprises an endonuclease having at least 75% sequence identity to any one of SEQ ID NOs: 141, 215, 229, 261, or 1711-1722 or a variant thereof.

20. The method of any one of claims 17-19, wherein said engineered guide RNA comprises a sequence with at least about 80%, at least about 85%, at least about 90%, at least about 91%, at least about 92%, at least about 93%, at least about 94%, at least about 95%, at least about 96%, at least about 97%, at least about 98%, or at least about 99% sequence identity to the non-degenerate nucleotides of any one of SEQ ID NOs: 3471, 3539, 3551-3559, 3608-3609, 3612, 3636-3637, 3640-3641, 3644-3645, 3648-3649, 3652-3653, 3656-3657, 3660-3661, 3664-3667, 3671-3672, 3678, 3695-3696, 3729-3730, 3734-3735, 3851-3857, 6033-6036.

21. The method of any one of claims 17-20, wherein said guide RNA comprises a sequence with at least 80% sequence identity to the non-degenerate nucleotides of SEQ ID NO: 3609.

22. The method of any one of claims 17-21, wherein said engineered guide RNA is configured to hybridize to a sequence having at least 20-22 consecutive nucleotides having at least 80% identity to any one of SEQ ID NOs: 4574, 4577, 4578, 4579, 4582, 4584, 4585, 4586, 4587, 4589, 4590, 4591, 4592, 4593, 4595, 4596, or 4598.

23. The method of any one of claims 17-21, wherein said engineered guide RNA comprises a nucleotide sequence having at least 80% identity to any one of SEQ ID NOs: 4543, 4546, 4547, 4548, 4551, 4553, 4554, 4555, 4556, 4558, 4559, 4560, 4561, 4562, 4565, or 4567.

24. The method of any one of claims 17-23, wherein said cell is a eukaryotic cell, T-cell, hematopoietic stem cell, hepatocyte, or precursor thereof.

25. A method of disrupting a B2M locus in a cell, comprising introducing to said cell:
(a) a class 2, type V Cas endonuclease; and
(b) an engineered guide RNA, wherein said engineered guide RNA is configured to form a complex with said endonuclease and said engineered guide RNA comprises a spacer sequence configured to hybridize to a region of said B2M locus,
wherein said engineered guide RNA is configured to hybridize to a sequence having at least 20-22 consecutive nucleotides complementary to a sequence having at least about 80%, at least about 85%, at least about 90%, at least about 91%, at least about 92%, at least about 93%, at least about 94%, at least about 95%, at least about 96%, at least about 97%, at least about 98%, or at least about 99% sequence identity to any one of SEQ ID NOs: 4676-4751; or
wherein said engineered guide RNA comprises a nucleotide sequence having at least about 80%, at least about 85%, at least about 90%, at least about 91%, at least about 92%, at least about 93%, at least about 94%, at least about 95%, at least about 96%, at least about 97%, at least about 98%, or at least about 99% sequence identity to any one of SEQ ID NOs: 4600-4675.

26. The method of claim 25, wherein said class 2, type V Cas endonuclease comprises an endonuclease having at least 75% sequence identity to any one of SEQ ID NOs: 1-3470 or a variant thereof.

27. The method of claim 26, wherein said class 2, type V Cas endonuclease comprises an endonuclease having at least 75% sequence identity to any one of SEQ ID NOs: 141, 215, 229, 261, or 1711-1722 or a variant thereof.

28. The method of any one of claims 25-27, wherein said engineered guide RNA comprises a sequence with at least about 80%, at least about 85%, at least about 90%, at least about 91%, at least about 92%, at least about 93%, at least about 94%, at least about 95%, at least about 96%, at least about 97%, at least about 98%, or at least about 99% sequence identity to the non-degenerate nucleotides of any one of SEQ ID NOs: 3471, 3539, 3551-3559, 3608-3609, 3612, 3636-3637, 3640-3641, 3644-3645, 3648-3649, 3652-3653, 3656-3657, 3660-3661, 3664-3667, 3671-3672, 3678, 3695-3696, 3729-3730, 3734-3735, 3851-3857 and 6033-6036.

29. The method of any one of claims 25-28, wherein said guide RNA comprises a sequence with at least 80% sequence identity to the non-degenerate nucleotides of SEQ ID NO: 3609.

30. The method of any one of claims 25-29, wherein said engineered guide RNA is configured to hybridize to a sequence having at least 20-22 consecutive nucleotides having at least 80% identity to any one of SEQ ID NOs: 4676, 4678-4687, 4690, 4692, 4698-4707, 4720-4723, 4725-4726, 4732-4733, 4736-4737, 4741, or 4750-4751.

31. The method of any one of claims 25-30, wherein said engineered guide RNA comprises a nucleotide sequence having at least 80% identity to any one of SEQ ID NOS: 4600, 4602-4611, 4614, 4616, 4622-4631, 4644-4647, 4649-4650, 4656-4657, 4660-4661, 4665, or 4674-4675.

32. The method of any one of claims 25-31, wherein said cell is a eukaryotic cell, T-cell, hematopoietic stem cell, or precursor thereof.

33. A method of disrupting a CD2 locus in a cell, comprising introducing to said cell:
(a) a class 2, type V Cas endonuclease; and
(b) an engineered guide RNA, wherein said engineered guide RNA is configured to form a complex with said endonuclease and said engineered guide RNA comprises a spacer sequence configured to hybridize to a region of said CD2 locus,
wherein said engineered guide RNA is configured to hybridize to a sequence having at least 20-22 consecutive nucleotides complementary to a sequence having at least about 80%, at least about 85%, at least about 90%, at least about 91%, at least about 92%, at least about 93%, at least about 94%, at least about 95%, at least about 96%, at least about 97%, at least about 98%, or at least about 99% sequence identity to any one of SEQ ID NOs: 4837-4921; or
wherein said engineered guide RNA comprises a nucleotide sequence having at least about 80%, at least about 85%, at least about 90%, at least about 91%, at least about 92%, at least about 93%, at least about 94%, at least about 95%, at least about 96%, at least about 97%, at least about 98%, or at least about 99% sequence identity to any one of SEQ ID NOs: 4752-4836.

34. The method of claim 33, wherein said class 2, type V Cas endonuclease comprises an endonuclease having at least 75% sequence identity to any one of SEQ ID NOs: 1-3470 or a variant thereof.

35. The method of claim 34, wherein said class 2, type V Cas endonuclease comprises an endonuclease having at least 75% sequence identity to any one of SEQ ID NOs: 141, 215, 229, 261, or 1711-1722 or a variant thereof.

36. The method of any one of claims 33-35, wherein said engineered guide RNA comprises a sequence with at least about 80%, at least about 85%, at least about 90%, at least about 91%, at least about 92%, at least about 93%, at least about 94%, at least about 95%, at least about 96%, at least about 97%, at least about 98%, or at least about 99% sequence identity to the non-degenerate nucleotides of any one of SEQ ID NOs: 3471, 3539, 3551-3559, 3608-3609, 3612, 3636-3637, 3640-3641, 3644-3645, 3648-3649, 3652-3653, 3656-3657, 3660-3661, 3664-3667, 3671-3672, 3678, 3695-3696, 3729-3730, 3734-3735, 3851-3857, and 6033-6036.

37. The method of claim 36, wherein said guide RNA comprises a sequence with at least 80% sequence identity to the non-degenerate nucleotides of SEQ ID NO: 3609.

38. The method of any one of claims 33-37, wherein said engineered guide RNA is configured to hybridize to a sequence having at least 20-22 consecutive nucleotides having at least 80% identity to any one of SEQ ID NOs: 4837, 4844, 4845, 4848, 4857-4858, 4883, 4887, 4892-4893, 4904-4909, 4914, 4916, or 4918.

39. The method of claim 38, wherein said engineered guide RNA has at least 80% sequence identity to any one of SEQ ID NOs: 4752-4836 that target any one of SEQ ID NOs: 4837, 4844, 4845, 4848, 4857-4858, 4883, 4887, 4892-4893, 4904-4909, 4914, 4916, or 4918.

40. The method of any one of claims 33-39, wherein said cell is a eukaryotic cell, T-cell, hematopoietic stem cell, or precursor thereof.

41. A method of disrupting a CD5 locus in a cell, comprising introducing to said cell:
(a) a class 2, type V Cas endonuclease; and
(b) an engineered guide RNA, wherein said engineered guide RNA is configured to form a complex with said endonuclease and said engineered guide RNA comprises a spacer sequence configured to hybridize to a region of said CD5 locus,
wherein said engineered guide RNA is configured to hybridize to a sequence having at least 20-22 consecutive nucleotides complementary to a sequence having at least about 80%, at least about 85%, at least about 90%, at least about 91%, at least about 92%, at least about 93%, at least about 94%, at least about 95%, at least about 96%, at least about 97%, at least about 98%, or at least about 99% sequence identity to any one of SEQ ID NOs: 4946-4969; or
wherein said engineered guide RNA comprises a nucleotide sequence having at least about 80%, at least about 85%, at least about 90%, at least about 91%, at least about 92%, at least about 93%, at least about 94%, at least about 95%, at least about 96%, at least about 97%, at least about 98%, or at least about 99% sequence identity to any one of SEQ ID NOS: 4922-4945.

42. The method of claim 41, wherein said class 2, type V Cas endonuclease comprises an endonuclease having at least 75% sequence identity to any one of SEQ ID NOs: 1-3470 or a variant thereof.

43. The method of claim 42, wherein said class 2, type V Cas endonuclease comprises an endonuclease having at least 75% sequence identity to any one of SEQ ID NOs: 141, 215, 229, 261, or 1711-1722 or a variant thereof.

44. The method of any one of claims 41-43, wherein said engineered guide RNA comprises a sequence with at least about 80%, at least about 85%, at least about 90%, at least about 91%, at least about 92%, at least about 93%, at least about 94%, at least about 95%, at least about 96%, at least about 97%, at least about 98%, or at least about 99% sequence identity to the non-degenerate nucleotides of any one of SEQ ID NOs: 3471, 3539, 3551-3559, 3608-3609, 3612, 3636-3637, 3640-3641, 3644-3645, 3648-3649, 3652-3653, 3656-3657, 3660-3661, 3664-3667, 3671-3672, 3678, 3695-3696, 3729-3730, 3734-3735, 3851-3857, and 6033-6036.

45. The method of claim 44, wherein said guide RNA comprises a sequence with at least 80% sequence identity to the non-degenerate nucleotides of SEQ ID NO: 3609.

46. The method of any one of claims 41-45, wherein said engineered guide RNA is configured to hybridize to a sequence having at least 20-22 consecutive nucleotides having at least 80% identity to any one of SEQ ID NOs: 4946-4947, 4949, 4951, 4957-4960, 4963, 4967, or 4969.

47. The method of any one of claims 41-45, wherein said engineered guide RNA has at least 80% sequence identity to any one of SEQ ID NOs: 4922-4945 that target any one of SEQ ID NOs: 4946-4947, 4949, 4951, 4957-4960, 4963, 4967, or 4969.

48. The method of any one of claims 41-47, wherein said cell is a eukaryotic cell, T-cell, hematopoietic stem cell, or precursor thereof.

49. A method of disrupting a mouse TRAC locus in a cell, comprising introducing to said cell:
(a) a class 2, type V Cas endonuclease; and
(b) an engineered guide RNA, wherein said engineered guide RNA is configured to form a complex with said endonuclease and said engineered guide RNA comprises a spacer sequence configured to hybridize to a region of said mouse TRAC locus,
wherein said engineered guide RNA is configured to hybridize to a sequence having at least 20-22 consecutive nucleotides complementary to a sequence having at least about 80%, at least about 85%, at least about 90%, at least about 91%, at least about 92%, at least about 93%, at least about 94%, at least about 95%, at least about 96%, at least about 97%, at least about 98%, or at least about 99% sequence identity to any one of SEQ ID NOs: 5126-5195, 5682, or 5684; or
wherein said engineered guide RNA comprises a nucleotide sequence having at least about 80%, at least about 85%, at least about 90%, at least about 91%, at least about 92%, at least about 93%, at least about 94%, at least about 95%, at least about 96%, at least about 97%, at least about 98%, or at least about 99% sequence identity to any one of SEQ ID NOs: 5056-5125, 5681, or 5683.

50. The method of claim 49, wherein said class 2, type V Cas endonuclease comprises an endonuclease having at least 75% sequence identity to any one of SEQ ID NOs: 1-3470 or a variant thereof.

51. The method of claim 50, wherein said class 2, type V Cas endonuclease comprises an endonuclease having at least 75% sequence identity to any one of SEQ ID NOs: 141, 215, 229, 261, or 1711-1722 or a variant thereof.

52. The method of any one of claims 49-51, wherein said engineered guide RNA comprises a sequence with at least about 80%, at least about 85%, at least about 90%, at least about 91%, at least about 92%, at least about 93%, at least about 94%, at least about 95%, at least about 96%, at least about 97%, at least about 98%, or at least about 99% sequence identity to the non-degenerate nucleotides of any one of SEQ ID NOs: 3471, 3539, 3551-3559, 3608-3609, 3612, 3636-3637, 3640-3641, 3644-3645, 3648-3649, 3652-3653, 3656-3657, 3660-3661, 3664-3667, 3671-3672, 3677-3678, 3695-3696, 3729-3730, 3734-3735, 3851-3857, or 6033-6036.

53. The method of claim 52, wherein said guide RNA comprises a sequence with at least 80% sequence identity to the non-degenerate nucleotides of SEQ ID NO: 3609.

54. The method of any one of claims 49-53, wherein said engineered guide RNA is configured to hybridize to a sequence having at least 20-22 consecutive nucleotides having at least 80% identity to any one of SEQ ID NOs: 5126-5130, 5133-5143, 5147-5150, 5172-5173, 5184-5189, or 5192-5194.

55. The method of any one of claims 49-53, wherein said engineered guide RNA has at least 80% sequence identity to any one of SEQ ID NOs: 5056-5125 that target any one of SEQ ID NOs: 5126-5130, 5133-5143, 5147-5150, 5172-5173, 5184-5189, or 5192-5194.

56. The method of any one of claims 49-55, wherein said cell is a eukaryotic cell, T-cell, hematopoietic stem cell, or precursor thereof.

57. A method of disrupting a mouse TRBC1 or TRBC2 locus in a cell, comprising introducing to said cell:
(a) a class 2, type V Cas endonuclease; and
(b) an engineered guide RNA, wherein said engineered guide RNA is configured to form a complex with said endonuclease and said engineered guide RNA comprises a spacer sequence configured to hybridize to a region of said mouse TRBC1 or TRBC2 locus,
wherein said engineered guide RNA is configured to hybridize to a sequence having at least 20-22 consecutive nucleotides complementary to a sequence having at least about 80%, at least about 85%, at least about 90%, at least about 91%, at least about 92%, at least about 93%, at least about 94%, at least about 95%, at least about 96%, at least about 97%, at least about 98%, or at least about 99% sequence identity to any one of SEQ ID NOs: 5211-5225 or 5247-5267; or
wherein said engineered guide RNA comprises a nucleotide sequence having at least about 80%, at least about 85%, at least about 90%, at least about 91%, at least about 92%, at least about 93%, at least about 94%, at least about 95%, at least about 96%, at least about 97%, at least about 98%, or at least about 99% sequence identity to any one of SEQ ID NOs: 5196-5210 or 5226-5246.

58. The method of claim 57, wherein said class 2, type V Cas endonuclease comprises an endonuclease having at least 75% sequence identity to any one of SEQ ID NOs: 1-3470 or a variant thereof.

59. The method of claim 58, wherein said class 2, type V Cas endonuclease comprises an endonuclease having at least 75% sequence identity to any one of SEQ ID NOs: 141, 215, 229, 261, or 1711-1722 or a variant thereof.

60. The method of any one of claims 57-59, wherein said engineered guide RNA comprises a sequence with at least about 80%, at least about 85%, at least about 90%, at least about 91%, at least about 92%, at least about 93%, at least about 94%, at least about 95%, at least about 96%, at least about 97%, at least about 98%, or at least about 99% sequence identity to the non-degenerate nucleotides of any one of SEQ ID NOs: 3471, 3539, 3551-3559, 3608-3609, 3612, 3636-3637, 3640-3641, 3644-3645, 3648-3649, 3652-3653, 3656-3657, 3660-3661, 3664-3667, 3671-3672, 3677-3678, 3695-3696, 3729-3730, 3734-3735, 3851-3857, or 6033-6036.

61. The method of any one of claims 57-60, wherein said guide RNA comprises a sequence with at least 80% sequence identity to the non-degenerate nucleotides of SEQ ID NO: 3609.

62. The method of any one of claims 57-61, wherein said engineered guide RNA is configured to hybridize to a sequence having at least 20-22 consecutive nucleotides having at least 80% identity to any one of SEQ ID NOs: 5211, 5213-5215, 5217, 5221, 5223, 5247, 5249-5250, 5252-5253, 5258-5259, or 5264.

63. The method of any one of claims 57-61, wherein said engineered guide RNA has at least 80% sequence identity to any one of SEQ ID NOs: 5196-5210 or 5226-5246 that target any one of SEQ ID NOs: 5211, 5213-5215, 5217, 5221, 5223, 5247, 5249-5250, 5252-5253, 5258-5259, or 5264.

64. The method of any one of claims 57-63, wherein said cell is a eukaryotic cell, T-cell, hematopoietic stem cell, or precursor thereof.

65. A method of disrupting a human TRBC1 or TRBC2 locus in a cell, comprising introducing to said cell:
(a) a class 2, type V Cas endonuclease; and
(b) an engineered guide RNA, wherein said engineered guide RNA is configured to form a complex with said endonuclease and said engineered guide RNA comprises a spacer sequence configured to hybridize to a region of said human TRBC1 or TRBC2 locus,
wherein said engineered guide RNA is configured to hybridize to a sequence having at least 20-22 consecutive nucleotides complementary to a sequence having at least about 80%, at least about 85%, at least about 90%, at least about 91%, at least about 92%, at least about 93%, at least about 94%, at least about 95%, at least about 96%, at least about 97%, at least about 98%, or at least about 99% sequence identity to any one of SEQ ID NOs: 5661-5679; or
wherein said engineered guide RNA comprises a nucleotide sequence having at least about 80%, at least about 85%, at least about 90%, at least about 91%, at least about 92%, at least about 93%, at least about 94%, at least about 95%, at least about 96%, at least about 97%, at least about 98%, or at least about 99% sequence identity to any one of SEQ ID NOs: 5642-5660.

66. The method of claim 65, wherein said class 2, type V Cas endonuclease comprises an endonuclease having at least 75% sequence identity to any one of SEQ ID NOs: 1-3470 or a variant thereof.

67. The method of claim 66, wherein said class 2, type V Cas endonuclease comprises an endonuclease having at least 75% sequence identity to any one of SEQ ID NOs: 141, 215, 229, 261, or 1711-1722 or a variant thereof.

68. The method of any one of claims 65-67, wherein said engineered guide RNA comprises a sequence with at least about 80%, at least about 85%, at least about 90%, at least about 91%, at least about 92%, at least about 93%, at least about 94%, at least about 95%, at least about 96%, at least about 97%, at least about 98%, or at least about 99% sequence identity to the non-degenerate nucleotides of any one of SEQ ID NOs: 3471, 3539, 3551-3559, 3608-3609, 3612, 3636-3637, 3640-3641, 3644-3645, 3648-3649, 3652-3653, 3656-3657, 3660-3661, 3664-3667, 3671-3672, 3678, 3695-3696, 3729-3730, 3734-3735, 3851-3857, or 6033-6036.

69. The method of any one of claims 65-68, wherein said guide RNA comprises a sequence with at least 80% sequence identity to the non-degenerate nucleotides of SEQ ID NO: 3609.

70. The method of any one of claims 65-69, wherein said engineered guide RNA is configured to hybridize to a sequence having at least 20-22 consecutive nucleotides having at least 80% identity to any one of SEQ ID NOs: 5661-5663, 5672-5675, or 5678.

71. The method of any one of claims 65-69, wherein said engineered guide RNA has at least 80% sequence identity to any one of SEQ ID NOs: 5642-5660 that target any one of SEQ ID NOs: 5661-5663, 5672-5675, or 5678.

72. The method of any one of claims 65-71, wherein said cell is a eukaryotic cell, T-cell, hematopoietic stem cell, or precursor thereof.

73. A method of disrupting an HPRT locus in a cell, comprising introducing to said cell:
(a) a class 2, type V Cas endonuclease; and
(b) an engineered guide RNA, wherein said engineered guide RNA is configured to form a complex with said endonuclease and said engineered guide RNA comprises a spacer sequence configured to hybridize to a region of said HPRT locus,
wherein said engineered guide RNA is configured to hybridize to a sequence having at least 20-22 consecutive nucleotides complementary to a sequence having at least about 80%, at least about 85%, at least about 90%, at least about 91%, at least about 92%, at least about 93%, at least about 94%, at least about 95%, at least about 96%, at least about 97%, at least about 98%, or at least about 99% sequence identity to any one of SEQ ID NOs: 5562-5641; or
wherein said engineered guide RNA comprises a nucleotide sequence having at least about 80%, at least about 85%, at least about 90%, at least about 91%, at least about 92%, at least about 93%, at least about 94%, at least about 95%, at least about 96%, at least about 97%, at least about 98%, or at least about 99% sequence identity to any one of SEQ ID NOS: 5482-5561.

74. The method of claim 73, wherein said class 2, type V Cas endonuclease comprises an endonuclease having at least 75% sequence identity to any one of SEQ ID NOs: 1-3470 or a variant thereof.

75. The method of claim 74, wherein said class 2, type V Cas endonuclease comprises an endonuclease having at least 75% sequence identity to any one of SEQ ID NOs: 141, 215, 229, 261, or 1711-1722 or a variant thereof.

76. The method of any one of claims 73-75, wherein said engineered guide RNA comprises a sequence with at least about 80%, at least about 85%, at least about 90%, at least about 91%, at least about 92%, at least about 93%, at least about 94%, at least about 95%, at least about 96%, at least about 97%, at least about 98%, or at least about 99% sequence identity to the non-degenerate nucleotides of any one of SEQ ID NOs: 3471, 3539, 3551-3559, 3608-3609, 3612, 3636-3637, 3640-3641, 3644-3645, 3648-3649, 3652-3653, 3656-3657, 3660-3661, 3664-3667, 3671-3672, 3678, 3695-3696, 3729-3730, 3734-3735, 3851-3857, or 6033-6036.

77. The method of any one of claims 73-76, wherein said guide RNA comprises a sequence with at least 80% sequence identity to the non-degenerate nucleotides of SEQ ID NO: 3609.

78. The method of any one of claims 73-77, wherein said engineered guide RNA is configured to hybridize to a sequence having at least 20-22 consecutive nucleotides having at least 80% identity to any one of SEQ ID NOs: 5562-5564 or 5568.

79. The method of any one of claims 73-77, wherein said engineered guide RNA has at least 80% sequence identity to any one of SEQ ID NOs: 5482-5561 that target any one of SEQ ID NOs: 5562-5564 or 5568.

80. The method of any one of claims 73-80, wherein said cell is a eukaryotic cell, hepatocyte, T-cell, hematopoietic stem cell, or precursor thereof.

81. A method of disrupting an APO-A1 locus in a cell, comprising introducing to said cell:
(a) a class 2, type V Cas endonuclease; and
(b) an engineered guide RNA, wherein said engineered guide RNA is configured to form a complex with said endonuclease and said engineered guide RNA comprises a spacer sequence configured to hybridize to a region of said APO-A1 locus,
wherein said engineered guide RNA is configured to hybridize to a sequence having at least 20-22 consecutive nucleotides complementary to a sequence having at least about 80%, at least about 85%, at least about 90%, at least about 91%, at least about 92%, at least about 93%, at least about 94%, at least about 95%, at least about 96%, at least about 97%, at least about 98%, or at least about 99% sequence identity to any one of SEQ ID NOs: 5861-5874; or
wherein said engineered guide RNA comprises a nucleotide sequence having at least about 80%, at least about 85%, at least about 90%, at least about 91%, at least about 92%, at least about 93%, at least about 94%, at least about 95%, at least about 96%, at least about 97%, at least about 98%, or at least about 99% sequence identity to any one of SEQ ID NOs: 5847-5860.

82. The method of claim 81, wherein said class 2, type V Cas endonuclease comprises an endonuclease having at least 75% sequence identity to any one of SEQ ID NOs: 1-3470 or a variant thereof.

83. The method of claim 82, wherein said class 2, type V Cas endonuclease comprises an endonuclease having at least 75% sequence identity to any one of SEQ ID NOs: 141, 215, 229, 261, or 1711-1722 or a variant thereof.

84. The method of any one of claims 81-83, wherein said engineered guide RNA comprises a sequence with at least about 80%, at least about 85%, at least about 90%, at least about 91%, at least about 92%, at least about 93%, at least about 94%, at least about 95%, at least about 96%, at least about 97%, at least about 98%, or at least about 99% sequence identity to the non-degenerate nucleotides of any one of SEQ ID NOs: 3471, 3539, 3551-3559, 3608-3609, 3612, 3636-3637, 3640-3641, 3644-3645, 3648-3649, 3652-3653, 3656-3657, 3660-3661, 3664-3667, 3671-3672, 3678, 3695-3696, 3729-3730, 3734-3735, 3851-3857, or 6033-6036.

85. The method of any one of claims 81-84, wherein said guide RNA comprises a sequence with at least 80% sequence identity to the non-degenerate nucleotides of SEQ ID NO: 3609.

86. The method of any one of claims 81-85, wherein said engineered guide RNA is configured to hybridize to a sequence having at least 20-22 consecutive nucleotides having at least 80% identity to any one of SEQ ID NOs: 5861-5866 or 5868-5869.

87. The method of any one of claims 81-85, wherein said engineered guide RNA has at least 80% sequence identity to any one of SEQ ID NOs: 5847-5860 that target any one of SEQ ID NOs: 5861-5866 or 5868-5869.

88. The method of any one of claims 81-87, wherein said cell is a eukaryotic cell, hepatocyte, T-cell, hematopoietic stem cell, or precursor thereof.

89. A method of disrupting an ANGPTL3 locus in a cell, comprising introducing to said cell:
(a) a class 2, type V Cas endonuclease; and
(b) an engineered guide RNA, wherein said engineered guide RNA is configured to form a complex with said endonuclease and said engineered guide RNA comprises a spacer sequence configured to hybridize to a region of said ANGPTL3 locus,
wherein said engineered guide RNA is configured to hybridize to a sequence having at least 20-22 consecutive nucleotides complementary to a sequence having at least about 80%, at least about 85%, at least about 90%, at least about 91%, at least about 92%, at least about 93%, at least about 94%, at least about 95%, at least about 96%, at least about 97%, at least about 98%, or at least about 99% sequence identity to any one of SEQ ID NOs: 5953-6030; or
wherein said engineered guide RNA comprises a nucleotide sequence having at least about 80%, at least about 85%, at least about 90%, at least about 91%, at least about 92%, at least about 93%, at least about 94%, at least about 95%, at least about 96%, at least about 97%, at least about 98%, or at least about 99% sequence identity to any one of SEQ ID NOs: 5875-5952.

90. The method of claim 89, wherein said class 2, type V Cas endonuclease comprises an endonuclease having at least 75% sequence identity to any one of SEQ ID NOs: 1-3470 or a variant thereof.

91. The method of claim 90, wherein said class 2, type V Cas endonuclease comprises an endonuclease having at least 75% sequence identity to any one of SEQ ID NOs: 141, 215, 229, 261, or 1711-1722 or a variant thereof.

92. The method of any one of claims 89-91, wherein said engineered guide RNA comprises a sequence with at least about 80%, at least about 85%, at least about 90%, at least about 91%, at least about 92%, at least about 93%, at least about 94%, at least about 95%, at least about 96%, at least about 97%, at least about 98%, or at least about 99% sequence identity to the non-degenerate nucleotides of any one of SEQ ID NOs: 3471, 3539, 3551-3559, 3608-3609, 3612, 3636-3637, 3640-3641, 3644-3645, 3648-3649, 3652-3653, 3656-3657, 3660-3661, 3664-3667, 3671-3672, 3678, 3695-3696, 3729-3730, 3734-3735, 3851-3857, or 6033-6036.

93. The method of any one of claims 89-92, wherein said guide RNA comprises a sequence with at least 80% sequence identity to the non-degenerate nucleotides of SEQ ID NO: 3609.

94. The method of any one of claims 89-93, wherein said engineered guide RNA is configured to hybridize to a sequence having at least 20-22 consecutive nucleotides having at least 80% identity to any one of SEQ ID NOs: 5955-5963, 5968-5975, 5979-5987, 5989-5993, 5997, 5999, 6003-6010, 6014-6016, 6024-6025, or 6027-6030.

95. The method of any one of claims 89-93, wherein said engineered guide RNA has at least 80% sequence identity to any one of SEQ ID NOs: 5875-5952 that target any one of SEQ ID NOs: 5955-5963, 5968-5975, 5979-5987, 5989-5993, 5997, 5999, 6003-6010, 6014-6016, 6024-6025, or 6027-6030.

96. The method of any one of claims 89-95, wherein said cell is a eukaryotic cell, hepatocyte, T-cell, hematopoietic stem cell, or precursor thereof.

97. A method of disrupting a human Rosa26 locus in a cell, comprising introducing to said cell:
(a) a class 2, type V Cas endonuclease; and
(b) an engineered guide RNA, wherein said engineered guide RNA is configured to form a complex with said endonuclease and said engineered guide RNA comprises a spacer sequence configured to hybridize to a region of said human Rosa26 locus,
wherein said engineered guide RNA is configured to hybridize to a sequence having at least 20-22 consecutive nucleotides complementary to a sequence having at least about 80%, at least about 85%, at least about 90%, at least about 91%, at least about 92%, at least about 93%, at least about 94%, at least about 95%, at least about 96%, at least about 97%, at least about 98%, or at least about 99% sequence identity to any one of SEQ ID NOs: 5013-5055; or
wherein said engineered guide RNA comprises a nucleotide sequence having at least about 80%, at least about 85%, at least about 90%, at least about 91%, at least about 92%, at least about 93%, at least about 94%, at least about 95%, at least about 96%, at least about 97%, at least about 98%, or at least about 99% sequence identity to any one of SEQ ID NOs: 4970-5012.

98. The method of claim 97, wherein said class 2, type V Cas endonuclease comprises an endonuclease having at least 75% sequence identity to any one of SEQ ID NOs: 1-3470 or a variant thereof.

99. The method of claim 98, wherein said class 2, type V Cas endonuclease comprises an endonuclease having at least 75% sequence identity to any one of SEQ ID NOs: 141, 215, 229, 261, or 1711-1722 or a variant thereof.

100. The method of any one of claims 97-99, wherein said engineered guide RNA comprises a sequence with at least about 80%, at least about 85%, at least about 90%, at least about 91%, at least about 92%, at least about 93%, at least about 94%, at least about 95%, at least about 96%, at least about 97%, at least about 98%, or at least about 99% sequence identity to the non-degenerate nucleotides of any one of SEQ ID NOs: 3471, 3539, 3551-3559, 3608-3609, 3612, 3636-3637, 3640-3641, 3644-3645, 3648-3649, 3652-3653, 3656-3657, 3660-3661, 3664-3667, 3671-3672, 3678, 3695-3696, 3729-3730, 3734-3735, 3851-3857, or 6033-6036.

101. The method of any one of claims 97-100, wherein said guide RNA comprises a sequence with at least 80% sequence identity to the non-degenerate nucleotides of SEQ ID NO: 3609.

102. The method of any one of claims 97-101, wherein said cell is a eukaryotic cell, hepatocyte, T-cell, hematopoietic stem cell, or precursor thereof.

103. A method of disrupting a FAS locus in a cell, comprising introducing to said cell:
(a) a class 2, type V Cas endonuclease; and
(b) an engineered guide RNA, wherein said engineered guide RNA is configured to form a complex with said endonuclease and said engineered guide RNA comprises a spacer sequence configured to hybridize to a region of said FAS locus,
wherein said engineered guide RNA is configured to hybridize to a sequence having at least 20-22 consecutive nucleotides complementary to a sequence having at least about 80%, at least about 85%, at least about 90%, at least about 91%, at least about 92%, at least about 93%, at least about 94%, at least about 95%, at least about 96%, at least about 97%, at least about 98%, or at least about 99% sequence identity to any one of SEQ ID NOs: 5367-5465; or
wherein said engineered guide RNA comprises a nucleotide sequence having at least about 80%, at least about 85%, at least about 90%, at least about 91%, at least about 92%, at least about 93%, at least about 94%, at least about 95%, at least about 96%, at least about 97%, at least about 98%, or at least about 99% sequence identity to any one of SEQ ID NOs: 5268-5366.

104. The method of claim 103, wherein said class 2, type V Cas endonuclease comprises an endonuclease having at least 75% sequence identity to any one of SEQ ID NOs: 1-3470 or a variant thereof.

105. The method of claim 104, wherein said class 2, type V Cas endonuclease comprises an endonuclease having at least 75% sequence identity to any one of SEQ ID NOs: 141, 215, 229, 261, or 1711-1722 or a variant thereof.

106. The method of any one of claims 103-105, wherein said engineered guide RNA comprises a sequence with at least about 80%, at least about 85%, at least about 90%, at least about 91%, at least about 92%, at least about 93%, at least about 94%, at least about 95%, at least about 96%, at least about 97%, at least about 98%, or at least about 99% sequence identity to the non-degenerate nucleotides of any one of SEQ ID NOs: 3471, 3539, 3551-3559, 3608-3609, 3612, 3636-3637, 3640-3641, 3644-3645, 3648-3649, 3652-3653, 3656-3657, 3660-3661, 3664-3667, 3671-3672, 3678, 3695-3696, 3729-3730, 3734-3735, 3851-3857, or 6033-6036.

107. The method of any one of claims 103-106, wherein said guide RNA comprises a sequence with at least 80% sequence identity to the non-degenerate nucleotides of SEQ ID NO: 3609.

108. The method of any one of claims 103-107, wherein said cell is a eukaryotic cell, hepatocyte, T-cell, hematopoietic stem cell, or precursor thereof.

109. A method of disrupting a PD-1 locus in a cell, comprising introducing to said cell:
(a) a class 2, type V Cas endonuclease; and
(b) an engineered guide RNA, wherein said engineered guide RNA is configured to form a complex with said endonuclease and said engineered guide RNA comprises a spacer sequence configured to hybridize to a region of said PD-1 locus,
wherein said engineered guide RNA is configured to hybridize to a sequence having at least 20-22 consecutive nucleotides complementary to a sequence having at least about 80%, at least about 85%, at least about 90%, at least about 91%, at least about 92%, at least about 93%, at least about 94%, at least about 95%, at least about 96%, at least about 97%, at least about 98%, or at least about 99% sequence identity to any one of SEQ ID NOs: 5474-5481; or
wherein said engineered guide RNA comprises a nucleotide sequence having at least about 80%, at least about 85%, at least about 90%, at least about 91%, at least about 92%, at least about 93%, at least about 94%, at least about 95%, at least about 96%, at least about 97%, at least about 98%, or at least about 99% sequence identity to any one of SEQ ID NOs: 5466-5473.

110. The method of claim 109, wherein said class 2, type V Cas endonuclease comprises an endonuclease having at least 75% sequence identity to any one of SEQ ID NOs: 1-3470 or a variant thereof.

111. The method of claim 110, wherein said class 2, type V Cas endonuclease comprises an endonuclease having at least 75% sequence identity to any one of SEQ ID NOs: 141, 215, 229, 261, or 1711-1722 or a variant thereof.

112. The method of any one of claims 109-111, wherein said engineered guide RNA comprises a sequence with at least about 80%, at least about 85%, at least about 90%, at least about 91%, at least about 92%, at least about 93%, at least about 94%, at least about 95%, at least about 96%, at least about 97%, at least about 98%, or at least about 99% sequence identity to the non-degenerate nucleotides of any one of SEQ ID NOs: 3471, 3539, 3551-3559, 3608-3609, 3612, 3636-3637, 3640-3641, 3644-3645, 3648-3649, 3652-3653, 3656-3657, 3660-3661, 3664-3667, 3671-3672, 3678, 3695-3696, 3729-3730, 3734-3735, 3851-3857, or 6033-6036.

113. The method of any one of claims 109-112, wherein said guide RNA comprises a sequence with at least 80% sequence identity to the non-degenerate nucleotides of SEQ ID NO: 3609.

114. The method of any one of claims 109-113, wherein said cell is a eukaryotic cell, hepatocyte, T-cell, hematopoietic stem cell, or precursor thereof.

115. An engineered nuclease system comprising:
(a) an endonuclease having at least 75% sequence identity to any one of SEQ ID NOs: 215 or a variant thereof; and
(b) an engineered guide RNA, wherein said engineered guide RNA is configured to form a complex with said endonuclease and said engineered guide RNA comprises a spacer sequence configured to hybridize to a target nucleic acid sequence,
wherein said system has reduced immunogenicity when administered to a human subject compared to an equivalent system comprising a Cas9 enzyme.

116. The system of claim 115, wherein said Cas9 enzyme is an SpCas9 enzyme.

117. The system of claim 115-116, wherein said guide RNA comprises a sequence with at least 80% sequence identity to the non-degenerate nucleotides of SEQ ID NO: 3609.

118. The system of any one of claims 115-117, wherein said immunogenicity is antibody immunogenicity.

119. A method of disrupting a mouse HAO-1 locus in a cell, comprising introducing to said cell:
(a) a class 2, type V Cas endonuclease; and
(b) an engineered guide RNA, wherein said engineered guide RNA is configured to form a complex with said endonuclease and said engineered guide RNA comprises a spacer sequence configured to hybridize to a region of said mouse HAO-1 locus,
wherein said engineered guide RNA comprises the nucleotides of guide RNAs mH29-1_37, mH29-15_37, mH29-29_37 (SEQ ID NOs: 5779-5781) comprising the nucleotide modifications described in SEQ ID NOs: 5779-5781;
or wherein said engineered guide RNA comprises any one of SEQ ID NOs: 4184-4225.

120. The method of claim 119, wherein said class 2, type V Cas endonuclease comprises an endonuclease having at least 75% sequence identity to any one of SEQ ID NOs: 1-3470 or a variant thereof.

121. The method of claim 120, wherein said class 2, type V Cas endonuclease comprises an endonuclease having at least 75% sequence identity to any one of SEQ ID NOs: 141, 215, 229, 261, or 1711-1722 or a variant thereof.

122. The method of any one of claims 119-121, wherein said engineered guide RNA comprises a sequence with at least about 80%, at least about 85%, at least about 90%, at least about 91%, at least about 92%, at least about 93%, at least about 94%, at least about 95%, at least about 96%, at least about 97%, at least about 98%, or at least about 99% sequence identity to the non-degenerate nucleotides of any one of SEQ ID NOs: 3471, 3539, 3551-3559, 3608-3609, 3612, 3636-3637, 3640-3641, 3644-3645, 3648-3649, 3652-3653, 3656-3657, 3660-3661, 3664-3667, 3671-3672, 3678, 3695-3696, 3729-3730, 3734-3735, 3851-3857, or 6033-6036.

123. The method of any one of claims 119-122, wherein said guide RNA comprises a sequence with at least 80% sequence identity to the non-degenerate nucleotides of SEQ ID NO: 3609.

124. The method of any one of claims 119-123, wherein said cell is a eukaryotic cell, hepatocyte, T-cell, hematopoietic stem cell, or precursor thereof.

125. The method of any one of claims 119-124, wherein said engineered guide RNA comprises the nucleotides of guide RNAs mH29-15_37 or mH29-29_37 (SEQ ID NOs: 5780-5781) comprising the nucleotide modifications described in SEQ ID NOs: 5780-5781.

126. The method of any one of claims 119-125, wherein said method further comprises disrupting expression of glycolate oxidase from said HAO-1 locus.

127. A method of disrupting a human TRAC locus in a cell, comprising introducing to said cell:
(a) a class 2, type V Cas endonuclease; and
(b) an engineered guide RNA, wherein said engineered guide RNA is configured to form a complex with said endonuclease and said engineered guide RNA comprises a spacer sequence configured to hybridize to a region of said human TRAC locus,
wherein said engineered guide RNA comprises the nucleotides of MG29-1-TRAC-sgRNA-35 (SEQ ID NOs: 5681 or 5683) comprising the nucleotide modifications described in SEQ ID NOs: 5681 or 5683.

128. The method of claim 127, wherein said class 2, type V Cas endonuclease comprises an endonuclease having at least 75% sequence identity to any one of SEQ ID NOs: 1-3470 or a variant thereof.

129. The method of claim 128, wherein said class 2, type V Cas endonuclease comprises an endonuclease having at least 75% sequence identity to any one of SEQ ID NOs: 141, 215, 229, 261, or 1711-1722 or a variant thereof.

130. The method of any one of claims 127-129, wherein said engineered guide RNA comprises a sequence with at least about 80%, at least about 85%, at least about 90%, at least about 91%, at least about 92%, at least about 93%, at least about 94%, at least about 95%, at least about 96%, at least about 97%, at least about 98%, or at least about 99% sequence identity to the non-degenerate nucleotides of any one of SEQ ID NOs: 3471, 3539, 3551-3559, 3608-3609, 3612, 3636-3637, 3640-3641, 3644-3645, 3648-3649, 3652-3653, 3656-3657, 3660-3661, 3664-3667, 3671-3672, 3678, 3695-3696, 3729-3730, 3734-3735, 3851-3857, or 6033-6036.

131. The method of any one of claims 127-130, wherein said guide RNA comprises a sequence with at least 80% sequence identity to the non-degenerate nucleotides of SEQ ID NO: 3609.

132. The method of any one of claims 127-131, wherein said cell is a eukaryotic cell, hepatocyte, T-cell, hematopoietic stem cell, or precursor thereof.

133. A method of disrupting an albumin locus in a cell, comprising introducing to said cell:
(a) a class 2, type V Cas endonuclease; and
(b) an engineered guide RNA, wherein said engineered guide RNA is configured to form a complex with said endonuclease and said engineered guide RNA comprises a spacer sequence configured to hybridize to a region of said albumin locus,
Wherein said engineered guide RNA comprises the nucleotides of mAlb298-37, mAlb2912-37, mAlb2918-37, or mAlb298-34 (SEQ ID NOs: 5756-5759) comprising the nucleotide modifications described in SEQ ID NOs: 5756-5759; or
wherein said engineered guide RNA comprises the nucleotides of mAlb29-8-44, mAlb29-8-50, mAlb29-8-50b, mAlb29-8-51b, mAlb29-8-52b, mAlb29-8-53b, or mAlb29-8-54b comprising the nucleotide modifications described in Table 5.

134. The method of claim 133, wherein said class 2, type V Cas endonuclease comprises an endonuclease having at least 75% sequence identity to any one of SEQ ID NOs: 1-3470 or a variant thereof.

135. The method of claim 134, wherein said class 2, type V Cas endonuclease comprises an endonuclease having at least 75% sequence identity to any one of SEQ ID NOs: 141, 215, 229, 261, or 1711-1722 or a variant thereof.

136. The method of any one of claims 133-135, wherein said engineered guide RNA comprises a sequence with at least about 80%, at least about 85%, at least about 90%, at least about 91%, at least about 92%, at least about 93%, at least about 94%, at least about 95%, at least about 96%, at least about 97%, at least about 98%, or at least about 99% sequence identity to the non-degenerate nucleotides of any one of SEQ ID NOs: 3471, 3539, 3551-3559, 3608-3609, 3612, 3636-3637, 3640-3641, 3644-3645, 3648-3649, 3652-3653, 3656-3657, 3660-3661, 3664-3667, 3671-3672, 3678, 3695-3696, 3729-3730, 3734-3735, 3851-3857, or 6033-6036.

137. The method of any one of claims 133-136, wherein said guide RNA comprises a sequence with at least 80% sequence identity to the non-degenerate nucleotides of SEQ ID NO: 3609.

138. The method of any one of claims 133-137, wherein said cell is a eukaryotic cell, hepatocyte, T-cell, hematopoietic stem cell, or precursor thereof.

139. The method of any one of claims 133-138, wherein said engineered guide RNA comprises the nucleotides of mAlb298-37, mAlb2912-37, mAlb2918-37, or mAlb298-34 (SEQ ID NOs: 5756-5759) comprising the nucleotide modifications described in SEQ ID NOs: 5756-5759.

140. An engineered guide RNA comprising:
a) a DNA-targeting segment comprising a nucleotide sequence that is complementary to a target sequence in a target DNA molecule; and
b) a protein-binding segment configured to bind to a class 2, type V Cas endonuclease, and
wherein said guide RNA comprises a nucleotide modification pattern depicted in any one of SEQ ID NOs: 5695-5701.

141. The engineered guide RNA of claim 140, wherein said guide RNA comprises mAlb29-8-44, mAlb29-8-50, mAlb29-8-37, or mAlb29-12-44.

142. The engineered guide RNA of claim 140, wherein said guide RNA comprises hH29-4_50, hH29-21_50, hH29-23_50, hH29-41_50, hH29-4_50b, hH29-21_50b, hH29-23_50b, or hH29-41_50b, mH29-1-50, mH29-15-50, mH29-29-50, mH29-1-50b, mH29-15-50b, or mH29-29-50b.

143. The engineered guide RNA of claim 140, wherein said DNA-targeting segment is configured to hybridize to an HAO-1 gene or an albumin gene.

144. The engineered guide RNA of any one of claims 140-142, wherein said class 2, type V Cas endonuclease comprises an endonuclease having at least 75% sequence identity to any one of SEQ ID NOs: 141, 215, 229, 261, or 1711-1722 or a variant thereof.

145. The engineered guide RNA of any one of claims 140-144, wherein said class 2, type V Cas endonuclease comprises an endonuclease having at least 75% sequence identity to SEQ ID NO: 215.

146. An engineered nuclease system comprising:
(a) an endonuclease having at least 75% sequence identity to any one of SEQ ID NOs: 1-3470 or a variant thereof, or a nucleotide sequence encoding said endonuclease; and
(b) a polynucleotide sequence encoding a CRISPR array, wherein said CRISPR array is configured to be processed by said endonuclease to an engineered guide RNA, wherein said engineered guide RNA is configured to form a complex with said endonuclease and said engineered guide RNA comprises a spacer sequence configured to hybridize to a target nucleic acid sequence,
wherein said spacer sequence is configured to hybridize to an albumin gene.

147. The system of claim 146, wherein said polynucleotide sequence comprises a sequence having at least about 80%, at least about 85%, at least about 90%, at least about 91%, at least about 92%, at least about 93%, at least about 94%, at least about 95%, at least about 96%, at least about 97%, at least about 98%, or at least about 99% sequence identity to SEQ ID NO: 5712.

148. The system of claim 146 or 147, wherein said endonuclease comprises an endonuclease having at least 75% sequence identity to any one of SEQ ID NOs: 141, 215, 229, 261, or 1711-1722 or a variant thereof.

149. The system of claim 148, wherein said endonuclease comprises an endonuclease having at least 75% sequence identity to SEQ ID NO: 215.

150. An engineered nuclease system comprising:
(a) an endonuclease having at least 75% sequence identity to SEQ ID NOs: 470 or a variant thereof; and
(b) an engineered guide RNA, wherein said engineered guide RNA is configured to form a complex with said endonuclease and said engineered guide RNA comprises a spacer sequence configured to hybridize to a target nucleic acid sequence.

151. The engineered nuclease system of claim 150, wherein said engineered guide RNA comprises a sequence having at least about 80%, at least about 85%, at least about 90%, at least about 91%, at least about 92%, at least about 93%, at least about 94%, at least about 95%, at least about 96%, at least about 97%, at least about 98%, or at least about 99% sequence identity to SEQ ID NO: 6031.

152. The engineered nuclease system of claim 151 or 152, wherein said endonuclease is configured to be selective for a 5′ PAM sequence comprising SEQ ID NO: 6032.

153. An engineered nuclease system comprising:
(a) an endonuclease having at least at least about 80%, at least about 85%, at least about 86%, at least about 87%, at least about 88%, at least about 89%, at least about 90%, at least about 91%, at least about 92%, at least about 93%, at least about 94%, at least about 95%, at least about 96%, at least about 97%, at least about 98%, or at least about 99% sequence identity to any one of SEQ ID NOs: 2824, 2841, or 2896, or a variant thereof; and
(b) an engineered guide RNA, wherein said engineered guide RNA is configured to form a complex with said endonuclease and said engineered guide RNA comprises a spacer sequence configured to hybridize to a target nucleic acid sequence,
wherein said engineered guide RNA comprises a sequence having at least about 80%, at least about 85%, at least about 90%, at least about 91%, at least about 92%, at least about 93%, at least about 94%, at least about 95%, at least about 96%, at least about 97%, at least about 98%, or at least about 99% sequence identity to any one of SEQ ID NOs: 6033, 6034, or 6035.

154. The engineered nuclease system of claim 153, wherein said endonuclease has at least 80% sequence identity to SEQ ID NO: 2824 and said engineered guide RNA has at least 80% sequence identity to SEQ ID NO: 6033.

155. The engineered nuclease system of claim 153, wherein said endonuclease has at least 80% sequence identity to SEQ ID NO: 2841 and said engineered guide RNA has at least 80% sequence identity to SEQ ID NO: 6034.

156. The engineered nuclease system of claim 153, wherein said endonuclease has at least 80% sequence identity to SEQ ID NO: 2896 and said engineered guide RNA has at least 80% sequence identity to SEQ ID NO: 6035.

157. The engineered nuclease system of any one of claims 153-156, wherein said endonuclease is configured to be selective for a 5′ PAM sequence comprising any one of SEQ ID NOs: 6037-6039.

158. A lipid nanoparticle comprising:
(a) any of the endonucleases described herein;
(b) any of the engineered guide RNAs described herein:
(c) a cationic lipid;
(d) a sterol;
(e) a neutral lipid; and
(f) a PEG-modified lipid.

159. The lipid nanoparticle of claim 158, wherein said cationic lipid comprises C12-200, said sterol comprises cholesterol, said neutral lipid comprises DOPE, or said PEG-modified lipid comprises DMG-PEG2000.

160. The lipid nanoparticle of claim 158, wherein said cationic lipid comprises 98N12-5 (TETA5-LAP), DLin DMA, DLin-K-DMA (2,2-Dilinoleyl-4-dimethylaminomethyl-[1,3]-dioxolane), DLin-KC2-DMA, DLin-MC3-DMA, or C12-200.

161. An engineered nuclease system comprising:
(a) an endonuclease comprising a sequence having at least 80% sequence identity to any one of SEQ ID NOs: 6274-6281 or 6340-6551, or a variant thereof, wherein said endonuclease is a class 2, type V endonuclease, or a nucleotide sequence encoding said endonuclease; and
(b) an engineered guide RNA, wherein said engineered guide RNA is configured to form a complex with said endonuclease and said engineered guide RNA comprises a spacer sequence configured to hybridize to a target nucleic acid sequence.

162. The engineered nuclease system of claim 161, wherein said endonuclease comprises a sequence having at least 80% sequence identity to any one of SEQ ID NOs: 6274-6281.

163. The engineered nuclease system of claim 161 or 162, wherein said endonuclease is configured to bind to a protospacer adjacent motif (PAM) sequence having at least 80% sequence identity to any one of SEQ ID NOs: 6332-6339.

164. An engineered nuclease system comprising:
(a) an endonuclease comprising a PI (PAM interacting) domain having at least 80% sequence identity to a PI domain of any one of SEQ ID NOs: 2811, 2819, 2878, 2916, 2963, 3009, 6274, 6275, 6276, 6279, 6280, or 6281, or a variant thereof, or a nucleotide sequence encoding said endonuclease, wherein said endonuclease is a class 2, type V endonuclease and said endonuclease is configured to be selective for a 5′ PAM of any one of SEQ ID NOs: 6326-6339; and
(b) an engineered guide RNA, wherein said engineered guide RNA is configured to form a complex with said endonuclease and said engineered guide RNA comprises a spacer sequence configured to hybridize to a target nucleic acid sequence.

165. The engineered nuclease system of claim 164, wherein said endonuclease comprises a sequence having at least 80% sequence identity to any one of SEQ ID NOs: 2811, 2819, 2878, 2916, 2963, 3009, 6274, 6275, 6276, 6279, 6280, or 6281, or a variant thereof.

166. The engineered nuclease system of any one of claims 161-165, wherein said guide RNA comprises a sequence with at least 80% sequence identity to non-degenerate nucleotides of any one of SEQ ID NOs: 6284-6325.

167. The engineered nuclease system of any one of claims 161-166, wherein said guide RNA spacer sequence comprises a sequence complementary to a eukaryotic, fungal, plant, mammalian, or human genomic polynucleotide sequence.

168. The engineered nuclease system of any one of claims 161-167, wherein said endonuclease comprises at least one of a S168R, E172R, N577R, or Y170R mutation when a sequence of said endonuclease is optimally aligned to SEQ ID NO: 215.

169. The engineered nuclease system of any one of claims 161-168, further comprising a single- or double-stranded DNA repair template comprising from 5′ to 3′: a first homology arm comprising a sequence of at least 20 nucleotides 5′ to said target deoxyribonucleic acid sequence, a synthetic DNA sequence of at least 10 nucleotides, and a second homology arm comprising a sequence of at least 20 nucleotides 3′ to said target sequence.

170. The engineered nuclease system of claim 169, wherein said first or second homology arm comprises a sequence of at least 40, 80, 120, 150, 200, 300, 500, or 1,000 nucleotides.

171. The engineered nuclease system of claim 169 or 170, wherein said first and second homology arms are homologous to a genomic sequence of a prokaryote, bacteria, fungus, or eukaryote.
